United States Patent Application Publication US 2004/0031072 A1 - sequence listing, part 2

SEQ ID NO: 4780 - DNA, 416 bp, Glycine max
  unsure (1)..(416): unsure at all n locations
  Clone ID: PAT_MRT3847_104320C.1
gggccgacccacgcgtcctcccactcttcctcccactcttttttttttttttcaataacaaacanctctnaagacttatgttaattcttatttaaccccccccccccatctttactntacttttacaaatcccataaaaatcttcacaccctaaattttcacattcatccaataactactaaatgttttaacaactaaattttttaaatcttcttaccttataaacatatcataacaacttttcatcacaattaccaattattattattacctattttctaataatcatcttttacctcacaaataattaaatctcattataacttatatcttaaattcattcctattttaaaaaaatctcaattattttattaactttacacttcattatatttcttattttaacatccccatta

SEQ ID NO: 4781 - DNA, 1576 bp, Glycine max
  Clone ID: PAT_MRT3847_104321C.1
ggctcgagaaacaaccaaaaaccgaaagaactcgtcaaacccatctcaccttcacgctcgaagatgcttttgagttgtttttcttttcccccttccaaaatgccttcttctcacattcttttctccctcctctctttcctctccatcataatcactaccttctcttcatccacacccaacaccatcactctccatctctctcccttattcaccaaccacccctcttcaagttcacacccattccacaccctcaaactcgccgtctcaacatccatcacaagagcccaccaccttaaaaaccacaaaccaaacaagtcactcgaaaccccagttctcacaaaaccctcaacaaactactcaatagtcctcgaattctattccccgtcacatacctaaattgttgttctcgaaacgcgtatgaggctcgtctggctcccgtgctcctctcactacctctgctccaaatgcaactcctcctcaaacacgccaaagttcatccctaaaaactcgtcttcttcaaagttcgttggctgcaccaaccctaaatgcgcctgggtcttcggcccagacgttaaatcccattgctgcaggcaagacaaagctgcttttaataattgttcccaaacatgccctgcctacaccgtccagtacggcctcggctccaccgcgggttttctcttatccgaaaatctcaactttcccaccaaaaaatactccgattttctcctcggctgctccgtcgtctccgtctaccaggcggccggaagtgcggggttcggtcggggagtgatattggggaactcgcagctgaacctcatctacgtctcttatgacttggactctcaccggtttgggtttcggagtcagagttgcagaaagagcgtctattaaaattatgagtttggaaaacaataacaatgcatttacagcgtaagtgatttgcagaaaaaccctaccacgcagaaaaaccccgcgttcggcgcgtactattacatcactcttaaaaggatcgtagtaggagaaaagcgcgtgagggttccgaggaggctgttggagcccaacgtcgacggcgatggtgggttcatcgttgactccgggtcaacgttcacgttcatggagagaccgattttcgatctggtggcgcaggagtttgcaaagcaggtgagttacacgcgcgcgagggaggctgagaagcaatttgggttgagtccgtgttttgtgttggcgggtggtgctgaaacggcgtcgtttcccgagctgaggtttgagttcaggggtggcgcgaagatgaggctgccggtggcgaattatttctcgctggtggggaaaggtgacgtggcgtgcttgacgattgtgtctgatgacgtggcgggttctggtgggacggtgggacccgctgtgatattggggaattatcagcagcagaatttttatgtggagtatgacttggagaacgagaggtttgggtttcggagtcagagttgccaaacgaacgtttaagttaggagtttgaaaaaataacatgcattgtatggctcagataataaatatgtgtttgaaaatgatttaacgagat

SEQ ID NO: 4782 - DNA, 350 bp, Glycine max
  Clone ID: PAT_MRT3847_104322C.1
atacatgctcactgctagttccttaagacgtgactggaacacagttggtgcactgcttgtgggtgatacttatcataccaatgctgaaagagcaagtcgtcgtatttttgttgggcctttcataggcagatggcccattcgggtggttacatttccgaattccatccagcagatggtaccagacatgaattcaaggttacagcttttgagtaccactaccaatggggcatctggtcaaggagaagatctggcaatggttaaagataatgtagcatgtgctgttgttgactagtcatgaaggtacacttcaactgcattggtggcatctggaccgcaaaagacagatggaa

SEQ ID NO: 4783 - DNA, 633 bp, Glycine max
  Clone ID: PAT_MRT3847_104323C.1
gtgccaagtcacacgcacaaacattttcttttctaatttttacctacttccgactttggttctctctcactctccaacttgcattcaagtaacaacaacaaactgaacctcccttcagatcgaacacaactcactcctcaaacaagaccaagattctcccccagtggtgcagttgaagggccgtgaggatgttagagaaagtgggggagtttaacatggataaagttatacaagagtttgaattattgacacgggatgcagaaagggttcagagggaaacactgaagaggattttggaggataacgcatcagcagagtacttgcagagtttgggtctcaatggaagaactgaccctgagagtttcaaggcctgtgttccactggtcacccacaaagaattggaaccttatatctacagaattattgatggtgatgcttctcctattctcactggaaaacccatcacaaccatgtcattaagttctggcactacccaggggaagccaaaatatgtaccttggaatgatgaattgtatgaaaccacaatgcagatatacctgacctcttttgtctttagaaacagggagtttcctataaaaaatgggaaggctttaagctttatatacggtagca

SEQ ID NO: 4784 - DNA, 353 bp, Glycine max
  Clone ID: PAT_MRT3847_104324C.1
aataatcggacattacacttattcatatttaattatatcgtaacaacaaacattgaaaacgaatcaaataaattatcacgacaatgattttagcaaacatggtgaaaatttgcaatgccacaatcactagttttacaatgctaccacttttggtcagagaaaaggttttcggtttcaattcttgccatattaacaaggttccccaaataacattatcttctgtactaggagaggcttcctcctctggcacataagatgagagaaaaaaccttggtagaatttttctgagcaccgacttcttttacagataaaccatacattttttgatcaagaaattgaacttctggttgctg

SEQ ID NO: 4785 - DNA, 351 bp, Glycine max
  Clone ID: PAT_MRT3847_104325C.1
aaatgggctttgcggttataataactcttccaccacacaacgacgacgctgtgattaacaaaacaatagacaacaaatttcctttttctcatgccgtctatttaacaaaacaaaagaagatcaactctgataattgttctttgatgatatttatatacctcgcttacttaccctcccttataccgcaggccaattttatgtgctacaaaaaaatttctggaaaagcagtttttaattatttacttcggcacatttactacccaccaaggtttctttaatattttttgcaatctagatttttgtatcgttactggtcataggtaaaatacctagcttttttccagccaatat

SEQ ID NO: 4786 - DNA, 247 bp, Glycine max
  Clone ID: PAT_MRT3847_104326C.1
ggcagcagcaggctgcatcctatagtattaaaaatggcagccgcctcctccatggttctctcttccgcatccttggctggcaaggccgcgaagctgagcccatcatcccccgaagtcgcgaggagcggcatgaggaagaccggaaccaagcaggcctactccgaaagcacatgatgcggcccaaaccgcgtcaagtaatgctgcccattctctgacgaacccccgtcctacctaactggcgaatacc

SEQ ID NO: 4787 - DNA, 288 bp, Glycine max
  Clone ID: PAT_MRT3847_104327C.1
ggcgaccagtaccaagcttgctatagctatctctcttagcattcgggtagcctggatgtcgaacctagccttgggcaaacttaaagaaaccaatgtcgaacaatatccatacctctaaacatgcatactccagtgccaacagctgcggcaatacactgagagtgacaagcgatcatgcttgcaacactgtgacatgtatgaagcaagagcgatagatacacatctaataggaaactcgtcagaaggatgaagaacttcacgagcagcatgaggaggaggatgacctga

SEQ ID NO: 4788 - DNA, 311 bp, Glycine max
  Clone ID: PAT_MRT3847_104328C.1
aaaacacctaatttacggaaattagccttttatgggaactaaatcccatcaatgggcaatgactagtagtttctcccaaaaaaataacccttccgcttttattggaaagcccttaacctaaatttgccggtttttttttggggggtggaaaaattaacatttttttccacggttttaaacttattaaatgggggggggaacattttttgcctacttaaaaatattaacatgacaaattgcctccagggtttggtgggaaaaaaatcccccgtaaacatggggatcctccttgggctcaaccaaacttgggc

SEQ ID NO: 4789 - DNA, 332 bp, Glycine max
  unsure (1)..(332): unsure at all n locations
  Clone ID: PAT_MRT3847_104329C.1
gttcagnttatgttcagaaatcattcattgattaccatatttccgtttcggtcttcttcctgggcgggctgtccgtccttccacaaatgttgcactctcactctcaccatcaccaccttctcttctccagtctccctctttgtctctcactcaccaccacccatcacaactcttctttaccatctcttcattttcttcacagacccattattaccaccaccaccacaacaacttctgttttagccattctctctactgctgcattgctttgcatagctcacaacacaaagactttgcccacctttgaactctcttccttcccatctttttac

SEQ ID NO: 4790 - DNA, 296 bp, Glycine max
  unsure (1)..(296): unsure at all n locations
  Clone ID: PAT_MRT3847_10432C.1
cgcgcttaaaacctattgtctaaaaattagcacgatcaaacggtgaacgaatctttagttgcaatctaaaaaatactctcaagtaggtatgtgaaaatcacgatgattttccctctccttctttctctctctcaatgatgtgtaattgttttctcttggatgtttggggggtggtggtggtgacttttttgtgattggggttgttgtatttttgggcatggtggttngtgctttgaattnaggtttagagtggggttgtgaatggggttgttgtaattttggaggtggnggtgatg

SEQ ID NO: 4791 - DNA, 2569 bp, Glycine max
  Clone ID: PAT_MRT3847_104330C.1
ctactccttccttcccttccctctcatctcttcttttctcttctcttctcttctttcttatcattctcgttcgattccttctctctttctcctgcaacaacaaccatttaagggatttcgggatgcgtttctgcggtctgttgattgtgttggtttgttgagtgtggcgttaacgtaatttggttttgagtgaagatgattttgtgatgtggttgagtgagtggtttttgtagtggaaggtttgttacttttgttgttgttgttgttgttgtgttggtttattttgttgaagagttcggaacatagtcggcggacgagaaaaattggaatttttggatgggtaataaacttgggaggaggagacaagtggtagatgagaaatatacgaggccgcaagggttgtataatcataaagatgtggatcacaagaagctgaggaagctaatactagaatcgaagttagcaccttgctatcccctagatgaagaaaccgcatacgatcgtgaagagtgcccgatttgctttctgtattatccaagtctaaaccgatcaagatgttgcacaaagagcatttgtacagagtgctttttgcagatgaaagttccaaattcaacccggcctacacaatgtcccttctgcaaaacggcaaattatgctgtggagtatcgtggtgtgaaatctaaagaagagaagggattggaacagattgaagagcaacgtgttatagaggcaaaaattaggatgcggcagcaggaacttcaggatgaagaggaaagaatgcacaaaagactggaaatgagctcctcgaatgtgaatgtggcagttgcagatgttgaatacagttcaaatgcagtgtcttcatcttcagtttctgttgctgaaaatgatgaaattggttcttctcaagactcatgtgccacatcagtggttagagcaaatgcaaccacgaggagccatatttttgtgttgggtgtgataccacacctatacttgtgcgacacaggtggagccttgtctctatgttattggtcgtttaggtggacatcctattaaacaaatattaaataaattcggctcgaggtaaataattgcacgagttctttcatatattttggaaactacatgttgtgggcttacattgtatgttctcccaaatgcggaaaactgcagagatgatgaatttgacgttgaccttgaggacatcatggtcatggaagcaatttggctttccattcaggagaatggcaggcggagaaatttatcttttgtcgatgctacttctggacactatgtagctgacggtcgctatgtttcatccgtctcatctgtctcatccgtcatgggtccaccaacgggatcatcctcgtctccatctgggggtctcgcttgtgccattgcagctcttgctgagcgccagcaaatggctggagaatcatctatgagcctcaccaatgaaaatatgccatcattcaacaccctaccgggttccagaagattttataacagacttggtagggatatggctaattatccgcctggtgacaacctcaatgaggagccactggatgaagctgtgacaatgactaggagtcatggtgaatgggacatggaccatgggacacagttgactgaaacagcaaccagctatacaaactctgtcgcagcagaagatcgtggtgaactatcatctttgccacggtctgatgacaatgatggaagccttcaaagtgccacagaacccattgttcccgagagttttgaggagcagatgatgctcgccatggctgtctctttggctgaagctcgagccatgtcaagtggacagagtgcttcttggcagtagtttttggttgaggtgctggtttaatctttcttaaattggtgatgcttgccttggctatttgacaagccaagtccaaggttgagaatttgagggaagttcactcgtatgcaatttgttcaaggatcaggtagtgatctcttctcacaaatttatatatataagtatcaaaagaaaactaatgattctagttggtgaaaggttgctgcttaatgccattttttttacttgtgctcgatgtcctctcctgccccctcattggttttctgtaaatagtttgtctttgatagatgtactctcattcttacagtaatatatggcacattttagacacgtactgaagaagaaagggaattaaatttctgtcatgaaaactttttatgtggttctattcattgagatctgactttatatagaagttatgcttgtaaggcgtgacacttaaaaatttatttgcagaactcccataaatgggtagatctgtgggtggattttgtagctttttggccctaggaaggaaaatgagttaaatgtggtttttcaaagaagcttccccacccgtcctcccttttttttttctttgctttacacgcataggtgaaagcaaaggcggctgtaactcatgttaaactgttttatggtaagctgtatagttaccctgggaagcagttctctatgttcatgagaattgtgtggaatttctttaaatttgagacatgttatttgccc

SEQ ID NO: 4792 - DNA, 808 bp, Glycine max
  Clone ID: PAT_MRT3847_104331C.1
ctagaatcgaagttagcaccttgctatcccggagatgaagaaaccgcatacgatcgtgaagagtgcccgatttgctttctgtattatccaagtctaaaccgatcaagatgttgcacaaagagcatttgtacagagtgctttttgcagatgaaagttccaaattcaacccggcctacacaatgtcccttctgcaaaacggcaaattatgctgtggagtatcgtggtgtgaaatctaaagaagagaagggattggaacagattgtaagtggttacctaacatgattattgggtttaggaatgcattttcagaaatattttcacatcgaatcaggttcatgtgcatactcataattattcaggaagagcaacgtgttatagaggcaaaaattaggatgcggcagcaggaacttcaggatgaagaggaaagaatgcacaaaagactggaaatgagctcctcgaatgtgaatgtggcagttgcagatgttgaatacagttcaaatgcagtgtcttcatcttcagtttctgttgttgaaaatgatgaaattgtttcttctcaagactcatgtgccacatcagtggttagagcaaatgcaaccactaggaccaatagagatgatgaatttgacgttgaccttgaggacatcatggtcatggaagcaatttggctttccattcaggagaatggcaggcggagaaatttatcttttgtcgatgctacttctggacactatgtagctgacggtcgctatgtttcatccgtctcatctgtctcatccgtcatgggtccaccaacgggatcatcctcgtc

SEQ ID NO: 4793 - DNA, 185 bp, Glycine max
  Clone ID: PAT_MRT3847_104332C.1
cgtccgcagttaccttgatcttaacaaacaactttctttttttaagcatacccacaaaaggactgattgatttccattttgctcaaattaattaaatttcttgataaatgtcaaaatttaattttaaaaaagttgtttttaatatcccaaaacttacataacaaatgcatactttttagtttttt

SEQ ID NO: 4794 - DNA, 213 bp, Glycine max
  Clone ID: PAT_MRT3847_104333C.1
gaagatgctggccagcttaatggcaatggggcctaccgagcacaaggccctgccactgtcgctgacatgtacagctgccaagacgtggccagctggagccggtttgggtttgagaatttggcacaagtgcagaaccgaagagcaccctggcttggtgcgctctatgcaccacggtgccgatattgtcaggctctgtgggaatcatatgtggat

SEQ ID NO: 4795 - DNA, 434 bp, Glycine max
  Clone ID: PAT_MRT3847_104334C.1
attgttgttcttagtttcttatattatatacccttccattttccacattttataccccataaaagaaaccaaccctggtgagaaagacaagcaggaaaagaggggggcaaacaaaaaaaaaaaaaaaacaaactgaaaaaaaaaaaaaattgaccgcccccgaaaagaactagaaaaaagaaaaaaatttacgccaaggggggcgggacttagaaccatggaaccagagggttaccacttgaaaaaaccaagaagccaatctcccgcaactgagccccccccagagtgtcccccccccccccaacaaatgctgaaaaaaagaaagggggggaaaaaactccgccccccgagagaaaagaactcaggggagtcggccacaaaacaaacgccgtgggcgggcggtggtgcaacacagggagaccaaacaacactga

SEQ ID NO: 4796 - DNA, 495 bp, Glycine max
  Clone ID: PAT_MRT3847_104335C.1
aaaacaagggccgcacccccgggcccggaagggggaaataaacacaattacccaacaaaaacaacaaagttaaaaatggccattggggggagggccgaatttttttttgggaaacaaaaaagcaaggcctccaaaaaaaaaccacaggggggcggggccccattggaacatcaaacacaacaaaaaacagcccccaaaaacaagaatcggggggaaattctaggagttttaatccttttccgggccctcaccaaactaaaaacccattttttaaaaatccttctaaagggggggaggggccccaggggcttaaaaaaattaacctttttccatacccccccccacggaccaggggaaaaaagcccgctgggaaaacaagaaaaaaaactggggaacaagggggccaaacacttaagccacacggggggaggtggaaataatgcaaacggccctttggacctgggaaagggccccccaaagaacaacggggggggg

SEQ ID NO: 4797 - DNA, 641 bp, Glycine max
  Clone ID: PAT_MRT3847_104336C.1
acaaaaaccatgcgattttattagatccaatattgggcgtgctgtcctttcaaagagagatagcatcaatccatttattagcccattttttggactattttgtgcttaacgcatactacatacttaatatattcttacaacatttcataatttccacccaaatcaaagactctaatttttttttatcacaacagttacatcgataatgatatcctttattgtgcattaatttatcttgttgagttcaagagcttatggtgttgaacctgcgaatcacttggcatcgtaaaggctttttcatttcgagcgagagctttaggcattctgaaagatccacgggttgcactggaatccatatgaaatggtgaagaagttgtgcaagccatagatgaactgtggctaagcctaatgtttttcctgggcacaccctacgtcctgcaccaaatggtgcaagtcttatgtccgaccccatgatcgacacattttctttcatgaatttttcggggcttaaaggcccacgggttcttccaaatggatgagtcatgtgatatagcccacatgttaaccattgcagttgtgccagctggcacgatgaccttgtccacgtggacatcatggattgcgaggcgagcccaggaaag

SEQ ID NO: 4798 - DNA, 116 bp, Glycine max
  unsure (1)..(116): unsure at all n locations
  Clone ID: PAT_MRT3847_104337C.1
cacatgttggtgcttctgggagcaanangcctacagnttgnaaagangatgtaccaattnattgtncncntatngctaaagatcctntcataggcaantatgtacatgagggtaac

SEQ ID NO: 4799 - DNA, 402 bp, Glycine max
  Clone ID: PAT_MRT3847_104338C.1
agcaactcgaagcgacaccgcgattctgcgataagcggaagcggggagggcgaggaggatcagcaatggaggcgctgctggagctcgacaagatgcacagggtgctgtccctcatgagttcacgcggcctgtaccacacctactccatctagagcggcgctgccggtgaccgcttcctcggccaattgctactattcatggagcaaccgtttgattctcttaccctggagaataagatccttctgatctctgagctattaagaaaggcgtctcctaatactttggaagaagtgcagcatgtcacccatctggaagctaatatagatatatgttctggaggtgcactccagccaattaagaaggtcaagatgcctgccgagaaatcaaccgctcaagccatgc

SEQ ID NO: 4800 - DNA, 293 bp, Glycine max
  Clone ID: PAT_MRT3847_104339C.1
ctcgagccgcgcggtcgtaagggctgaggatttttggtccgcacgctcctgctcctgactcaccgctgttcgctctcgccgaggaacaagtcggtcaggaagcccgcgcgcaacagccatggcttttaaggataccggaaaaacacccgtggagccggaggtggcaattcaccgaattcgaatcaccctaacaagccgcaacgtaaaatccttggaaaaggtgtgtgctgacttgataagaggcgcaaaagaaaagaatctcaaagtgaaaggaccagttcgaatgcctacca

SEQ ID NO: 4801 - DNA, 1227 bp, Glycine max
  Clone ID: PAT_MRT3847_10433C.1
ccacgcgtccgtacggctgcgagaagacgacagaaggggatccacacgctcacaataacacactgtcaccgttccgttccgttttcctctgttttttttttctttctttcaaatccccgcttcgtggaaatcccgaaccagaaaccatgcttctccgaaccgctgctgcttctgcttcgtccctctccctcttcagcccgaacgccgaacctccccgttcggttcccgctcgtggattggtggttcgcgcagcgaaaggatccacgaaccaccgcgccctgaccggagtgatttttgaaccgttcgaagaggtgaagaaggagctcgatctcgttcccaccgttccgcaagcttctctcgcgcgccaaaaatacgttgacgaatctgagtccgccgttaacgaacaaatcaatgtggagtataacgtttcgtacgtttaccatgccatgtttgcgtacttcgatagggacaacgttgcgctgagaggacttgccaagttttttaaggaatcgagtgaagaagaaagagagcatgctgagaaattgatggagtatcagaacaaacgtggtggaaaagtgaagttgcagtcaattgtgatgccgctttctgattttgatcatgcagataagggagatgcgctgcacgcaatggaactcgctctgtcattagagaagctaaccaacgagaagctccttaacttgcacagtgttgccacaaagaatggtgacgtgcagttggctgacttcgtggaaactgagtatctgggtgaacaggtggaagccatcaaaagaatatccgagtatgttgctcagctcagaagagttggcaaaggacatggtgtttggcactttgatcagatgctcctccacgagggaggagatgcagcttgatgattattactacattacccccctttctattattattttgtatcttgctcatctaggtggctttctagtcttttgctagaaggtggaactgaactatatggatgaataaaataaatgtggactggtttcggtcctctcgtagattatccaccacaaacaaccaaacaaaaaaaattttggatcttgctcatttaggttgctgcctgaaggcggatccgaaccaaatgaatgaatgaaataaatgtggcctggtttcggccctgcccccctttatattattattttgtatcttgctcacctagctggctttatagtcttttgttagaaggtggagatg

SEQ ID NO: 4802 - DNA, 576 bp, Glycine max
  Clone ID: PAT_MRT3847_104340C.1
cacggactagcggataaaccaattgatttagaagctggttctagctcttctcatgggccctctgttactacaatagaggctggtaaacatactgtaggtgcagatgacataagggtgtcatcaagtgttgatacccatgccccagttgcaagctcatcatctcttgaatccactggcagcattggtgttactgacttagacattgcaactgttgagtatcaactaaaggctcttggtgtatctaatgcaccaaattcagaaagtctgagttacaaagagaaatggaagaccggctaccagaacaatttgatgcaacgccagggattccagcaacaaaacaatccatatgatgttcctagtgccaactgtcaaaatgtaaattctgtgtatgctggtagggaacaatttccttttaattccaacaagttctccaatgtccagccactactgcagtcatctggttttacaccttccctatatgccacagcagctgcttatatgtcctcagccaatccattttacactaatatgcaggcgtcaggtatatatacctcacaattatgttgccgatacact

SEQ ID NO: 4803 - DNA, 533 bp, Glycine max
  Clone ID: PAT_MRT3847_104341C.1
tggttttttatagtactactttttgtggatcgcgacaaggaacacactctcacttgtacgagccaatcatgagtaacattggaagcaaactgccctcgacacatccatcgcgcttcgatgtcctacaaaccacaaactgatatcgacgcgcaagatttttttgtagagagttcgtttgcgctttgggacaccggctataaaattgacgaggacgcttgcccttgcttgtacaaacctgacaagccctgttctggagcattatgtagaacctttccgggaactagccgatccttcgacttaggaacggacgcgtgcttggctaaccctgtataataaaccgcttgtgtgaaagaaagttcctataaaattgttgccatggactgccttatggtaagactgctatttacgcacaggttcgccaaaaccgacctttaatggaatcaaagcttatgaaaaactttctgagcttgacgaagagagccagatgctgctctctcctggaaagagaagaagggcggtacctgctctcaagg

SEQ ID NO: 4804 - DNA, 768 bp, Glycine max
  unsure (1)..(768): unsure at all n locations
  Clone ID: PAT_MRT3847_104345C.1
attcgagctctttacccggggatcctctagagtcgacctgcagaagtgataatcatactcccttaaatgcggagcaacttagtacaagacgtagaagagaggtactccctctttctaaacctaaccatttcttggttgaattcctaattttatgaatgtataatattactaggtctaactaaaatgaagtattatttctatatcaatgttgtaagcttttcaaatattcattgttttatccatgctgtttgcgagcgaagtttatgtaccatcctgttttttaaccaatatattctttgtctatgatttgcagcatagaaaagagaagggtgttttacaaagttctcaatcccaaagcattcaatcagtccaggtatgtttggtgctacgttgttgcagttagtttgacagcggtgatatgaggttatgatgtaatgctttttgattcaacgcagagagctctggcattaaattttaatgcacatactcttcctgttgagcttaaaattctaaataaagcatgctttaatatttacatcactcggatagacattgngtggttgaagggagaggaaagaaaaagacatggtaaaggaacaatacagagttgaagttgaaccttgcatagattcctttggacttagttcataaaatcttgccactacttgtaatgatatagatgaacacgttaaataagcaaatgccaaaagtctttttaaattgagttttaattagcaaacacctgaagggctgataccaaaacttatc

SEQ ID NO: 4805 - DNA, 417 bp, Glycine max
  Clone ID: PAT_MRT3847_104346C.1
gtcctggaaaaaaaaagaggcggggaatattttaaccgattgcaaggctttccttgaaaatgaaatttctgccttaaaaaccaacccatttatgagggtgccgaatttcccacccggataacaaaatgataatgttatccctctttcttccaccaaactttttttttcctttcttggcaaaaggaaaccgtcctttctaaccctaatattgttgccctgggggggatccacccccggttcttgcttttgggggacccaatccttcagcagttgggttggtttccatgagagggcaggacccaccatcccaacctgaacccccacgggggggaatacttcctttggggggacccctgggctgggcattcccctttggttttgctttattacccatggggctgctttgcgaatgggggg

SEQ ID NO: 4806 - DNA, 400 bp, Glycine max
  Clone ID: PAT_MRT3847_104347C.1
cggatttccgggttggcccaacccgtcctttatttatccgtttggtttgggtggtttggcattactgggattggttgggcatttggcccctggggctttcggttgggtccaattggtggggggatctgtccagaaggaggcttctggcaccagctcactctcaagctcgagcaggttggggtctcgccgctttccagctggggatgctttatacaatatatcacatttcatcacagacttgagacgaaataacctctagctgcacatttgtgtatgttttggcgatttgaaaagagctgtgtggtatttgagggtattagaactcagacctgaagacgctgagaacctttttacttagagcaatgcatttaagctgacagggatcaaagatgcagaactt

SEQ ID NO: 4807 - DNA, 430 bp, Glycine max
  Clone ID: PAT_MRT3847_104348C.1
cacactcgtgacttggtaggagtgttgaactggtggccaccgttcggatttctgctatacacggcttttgtgatcgcgcgctgtaagtcactcttttaggggctctcccattctgatctttactcgcatctgctagcataactgtgagtggggcatatcctgcttgtcgcatatacaacatctatgtcttctattccatacccccttctgatgcttagtagtatgtactttctgcggcatgccttatttaactggcattcatcagaggaagtgtatgcactgccacccgactgcaggaatggacaagatgcaactgataggggcccatgctctaagaacatgtgcatgcgactacctactcctgacacacaagccgcataacccttcgcacacatttaagtgaactcgaaaaatggctgtaccaacctga

SEQ ID NO: 4808 - DNA, 180 bp, Glycine max
  Clone ID: PAT_MRT3847_104349C.1
atattgggtcctttttggtttttaaaaaaaatggaaaaaaaccgcggggaagctaacttatcagtaaaaacttatcaaaccgtcaagggattaatcctggtctgctgcccggcactaaattgcacgcaaaactatccactgaaaaacatggtggaaactattaaccgtttttttgccttc

SEQ ID NO: 4809 - DNA, 1010 bp, Glycine max
  Clone ID: PAT_MRT3847_10434C.1
ttctcggctgcgagaagacgacagatggggatccacacccacactgtcacctttccgttcatttcctctgttttttcttcaaatccattgtttcgtggaaatcccgaaatttaaccatgcttctccgaaccgccgcctccgccgcttctgcttcgtccctctccctcttcagccctacctccgaacctctccgttcggttcccgctcgtggattggtggttcgcgccgcgaaaggatccacgaaccaccgcgccctaaccggcgtgatctttgaaccgttcgaagaggtgaagaaggagctcgatctcgttcccaccgttccacaagcttctctcgcccgccaaaaatacgttgacgaatccgaagccgccgttaacgaacaaatcaatgtggagtataacgtttcctacgtttaccatgctatgtttgcgtactttgatagggacaacgttgcgctgagaggtcttgctaagttttttaaggaatcgagtgaagaagaaagagagcatgctgagaaattgatggagtatcagaacaaacgtggtggaagagtgaagttgcagtcaattgtgatgccgctttctgagtttgatcatgcagataagggagatgcgctgcacgcaatggaactcgctctctcattagagaagctaacgaacgaaaagctccttaacttgcacagtgttgccacaaaaaatggtgacgtgcagttggctgactttgtggaaactgagtatctgggtgaacaggtggaagcaatcaaaagaatatccgagtatgttgctcagctcagaagagttggcaaaggacatggtgtttggcactttgatcagatactcctccacgagggaggagatgcagcctgatgattactatattacctcccccccccccccccaccccacaagtattttgtatcttgctcatttaggtggctgcttgaaggtggatctgaactaaatgaatgaatgaaataaatgtggcctggtttcggtcctttcggagattaa

SEQ ID NO: 4810 - DNA, 325 bp, Glycine max
  Clone ID: PAT_MRT3847_104350C.1
tttttgtgtgtcttgattttttttttcttttgtagatttttgggccggagatagaaaattaagattgcggaccttgccggggtgagctatgttcccgacggcgaactgtctgtggggaccaaggctgaaataaggaccaagctcaaaaattagataggaacaacagccggtttccctcccgctgagacggcgtgccactctaatttaataaactcaaaagctcttctgagggccaaaaatgccgggcccgatggttaactcaccgagccctggtaaaaaaaagcttggtctcacggatggggcctctgatacacgaagatccccc

SEQ ID NO: 4811 - DNA, 909 bp, Glycine max
  Clone ID: PAT_MRT3847_104351C.1
cacaaaaacgtcctatctcctgcaatttatataatcaccaactagtttgagtttaaatccccttaacattatagtcacaggagatttctagatagagattagataaatacgtcaaccaaaagtgacatcccccacctaacttggcaatattaaccatttagcgggttatcctgagttgccgccaattattcatttcttctcttacagcttgctagcagcagggtttgagtatctgacgatattagccatttagaatgttacctgacctgacaatcagtcatttcttctcttattgctactgccaccaggattttgctcagtaagcatttttaaaacgtttactaatgctcgcaaacggtcccatatgccgagaccataaagcgcttcaacaagtgactcctgaaattcgaatccattctctgcaacaggatactgaataggcttaggtatcttggttttgacaaatggccaccatcgatcttcaacaactgctttaacaagacagcaagctcgcaaaccttctacaccaccaaatcgtccaaatccactatgtttcacacccccaaatggtagggactgacacatgtatgttgatgcaaaatcattaactgcagctaccccagcatgtatctgtgaagctatctctctggcacggctctgattgcctgagaaaacagcacagccgagcccatattttgagtcatttgcaagcctgacaacctcctcatcagagctgaatttcattattggcatgattggtccaaatgcctcttcttgcatcaatctcattgtgtggttcacattcacaatcacagtaggggggaaatattgatcaactgcgtcttcgcctatatgtccaagattcccacgggcaacaatttcagctcctttgtctaaagcatcatttac

SEQ ID NO: 4812 - DNA, 702 bp, Glycine max
  unsure (1)..(702): unsure at all n locations
  Clone ID: PAT_MRT3847_104352C.1
gaaagggttgagctgcacaacaacctaagaatgggaggaagttcgagcttcagggatgagtataccttgggtaagttcaacttcaattcgtcgtcgtttctgagacttgatcatcacctattttattttattattattaccatcatctgagactttatttgatttctgcgcagaacaaaggctcggagaatcgcgggatattgtggccaaatatcccgatcgagtccccgtaagcctccttcttcatcctaatcatcttctccttttttctttatatatattttaaaatatttgttttaataattctctttaatctcgctttgtggatggatccttatagctctcttgatccttgcactctactgtttataacgaacgattcgattcatgtgccaaatatatagaactagaaccacacggtaacggtaaacatgctttccgtaaccctaaattggtcattttatgattcgattcttcttctttaccttctgcaggtgattgtggaaagatatgcgaaatgcgatctgcctgagttggagaagaaaaagtaagaccatcctgcatgattgaagtcatgataataagagataactgtagtctatagccatatagatcgaattgggacttatgagcatatgtgattacattttatanattcatatagaaatgtataaactatagcaggtatataaatttgaaatc

SEQ ID NO: 4813 - DNA, 684 bp, Glycine max
  Clone ID: PAT_MRT3847_104353C.1
aacttttaatgatatcttacatgaaaattgaatctaaatctctttcataaaactcaaattatattatcaacttatagttttaggatataaatatgagagacagaaaaatacacaccttaacaagtgaagttttctaaacgtgaatttaatttaattctgaagcacctgattcttttcaataaaatgtttgcccaatcaaatcatcccagaagttatggacctcagcctcatacagttggctctgacaagagattagtggaaggactaatggacgaatcaagtggtgacaaagttgatggtttcgttttgaaaacatgtactgtcgaacatttgaaacttctgtggttgagattatccaagacaaattgtattgcatttgtctactcctacatcatcattgtgttcacaatttggaggaagctttggtgaactctctctatatatatatgcatgccattatccttttgtctaatttagaaatatgccacttttagcaacaattctgtgcagacccactattcaaggcctccatcgtttgagttttatttcttgccaaaacactaattttataaccagtgtatttaaaaataattatagtttgagttttataaccaaaacactattcaaggcctcgatcgtttgagttttattttgttaaagtattctagagtgagaagtcgtggc

SEQ ID NO: 4814 - DNA, 1353 bp, Glycine max
  unsure (1)..(1353): unsure at all n locations
  Clone ID: PAT_MRT3847_104354C.1
tggtaccgcctgcaggtccaccctccaanngcttggttgaaccggtccggattcccgggtcgacccacgcgtccggtttggatggcaccaaaagacacacaacattttcagtgaaactgaaaaggggaagaagagagtgaaatgggggagctttacgcgttggacttcgatggagtcatatgtgatagctgcggagaaagctctctctctgctctcaaggctgccaaagtgagatggcctggtttgtttgatggggtggattcaaccacagaaaattggattattgaccagatgcacacagtgcgaccagtagtggaaactggatatgaaaacgttttacttgtgagattgttgcttgagagcagaacaccaaccatccggaagtcttcggttgcagaggggctaacagttgagggtatattggagaactggtcaaagttgaagcctattatcatggaagaatgggatgagaagagggatgatctgatagatctttttggaaaggtcagagatgaatggttggagcaggattttgctacttggattggtgcaaacagattatatcctggtgtttctgatgcattaaaatttgcaagctcgagagtgtacattgtcaccacaaaacagagccgctttgctgatgctttactccgagagcttgccggagtgaccataccacctgaaagaatatatggccttggaactggtcctaaggtagaagttctgaagcagctacagaaaaagccagagcaccaaggactgacactgcactttgttgaggatcggctagctaccttaaaaaatgtcatcaaagagcctgagttagaccaatggaatttgtatcttggtaattggggttacaacacccagaaagaaagagaggaagctgctgctatccccagaattcatgttcttgagctctccgacttcagcaagaagttaaaataggggtcttcattggattgtcaactgtcaatcgttgaaccaaatatttttcttccaactcatttataagcaataacaagtttctagtgaacacaatctttctactcagaaattctctccttttcgtcttgtgaaactgcaataattgggtcgagagctttgttgtctttactagacctgcccaacttgaacttgaataagatggttcaaacccataagttacagtaatttgtactctcttagaggaaatgaaaattggtgaaattcttgggacgtgtctgacaaattccttaccaaagtccatagtcacaaggttcctttaggtgtagtataagtacatctgtaaaatcaactgtttgttgaaccaagtagtatattcttcctcccattctctcataagctgaaaat

SEQ ID NO: 4815 - DNA, 1038 bp, Glycine max
  Clone ID: PAT_MRT3847_104355C.1
cgtagctcgaattcggctcggatgaaactagagctaagggtataaggttcatccagagtaatggcaccttggatgaaacctatgaagcatacataaacaaagccaagaattcaagttcaaagggtgatgtcattttggcagcaggtgcattaggtagccctcaacttatgatgctaagtggcatagggccaaaagaacagctgagaaggttcaacatttcaatagtgcatgaaatgaaaggggttgggcaaggaatgcaagacaacccttgcatagcagttttggtggactcaaagccacagaataggctccctgatccaccccaaattgctggcataacagatgacttcaagatcatagttgaagcatcaatacttcccctaacttccaactcatcaagggttaatgttgctgccaagatagcaatgcctacttcaaaagggatgcttgaactgaacaacactgaccctaggctgaacccttctgtgaggttcaactatctagcaagtgatgatgacatggaagaatgtgtcaagatgacaaagctacttgagagaattgcaaggtcgaagtctattgcatttttccttggagaatcaaagcaagaaaaactgacatctactgatattgatctaagaaacttctgcaagaaaaatgtgagaacaatctatcactatcatgggggttgcacggttggatcagtggttgatgagcactacaaggtttatggaataaagggattgagaatattggatggctcaactttttcagagtcaccaggcacaaacccaatggccagccttctgatgctaggaaggtatcaaggacccaagatcgtaagagaaaggaatgcagaatctggcttaaatgccaaagagcaccgaaaatgagtttcttgattaccttttttacctgttaaacaaaaccagtgtgtaaaaagaataaggcagtgcttaggagcctaacagtttgtaccatgaaaaccacaattctattttcaccatgtaaagttatttcatttcattccttcttcaaaaa

SEQ ID NO: 4816 - DNA, 172 bp, Glycine max
  Clone ID: PAT_MRT3847_104356C.1
ccgatccaactacaactacactgatctacctttagctgcatatgcaggtttagcagctgcacttgtgtcatttggcgaagatacaaccaccgatatacacacaaacatccttttctctcctgttctctcaatgtctcccacaccacctcccactccatcaccatggaaacca

SEQ ID NO: 4817 - DNA, 215 bp, Glycine max
  Clone ID: PAT_MRT3847_104357C.1
gttaaaaaaatatacggtcgttgctacttcttaaaaacgatgacaaaacctattttactttttcgtagcgagaataccaggataacctcttgacactaaaacaagaaatacgctaccagacttgaatggaaactaacccgtgcttggtgccatacataactgaaactagcttcccttaacttaaacattccacagtgggaccacccaattatgct

SEQ ID NO: 4818 - DNA, 268 bp, Glycine max
  unsure (1)..(268): unsure at all n locations
  Clone ID: PAT_MRT3847_104358C.1
gactgaattaataataactgttttttggatctaattaantacctncttagtattgcggcttactgtgtgggtgccggggactcttctctaccacatattccaattgctttccttgaacgaatcaatgaggattttaccaaaaaatattctggaagaaaagcatcaacagcggctgctcagagcctcaacatagagtttggacctaagtttaatgagcagattcagtactgtgtttatcacccacagtaaattatcaagcttgcaaaaa

SEQ ID NO: 4819 - DNA, 186 bp, Glycine max
  unsure (1)..(186): unsure at all n locations
  Clone ID: PAT_MRT3847_104359C.1
ttataaaaacctaatcctttaattcctggtactacctacttcaatattagaaactatatttgtcaacatttaaattgttgcgtttggacatntaaggtaccttcaacaaatttaatattatttttactaacnctatttattttaacttaaaacctttatgttctccctgttctttattatacttct

SEQ ID NO: 4820 - DNA, 980 bp, Glycine max
  Clone ID: PAT_MRT3847_10435C.1
tcgacccacgcgtccgcccacgcgtccgtacggctgcgaagagacgacagaagggaattgagtgtagaagagtgctgaaatggacatatgcatatgggttttatttgccggagcatgagcatgcaaaaaaacagttctttgagtacttacaaggtgaagcagaatctggtctggagagacttcatcaatgtgcggaaaaggaacgggggcgttcctaagtgctgatgatccatctagagaattcaatgactttcgtacaaagctagctggattgactagtgtgactagaaactactttgagaatttagtaagggcattagagaatggtctatctgatgtgggaagtaatggagctgccttcagcaaagcaacgagctcaaaaaatgctgctggtagcagtaaggggagagctggaagaggaaagggaacttttcgaagcagcacgcccagcaaaatgaatgatgatagtcattggtgttgcgagcattgtacctatgcaaatgccaaatctgcctccacatgccagatgtgctatcaacagcggcgatgaaaacttggttctccatttgaagcacttgtctcctgccgaaggcctttgcaccaaaagctgagatggagacataagatatattatgcagtctccaattttgtgatgctaaatacaataggatgaaaggagtaaggcttggaagaaaggttgctctccatgcgctcctattcaatacacaacccaatttgatgtatatagtgttttatctttttacgtatgaggttttctactacaggcatttgtaactcaataccataacacaacagatgctggataatggagatgaacacaaatgttcttgtttatgaccactctttcagttggtctcttggcagcttccaagagggttagtcgtgtataataactcagggtttgattacattctaaaaaactgataaggggctgcaataaatattatactttatcactt

SEQ ID NO: 4821 - DNA, 154 bp, Glycine max
  Clone ID: PAT_MRT3847_104360C.1
ccacgcgtccgggccaccgcaattcgtggcgcgattattctcgcgaagctttcggttattgcccgcgatgatggttgaatgatgttagaatgcctgtgtgtataaagagcgtgctatataagcgagtgtgtctactgtcaggtggagaccgact

SEQ ID NO: 4822 - DNA, 322 bp, Glycine max
  Clone ID: PAT_MRT3847_104361C.1
gggtgaagtttcaatgatgctttactaagaaatgtgatatcggcagttggtaaaatcaaaggaagtatgctagaagtagagaagaaaaatgaaacctaggtcacaccttaaggtttgatgcatttatgcattgcataggaatttgctgctataattcatgaaactgagcactctatttgaaagaaagcattacaaatttacaatctcctattataaagattaggaatgaaatcctaattcgaataggtgtgtgtttagactttagattagtttgttaaaaatgaatataggtataatatgctattgccactgctgtgctagt

SEQ ID NO: 4823 - DNA, 167 bp, Glycine max
  unsure (1)..(167): unsure at all n locations
  Clone ID: PAT_MRT3847_104362C.1
gagncgncanagcaaaggcgngacagcaaggantanacngananaganannnngnngagncgacgnaagncaggangatgnagagcagananananacnnacnacncnngcgacgcacanagcanancnagnaaannagncaccnantgcgagagaagagcagacgc

SEQ ID NO: 4824 - DNA, 340 bp, Glycine max
  Clone ID: PAT_MRT3847_104363C.1
gcgccagttttgttttgtggaacactggttagttaagctgacaaccaggaatggatggacaaatattctaaggccgtatttttcttgatcttgttgctcgactctaataatcttaaaaattctcgttgtaaccttaaatgttgtgaaacaatcttatttgattatctttggcgtatcaaaacctgtattcatactttcagaaatatcttacctggaaaaaagtcacgtctagggctgtttataatatttttttctgaatataacctatccaaacatattgccccctttctatttatcttggcgagataatgcattatgattattatatttttaatatttg

SEQ ID NO: 4825 - DNA, 479 bp, Glycine max
  Clone ID: PAT_MRT3847_104364C.1
acggctgcgagaagacgacagaagggtggttgttgtgctctaatatcttatgctttaagccatacctattgttcaaacaacttaaacaggctcaaccacgggctcacaaaacttaagcccaagctacataaatatcctatctgcattttatttatccttaaccctccactgaaatgctcaatgtcctcatcaagcccagcttaccccgaggatccttcctaaggagatttatagagacactagagtcagtattcagtacccatgcaattgagagttcgctggacgtcaattcaaaaatgcccatcaccaccaacaagccattttggagggaaaaaaagttaacagcatggtgacttggctggacactttcattatatctatagacatgaaatcacaagcaaaatccaccacagtactgtcattagacttgttatgtaattacgttacataataactcctaccaaaatttatcctagaaa

SEQ ID NO: 4826 - DNA, 320 bp, Glycine max
  Clone ID: PAT_MRT3847_104365C.1
atcatatccttttttatcgcatagttcgcatcctttaagcgttggtgggggcggggctggtgggagcaacggccttggcacggggaccgaagaacttggtcttctcctcgcgagtctggaagcgaccgtgttcgaacttggaagaggtgtcgatgaacttgagcttgatctgctccaaagcggctatggaagtctgggggaccagggaatttttgagggggaaaaacctttttctggttccgacaatggttaccttgagcattaagttggcggtctgaaccgtaccctaggggctgaattcacccataggggggaacttc

SEQ ID NO: 4827 - DNA, 165 bp, Glycine max
  Clone ID: PAT_MRT3847_104366C.1
acattctttcgcctcattcgttctctcactcaccctcttatttcttcccaaaactccatatacatccatatctctatagccattaattcttctaccatagcacacagttaccaaaccagaacatgtctactcaaattcaaaatggttcttcctcctcatcacaac

SEQ ID NO: 4828 - DNA, 213 bp, Glycine max
  Clone ID: PAT_MRT3847_104367C.1
attattatgttaaaaaaaagtaactaaaatgataaaagaaaaaatatagacagaaaaaaaacaaacaaaaaaagaaaagtcactatgggagcagcgacctcggaaagtttacatactagggaaatatggtatttaggctccaaagaccatcagtctcatacctgaaatggacgcttaactggtcaacatcaaccatgtcgaggagcactacct

SEQ ID NO: 4829 - DNA, 545 bp, Glycine max
  unsure (1)..(545): unsure at all n locations
  Clone ID: PAT_MRT3847_104368C.1
ccacgcgtccggaagttatatgttgttttcataagttcaaataaactcttccaattgtcccatcagtgtcaccataagtacttctacattgctgctgttctcttcactactcttatagttttctgttagcttttgtgatggtggtggtgggggacatggcaagacattcattaagttaggggtgttgaaagtaggaatggaggtttcttaattgcttctataatttgtgtgtcattttgattattaggtgatgatataaaatgttttcttttacatttactcgagactgtaattaaactgatgaacttttataaaaaaaaaaaaaaaaaaaaaaaaaaaaaaaaaaaaaaaaaaaaaaaaaaaaaaaaaaaaaaaaaaaaaaaaaaaaaaaaaaaaaaaaaaaaaaaaaaaaaaaaaaaaaaaaaaaaaaaaaaaaaaaaaaaaaaaaaaaaaaaaaaaaaanggggggcccccttttaaaaaaaccaattttactcccccggggttggaaaaataaattttttttttagggcccccaaaattaa

SEQ ID NO: 4830 - DNA, 253 bp, Glycine max
  Clone ID: PAT_MRT3847_104369C.1
ttcacgtactatatgtgtttgttttgcacagcaaaaatcataatatattataaataagattcagcacatgtatcaatcgtatgaaggcctgatggcgactagatggaaatggtggtggttagcattgacatggtccattggggagcacagaaatagcattattttctctggcagcaccttcaatgcaaatcaaatgatggaggatgcagtgtctttattatggacttggctgagacatttagagaagggtttt

SEQ ID NO: 4831 - DNA, 3758 bp, Glycine max
  Clone ID: PAT_MRT3847_10436C.1
aattgtttggaagttccatttactcaaagaatcgaacataactaatccaagcaactgaatgaatattaattcatcacaactcctatctaattccctcattcaatctttactttaattccgtataaataaaactaaacaaataggaaagcgactattgacagacaactaaacagaaatgaaaaatgatgattagctcgattcaattttcactacggcagtggcagaagttcagtatggtgaattttgaatacgtacttttccatctgcttttcatcctttatacaagagaaatgtagtataatatgacgcagccataaagagcactcaatcattaatacagaagatagttacggagcctgtacacctggtgtctttcttgcctaaagttgcagttcagcttcttcaatcatcaaaaggtgaataacgtgatcatttaaacttcagagccagagggctctgtggacaacgatgagtctgtgccataattccaaaggctcttcaactcacctcttatacatcccaatatgactgtgacacctagtgtgcatggaacaagaattcggctcgagctcttggaacttttctattattttttctctctccattctccattctccattctcctctttgcttactacccttccatattccatatattttcataatttttctttcaattccccaaaacacattaataaaaggaaatcaaatcaaagcaaagacaacacgcattcttttcttccccaatttccaatccccaattcttctgccctagattttgtccctttttttattgcactccacccacccaccgtgcatcggtcgctggttcctgaatttcccttgtggttaggtttcctcgatggagtcagaggatgatatgcacgacgccaacgacatcgagtccctcgacgacgatttctacagtggcgagaccgaggacgctcctttggactactacagcgacgacgacgccgacgattacttcgacgacgccgagaggatcgagtctcgccgccctgagcaaaattttaccatattgaaggaatccgatatccgactaagacaggaagatgacgtcgctagagtagcaacggttctttccatatcaagggtttctgcaagcttactactccgtcaccacaattggagcgtcagtagagtgcatgatacatggtttgctgatgaagaacgagttcgaaaagcagttggcttgttggagaagccaattgtccagcatcctaatgctagagagcttacttgcggtatctgttttgaaaattatcctcgtgctaggattgaaatggcttcctgtgggcatccctatcgtatctcatgctgggaaggctatatcagcacatccattaatgatggtccgggatgtttgatgctgagtcctgatccactgtggtgctgccactggccgctcgagccgattcggctcgaggtcggatgaagataagcagaaatatgcacgttacctacttagatcttatattgaagacaataagaagtccaagtggtgtcctgctccaggttgtgaatatgcagttacttttgatgctggtagtactggaaattatgatgtctcttgcctctgttcatatggcttttgttggaattgcactgaggaggctcatcgcccagtggactgtggcactgtggcaaagtggattttgaagaacagtgcagagtctgaaaacatgaactggatacttgctaactcaaagccatgtcccaagtgtaagcgaccaattgaaaaaaatcatgggtgcatgcacatgacatgcactccaccctgtaaatttgaattttgctggctatgcgttggtgcatggtcagaccatggtgaaagaactggtggtttttatgcttgcaatcgttatgaagcagctaaacaagaaggagtgtatgatgatactgaaagaagaagggaaatggcaaagaattcgctggagagatacacacattattatgagcggtgggccagcaatcaatcttcaaggcaaaaagctcttgcagatctacagcagatgcaaactgttcatattgagaagcttagtgacatacagtgtcagcctgagtcacagcttaagttcataactgaagcctggctacaaataattgagtgtagaagagtgctgaaatggacatatgcatatgggttctatttgccggagcatgagcatgcaaaaaaacagttctttgagtacttacaaggtgaagcaaaatctggtcttgaaagacttcatcaatgcgcggaaaaggaactacagccgttcctaagtgctgatgatccatctagagaattcaatgactttcgtacaaagctagctggattgactagtgtgactagaaactactttgagaatttagtaagggcattagagaatggtctatctgatgtgggaagtaatggagctgccttcagcaaagcaacgagctcaaaaaatgctgctggtagcagtaagggtagagctggaagaggaaagggaacttttcgaactagcttgtccagcaaattgaatgatgatagtcattggtattgtgagcattgtacctatgcaaatgtcaaatctgcctccacatgccagatgtgctatcaacaacgtcgatgaaaacttggttctccatttgaagcacttgtctcctgcccaaggcctctgcaccaaaagctgagatggagacattcctgtatgtttatatatatttatgcactatgcagtctccaattttgtgatgctaaatacaacaggatgaaaggagtaaggcatggaagaaaggttgctctccatgcgctcctattcaatacaaaacccaatttgatgtatatagtgttctatctctttatgtatgaggttttctgctacaggcatttgtaactcaatatcataacacaacagatgttggagaatggagatgaacacaaatgtgcttgtttgtgacaactctttcagttggtctcttggcagcttccaagagggttagtcgtgtataataagctcaggatttgattacattctaaaaaatgataaggggctgcaataaatattatactttatcacttgatatatcatcaaacagatgccaaggatatcttggccagtccatgaatatgattcctgtcgagtagcagcccagaaaattgcaaatgccacacagaataacaatactgccagggagaaaatagagatctccccaaatagaggtaagctcactgtcttctgaccacaattttggcattttcttaaagtgaggcttacaatacaattgtgcataccctcaataccaccaatgcagaaaagtacaatcagcacccagacaaaccaagttgacatgaagaagaacaatagcacaagaaaggtagacgctgctatgacaaatatgacagcaccctttgaatcaatgttaacaatttccttgtccaaatcatctttttctgtttcagcattagaagattccttggggcacaatttgttatagcgttcatcagacttctctggggtagtcagatcggaccatagtgaagcacatacaatagttccaacagacatcaaccacaaaaatgcaactgagaagtccacaagtggccgaggcggagcatataacaaaatttccactttgcttccagatgtgaaagacttgttgagagattgtcctgctgactttgctatcatgactactggaattgaaatatttgcttcactgctattggagcaaaccatctcaaagagatcttgtgagtcgttactcgagcc

SEQ ID NO: 4832 - DNA, 506 bp, Glycine max
  Clone ID: PAT_MRT3847_104370C.1
cagtgattgctgaattgcgggaaagacttcaatcacattcaatgaaatcatatcgatctcgatttcagagaatctatgatttgtttatgagtgatgatttctcatctttctcacggattgagcaacagtttcctcatctgaagcaatggcttggctttaaagctgctggcactgtggagcttggtcatatagttgagtcccctgttattcgaactgcaacttcaattgttcctttgggatggaatgatggactaggagcaaaaaatggagaacctctgaaagttgatattactggttttgggttgcatttatgtacacttgttcatgctcaagtgaatggtaactggtgctcaactactgttgaatcatttccttctccaccaaactattcttcaaatcaaggtatccagcctgagttacagaagttgaggatatttgttggtcctcctctaagaagtccaccaaagcatcaaactgtgttagactcattgatgcctgcttttact

SEQ ID NO: 4833 - DNA, 485 bp, Glycine max
  Clone ID: PAT_MRT3847_104371C.1
gatcattgcaagaaaccgatatagttctttggtacgtgtttggtataacacacattccccgattggaagactggccagttatgccagtggaacgcattggctttatgcttatgccacatgggtttttcaattgctccccagctgtagatgttcccccaagtgcaagtgatttggatgataaggagaatgggatgtctgcaaagcctattcagaatgggatgattgccaagctctaaaaggaccaaaagtagagatacttgattatgtttaccatcacctaagtgagtgcatcactttaattaattaaaaatcgtcaataacaaagtttttctcatggtccacagaatagctatttaggtgatgcatttgatgtgtaattgtaaaatgatagtactttattggtttctctgaaatctaaattgatgcgacgttcctattgtgagaaattgaagtgtgttggattaaaataagtactcatgtattac

SEQ ID NO: 4834 - DNA, 961 bp, Glycine max
  Clone ID: PAT_MRT3847_104372C.1
cacatgttcttctcttatctctatctcttctgctttggaaccaaaacacaaacacaataacaacatatcaagctttaagtgcaagtaaacaaacacaacacaaccaaggttgacaagaattgaaagttgaatcctgtgtgttgctggtgcagatatggactcaaactcaaaggctgtgtgcttcataacccaccaagccattttcaacgcggttcgatgtggggaccttgaagggctgaaggagcagctgaagaacaagggtgaagagggggtttctgaggtgatgtctatgcagaacgatgcaggggaaaccatgttctacatagctgctgagattggtcttcgtgaggtgttcagcttcttgtttggtttatgtgacatggaggtgctgaagatcagggccaaatcggatttgaacccctttcacgttgcagccaaaggtggttgtttggatattgtaagggaaattttgagtacttggcctgaggtttgcacgttatgcgactcctctaacactagtcccctatattttgctgctattggagatcatttggatgtagtgaatgcaatattggatgttgatgtgagttcaatgatgatagtaaggaaaaatggcaaaactgcattgcacaatgctgctaggtatggcatccttcgcattgtaaaagcactgattgcccgggatcccggaatagtctgcatcaaagatagaaagggtcaaactgcactgcatatggctgtgaaaggacaaagtacttcagtggtggatgagatattacaagctgatcttaccatattgaatgaacgagataagaagggtaacacagctcttcacatggctaccaggaaatgccgtcctcaggtagtaagcattttgttaacctacacagctctgaatgtcaatgccatcaataatcagaaggaaacagccttggattttgccagataactacgatatgga

SEQ ID NO: 4835 - DNA, 2245 bp, Glycine max
  Clone ID: PAT_MRT3847_104373C.1
gattagtgtaagttccaaattacgacagcgagatagagtttcttacggacgacgacgtatccattgagatctcggacggtggctttcgatccgccaccgtccgatctcctcctccgtaactgacgacggtgtttcgatatcttacatctctctctagccacaggtgatttgaaacagttcttcctggtctaaaggagtagtggagagatatggaagtcaacaattggcataaggagcttacatatgatgagtgggtaccgatcactgtatctggtgcacgtccagctgctcgctacaagcatgctacagcagtagttgatgaaaaattatacattgctggtgggagtcgtaatggtcgatacttatctgatgttcaggtttttgatttaagaagtttgatgtggtcttctctgaaactaaaagcaaatgttggaaaagatgatgacgatagctcacaggagattcttccagccacatctggtcacaatatgattaggtggggggagaaactgcttcttcttggtggcaattcaagggaatcttctgctgagctagcagttcgatacattgacattgaaacatgccagtttggggttattaagacttctggtgatgttccagtagctcgtgtgggacagtctgccacaatggttggttccagagtgatattgtttggtggagaagatatgagcaggaagctgttgaatgatgtccatgttctcgatcttgaaagtatgacttgggaaatgataaagactacgcagacacctccatctcctagatatgatcattcagctgctattcaaggagagcggtaccttctaatatttggtggttgctctcattctatcttcttcaatgatcttcacttgttagacatgcaaacaatggagtggtcccaaccacaaactcaaggtgatttagtatctcccagggctggacacgctggtatcactattgatgaaagctggtttatagttggtggtggagataatagaagtggttgccctgaaaccctggtgttagacatgtctaagcttgtttggtcagtattgactttgtgaagcaaaaagatccatggctttctagtgagggtcttagtgtctgttcagcaacaattgatggagaaaagtatttgttagcatttggaggctataatgggagatatagcaatgaggtttttgttatgagacccaaggccaaggataccatgcgtcccaagatttttcaatcacctgctgccgcggctgctgcggcttctgttacttctgcttatgcattgtctaagtctgagaagttggatttcatgcaactggatgatataaattccaagttatctgtaaatggtcatcataaagatgatgtggtggataaagttgaagccattaaagaagaaaaacggttattggaattgtcaattgcagaagtcagggctgaaaattctaagcttggagacgagatagaagaaataaataatactcatgctgagttgaccaaggaactccagtcagtccaggcacaacttgtggctgagagatcaagatgctttaacttggaggccaaaattgcagaactccagaagttgctggaatcaatgcagtctgtggaagatgaggtacaggctcttcgtgaaaagaaatctgctctggaccaggagatggagctcgctgcaacagctgagaggaaaagttctggttggcgatggtttggtgggagtgaaacatgataaatatgtggccatgagggcaaatgtcaactaagagtgatttagagttgagtctgaggaacctcaactgcttatattctattattgtagttcatgcagaaaatgaaatttccttattaccgaacttttacggtgtcatcttttgatttgaaatgcatgatggactccaattttgaagaactgaagtctgaaactttcaaaagatggggaacacaagttttttttttttttttttgtatcgttaatttgtaccttgacaggtttacagtttacttttgactgattcatttcatgctcaagtgtccattaaattctataggatatacatttcattttattcatttgagtatatattggcatcttattcacatgttttattcccttataaatataattatgttcaatttttggttttgttaaaaaaaaaaaaaaaaaaaatcttcaagacttgtctaagttttttctttcatagtttgattaattagcaccaccaccctgccatcgtgggattctactggt

SEQ ID NO: 4836 - DNA, 579 bp, Glycine max
  Clone ID: PAT_MRT3847_104374C.1
gagggctcgcttcttgccataacgtttgttacgcgacgacgacgtatccattgagatctcgacggtggctttccatccgcctccttccaatctcctcctcctcctcctccgcatcagacgacggcgtttcgagatctgacatctctctctcgtaacagaatactggacagatatggaagtcaacaattggcataaggagcttaaatatgatgagtgggtaccaatcactgtatctggtgcacgtccagctgctcgctacaagcatgctgcagcagtagttgatgaaaaattatacattgctggtgggagtcgtaatggtcgacacttatctgatgttcaggtttttgatttaagaagtttgacatggtcttctctgaaactaaaagcaaatgtcagaaaggatgatgacgatagttcacaggagattcttccagccacatctggtcacaatatgattagatggggtgagaaactgcttcttcttggtggcaattcaagggaatcttctgctgaactaacagttcgatacattgacattgaaacatgccaatttggagttattaagacttctggtgatgt

SEQ ID NO: 4837 - DNA, 541 bp, Glycine max
  Clone ID: PAT_MRT3847_104375C.1
gattagtgtaagttccaaattacgacagcgagatagagtttcttacggacgacgacgtatccattgagatctcgacggtggctttcgatccgccaccgtccgatctcctcctccgtaactgacgacggtgtttcgatatcttacatctctctctagccacagttaatcctgaagtgacaatttaaaataaaaggtgatttgaaacagttcttcctggtctaaaggagtagtggagagatatggaagtcaacaattggcataaggagcttacatatgatgagtgggtaccgatcactgtatctggtgcacgtccagctgctcgctacaagcatgctacagcagtagttgatgaaaaattatacattgctggtgggagtcgtaatggtcgatacttatctgatgttcaggtttttgatttaagaagtttgatgtggtcttctctgaaactaaaagcaaatgttggaaaagatgatgacgatagctcacaggagattcttccagccacatctggtcacaatatgattaggtggggggagaaact

SEQ ID NO: 4838 - DNA, 721 bp, Glycine max
  Clone ID: PAT_MRT3847_104376C.1
tcaggcattggcccttttacacagtagtgaacctgttcctaaaaagtcaggtgctatgagaagttttctttggaaaattgatactattcttccccactactgtcctcctgcctcacggttgtcttgtctcttgggaatgatttggcagtcaagggcaaaaacaacctgaagttaatgttggtgattttagtgctggttcatatgcaacaatccttggagcagagatatcacggagggtaaagcaggttcccctagcattcttcaaagcaactccttcctctttattttcagagactgattttgctggttggactttcaaatgtgaagaaacccccaaaatgatcaatgacaacaatgacagcactaaggatttatcgtaacatgaatggtgttctgtgaaatgacacaacagagtgctcgccatcttggaaatatgtctgcttgttcttgtttgatttgtttatttttactcgaggaaacaaatcatataggaagagggttttgggttggggggagcgcgggacatgctcgagatcccttgtggctcactattggaacataagcttaaattaaattgaagttttatatgtaacagttagaagataagttttgcccctttctttttactgcagcagattaatatgttcccccctctaaatgggaactaaatatttggaatgaaagttttgccatccattatcattttatccaatttgacttt

SEQ ID NO: 4839 - DNA, 593 bp, Glycine max
  Clone ID: PAT_MRT3847_104377C.1
agagcttcttgccataacgtttgtgctccgacgacgacgtatccattgagatctcgacggtggctttccatccgcctccttccaatctcctcctcctcctcctccgcatcagacgacggcgtttcgagatctgacatctctctctcgtaacagttaatcctgaagtgacaatttaaaataaaaggtgatttgaaacagttctttccttgtctaaaagaatactggacagatatggaagtcaacaattggcataaggagcttaaatatgatgagtgggtaccaatcactgtatctggtgcacgtccagctgctcgctacaagcatgctgcagcagtagttgatgaaaaattatacattgctggtgggagtcgtaatggtcgacacttatctgatgttcaggtttttgatttaagaagtttgacatggtcttctctgaaactaaaagcaaatgtcagaaaggatgatgacgatagttcacaggagattcttccagccacatctggtcacaatatgattaggtggggtgagaaactgcttcttcttggtgggcattcaagggaatcttctgctgaactaacagttcgatacattga

SEQ ID NO: 4840 - DNA, 1566 bp, Glycine max
  Clone ID: PAT_MRT3847_104378C.1
gatggctcttagcagcctttttgtcctaatgacccagtatggattggaatacccaaatttctatgaaaaactatatgccctcttagttccatctatcttcatggcaaaacatcgagcaaggtttttccagcttcttgattcttgcctcaagtcacctcttcttccggcttacctggctgcttcctttgcgaagaaattgagtaggttgttgctttcagttcctccttcaggggcattagttattacggctctgatacacaatattttgcgtagacatccttcgatcaactgtttggtgcaccgggaagatggtgttgatgaagggaaaggggatcatagaacagatgaaggaatggctactaactcggataatgcgaagactgttgccatgcccagccagaaatcaggcattgaccattttaacagtagtgaaactgatcctaagaagtcaggtgctatgaggagttctctttgggaaattgatactattcttcaccactactgtcctcctgcctcacggtttgctttgtctcttgggaatgatttgacagtcagggcaaaaacaactgaagttaatgttggtgattttagtgctggttcatatgcaacaatccttggagcagagatatcacggagggtaaagcaggttcccctagcattcttcaaagcaactccttcctctttattttcagagactgattttgctggttggactttcaaatgtgaagaaacccccaaaatgatcaatgacaacaatgacagcactaaggatttatcgtaacatgaatggtgttctgtgaaatgacacaacagagtgctcgccatcttggaaatatgtctgcttgttcttgtttgatttgtttatttttactcgaggaaacaaatcatataggaagagggttttgggttggggggagcgccaggggacatgctcgagatcccttgtggctcactattggaacataagcttaaattaaattgaagttttaaattaatggtttggatagaagtatgatacttgatagaacattatggcggaagttgatccatgtaaccgaccccacctagtgggataatgcgttgttgttgttgttgttgtatatgtaacagttagaagataagttttgccactttctttttactgcagcagattaatatgttccccactctaaatgggaactaaatatttggaatgaaagttttgccatccattatcattttctccgcaaagaagaaaatgagctccgggaaccaagaattatctgagaaatttgaatacaaggaaaataaagaggagcaacagaagctagttaagttaagccagaaggttgatatgtctacagaggattctttgcccaaaaagaaaaatgatcacagaaaacagttgataagtgataggaagaaaatcaccagtgccaataaaagttttctacaccaagctaagcatatgaagacggatgaagacagcacatgcatgccatcacaatctacggtatccgagaatcatcaggtgatagctaacagcaacatagacgtgaatgcaaaaacaacaaatgagtcgaactt

SEQ ID NO: 4841 - DNA, 1034 bp, Glycine max
  Clone ID: PAT_MRT3847_104379C.1
gctttctgattcatcctttgacaatcgaggctcagaaccttctatgtcttctagtgaagcaattcaaaatttcagagtttttgcagcaacatggaatgtaggagggcaatgccccactggaaaccttgatctgaatgattttcttcaagttcgaaacgaaccagatatgtatgttttgggctttcaggaaattgtccctttaaatgctggaaatgtgctggtattagaggataatgagcctgctgcaaaatggcttgctttaatcaaccaatcactcaatggttcttcagatttggcttctaacgcgatctagaactaggcgtcttttggaggcccattgttctcacaaaagccttctttgaagaagattaagaaaactttcaagaaactaaatggaaagaggctaagaagttgtaactgtgttcttgaaatggaaaggaaggctggtaaggatttctgttttcgctgccaagaatcaaacttcaattcagatgattcttccaccgaagaggaggatgagaacttcccaattcctgttgcattggctactagtcagatgaaatacagtcttgttacatgtaagcaaatggttggaatttttgtaagtgtctggatgaggagggaacttgttcagtatgtaggccatttgagaatatgttgcattagccgcgggatcatgggttgccttgggaacaaggggtgtatatcagtgagcatgtcattttatcagacaagtttttgctttatctgtagtcatttggcttctggagagaaagaaggtgatgagcttcgcagaaaccttgatgtcatagagattctaaagaacactcagtttccaaggatttgcaagacaccacatagtaggatgcctgacaaaatcttagatcatgaccgaatcatatggtttggagacttgaattacagaatttcattgagccatgatgatgcaaaaaggcttgtggaaaagagggactggcctgctctttttaacaaggatcagcttaaaatggaaagggagccaggtcgggtattca

SEQ ID NO: 4842 - DNA, 302 bp, Glycine max
  unsure (1)..(302): unsure at all n locations
  Clone ID: PAT_MRT3847_10437C.1
cctacgcgaccgcccacgcgagcgggngctatccagaggaacgatcgggcaacggatgggaagaagagtcgagacaggagagggaaaagggtcctaataaacgacgagcagagcccacctcatttgcaccaaacgccgaaacggccatgacaatcgacgagcacagtggaggccaggaccaagatttggtgatagaggcagacggccaggcaacaagaagcatcgacactgagcgagggaggctaagaccacacgagcagaggactgtggaggccattgttgaggccaagaaaggtcctctt

SEQ ID NO: 4843 - DNA, 635 bp, Glycine max
  Clone ID: PAT_MRT3847_104380C.1
ggcaggagcttcgtgatggtctcttgcttagttggatcatagtaaacaagaaaataaagcaatctgctaatcttgcaagctggagccctttagatggacaaaggcattggcctacagacaaggattttgtctttcgttttggatctgttctctctgccaagggcattcttccttctgaagcagtgcagtgcatcctcattatgaagtttagagtggttcacattgaagaagagggtgttcaaacaaatcttaaggcaacagagctgagtatgcagttggaagacatggaatgtgctcatgttaatgggaggaacagtttgcttattcttaaggaagcacttagctgccgaaggagcaacaattttagtgaagtacttgaatcctgtcttatgtactcaaaagtgcaaaataagttgaaagaggagaagattaaaaacgaaagtaggttggacacactttgcattttaagtggcattgttgctgtaatgacattttggtactatgttttgtgatatggtatggcaatgttcgttttactggaataagctaatgttgatttagcagatgatcaaatttggccctaacataagattccgaataaagtaactaattgatgaaagcttcctttggtttgt

SEQ ID NO: 4844 - DNA, 739 bp, Glycine max
  Clone ID: PAT_MRT3847_104381C.1
gttaatggaaattgtcaattctcacaagtcaggctctgaaaattcctaagcttggagtggcagatagaactaaataaataacactcatgttgagtttaccaagaaactccagtcagtccagggacaacttgtggctgagagatcaagatgctttaacttggaggccaaaattgcagaactccagaagttgctggaatcaatgcagtctgtggaagaggaggtacaggctcttcgtgaaaagaaatctgctctggaccaggagatggagcttgctgcaacagctgagagcaagagttctggttggcgatggtttggtgggagtgagaaatgataaaatatgaggccatgggggcaaatgtcaactaaaaatgatttagagttgagtctgagaaacctcaactggttatattctattattgtagttcatgcagaaaatgacatttccttattacagaactcttacggtgtcatcttttgagttgaaatgcatgatggactccaattttgaagaactgaagtctgaaaccttcaagagatggggtacacaagttttttttgtatttgtaatttataccttgacaggtttacttttgactgattcatttcatgctcaagtgtccattaaattctataggatttacatttcattttattcatttgagtatatattggcatcttaattattaagttctttactatattatataataacattaaaaaaaaataataaaataaaatc

SEQ ID NO: 4845 - DNA, 550 bp, Glycine max
  Clone ID: PAT_MRT3847_104382C.1
attggttcctgtatattaaaatggtttctcatgaaaagttagaacttgaagtccaataaatgcattgttttggacaaggtgctatactaaccacctacaaaattggtagcagctctaaacgaaagcaaaatagaaataagaacttttgaaatactttgatggatatggttctgtctctatccatctgtgcatgtgttgtctggattttgtatatggctaggggccatgttcactgttgaaaatgttgttatttccatatatattaatatattggaagtttctgatcacaaaacatagctttggctgctaatgggtgagaccatttgagttgttttatatggctgaatatggaacacattatactttagtaatagttactggctattgtttgtaggtgtcagagaagctcccagagtcctatgtgtgggcaacctatcagcttgagggatgctaccagtcaagagctgcttgaggcagcacagctggagaggagcttgagagatactccatcaagaaatgctgcgatttatcatcatccaacacttggtga

SEQ ID NO: 4846 - DNA, 137 bp, Glycine max
  Clone ID: PAT_MRT3847_104383C.1
gccactcaaacgactaccattctcatcttggtgagcttaatacaccaatcggggttagggctacaaattacggaaaggtacactcatttgattctatggcgactatcacaatttacattgaccatggcctctttgat

SEQ ID NO: 4847 - DNA, 575 bp, Glycine max
  Clone ID: PAT_MRT3847_104384C.1
aatcttatctttaataatttgattttccctacctatttttaaacctattttattaataaaaataggattactaatatttttttcaatcttaggtttaggagtttatccaattttaatagccggatgatcatcaaattcaaatttttcattaattggtggaatacgagcactagctcaaacaatctcttatgaagtttcgttaatttttattattttaagaaatataattttaaataattcaataaacttttttaaactaatagaagttcagaaaatatttgtttatatcttttttatatttaactttctgttatgaataatttcatgcacagcggaattaaatcgaacaccatttgactttgctgaaggagaaagtgaattagtttctggatttaatacagaatataggaggggaacttttgctataatctttatagcggaatacataataattttgttttttagaagattttcaacaattatattttttggattttacataagtgagctaaaatatttcattaccgtaatattatttatttttttttttgtttgaatgcgagcaacattaccac

SEQ ID NO: 4848 - DNA, 1283 bp, Glycine max
  Clone ID: PAT_MRT3847_104385C.1
agaaacccgaaacccttcttcactctgcaactttcacttcacacaacaatgatgatggcaggtgcagccaaaaccctaaccaatctttgcccctctttcccattcccaaccaaaccccaaaaccaactcaccactagccacgctttcccttccactcgcctccgccaccgcgccatttccgcggtggcgaacgcggcgcaacctccactcgccgccgccactgccaccgagggtcagtaccgagtcgatgtgctctcggagtcgctccccttcatccagaaattccgcggcaaaaccatcgtcgtcaagtacggcggcgccgccatgaagtccccggagctccaggcctccgtgatcaacgaccttgtcctcctctcctgcgtcggcctccgccccgtcctggtccacggcggcggccccgagatcaactcctggctcggccgcctcaacatccccgccgtcttccgcgacggcctccgcgtcaccgacgccgacaccatggagatcgtctccatggtcctcgtcggaaaagtcaacaaaaccctagtttctctaattaacaaggccggcgccaccgccgtcggcctctctggcatggacggccgcctcctcaccgcccgccccgctcccaaggccgccgacctcggctacgtcggcgaggtcgcacgcgtcgatcccgccgtcctccgctccctaatcgacaccagccacatccccgtcgtcacctccgtcgccgccgatgaatccggacagccctacaacatcaacgccgacaccgtcgccggagaattggcagcgtcgctcggcgcggagaagctgattctgctgaccgatgtggcgggaattctggaagatcggaacgaccctgacagcttggtgaagaagattgacataaaaggagtgaagaaaatgatggaagatggaaaagttggtggtggaatgatacctaaggttaattgttgcgttaggtccttggcgcaaggggttattacagcgagtattattgatggtagggttccgcattctttgttgcttgagattttgactgatgaaggtgctggaactatgataactggataagtttatttatttatggtgtttggattttttcttttcaatcaagccttgagttgaggttgcattgcagcacttgttttgttagagattggtgattgtttttaagtgcgtgtaatgtgagagatggttgaattgaattgaatgtttcagaaattgcttggattacatcctaaagacaagaaaattgggataatggattccggaag

SEQ ID NO: 4849 - DNA, 213 bp, Glycine max
  Clone ID: PAT_MRT3847_104386C.1
cgttcctaaggtaaggaaacaaaccggcaaggcaagacaactccctctttatgcctaagttttgaacactaatgtaaggccaatcttttacctagcacactaataatacgtcctcctttgaggacaggctaatccatttttttctatccatgggaagagttgacttggtgccaaatctgacaaaggacacaaccccgagggtggtgggaaaaa

SEQ ID NO: 4850 - DNA, 609 bp, Glycine max
  Clone ID: PAT_MRT3847_104387C.1
aacaacaacatggatgccacagttaccacaaaagactacaccatccccttccgaatcaaccttagctgttcttctgcagacaatcatgatgatgtctcttcaccaacatctctccgtagcagaaccgagatggacttcttctccaacaagaacagtaccaaagatgatgacaacaacatcgttgctgcggctggttctgcctctctccccgacaatgatcatcattccatctctccacccacgttggatttaaagtaaacacttgtctgaatcttcttactaccaatgctagtagcgatcaatctatggtggaagatgagatatcacccaattcagaagamaaagaaactaagaaagagatggctgatcttcaaggtgatcttgagagaatcaaaagggagaatcaaaagttgagggacacgcttgatgaggttaacaccaactacaacgcgcttcaratgcactttatgaatatgatgcaggagcggaagggcgaggaaggtgaaratcagcaaraagtgtctgatggcaaggttaaararaaraagcagggtcagagtggtggtggggtattggtgtcaaggcagtttatggatcttgggttggcta

SEQ ID NO: 4851 - DNA, 207 bp, Glycine max
  unsure (1)..(207): unsure at all n locations
  Clone ID: PAT_MRT3847_104388C.1
gcctgcaccggggcggccggaattccccnacccacccactcctccaaccacacattctttttgtctatgtaaaagcatagcaagaacacctaacggcgtgggcggacaacataactcaagagcatctctcaacatatcatacttgactaaaacagcaaaaaggcatctcttgacactcatcttaaaaaatcataggaacaactgtat

SEQ ID NO: 4852 - DNA, 433 bp, Glycine max
  unsure (1)..(433): unsure at all n locations
  Clone ID: PAT_MRT3847_104389C.1
ggagagaactagtctcgagtttttccttctcttactttttcccctccccggccagtaataatcacttaataaatattgtacaatttttctctcctcttcttaaaagtatactctcttgcatgaaanctggatattggtgtattccccatgagatgctctttcttttccaacgacgaacagcttgttgcagcatgcttcatcatgacgacgaaaccctagtctagtaagagaaaaaaagggatgtattaattaannnttttttcttctatttatgtggaagaggaacagatccgtgtcgtgtcgatcattttcctattgttgattactcactccttggaagaaatcccctagnaatagtcgaattaaattgcctgtcccgtctccagcttaatttgggggaaagaagggggtatttccttaatttttggttgga

SEQ ID NO: 4853 - DNA, 222 bp, Glycine max
  Clone ID: PAT_MRT3847_10438C.1
cgattattaataacacgcaagcgttttacaagaagaggaacattacatagtcactttcaaacaaaatatgtaatgagccaaattagattttcctgcataagaaattgtcttagctcaacaaaaaacattttcttttaaaaaaaatagcctaaaaaaagattaacttgactcagtatatccacagaaatatgctaaaagctcaaacatatcaagatactacaa

SEQ ID NO: 4854 - DNA, 438 bp, Glycine max
  Clone ID: PAT_MRT3847_104390C.1
cagcatactattgcactctcctatctatctgtatattttcttccaaaaaggataacgaattttatacgtttacaaatgtgagaagcgccatgtctgatctatgcgcgcattgtctccgaagcaacagacaggtgcatgccctaaaatcgctaatcaggagtgcaagaagagtgccatcgccatagaaccgaaggcagagatcgaggctacttcctctccaagattgattctattctctaggaaaaagctattggatgcgctataagtgttgagaaatctacatgtgaagctattctgattatcaacttagacaacgcacttgacagggatactactcatagatatggtcctaattctcttaaccatcatatgttgcctaggacccaggacacaccaggtgcttgcgttgtcaggtactaatgtgatctggaactacac

SEQ ID NO: 4855 - DNA, 422 bp, Glycine max
  Clone ID: PAT_MRT3847_104391C.1
aaaaagaaaatcaaattttatccatttaacatggactccccggatctactaccaagccccaatgcaatcctgcttcaatccaactttttactaaacaatcataggacattgaaacaaaggacatttcgaaagaaaataaacactttgatgccttgctcaagcattgcgcggaccctaattgttagaccatacagacggatgaacccaacaccatcaactcgatcatatttctgcccactctcaaaggatgaaatgacctgcctatgcaggttgaagggactctttccactgagaacagtgacagaacctttccacaatcaccaggtcccagaatctgatgctatctctgtgaccaagtgcataaaggcatccatatactccccattcggatcaaaccagctgccaggatatactatctctgc

SEQ ID NO: 4856 - DNA, 331 bp, Glycine max
  Clone ID: PAT_MRT3847_104392C.1
gccatcatcacagacccaccctggaccgagagggaatggatatgcccctagcctcgactgcgcacttgtcacattgatgccaagattgctgaactcatgaccgacattgacaggcgatgcggctaagagcttgagaaggagcccaagattctgacgaacggtgatgctggctaagctaacacgatgccataccaaacccatgggtgctgcaactttttccgagtattcttcacttggacagtacgctgatagggacacgcgtccaactgttgccgatggagtcatgaggaacgttgctaagaaggatcctaccggagccaaggttaccaag

SEQ ID NO: 4857 - DNA, 764 bp, Glycine max
  Clone ID: PAT_MRT3847_104393C.1
ccacgcgtccgcccaatatcccatccagtgtgactgcaatcgcaatggattctctgcgtgtctatgcgtcttccattcatctctgtccttctcggaacagacaacataaccctagtaaccatttcagattcctccttccatctatccctccccctccgcctcaccttcgccctctccatctccgattgcctccgcttatctccgctgtctcctcctccccccaaactcaaactagggacgaccaagaccaagaacaagaacaagaacaagaacaaggaaagaacaagtccctgaagaacaaagttcgtttgcaagttcgattagatcaccaggttcaatttggcgatcacgttgtcattcgcggatctaccaaagaattaggctcctggaccaacagtgtgcccttgaattggacccaaaatggatgggtgtgcgacttggaatttgaacaagggcaggggacccttcacattgagtttaaattcgtcaccgtcaacaaggacgacactttagtctgggaagctggagaaaacagagtgttgaaagtgccaggggcaggtaattttgccaccgtggctacgtgggacgccactcaagagactttggagctacattctttggatgatgatgaacaagtacaagatgcagatattaatgagtctgtttccgaatcagaggcaagtcccctttgtggtcagtggcaaggtaagcctatttcattcatgcgatccaacgagcatcggtccatgaaacagaacggaatg

SEQ ID NO: 4858 - DNA, 230 bp, Glycine max
  Clone ID: PAT_MRT3847_104394C.1
cttcgccctcgtttactgcaccgctggcatctcagggggacacataaatccggcggtgacatttgtgctgtttttggcgtcgaagttgtcgttgctcagggcgattttctacatcgtgatgcaatgctttggtgctatttgtggcgctggcgtggtgaagggtttcgaggggaaaatcaaatacggtgcgttgaatggtggtgctactttgttgccctcggttacaccaa

SEQ ID NO: 4859 - DNA, 336 bp, Glycine max
  Clone ID: PAT_MRT3847_104395C.1
tacacgcgtcagaacacgagagaaaagaccacataagggacaactacagaaggggacgggggtgagaagacaacagaagggggagtgggtgccgtcatagatgatccaagacaaaaaacgggtgcaagcgaagtcaaagaagagagtagacgcacccaaatctaacgcaggggccggcgttctacaagcgaaagacggaagaaaccttggcggaaccgaccacagaagatgaaagcgcaggccgactcaccagctggacaagagcagacaggcccgaacgaaagacgaccaacagctcaaaggcggaacgggaatgggacgcgcccaagccggaga

SEQ ID NO: 4860 - DNA, 451 bp, Glycine max
  Clone ID: PAT_MRT3847_104396C.1
tgccggggaaaaattttgggcaataggcccacgtattgtggtccactggggcagtgaggtggtcctcaaggggttctaaggggccctttcctggcataattgcctaaacaaaaaatgcaaatctggggaacttggccaacctaccgttcttgaggtttttccccttaaactccgcaaaggccttcgggatgtcaccaagagccaaagggacaaccttgccacctggatagatgggatcacccacctctccaagaggccctccggaaaaacgtcaaccctcaaatgtacccataatgatgacttgggaggcccagattgcaaaaaagctttgtgcatggatcacgcttgagttgcccaagtactcaagccctccactactgaaaatctgagacccagcctggagcatcacggtctctcccacctttacttctttgggggtcaagagtcccgg

SEQ ID NO: 4861 - DNA, 373 bp, Glycine max
  Clone ID: PAT_MRT3847_104397C.1
gaaataccgtatgtctaaggtacgacttacaaattttatgggcttttacagaaccaacttatgatgacacatcattgacccaattctatgaattccttgctctttccaaaaggactaggccgctacagtggcttggctaaggtttgccgaagacaaataatatctcttcccttttgaccagatttcatgacttcttcccgggggtgattaaacaataagaaaactgaggtccaaaacactattctcaaagaccgacaattgattttctaaaggcgtagaagcacatcttatgcacggttaccacgaatattgtttgccagctgtatatattttggcgtaatcttcacacgcttggcgtgaatggggcacaact

SEQ ID NO: 4862 - DNA, 299 bp, Glycine max
  Clone ID: PAT_MRT3847_104398C.1
ccaggcgtcagcccacgcctcagcgcgagacgtccatgctgctgctacaagactacacattggggcaatcatcactgttccactcatatgtcatttcgcgtcatgatgctgtcgttcttcgtctgcatcgattcacaccactctcacagcgtcacatacttgcaggggactcctcattagatattcgatcaacattctgcaagatagcgtacgcagaggcacatgatctgaactcttctgaggcattcccgctaatacgagttgcaaatcgagtgattctggttcagcaacatcatagc

SEQ ID NO: 4863 - DNA, 256 bp, Glycine max
  Clone ID: PAT_MRT3847_104399C.1
attctctagaagacatcttgtactcctctttgaataatgataggactttgcttgattttagatatgtctctgctctcaaatctcataaaccttaacctctccgatatcaccgcgaaggtgatcgcagagtacatatggatcggtggatcaggaattgacctgaagagtaaatcaaggaatctcccatgaccatttagcgactcttcagagctgcccaagtggaactatgatggttccagcataggtcaaactcctg

SEQ ID NO: 4864 - DNA, 431 bp, Glycine max
  Clone ID: PAT_MRT3847_10439C.1
ggctcgagctgctgaaggtatgaatgctctagtcatagccggataggccattagcgtgcatacatgtaactggcccgtctcaacacgttcgtacaaacggacgaaccggaattcgagactaccttcaccacatatatgatattaaaccaaggcaataggccctagatcgtatacactgcagagactggcggattacttatattgcgataggacgttctatgacacagttacactggccatgggaaccctaacttctactggaaacgaccaggcatctacccatgcatactatgtggtcctacagcgaccgacacatctcttgatccggtcgacgagtacgagcctatgcaacccgtgctgtactaagacgcttccggcgcgagacaacgaaactgtgcctagacgctgacgacgacctcgaggagtccttg

SEQ ID NO: 4865 - DNA, 1627 bp, Glycine max
  Clone ID: PAT_MRT3847_1043C.1
ggcacgaggaaacaagagaaactggttgagcccggaaaaaacaataacaaaacaaaacgtggaggataaaaaagagagaaggatcgcttaaacgtctctctctttctttgaggcttctttccctctcttcgtcccttgctctgtgtcgccgtaacacaaaaagggaagagagagaaagaaccaccccacccaacaacagcttttgttcttcacaagacatagcttcgtgtgtgtgtttcttttcttccttccagcttggaaagactgaagtctctgtctttttcaggttttgggggtgttgttgaagatgttggtagcaaatagctttgatctatggcgaaaggacggttttttctctgcggcggaagaggtgcaggaatcagctgatataatggaatctgcatacagggcatggttgagagagaagagagaaaggtcaactcctgaggaattaaatgaactatgcagagagctgcaaactgctttaggtaccgcaaaatggcagttggaagaatttgataaagccgtcaggctaagctaccgacatcacggtgatgacaatacatccactaggcataggcagtttatttctgccattgaaagccaaattacccaggttgaagcagcactgagggaatcttacattgaggaaggtaagcaaccacttcggtgggtaaatcttgatgaagaagagcgagatgatctggctgcctttctatctggaacttgtcagaccacacaaagcactaacgatgaatacatggaggtgaaacaagccaagaaagaagataagattgtagatataaacactttccgcaaccgggatatatctgctagtgaaaagtcttctaaggatgtcatttctgttaacaaggatacagattatgtgatagaaataaaagcagatgctgtttctagaagtaatgatgatgtagtttctcaaacagatagaacaactagtacaaggaaaacatggagtccacctaattatggtgctttaaaaattgtaattgctgatgaaggtgagcagagagataaacctacacggactgttgatgccacccctaaagaaaaaggattcagaaatctattttggaaactaaagtttgaagagtatcctcaggccatgcgagtagttcatatgttcaatcagcgttttgggcgcataggtatatgccagagccagaggcagtttcaaagtcccttgcacttgcgatatggctgttctgttcaagttacacttgctctaatgttgaccatttttctcattgttccctttgtactttattcaacttgagttaaacggctgcttcacgcaaagagggctttacttgtcttggtgtatcgacaaggtcactgatcatttgagatctcagccactgccttcaagtattggtgggaaaagttatagctaaaggcacagtgagtgccaccttctattttgtcgttgttgagattaagatgaatttacctatgtgagtgtggatacagataggataaccaacctcttcgtcctacagggacacctgtctattttagtttctcagctattaaaatgtacatacattcatccaatatttaatgcaagttccgctttatttggttgccccccaaaaaaaaaaaaaaa

SEQ ID NO: 4866 - DNA, 238 bp, Glycine max
  Clone ID: PAT_MRT3847_104400C.1
atttgcaacacaacagaaaaagacaacacagagagaagcgtcttaataaacgctcttctctgaaaaacctgatttcttctcttctgctcttctctttcgtttcgatcttcgatctctgagaatgatacagtgcatttgaatccacatcggtcaggcgggtattcaggtctgaaacgcctgctgggagctctactgcctcgaatacggcattagcctgattcgcagatgccaagttata

SEQ ID NO: 4867 - DNA, 338 bp, Glycine max
  Clone ID: PAT_MRT3847_104401C.1
tttttgcaatgcaatcagaagttctgtattactgggggttttaaccaacctttacaaattacatattgaagttattattggacttaagcataatgaaaatataatctacacaagtatcacagtgaagtaaaactaatcctgtttacaagcctcggaaaacacaaagatggaacttgtaccctgcaaacataatggtcttaggatatggaatggcgtcgattcttatcgggttttacgtgacctttgagaagagttgtggcagcattgccacgtgaaaaaggagaaagacgaccaagctttttggacacagagtttatgaatgattttctaggcagagg

SEQ ID NO: 4868 - DNA, 263 bp, Glycine max
  Clone ID: PAT_MRT3847_104402C.1
aaagaatggaagatgcaaccatcttggttcctttcattaatctacattatcttccttacgcatcattaaatacaacaggccatgaaaatgtatcgaatttgcataaaaatgtgtgcaaacattataatttaatttataggataatttttaacgaacgtgtggattaatttatgtgtaattgttttaacttaactaattgagtataatggaataaaatggccacttgtattgttaaaaaaaaaaaaatacaaacaaaaaaaata

SEQ ID NO: 4869 - DNA, 184 bp, Glycine max
  Clone ID: PAT_MRT3847_104403C.1
ggtccggattccgcgtcacccagcgtcgaaagtttattcttactgtgtggctaactttacagctttgatgttgccttatactcatttttacaagtggaaaagtagaattaaggtggtgtttttctcaagtctgcacttttatttatgagaacattattttgatggtatagaacatatgaaagac

SEQ ID NO: 4870 - DNA, 638 bp, Glycine max
  Clone ID: PAT_MRT3847_104404C.1
ctcattcacattttctgaccactgtaatcacaactccactctcaaagatgaggatggttggccaatataacactgattacgagcacgattaacacagacaacgatgcgtgcggaaacggtcttaatctggccgggaccctaagaacggttgcttatccttgtcagtgttgccgtacaatgacggatagactaaatgaaacttcacatactttaatcaatatgtgttacaaattctagggaaaggacttgaatttctggccttcccgagcaatgagctaggcgctcaggagccattatctaaggcatagcatcgtggtattagcttgtactcgatacaaagctgactttgccattatcgacacggagaatgcgaatggagacgatgctgatacactgtacaaggttatgccatcaaactgaggtgtactcttcaccgatactatcaaatggaacttgttcaaattccctggtgataaggacagaaatgtcccagacccatatgcacccacaagttctactattaccattgagaaagacatcaagaagctgctaaatgcatgaatgactggagttgccacttaatgaataatgatgattaggatatcatcctgaataatgtactgcagatcagatattag

SEQ ID NO: 4871 - DNA, 370 bp, Glycine max
  Clone ID: PAT_MRT3847_104405C.1
taccggtacggaattcgcgggccgacccacgcgtcaatagaggcttcgacagctgcaaaaaaagggaaggtagggaatctcgactattgtaaccaacaaccttagagttactgagcatagggacaccattccaaaccatctaggcatcaccgattcctcaatgacaacacgcactcaccccctcttctatgtggtctccgaccgttttcaacaaacagaagtcactgcagatccattctaacaggcactcgctgaagaatatatatctcatggatatgctaacatttgttactcacccttcttgatgaagtcaccatacttcaaaacttagatgaagtcgcttcagacgaactctttactgacaccactg

SEQ ID NO: 4872 - DNA, 689 bp, Glycine max
  Clone ID: PAT_MRT3847_104406C.1
tttcagaagccccgatagtttcaccccctttctccaacttccattaacattctcatcttctccgtgggcgctctctgtatcacctccgtcggcactgttcttcgatctaaagttgttcaaccacagcagtggcagattgacagtgcaaccctcctattgtttcttcttttgagtaagttaagttcactggttcaagtattttggcacccccaaggtgggacctaaaggattaggatttccatggagactgacagacctgacggccggactcctaatcaactgagacccctggcctactcgtgttccatcctgcatcgcgcccatggttcggccagttgggctcaaggagaaaccaaagtgcttgctgctgtttatggacccaaagccggaaccaagaagaatgaaaaccccgaaaaagcatccattgaagttatttggaaaccgaagactggacaaattggaaaaatggagaaggagtatgagatgatattgaagaggactttggaaagcatttgcattcgaacaatatatcccaacaccaccacttcagttatagtccaggttgtccacgatgatggtgctgtatcctacttaaaaatccagttctaatatgattaatctgcatgtgctgcacttgtggatgctggaaattccctaaacatcttgctgttgcatatgttgctctgtac

SEQ ID NO: 4873 - DNA, 391 bp, Glycine max
  Clone ID: PAT_MRT3847_104407C.1
cacgcgcacgcaagcttggactctgtatagcgctcgcgcgccactgcaatgggcatggcttagagcgccccgcgctggcgctgtcggcatcgccagttggcgcgaagggaccaccgccggatcttaacgccggtaaccttctcttacacggacggtcctagagcacgcccgggacgacagattgttgctgccaccagtccttgcgctcacgggggctcacgaccaccgtcacctacacacaacctaaagcacaaagccggcccaagagaacgctttcccgtcgcgcaccggcgggctccacgtgccgcacacgcgcaaagcttcctgcgcgccgccatgacaagtctttggacgccaccgaccaacggaggccggaggaactacacccaca

SEQ ID NO: 4874 - DNA, 1348 bp, Glycine max
  Clone ID: PAT_MRT3847_104408C.1
tttcagaagcctcgatagtttcaccccctttctccaacttccattaacattctcatcttctccgtgggcgctctctgtatcacctcctgcggcactgatcttcgatctaaagttgatcagaccacagcagtggcagatggacagtgcaaccctcctcgcagcaaagctctcaactttactttacgatttcgctacttccagttccatcagtggcactcttgtttcttcttttgaggaagttaagttcactggttcaagtattttgggatccacaaggtggggacgtaaaggattgggatttcgatggagactgacagacctgacggccggactcccaatcaactgagacccctggcctgctcctgctctatcctgcatcgcgcccatggctcggccagttgggctcaaggagaaaccaaagtgcttgctgccgtttatggacccaaggcggggaccaagaagaatgaaaaccccgaaaaagcatctattgaagttatttggaaacccaagactggacaaattggaaaattggagaaggagtatgagatgatattgaagagaactttggagagcatttgcattcgaacgatatatcccaacaccaccacttcggttatagtccaggttgtacacgatgatggtgctcttcttccatgtgcaataaatgcagcatgcactgcacttgtggatgctggaatacccctaaaacatcttgctgtggcgatatgttgttctgtaacagatagtggctgtattatattggacccaaccaaagaggaagaggagaaaatgaaagcatacatcaatttagtttttccaaatacaattgtttcagtcctcccagagagatcatcgcaggtgggtagtgagcctatggcacatggaatcatgacatctgttacacagggtgctatgtcagtggatgattatcttcactgcctagatcgagggcgtgctgctagtgcaagattgtcggaatttgtgaggaagaacatagggccgaaatctacatgtgaggcatctaaagccgggtgattttccattcattttggatggatgtagtttacatatttgtctgttttttgcctgcaagggttggggaggatgggatttctctgcaggtagtgtcgcatatctgtcccattcatgaaaattattgttggtcgataataaatttgccaaagccaaactgacctcctggtttggttagttctttagtagaagactatttgttaatatatttgtgcatttgattacacaaaaatgttactaaaaattatttgatttttataatatatttcggtcataaattattttttcattgaaaaaaaaaaaaaaaaaaaaaaaa

SEQ ID NO: 4875 - DNA, 486 bp, Glycine max
  Clone ID: PAT_MRT3847_104409C.1
cctccgccccatccccaatccttattgggcggggggacccactcgtccgaccgccgctcttattactccacataggggaaccacaccatgctatccatacaagcggtggcgaggcacaatataaaagcaaaataccaaatacttctacactcccacttctaagcaaactgttcagaattgcaccctatgaaacactccccccaatccattattacccaatgcttcatttatctttacaccaacaccttgcagtacgaaaaatacacatccttattgccctggaactgttgctctttgtgtgactacgaaatacccaaatagcactgagctcctaatcaacacgctttctatccagaggttggttcgtgaaataccccacgatttcaatacttatctccttacccacacctatgctgtgcttgcatagcaagatgctgctgacgcataccttgttggtctcttttaggacactaactcttgttccat

SEQ ID NO: 4876 - DNA, 370 bp, Glycine max
  Clone ID: PAT_MRT3847_10440C.1
gacttgttacacatcatatttttgggctaatgtcaaggacacgcaggggaagcaaataaaaaacgaagcaactgacacaggcaggtaaaaggctgacaacaaaggaaaaagtgttagaacatttgactctcgagaaagagcaggcaggcaaggccatccaccactggaagggaagagcaagaatctgatgatcccaagacacaaaaggagggcacataaaacccatagggatgccacagttgataaacaaactggcccatatgcccaagagaccggtctaacagcaagagggtacaatcatcataagctctgcctgaatattcaatatctaagcccttgatgccccttcggtgcaatatattcacgggaa

SEQ ID NO: 4877 - DNA, 362 bp, Glycine max
  Clone ID: PAT_MRT3847_104410C.1
aaataaattgattatatttcaacgcagcataaatcataccgaaaattccatccctggatgtataaatcatactgtcatacagaaaattccaaccctaggtgtataaatatagcataaggatctaatcctcaaaaaccggttaggctcatgatagctcaactatccttggacgttttttggaatgaccatttccctttgtttttccatgaatattatccttactggaaatagatttttgaacaagagacgaaggcttttcactgttgtttccatcgtctaaataatcatcactgttattaatatcatcatcactgtcattatcagtactactttcttccaaatctgtttcactaccatcagca

SEQ ID NO: 4878 - DNA, 374 bp, Glycine max
  Clone ID: PAT_MRT3847_104411C.1
cccacgcgtccggcctgggattatcaagagaggctttgagcgtggtggacttggctgccgcctggtggaggccttggaggcggtgtaggtgggctaggtaatggagacggtggtggcattggcggtggagcgggtggtggtggttggtttggttatgtgtgttgtggggtgttttggttgttttttttgtttttttttgttttgttttggtttgtgtttttgttttgttttttgttttatttttttttttgttttttttttttttttgttttttatttgttttttttgttttgttttggggagggggggtggggggtttttgttttttttatatattttataattttttatttattttataatgttttaatatt

SEQ ID NO: 4879 - DNA, 459 bp, Glycine max
  Clone ID: PAT_MRT3847_104412C.1
ctaacgcgattggtactcagccagctagactcatgcctcaatcgctaagccatattattgtactgttaattgggacatcttatcatcactcatgatgcaatcctaatgattccaacctgtatctatttagagagcggaggctcaatgacgaatataggattaatggcacatcagcgagggtgagcccgccacattaacattcatgcgacggagcgaaacttaggaagattatatactgggaggacgaccatgctagctaaagagatactcccgctgggttgtatttgattcaagagtacaggaatgggtgaacattcgatccagcgtgagccggctgcgcttgtacggaccatacgccttacagtggaggcatctgatggcggagctgctcatggatcggataccaacgatgacgcgcgttcactataaatggaccaactactgaacatgctggagatc

SEQ ID NO: 4880 - DNA, 194 bp, Glycine max
  unsure (1)..(194): unsure at all n locations
  Clone ID: PAT_MRT3847_104413C.1
aangtcangcacgcntncgtaagctcggaattcngctctagcctactagtganctcgttcgacccgggnattaattccggnccggtaccngcatgnntancanctttcccnatagggaggcgtantatagcatgtgctaatcntgggcatagntgtgtcctntgtnaaagtttnntccgctcacaattcnacng

SEQ ID NO: 4881 - DNA, 824 bp, Glycine max
  unsure (1)..(824): unsure at all n locations
  Clone ID: PAT_MRT3847_104414C.1
ttttggggccggnaaaaaccggntcgacccagcgtccgttacttcttaaggtaacataaaaatttgaaggaagattgataagaggactggggatagcattactcatatctttttaacataatataagaggtagagattccctaacaatagtacttactagttagaaaagccattgttaccgttctattatcatgcaaaaccatgaacatcttaactatgaacatgtgcaaaagccactattatttgtttgtcattggttagaatgttagctttttaattacatcagtttgggctcaaaattctctatctctctctctctctctctctcttttttatggtaagaaacttatataatttcactattaatatgaacagcaatacaagttggagcattatcaaaagatttgttcatagattattcatgatgttcacttggactatggtttttttttaggttatcatatacaacttgtaattcgcgttgctgtggaagctctttgattatagcaactccaggtacgtatgtaggaactagtatttatatactggtgtttgatttaaaatcttatatactagtgtttgatttaaaatattatatgcaacacctttaaaaagactacaccaaatataacgttatgatttcaaagggtacctgagatttcgatgatgattgctagactaccttcttatatcccttaacaactccttgatgactagcaaggtctgcaacaatgttgtacaatgaccatagcacaaaggaaccaaatgcttcatatgatcgatgactgaccaaatccgtttatattttgtaaatatcctcacag

SEQ ID NO: 4882 - DNA, 569 bp, Glycine max
  Clone ID: PAT_MRT3847_104415C.1
aacaaagcttccttatatatataaatgcgcatttaacaacatctacttcccagcatcaatggaaacggacttaaaccctatggctgcctgagaattgaaaaatctcaaacttttaccatcaaagaagaaaactgtcctgagcatatcaaactgcaacggaaatgctaccgccgctcaagaacccagttttgaaggctacggctacattacatcggcggactcttctaaatatacctggtaaaacaaacacctaacactgtgcacagataaactactggaaaggaacaagtttttttgaaaccacggtgttgatcacatgtgctagcaaaactgccaaaatgcagtcactttttcttggcggcggcctttgagaccttggcttcggtggggactttattggaaacactcttgatgactccaacagcttcggtctgacgcatgtccctcacagctgaacgacccaggggaggatactgaaacaaagttacacccaccatgggcttggtcggaaccatgttatccataccggcttaaccattctttaaaaatttgggctccttctaaagctc

SEQ ID NO: 4883 - DNA, 868 bp, Glycine max
  Clone ID: PAT_MRT3847_104416C.1
cccacgcgtccccccacgtcggcggccaatttgtttatctttagtaccgcctagtcacaaaacatataccatgtcgaatttgagtttccttcaatttcatagtagcaactcgttggggcactcctcttttcaacccaatagtccaaacccgaacaacaacataaaatcatcaaaacagacatcaaatgtagggtgcaatattcagccaaagtcagaggaaatgaaatgggtgttcgacaagtttgacaccaacaaagatggcaagattaccctcgaagagtacaaagcagcagtgagaacaatggggtggggaatcgaaggcactgagactgatgagtcttttcaggtgatggactctgatggagatggcttcattgacttcaaagagttcatggacatgttcaacgtggaggagagggtgaaagagacggagatcaagagtgcttttcaagtgtttgatttgaatggcgatgggaaaatcagtgcagaggaattgtcacaagttctcaaaagcctaggggaaagttgcagccttagtgcttgtaagaaaatggtgatgggggtggatagaaatggggatggctttatagacttgaatgagtttatgaggatgatgatgagttgcaagaaactcacctaagttccgagaaggtctagaattgcttgaacaggatgcgcggagtgtgagatgttgtgaactctggcttcttatgcattaaaaaaaaaaaaaaaaaagacacccgagtgatcatatatgttttggtgtgatcataggtatttgtcttttcctgatcatatctttttttcttacttttcctctctattttgggttgctagatttgatcttccaaaccaaaagcatccagac

SEQ ID NO: 4884 - DNA, 594 bp, Glycine max
  Clone ID: PAT_MRT3847_104417C.1
atggggatggatgaaggggtggcaagcatgaaaaaaggggaggttgcaatagttggctacaagtcaagaggtgctggtgaggattattcaaaaggaaaagggttccacgaacttgaatatagggagaggaagggtgattttatgtcagtagtgtcacaaacattaacttatgagcctcaaaataattctaatgtggagcagaggaaggtattgaggttagaatctttgaatcaaagtctcaatttgcttggtgatcatattgtgaattataataggaagcttttggtagataaagaaagagatgatgtgatagtggctatggattttggaaagaaaatgggtatgttttatggaggaaatgttgtgaggatgctttcttataatgtgaggaggttaggggataaggtgaaatacaggtttattatagagttagtggtgaaggagaaagtccaagttggtgcggtgggtgacgatgtctccttcacctctagaaatctaaaaatcacttctaaacctacaatcctcttgaaagctgacatttttggttctcttgtgctctgttttatcttctactacatctctcacgctctatgg

SEQ ID NO: 4885 - DNA, 283 bp, Glycine max
  unsure (1)..(283): unsure at all n locations
  Clone ID: PAT_MRT3847_104418C.1
attctcctttattaatttttaatcctttttttctccaaatctaacgggcccctcttcttggcaatcattatatttctcttcactcattctatctaataatttcacattctcttttctttttttcttaccatttactttatttcatctctaccatattacatatccccaaactatttcattacttttccctataatcaattccctcatgtttgctcactctgtaaaggctgtatcncattcttncactcgccggactttcaccgtctgangagaaccaccaaac

SEQ ID NO: 4886 - DNA, 390 bp, Glycine max
  unsure (1)..(390): unsure at all n locations
  Clone ID: PAT_MRT3847_104419C.1
nccacgcgtgcgnccaatcacgcccgttccgctcttctgtctcgaaacgacgtcgtcttggatgaccgcagatctgctgctttctcccattcccttcttcccttcagaggttacacttttaccaatatgcccctccttttaaatccaattattggtagcttgattgctctaatcagaaattgtagatcggttgtggactgggggcttgagctctcatgctatgaaatatggtttcatgctatgtcttgtcttgtgttggtattaactatttctatcggcaaaggttagatgctagtttctctttctggagtttaattagctgttagtttgctaggtgattagtttttgttattgagaggattctgacccatgacctgttcccttaaatta

SEQ ID NO: 4887 - DNA, 376 bp, Glycine max
  Clone ID: PAT_MRT3847_10441C.1
aatacccagccggacgcacgcgtacgctagaaccaattcacatcaatacaataaattttaaggcgctaatgatcacaataggatttgaacccttacccggactacttttccccgacatggctgcctattaagtagaagatgctgaaaaccttctactaatgttatctcccttataaccacaaacctttcactttataggtcaattcctcatcatgcttcaatctaataggatcatgaacaaattatggcagaattaccacaaatgattaacacacgaactactacgccaacatatgctgatactatgtcagccctatcacgcataatatcagtacaaagttccactacacattctatgttaaacatcatcattatt

SEQ ID NO: 4888 - DNA, 512 bp, Glycine max
  Clone ID: PAT_MRT3847_104420C.1
ccacgcgtccgtccacgcgtccgcccacgcgtccgcccacgcgggcgcccacgcgtccgggctctgctcctcctcgcctcctctccctagcctccacgacgcaagggagggtgacggaaagcgacgcggcgcgagcgaggagggccaaggcgaagaggggaagcaccgcaccaggacccttgttcgccgccgccgccgcctctgatctccgcgaggttgtcaggattcaatatgtcgaccagcacattcgctacttcctgcacgctgttgggcaatgttagaacaacgcaggcctcccagacagcggtgaagagcccttcgtctctaagcttcttcagccaagttacgaaggttccaagcctgaagacctccaagaaactggatgtctccgccatggctgtatacaaggtgaagcttgtcgggcctgaaggtgaagagcacgagtttgatgctccagatgacgcctacatccttgacgcggccgagactgccggtgtggagttgccatactc

SEQ ID NO: 4889 - DNA, 408 bp, Glycine max
  unsure (1)..(408): unsure at all n locations
  Clone ID: PAT_MRT3847_104421C.1
cgcgacgtaacncggaagcggctcgagangccaangaaaaaacacaagcgaaaaactgtttgggaccaaaggaaaagtaccgaattagcccaaatccgagaaaccgggcctgaaacacaaataaataatccagacaaaggccgcacacgagcacgctcatgacatcccaacgattgaggatgacaatctgcattccccaaaggcatcccgagaaaacaaccccgagagcggagacagagctgataaaaaatgcaggacaaacccgatgacatcgacgaagcagagccgatgaaagaccttctggaagaaaatgactacgaaaacaacgaagagaacataggtccacgctcacagacaaccccacaacaccacaagggcaacttgcagaacgggaaccgagcaaaaaca

SEQ ID NO: 4890 - DNA, 169 bp, Glycine max
  Clone ID: PAT_MRT3847_104422C.1
cagcaattgggttatgagcactcattgattacttatctggggttggattgcaaactatacatgagtatgacgtggcgctgcttaaatatctgggggagaggcttatatcattaccaaatatgccatgtatggcacacccttaaaaaagtgaacactgcctcagttttaa

SEQ ID NO: 4891 - DNA, 354 bp, Glycine max
  Clone ID: PAT_MRT3847_104423C.1
ctccatttcaatattacccttgcacagcccccattctctggccagcttttctgatcgagaaaaacaatgaagatcttccattgggttcacaagacgtttcatcatcacaacgctctgaaagatgggtttgcttcaaacatgaaaaagactgaacctacaattaacaacgcggatagtcaagctttgctgaaacaagttgccctcactgaatcacttggtggatgggaagatggcattctaaccattggcactctcggctatgatcccttgaagaacatcaaccctcacaaagaatactttgatttggagattgaagttgaacaagaagatggtgaaggagagaacatcatggtc

SEQ ID NO: 4892 - DNA, 262 bp, Glycine max
  unsure (1)..(262): unsure at all n locations
  Clone ID: PAT_MRT3847_104424C.1
gttgantcgattcgagangttgggtatganatagcnaacacaanctctnctaatggtagtncaaatgcaatccaaggnaatcaagcactagatganacacttanggttgaacagtntaaccnatggcactnctcaagtcggaanctgggncattatnggtgatggcattgagtaaantgtgncccataaacttccngnattcccagcgnatgtatgttcgcaactttggccagncntgagaataatggttcngnccccaggg

SEQ ID NO: 4893 - DNA, 1137 bp, Glycine max
  Clone ID: PAT_MRT3847_104425C.1
aagcacggaattcggctcgaggagcgacaaaacgagactagcacggaaagaaggtgcatcagcccttgacaatggcaatggtggcggaatcaccggaatctgacagtgacaacaactcctcaaaaaccaacaatcctcaaaccctcaatgaaacggcgccgtttcttgactacgctcttgcgcaggcccagctttaccacaaggccttcaacgacgccgtcgattcgacaatcgatactgcaaaatcccgtttctcccaaatccgctcaacttcttccgcccactttcaccagaccttggattctttggatgatctcaaatctcagtacactgcttatgagggtcttttgtttggaaagatcaaagagggtgtagttgttgcagcttcgcatccggtgattacatgtggggctactgcttccctggggcttctggtacttaagaggcctcgtcgggtcttgtactacaacactttgcgcctttttgttagtgaagagtccatgatttctagagcccatgctgaagtgaaagaattgcggcaatcaattgagcttttaaaggctgaaggtgaaaagttggagaagagtgcattacatgcagaagagcaattcttacatggaaggacaaaactcagacatgcaggaaagcagatccgtaacgtgattcaatcagcatataaaattgaaatacgagcagggggtttaaaagatatccttggagaactccctaaaagagaaacatctctcttccgatctcaggtttccaaacttgcttctgaggcaaagaaagaaaaaaataccatgtcgaaggagatctctaaaattagcaactatggcatctcggtttgagaaactttgcttcatcattctctaatcaggactaaagacaatcccctgttattgtcattattttaaattccttcggttcatcatgtccccagagttggaaaatgtgaatgaaaaacgcattgaggctacataacttgataacaatgattatttttttgttgtctttcttttcacaaaatataaagctcaataatagctacaattacattttactagaaaaaaatttctgtatggacttagttaacatatctatcaagaatgagcattttggaattgttacaaaaccaaa

SEQ ID NO: 4894 - DNA, 237 bp, Glycine max
  Clone ID: PAT_MRT3847_104426C.1
gaacagttgttaatcgtatgtgaactacttaaagcaaacttgattgtgttttataaatttaatacagaatcaggtggtgtagtgtactttacgatgccaagattgcagtcaatgaccattcagcgtgtggaagctattaaagtgacgcatagcgcttggactaatacactgcgactggaaaccagagaatatttcgggtaaaagatatagatagtgtgaggtgaaagtcatttatct

SEQ ID NO: 4895 - DNA, 340 bp, Glycine max
  Clone ID: PAT_MRT3847_104427C.1
aatgtggaagctgacctattatgctgcacatggggcattgggtcttaaaattacgtaccatgaaccctcgttcactaatacgaagccatacttcaatgactggtcaaatcatgagtcgaagagttcactactgttgtactacatgtgccagtgtcggctctacatatatagcattgctgctattctcacatgggacactcgaatgaaggatttttcaaagacgtttacttaccatgtaattactgcactactgattgggatctcatatctaacaagtatctttagggatggctacataatcctcgcccttcatgatgcacgtgacgtattcatggaagct

SEQ ID NO: 4896 - DNA, 248 bp, Glycine max
  Clone ID: PAT_MRT3847_104428C.1
aagaagatgaacttgatttggacctaatcagaaaggtaaaaacaaaagcagaatttgtggagcagcatatcagcactgggattacgataaaacatgaactctcgctctcccagtgctgatatgctgctccaagaaatgaacttgatttggacctaatcagaaaggtaaaaacaaaagcagaatttgtggtagtcaaactaaagcaaaatgtatgccataatccatgagttaatcgaagggaaatcaga

SEQ ID NO: 4897 - DNA, 347 bp, Glycine max
  Clone ID: PAT_MRT3847_104429C.1
acgcgacgcgtccggcgacgttttccctccattggatggagatggcaacatgagatggttcttggaagggtctggagtggattagcgctgatcagatgaaggcggcgaaagagcaaggcaatctgaaagtaggatcttctttaagaaatgctgtcccacattcgtaccggtaccaccagactggagatcgcctactacggactaaacgatctcagtctccggcctcaaggcaaccatatactggtgcatatgaccgactacgtaaacgtgcacgacgctctgcacgactcccaacacgtagacgtcgacgttgacaccggctactgaagccacaggaccatgcctta

SEQ ID NO: 4898 - DNA, 369 bp, Glycine max
  unsure (1)..(369): unsure at all n locations
  Clone ID: PAT_MRT3847_10442C.1
ttatattaaaaaaannnnaaaacnngtntttaaaaaaaaaaaacaaaaaataaaacggggggaaaaaataaaaactaaaatacaccaacctcccgggggcggcctctttttatgatccaagctttcttccccttgtctgccaaattataactttcttttaagtgcaacaaaaattaattaactcgcctctgttttacaacatcgtgactggaaaaacacctccgttacccaaataaataggctttcaaaaaaacccccttttaacaaatggggtaaaaaaaaaaaagcccccaccgatcgtcttttcaaaaaattacccaaccttaatgtgtaattgaaccccccctttaacgtacaattaaaagcgga

SEQ ID NO: 4899 - DNA, 352 bp, Glycine max
  Clone ID: PAT_MRT3847_104430C.1
accatcaaacgacattttaatcaaaacccaaatccaacgatccagaggttatcaacaaaagaaccccccttcagaaatccctcactaaaattaatgcctggaaaggctagacacgaccctgtgtaccaaaaaaactgggcccacataaaaaaaaaaaatgccaatcttggctgggtgtaccctaaagagttcccaaatagctttcaccatacaatcccatgtcttttttttttttttccaccaaacaagccaacagcaaaatatagcttttttttgcccccggagggaattaaaaaaggcctttcagagtttttcacttatagggcttttgcaaccaagtagggccgcaccc

SEQ ID NO: 4900 - DNA, 594 bp, Glycine max
  Clone ID: PAT_MRT3847_104431C.1
gtattataaatcgatcgtactataggagacccgttctagtcttccagtgactggttgtgtctctttaattagctcttgtttcatattctaaaaaatttccaaaccttatgagactatagccacaaacacatacaaaatgggaactggtcacagttctcataataacctaagaagcgattgtacttctttcgatgtcaccctcgatggtgccaaagcaagatggagaaactcactagaggtttccatgggcaactggagaaaaggcaacacagaattttggggtgtggaatacaaaaccaatcagaaaaaacgggaaaagtgtagtcattttgaattgtgggcaaaaccaatcggtcaatgcttgcatggtgactatggaacagtattacatgccatatgatgatgttggtctttatgttgtggccaaaattcgacacaaaatgggtcacggttttgttgttgaagtggatggtcctttcaaacgctcagtggtttatcttgatgaggttattagcctaacctttcacaccggtgtgtggtcacctaatgcgttttctcactctaatggagcaaatcgcagccatggcgaagaaa

SEQ ID NO: 4901 - DNA, 2467 bp, Glycine max
  Clone ID: PAT_MRT3847_104432C.1
gaagatttggctctggcatgtcttcattggattttatactcatggaaccagctgaagttgcaggggttaatggtggaaagtggactgatcaggagactctcctgctccttgaagcattagaactgtataaagaaaactggaatgaaattgcagaacatgttggaacaaaaacaaaagctcagtgcatattgcactttgttcaaatgccaattgaggatacctttgttgactgtgatgatgatgttgatgctggttgcaaagaaactgcggatccagttgcaacaaaaagtgactcatctatggacaaagatgcttcagaatgtattgagaatcatactagcgatggcatcaaagacagtgaaaaaacttccaaagctgaagatctcgaagtcaaagtgaatgagaaggagactccaaagttacaagaaggcagtgatgagaaagccagcgaggaaacttctaaatcagaagatgctgttaaggtaaagattgatcaggaagcagacaatgactgtgctataaatgctcttaagtaagcatttgcttcttttggttttctcctggacctgaaggcccttcttcatttgctgatgtgggtaatcctgtcatggcactggcaacttttcttgcacacttggtgggttctgatgcggctgttgcttcagctcacagctccataaaatccatgacaagaaattctcctggcaccgagcttgctgcaaggtgttgctttcttctagaagatccgccagatagcaagaaggaaccaactagttctgagagggattctaaaagtgagggagaccaggatgaagtaaatgtaaaccaggataaatcaacattggaggataaagatttaccgaatgatcacaataataagaaaattgaaagtaatgctttagaagacaagggaaagccggcttctacagatgatggagccttggaaaaacccatttcttcaaaggagcaagcagtggttaataatgaatgtgggcttgacaagggtcatgatctcaacaatgcaaagctacccaatgatcaagcaccaggcactctgcataattcaggtggttcaacatccaaggctgaaattccacctagttctgacaaggctcaggaggaaactttaattgaagaaccttgcccttctgtaaaggacaagcatgtgtctgattctcttctatcagacaaatcaaaagatgctgagatggtttctaatgctattccctcaactaagagcaagcctcaaaatccagagtctacaaatccagctcatgaatctctagaaacaacggactcagtaatggatgtggatggagtttctaattccttgccattggaaaagattgactctcagccactaattacatcaaaatcatcccaatgtaatgggacagaaaaggatgtagaagtgatgtcaccttcaaatccagttagatcaaattctagtgctgaaaatggtccaaatacaggggcaggtaaagataatgcagataatggagcaaaagtggaagatgatggtacaaagactaaacaggatagcagttttgagaaagtgaaacgtgctgctgtttctacacttgctgcagcagcagtaaaagcaaaacttctagcaaatcaggaagaagaccaaattcgacagcttacttccttgttgatagaaaagcagttgcacaagttggaaacaaagttggctttttttcaatgatgtggagaatgtggtgatgagggcaagggagcatgtagagcgatcacggcataagctttatcatgagcgtgctttgataattgcatcaaggcttggtataccaccttcctcatctagaggtgtaccaccatctataccaaccaatagaattcctacaaatattgcaaactcactcccaagaccacaaatgatgatgaatccaccaagaccactgatttctagacctgcaggcacggtagcaactattcaaaacccattaacaccttcaactgcagcaggaaattcagttcggccatctaatcaggaaaagctttcttctgttgggacaaaataaatgtcaatacatatagaaaaatgttcatgtcttcatacttactgatctctcgccatcattttgacaattaaattcttgcaaaggtcaagtgctggttaggactaactccaaattgagtagtattgggaattcggtgaccagagtagtgtgcattggaagctcatcctttccccgttattaggagcagccgcagatgagaggacggaagtttactgatagatttgaagttgtagaccgatttttttatatttatttttgaggtgtttaacttaaaactagtggatagttgtgcaaaatgcgcgccttcaatcctctaacttgaatgctattcactacattattattggatgagagcatattgaaatttggatgacttcataaagaatatatagcagtctggcaatgatcaagtgttggctacaggc

SEQ ID NO: 4902 - DNA, 345 bp, Glycine max
  Clone ID: PAT_MRT3847_104433C.1
ttaaataaattttcttttacggagacaacaagaaggcctaattttattgaaggtagcccaggatgccctccccatgcatatgataacagaccccattcactcactatatgaaccccacccaaccaaccacatgatactggtattgaaacggaaaggggaagggtttcgaaatggtatccttaacaccacaattccctaaacgacaacacgagaaagaaaagaagagaaaaaaaaggcagaaacgacaccgaacgaaataacacagattcagcgcttaaagccccgggtcaacgtatggtaagagaggtgaccgcagccggcgatgacaacaggcttggaggtcct

SEQ ID NO: 4903 - DNA, 604 bp, Glycine max
  Clone ID: PAT_MRT3847_104434C.1
gggaaaggaaaaaaaaccccctttgttttaccccccaatcccctccaaagaggggcccccaacccccatttttttccctaacaaagggcttcccccaaaaaaaaaaaatacccccccccttcaccaaaaaacattttcccaacaaaaccccctaaatcgaagcgagggggcttaatagccagtccaaaacctagggaactgggggacccccttggccccccaaaaaacggggggctgggccaattccccgggcaaaaaaaccctgaccgggggttaaattccccttgaagggggggggggctttttggtggaccgggcaattttaaaaaatcccggggcaaccttctcaaaaatgtccttaaaaaaactgttaataaaccccagggccctgctggaaaacccaagggggggggggccccccttcaaaaccttgaaaaagaaaatctgggttgccccccccccctttgggggtctttttttttttttcccttttccggggggccccccctttttaggaagcttttttccggccttgggttttttccccgccggacccttgtcccccccggggactttttctcctccgggggcttttttcccgggg

SEQ ID NO: 4904 - DNA, 177 bp, Glycine max
  Clone ID: PAT_MRT3847_104435C.1
ggacaacagctgaagaaggacaggaaggaccagaaaaagagggatgggagacagatcgagagggaaataagaaacacacgacgcccaaggtgcccgctagacaaaaaaaaatgtctaagcgggacataataggatgaggaaggattgacgggcgatgcagagacaattaaagaagga

SEQ ID NO: 4905 - DNA, 457 bp, Glycine max
  Clone ID: PAT_MRT3847_104436C.1
aaagaattgaagaagtggttttaatattttaccaccatgaagctctaattatacttgccaacatttgtaatggcaagtccaataattagacatggtggattatttgttttttgtttagtgtgtaacaatatgtagtacttttccctcccaataatagaatgtcaagtcttgcatatatttttcatctctctagttcattattaatttgactcagatcaagaacttttacttttgtgttattatgcaaaaacttgtaatctccagcatataaaacaggtaacccattgtctttgtcttttatgaaatcatgtaattctaatatagatagtttggctaatttaggtcctgctcagtcagtggtctgggatgccatggtgccttcaaaaaagaggacatgtgttggtcgttcaaagccttcttctgttgagaagctaacaaaagatttatgtactattct

SEQ ID NO: 4906 - DNA, 297 bp, Glycine max
  unsure (1)..(297): unsure at all n locations
  Clone ID: PAT_MRT3847_104437C.1
atcgactacgttttccgcccacgcgnccgcnngaganngagttattgacancaacaaagccacggaggaagnnaangnggnncaaaccaagaaaggaaccggnncagnagcnncagcgnnggcnggccacaaggaagcnanacagcaaagggaccacaaaaannnaagaaacgcnngcgaagaagcagacaaagggcgagaccgcgaagaagggggccccaccggagcnaggacagaacgacaagacgaaaaagcggcgagacgccacacacaaggcaccgaggaacacacacccca

SEQ ID NO: 4907 - DNA, 270 bp, Glycine max
  unsure (1)..(270): unsure at all n locations
  Clone ID: PAT_MRT3847_104438C.1
nnnngggttttttttttttttttttttttggctctgcttctccctctgaagacactcttccttgccatagaggtgcatgtactattagggtcaatgatagaagggggatcctacatgtgtaaatgggcttgcttccccatggaaggaaatgatctgccagatgtgataatgaagaattgatgaacttaaccaaatttgcccggtttgcgaggccctaggaaggccgggtgaagaggatgtgtaacctacgggaaagggggctggggcggc

SEQ ID NO: 4908 - DNA, 171 bp, Glycine max
  Clone ID: PAT_MRT3847_104439C.1
gacacataacaccataatattgaaataccttctatttcatgctcttacaccatttcaaacgggcgggtctaattacttgcaagggtggcatttcacaacatggtaaaataaacttgtgctttgaacctgtttgcatttgctttatacaggaaactacttatgacatttttt

SEQ ID NO: 4909 - DNA, 478 bp, Glycine max
  Clone ID: PAT_MRT3847_10443C.1
tacggctgcgagaagacgacagaagggggtggaaaaactgaagattatgatcatgaagataaacaaagtggtgtcactttcttcagctgcagctcttaaatctgtgtgttccaaaactttttgaggtaaagtctcaaaactttctctcttttctcattaatcacattcttgcttaattagctcttcttttacaaattcttcttcattatattcagctgcagctcttaaatctgtgtgctccaaaactttttgaggtgaagtctcaaaactttctctcttttctcattaatcacattcttgcttaattagctcttcttttacaaattctccttcattatattcagctgcagctcttaaatctgtgtgttccaaaactttttgaggtaaagtctcaaaactttctctcttttctcattaatcacattcttgcttaattagctcttcttttacaaatttttaattcttcattatataatta

SEQ ID NO: 4910 - DNA, 437 bp, Glycine max
  Clone ID: PAT_MRT3847_104440C.1
tcgagtgtagaacctgtgcgtcacgctctattagacctgaggacaagtaatctacacactctaatatataaaggataaaaaagggcgacataaacctttatatcactgaaaaaaaaatttacaaaaaaaaaaactggaaggggcggcggctttagagaacccaaatttacttgcccgtcattcccatttcaaaagttttttatagtggcccctaaatccaaacccatggcccttgctaacaaatgcgcagactggaaaaaccctgggactacccaaataaatcgccttgaaaacatccccttttggccagtatggggaaaaaccaaaaaggccctaaccagatcgcctttcccaaaatttccctatttaaatgggaaatggaacccaccttgtaccgctttattaatcacggagtatgtgggggtctcccttaaagg

SEQ ID NO: 4911 - DNA, 268 bp, Glycine max
  Clone ID: PAT_MRT3847_104441C.1
ctccacctgtgtattgctttgtttgctaattttgtaacactgggagatctagcaactacatgcgtgaatattgcgactgctgacatgtaatccaaagtaatgaaactcgccattccgcataagctcggcagagcgtgcttacagatgctggagctgcggtctctgagtatataagaaggggtcacaattcaccattgtcattttgtacttttaaaggagatgcaggtgctttaattgactgccgtcgcgagggagaaaagccatctcg

SEQ ID NO: 4912 - DNA, 326 bp, Glycine max
  Clone ID: PAT_MRT3847_104442C.1
aaaaaaaaattccaaactggtttttttgggcctctaaccaacaggtttgaaataagggcggggggccataaattatttaagggggggttcacaaccgccgttgggatttgggggccaacaagaattcctttttttaataagacatgaatttaacagtttgcaaggaagcttgcaaggtttgtatgggcattaaaaatttttaatctttagattaccctttgggtgcaggagccctttttgggggggggttaaactttaacgggttttttttttcagggttttctatgaataacttcgggtccccctttttttcctttttttttggg

SEQ ID NO: 4913 - DNA, 437 bp, Glycine max
  Clone ID: PAT_MRT3847_104443C.1
ttcaacatctggactattaactcaggacacgatgtacagaaacaggaaaggacatgccattattgcaccagtgggtcagttgctagaacgaaaggcaaacgatttcaaaatatgatccatttctccaaccgaaaggatgtttggagatttgtgcatgaattaggctacagcaatgaatcatcatctaaaaccaaaggggagttgtactcagttgtctgcagcccaatagatgcagccttggtggctactgcaggcggtgatgacagaggatttctctggaagattggccaagcggattgggcttttgagcttcaagattatggccccattgtaagcggtaaaatagcagattatgcaagtcgtcgagttgcaatgggtttcttgaaggttttctgcatctttggatcacttatcatagcattctcaaagctaacatg

SEQ ID NO: 4914 - DNA, 962 bp, Glycine max
  Clone ID: PAT_MRT3847_104444C.1
ggatggggctcgagcaattttcagcaccttttccaccgccgttgcgcccaaatgcgccttcatcaatggcgctcttgatcggcttcaggggctttgaggttcaccacctttagtttgttgattgaagacaacaacttccaacgaagctaccttcaaggatctcttcctggtggtggaagttcaaatttttcttcaaatatgcatgggataaatggcttctgctttggttcattatgtatgaacccagaattgtcagcattgaagagaagaaaactcaagaagaattcattagccaactatttgatccaacatctggactattaactcaggacacgatgtacagaaacaggaaaggacatgccattattgcaccagtgggtcagttgctagaacgaaaggcaaacgatttcaaaatatgatccatttctccaaccgaaaggtaacccattactgatttttcaaaggattttctgtttagatgtctttcattagctatggatatagtcaaaatatttttttttttgtaggatttggacaattttctggttctgaactagcttttcaatttttttgtctaatatggtattcaagtctcatggttggatcactatctatttcaacgagcttcgttaatgattatgtatatggtctggtactattcaaattttattaattccttttcttttgttatatatattccggttacgttataataattgttttaggcatgagggaactatagttagatatctcatagtaactaaaaaagtggttaatgtacttcacataaaacttaagcaaatgatccttccttgaattagcaaagtggttaatatacttctcattaagaaaatatttttttttcaataacacgagtaatataatgcaggagatataaagttccttaatgattaagaaaaagacttaaggattgatttggttggagagaagagtaacgaatg

SEQ ID NO: 4915 - DNA, 469 bp, Glycine max
  Clone ID: PAT_MRT3847_104445C.1
ggaatatgccaacacattccgtacggagtcatacactgagttttggacacgtgtccttgcatattccaaggatgaatcctctacttgtttgtctagagagtccaccacttcggccaggcttccctcttaccgtttgtttgcggagcatctcttggacccagatcagtccacggttactcgggccctatcagaagcccaatgtcggcccataatccattctctcttgtctgactattttgcacacactgctaatgcttctcttctttgtagtcatctattaaaggaaattgatcgtgtacgtgtgaagtataggtcactcaagaccatccttcaatgtgttccaactaatcaaattccttccccaatgataatgatacatttaactgaattttccaacttcttgaacccgtttggcgcatccagctcgccgtcggcccggattcgggctacccaatgccaatgctctgac

SEQ ID NO: 4916 - DNA, 646 bp, Glycine max
  Clone ID: PAT_MRT3847_104446C.1
ttcgggcaagagcctcctgtggcccagcctgtaagacaacttccaaagcggcctcgtaactcagatgctcttcaggaagcattgatgacagtggcatcgagcatccgacgtctggctgatgccatggagcaaagcaaatgctcatttgatgcaagtgagctattacatgctgtgatggagatagatgggttggaagagggtaaacagatgtatgcattcgaatatttaaatgctgatcctgtcaaagccagagccttcctcacctacaatgctaggatgagaaagacatatctgtttagacagttctggtggtggaggtgagggtgatggtgccttgaatgtttttggtgtacagatatctagggactgtttcacagacgttttctgtgttttgagcaattttttgttgatgtgttgttaggataattgaatgtatagactctagactgataggagatagccatatgccggagacattagaaacatcgtctcttccaagtaaccatggtcatttgaaacaggcaaaatagatagaaagctgtgcacatgcacatgtaatatacaaagcaaaaatatattactttggctattaataaaatgaaaagaaaagaaaaaaataaaagaaaattctaatgagtcttatttg

SEQ ID NO: 4917 - DNA, 329 bp, Glycine max
  Clone ID: PAT_MRT3847_104447C.1
ggaggaacagtggcaaacataagcgcgtgttcttcgattcagccatttccacaattttcgtcattcccaatcccgacgctcattggcggaaaccacgcttcttccttgctcatcccattcatccgcaacataacttccatccccgccaaccttccttctctcaagatatccaacagcgcccccttcaccccacctctctcctctcctcgtagctctaagcgcaaggcttatttctactccctccataacgccttcctcctccaccctttttttgccaccttcgcccctttcaacccctttcgcctccaccaccttgccaccttcaccat

SEQ ID NO: 4918 - DNA, 352 bp, Glycine max
  Clone ID: PAT_MRT3847_104448C.1
aaaaaacaaaaccccccaggggatgtttaaagggtttgaaccgaaccaatttcggcccgtttttgaaaaaaaaaaaaaaaaactttttttttgcaaaagagccgttttacaagaccttttaggccgtgggggaccccaattgctttacaacacaaaaataaacctggcttagttgcctccctttgggggggaacatgaacggtttttttttaattcccaatttttttttggagaccccctttttaataaaaataacatttttccggggggccaaagggggggaaaaattaaggggccttgtcccttgccattaaaaacccccctttaaatcggggggggtcaagcaagtttt

SEQ ID NO: 4919 - DNA, 352 bp, Glycine max
  Clone ID: PAT_MRT3847_104449C.1
agaaaacccccaaaagccccttttttggaatttaaccaggtcagccccgggaacttacaaaaaaaacaatttggaaagaaagccccggttggaattccaacttaaaaaaaaacgggggcaaaaaaagagggggcccctttttcctataaacgggaaagggtttcaatcataaaaggggccattaacaaatatgcttcagaacgggggcttttttttgggggggaagccggggcccccttcccagaatcatggtttattggggggccccccaaaaaaagggatgcaaatgggaatgcccacgctgaaccaccaaaaaggggcgttttgaagccccttcctttggaacccaaaa

SEQ ID NO: 4920 - DNA, 311 bp, Glycine max
  unsure (1)..(311): unsure at all n locations
  Clone ID: PAT_MRT3847_10444C.1
aagcacaaaaagactganaatgaaaataacatttgaagtcaattgcatattgttaagattgcgcactgtgacgatgctgggtgctaacctccctgtcgaaaaacactccgactatcacacttaagttcgaaccagactttttcaatttccgaccttcctaaataaagtggtgcgactcgccatttccttcatgaagaccacttggagtcccgatcgccttcctcaaaggtagttgcgcagtacttgcctttcgcgaaggtagttccttattgaataactaataacaaaagtaaactaagctaaaataactc

SEQ ID NO: 4921 - DNA, 567 bp, Glycine max
  Clone ID: PAT_MRT3847_104450C.1
cttttgttgaaaaagattttcatggcaaatcactcaccacaaaagcagtaggtgtgagaaccataatttatcctggtgctggagcggaggcaaactttgaagctaataaatacttgaggattttgcatttaacgcattctacctttgaaactttgcctcctttcattgggaagttaaaacatttaagatgtcttaatcttcgcaaaaataagaaaattaagagactccctgattccatttgtaagctccaaaatttgcagtttttgttcctgaaggggtgcactgagcttgaaaccctgcccaaaggtttaagaaaattgataagcctctatcatttcgagataaccacaaagcaagctgttttacctgagaacgagatagcaaacttgagttatcttcaatatttgacaattgcatattgtgataatgtggagtctttattctcagggatagagtttcctgttcttaaactactgtctgtttggtgctgtaagagactaaagtctttgccacttgacagtaaacattttcctgcattagagactttgcatgttataaaatgtgaca

SEQ ID NO: 4922 - DNA, 331 bp, Glycine max
  Clone ID: PAT_MRT3847_104451C.1
gatgaaaggcctttcattcgtgcatataaaggagagtttcaaccaacatatgggtgtgctaatgtcatatcaaatgtcattagggcaaaatttgatgaaccagctccaagttggttgaaggtgtcagttgaccttcgcgataggtggtttggagagtttaagaaagagtataggtggcacccacaagaagagcaagccattagagctgtttttgagacaaaaggttcacgtattttaaaaagtgcaatgaacaagatcagaaatggtcaagataaaggaaagtggataacaactaatgttcgagtagccttggacgaacattgggggtcta

SEQ ID NO: 4923 - DNA, 278 bp, Glycine max
  Clone ID: PAT_MRT3847_104452C.1
agccatgaccaatactaacgtcttcgtcaacactctacaccgcactcaatctcaaatctaagttactcctctcgacaccgatcatcaactcaacaccgatctagaacactctcacgaaccagatgactaacctgccacacatcaccatctacacaaccaatgcaaaaatcttaagaagtcacttaccttctacaagaaccaactagttctaaatactaatacagctattatcctctacaagactaacatcaccatcgctaaactactctactacttca

SEQ ID NO: 4924 - DNA, 738 bp, Glycine max
  unsure (1)..(738): unsure at all n locations
  Clone ID: PAT_MRT3847_104453C.1
ggttctcggtccggaatcccgggtcgacccacgcgtccgcagctcccgcagtcgacctctggaacttggttatcttttccgccaacagtgttgagaatcagaattcagaacccatacatcttctatcccttatttacatggctgtatcggcgcgtgccatagcttgaaccaaagtgctgctccgaatccacctttcttcgcgcgtagattctcacgcgcagtctccgccacacactcttctctccgttcggtagcgattggctttagaagatgtcgggcggtttctttagaggcacatctgcggatcaggacactcggttttcgaacaagcaagcgaagctgatgaaatcgcagaagtttgcaccggaattggagcatctggtggacatgacgaaggtgaatatggaagtgattaagccttggatcaccagaagggtgaccgagcttcttgggtttgaagatgaagtgcttattaacttcatacacagtcttctggatgcaaaggaagtgaatgggaaagaagttcaaatacaaattacaggatttatggaaaagaacactggaaagttcatgaaagagctttggatgctgcttctcagtgcgcagaaaatgccagtggtgttcctcagcagttcttggatgccaggggagaagaactcnctgagaagaagctgaaagtgatctgatttgcagtgannatcagaggaaaaaaagataggaaggtagagagatcatgga

SEQ ID NO: 4925 - DNA, 543 bp, Glycine max
  Clone ID: PAT_MRT3847_104454C.1
ggggggttttttttttttttatttttttattttgtttttctttttttcttttttgttttggtttttattgttttttcttgttggaaaaacaaaccgacagagtgtaaatttaaaaccggcaaaaaatgtcaaaaaagggaggggggcaaacccaaagagccagggggggcggggggggacccaaaaaagcccccgcgggcgccaaaaaaagaagggaagggccccaagggcccaaaaaaaaccacaccgtttgggaattagagaacccatcccaacaagaaaaggggagggaccccaaaaaaaaacaaacccgggggaagaaacaaggggggctccccacccccctgccttaaaacgtcggggccggaagaacccccaaaaaagaaccctggggggaagggggggaactaggaaaaccccccaaaggtcttcctcaggagaacccccacatttcgcccaagggaaacatgccagaagaccagggccaaggcccccccccaccccattagggggacggcccgccataagggggccagggccggc

SEQ ID NO: 4926 - DNA, 558 bp, Glycine max
  Clone ID: PAT_MRT3847_104455C.1
cacaaccaagaaaggtcacaaaccaaaaaagcaaaatggtgcaccaacaccaagtgagggcctcactcacatgctttattcttttcctccttgtcttggccaccacctccttcacatcagttcactcgaggaacacactactgatccatgaggatcaagctcatgaactgcacaagacttggccaaggaagacaaggatgaaccatggaagccaccgtggcgccaagaaacacctcgtgaacccgacaatcgatcatccatttcaggctcgtgaatttcctgtgtagttctgttttcttctgtttcattgcgcttatttttctgtaatttgaatcagtaaaggttctttattttaccgttatacttatttattcttcatgcccatttctctgtaagtcccaatcattccaaaaatgttgatccagtggtacttgtgtttgtagtatcttgctagaaaacacattcagtaacaccttccaactcgatcttgcctcgtgcgaattcggcacgaggtcggcacgaggttcggcacgaggcctcgtgccgaattcggcacga

SEQ ID NO: 4927 - DNA, 664 bp, Glycine max
  Clone ID: PAT_MRT3847_104456C.1
gcgttttgttgttgcgtacgtcgtcgtttagtaataccaacgcggctttctttttgccctgatcatgacattaattatattgagggctttgctatggcttattttattagtctgcaacttctgactgtggttgccataactcctaacttactaacacaaatacttaaaacattctaatgatgccattttgctgtacctagatcataatatttggaaaatggcaagatcatatgtttctcactcctttcgaatttaaataaaacaccttacctgaattttaattacataaaacttttattgggatttctaacactttcatcaggtttaatggcttgattttcatctacaaccatcttgactagtttttttatccccttgggaggggtgcaattgtctcagacgcatgatatcagtttaagcaaggatgatctgtttgtatgctattttgagctatattctgattataatattgatataaatttctacccctgcgattgtgctgctaggattaggtgaattatgatggatggcttacctttgttatgaattactttgagttcaagaatggtgcacctaaaaatttacccattccatttttgtcgaattagatagtgctcgtagcacttctgtcttgtatttatgcagaagaatttataaccaaaaa

SEQ ID NO: 4928 - DNA, 490 bp, Glycine max
  Clone ID: PAT_MRT3847_104457C.1
gggcacgagatctcgcagcttgacgggccggaagccctcggtggcgattggacctggggcaacggccaggctacgtttggccacttgattggcgggtacgatgctggatactacggctacctctcctcacaggtctactccaccgacatgttctactcggtcttcaaggacgacccgatgaacggcaaggagggcaggcggtataggcatacggtgctggagcggggtgggagcatggaggagatggatatcttggaggagttcttggggaggaagccgagtactgaggcgttttacaaggagttggggattgcgaagtaggtggttgatgagatgatggggcgcatggatagcggggaggctcgtctgattgcatttgaaatggcttcgtgccgagtggttcgcaatgcatgggggatgtagagtcgaggttcacactgctgggacggacccggggcgtagatgagaatttacacagtttaacgttaaa

SEQ ID NO: 4929 - DNA, 414 bp, Glycine max
  Clone ID: PAT_MRT3847_104459C.1
aagacaaaaacagcaattccttgggaacaaagggaaagggcctttcggaattagggaaacccaaatacgggggggctctgcttgatctaaccacactggcaaatgaaacggttgaaacctacactatacgacgaaccctcaagaatcactagggacactgggccaaaaccaatcttagctcgtgattcacccgatcacaatatccgcaactgatgacaacagctccctatatggtcaaccaatttaattccaggacgaatcaagcttccgggccaagaagacttacattggtgcgaaaatatatgcattcactgcgtaaacgaggccagctgcaggctattataggaaagacttgaacccttagactaccctttggagccaggccaacatacttcagaacctggaccatgtttt

SEQ ID NO: 4930 - DNA, 505 bp, Glycine max
  Clone ID: PAT_MRT3847_10445C.1
ggctcgagggaaatatggtgcagaaaatacatgtaccagtggtaatacactgtcgagagctgcactaagttttgcgcaagcccatgctcaaattgagaaggagcgtggaaacttactaaaagctcttgggacacaggtagtatatacatgttgatatgtaagtatgcttatgtgtggagtgtttatgtatgagttcattgagcagtacttgcaattgcaagattataaggttcaaatctgacttcacagaagtaatgatggggatttccccctaactgaactggtttactggatatgaatgagatttacagatatttaagtacatttaatctaatgaaaaaggaatatggaggccatattcaagttcaatcgtgaatagaatttaatagccatgctcgtatactgagttcatcaatctcacgctatctatactggtggctcatattattgatttacctagtgtgtgttgccatcttagcctaataactatgtgattgaagtcatg

SEQ ID NO: 4931 - DNA, 151 bp, Glycine max
  Clone ID: PAT_MRT3847_104460C.1
cgatacgaactataatgccaaacttacgcggattgggttggccggagatggtaggagtggcgatgaaagccatgtctctacaagaggcatgggaacccgtggatatgcggccccagaggagtcaacgacaggagatctcactaccaagagt

SEQ ID NO: 4932 - DNA, 3147 bp, Glycine max
  Clone ID: PAT_MRT3847_104461C.1
gcagattgctgagagtgcttgaactagtggaatgcgtggttgaggttggcgacgaggaaatggattggatgtcgtgttttccggagagtgatgctcagacacatttggaatctcttgtttttgactgcgtggagtgtcccgttaatttcgatgctttggagaggctggtggcgcggtctcccttgttgaggaagctgaggctgaatcgttatgtttcgatgtctcagctgcaccggttgatgcatcgagcgccgcagctgacgcatctgggaactggatccttcagtgcttcggagctggatcaggaactggattttgcgtctgccttcgcctcttgtaaatcgttggtttgtttgtctgggtttagggagttttgggcggattatctccctgctatttatccagcttgtgccaatctcatatccttgaatttcagttttgctgatatcagtgcggatcagctcaaatcggttatacggcactgtcataagctacagaccttttgggtcctagataccatatgcgatgaagggcttcaagcggtggctgagacttgcaaggatttgcgtgagttttatattcatttttatcataccggaaaactgcccaaggagggggaagtagatattgctgaggctgctcaggattcgctaataagccccattccattcccctggtcaaatagatgtacgttgagagcagattcagaaggatcaaatcagaaggttttggagaggtgatgttctctaacttatccatcataccttaccagtagagaagcaacaaatgtgtattcactttgcaaggaacttagagtgaaattatagagcagggattcttaaataaacctaacctgccacaagattcatcattatttgtactgtcaatgtcaaaaaaagttgagctaacaactctgctgttcttggccaacactgttgtgatggcaggccatagattctattatgtggcaaagcatttcaaattctgcattcttgttcatgggagagaacttggggaatagcaacgggagagggtgtgctgagaatgatgcagatgataagaattcctgtagttatcgtatcaggccatccaatgttgtatcaccattattaaaatttatgtcctcttttttattcgttttatcatgaagacctaccatattgaggaaggtagagattgctgaagctgctttgaggatttgttaataagcattatttgtctccttggtcaaatagatgatgatggtttaccgtaccagtagaaaagggaaagcattctcgtttttaattgcttggtcttgggttgccttcgggttttccctgtcaatacccgggaggagatagaaggtcccgtgtctgaggtggggttttgaggcgatttctcgaggttgtaggaaactgcagtcgtttctgtttttctgccaaaggatgacgaatgctgccgtggtagccatgtcgaacaactgcccggatcttgtggttgtttcagttgtgtataattgggcggtatcggctggacccagagacactagaacccatgtgatgagggttttggtgccattgttatgaactgcaagaaagctcactcggcttgctgtgtccgatttgctgactgagccgggttttagtggtatttcgttgatgggtaattgggtgggatcgctctcagccggctttgctggagacactgaccttggactccaatatgttctacaaggatgtcctaatctgcagaagcttgaaatcagggacagtccatttggggatggagctttgcattctggcttgcatcacttttacaacatgaggttcctctggatgtcctcatgtaagttgacgcgccaagcttgccaagaagttgcgcagacattgccccatctggtgttggaagtcattaatagtgaagaggacaaagctgatggtatagagattctgtacatgtatcggtctctggacgggccacgggatgatgctccaaaagttgttaccatcctttgctgattctttgaaacttaactagtttttagataaacctgccacaagattgatgatttgtactgtcaatgtcagaaaaagttgagctaagaactcagctgtttttggccaacactgttgtgatggcaggccatagaggactatagattctattatgtggcaaagcatttcaaattctgcattcttgtttatgggacagagcttggggaatatcaacgggagagggtgtgctgagaatgatgcagatgataaaaattcctgtaggtatcggaccatccaatgttgtatcactatagctaaaatttattatgtcctcttttttattcattttatcatgaagaacttcactatcatagttgaggaagttagagattgctgaagctgctttgaggatttgttaataagcattatttgtctccaacttcaccgtaccagtagaaaagggaaagcattcgctttttgaaggacttagtctgtgtatgctgactcagatgatagttagtttaagctgtgggtggtgagaaccctatcaccagactgatataagcgaatatgcgtcccccttatgttttctcagatgtgtttctgtagctcctgacttttgaattttttttttagttagcaattgctacatggttaataaatgccagaatatgcatggaccatatcattgagttgcgatctgggaggatcaaatcagattgctttggagaggtgttgttctctaacttatccatcataccttaccagcagagaagcaaaaaatgtgtattcactttgtaaggaacttagtctgtttatttggattcaaacgatagttagttgaagctttggctggccagaatccaaaccccagactgtgatataaacctatctctgtctccctaatctcaaatgtcttttttcctttctttttttaatgttcacggatgtgttgctgtagcacctgactgttgaatttattgttattgttagcaattgtgagatggttaataaatgccccaagattcatggacccatgcttgactgtgtctgccatggatagcagagagatcttctagcaggttgatattttaaatccccccttctgtcgtcctctcagcgtacagcaggccgcctcctagcagactgtgtcgcggcgggagtagtcccg

SEQ ID NO: 4933 - DNA, 539 bp, Glycine max
  Clone ID: PAT_MRT3847_104462C.1
aagaactgcccggatcttgtggtgtttcgtttatgtataattgggcggtataggccggatcctgtgactgaggaacccatggatgaaggttttggtgctattgttatgaattgcaagaagctcactcggcttgctatgtctggtttgctgactgatcgtgtttttgagtatcgtgggatggctgggaaatctgtaaggacgctgtcagttgcctttgctggggacactgacgtcggccttaaatatgtgcttgaaggatgccctaatttgcaaaagcttgaaatcagggatagtccttttggggatggagctctgagatccggtttgcatcattattacaacatgagattcctctggatgtcatcctgtaaattgacgcgccaagcttgccaagaggttgctcgagcattgcccaacctggttttggaagtgatcaacaacaacaacgaggagaatgcaggtgatgaagaggagaatgcaggtgatgaagttgagacattgtacatgtatcggtctcttgatggaccacgggatgatgc

SEQ ID NO: 4934 - DNA, 1754 bp, Glycine max
  Clone ID: PAT_MRT3847_104463C.1
cacaactacacatatattcttcgacagtcaactcaatagcctatccaaaaaaaaggttgtttcagaattgagagcaccggtcgctggacggaaacgaaatggatatttgtttaattgacatgagaaagatggaaattaattagggaagaaatgtcatacagatcaaagttagtgccctataaatactaaccaaagcattgctctgcaccacaagccattgctagtttagttacgtacatagcttgaaaacacagtgcttgtttagactagtatcttccatggctccgaaagatagaatcctggttttgggacccacaggagccattggaagacacatagtttgggcaagtgtaaaggcagggaatcccacttttatattggttagggacacccctgcctctgttaacaagccaaggcttgtcactgctgctaatcctgaaaccagggaagagctcattcagagcttccaaaattctggagttactctaatccagggagatatgaacgatcatgaaagtctggttaatgcaatcaagcaagttgatgtagtaatctgctcatttggtagactactaatagaagaccaagtcaagatcattgcagcaataaaagaagctggaaacgttaagagatttttcccatctgaatttgggctggatgtggaccgtcacgatgcaaatctgactcagaggagaagttttcgaggaaaaagcgaaaattcgaagagtaattgaagctgaaggaattccatacacttacctatgttgtcatgcctttactggttacttcttacgtaacctggcacagattgacatcactgttcctcctagggacaaggtgttcattcaaggccatcgtaaatgtgaaaggagcgtatatcactgaggctgatgtgggaacttttaccatcgaagcagcaaatgaccctagagccttgaacaaagccgtgcacataagactcccaaacaattatttgtccttaaatgatatcatctctttgtgggagaaaaaaattgggaaaactcttgagaaaatttatgtttcagaagaagaagttcttaagcaaattaaggagacttctttcccaaataattatcttctggcactataccactcacagcagataaagggagatgcagtgtatgagattgaccctgccaaagaccttgaggcttctgaggcttatcctcacgtggaatacagcactgtttctgaatatttggatcagtttgtctgatttccgaaatcttaggaaccaaagcacttatatgattttatcactctgcaaaatgcttaataaaacaaatgcagttcttccttctgtttttctttcagaaaaggcctatgcaggcttttttgcggcactaccactgcctgttacgtagtggttgcttgtgtttgtcctgttctcaagaaagtatccacatttatcattttatgtaattgttctacctgaaaaataataatataatcttgttttaatattgttatgctcaataaaacctatgccttttcttttttgcgaaattggttgcttttgtcctatgtttcggaaaccatccacattaatgtaatcttttttttttttggcccttatgaataccctaatctgtggcattgtttgtttcgtggtggttgctggtgtttgtcctgttctgaagaacctatccccattaatgtaatgttatacctgaaaaataataatataatctgtgctactgtttgcacatcatctagacaaaaaaaaaaaaaaa

SEQ ID NO: 4935 - DNA, 1808 bp, Glycine max
  Clone ID: PAT_MRT3847_104464C.1
atcctctagagcggccgcgtttgaggcttgcagatccctggtttgcctgtctggattcagggagatttgggcggattaccttcctgctatttatcctgtctgcagcggatctgacatcgttgaatgtgagctatgctgatgttaacacgcgtccggatcagctgaagtcagttatctgccactgtcataagctgcagatattctgggtacttgattcgatacgtgatgaggggcttcaagcggtggctgcaacttgcaaggacttgcgcgagcttcgggtttttcctgtggatgcgagggaggagactgatgggcctgtttctgaggtggggtttgaagcgatttctcagggttgtaggaagttggaatcgattttgtttttctgccagaggatgactaatgctgctgtggtggccatgtcaaagaactgcccggatcttgtggtgtttcgtttatgtataattgggcggtataggccggatcctgtgactgaggaacccatggatgagggttttggtgcctattgttatgaattgcaagaagctcactcggcttgctgtgtctggtttgctgactgatcgtgcttttgagtacattgggatgtatgggaaattggttaggacgctgtcagttgcctttgctggggacactgacgtcggccttaaatatgtgcttgaaggatgccctaatttgcaaaagcttgaaatcagggatagtccttttggggatggagctctgagatccggtttgcatcattattacaacatgagattcctctggatgtcatcatgtaaattgacgcgccaagcttgccgggaagtcgcacgaatgctgccccatctggtgttggaagtcatcaatagtgaagaggacaaagccgatgatattgagattctgtacatgtatcggtctctggacaggccacgggatgatgctccaaaagttgttaccatcctttgctgattctttcaaactcaacaagtttatggctttttcccttgttatgggggctgctgagtgaaattatagagcagggattcttaaataaacctaacctgccacaagattcatcattatttgtactgtcaatgtcaaaaaaagttgagctaaaaactctgctgttcttggccaacactgttgtgatggcaggccatagattctattatgtggcaaagcatttcaaattctgcattcttgttcatgggagagaacttggggaatagcaacgggagagggtgtgctgagaatgatgcagatgataagaattcctgtagttatcgtatcaggccatccaatgttgtatcaccattattaaaatttatgtcctcttttttattcgttttatcatgaagacctcccatattgaggaaggtagagattgctgaagctgctttgaggatttgttaataagcattatttgtctccttggtcaaatagatgatgatggtttaccgtaccagtagaaaagggaaagcattcgcttttttaaggacttagtctgtgtatgctgactcggatgatagttagtttaagctgtaggtggtgagaatcctatccccagactgatataagcgaatatgcgctccccttattgttttctctgatgtgtgtttctgtagctccagacttttgaatttatttttagttagcaattgttacgtggtttaataaatgccagaatatgcatggaccatatatgaacttacttactggggctgtgtctatgcatttcattttctgaatgcagaatgatcaattgagtgtgaacgcccattgattatgtgtatgatattctattttattcaggt

SEQ ID NO: 4936 - DNA, 265 bp, Glycine max
  Clone ID: PAT_MRT3847_104465C.1
cggagataagtggacatgctagacatgatatgattaagaacgaatacattagagaaaaaatggggtaacatccatgtgcacaccatctgatggcgtttgtcccaacttttcaccacctttgacaaagatggataccagcccttttcctgtatttgtacaactccaagcagctgtttgatggtctattcatggtggcttatcctctctgtggatctgctgctgtttggacttgtaaatattatgttctgttgctgtttgtattatg

SEQ ID NO: 4937 - DNA, 918 bp, Glycine max
  unsure (1)..(918): unsure at all n locations
  Clone ID: PAT_MRT3847_104466C.1
agaagaggagggttagggctcctagtttggctgatttgacccttgttgatgaactgttgcggaggttgaggagagaggggatgcgtgtgagggagagggtgagtgtccccaaggccggactcactcaggaggtgatggagaagattcataagaggtggaggaaggaggagttggtgaggctcaagtttcatgaggaacttgccgaggaaagttgcctgattggctgtagtgtgcagcgtcgaactggaggattggttacgtggaggtcaggcagtgttatgatggtgtatcgtggtattgattaccaagggcctgactcgcggaaggaacttaatgagaagaaaggtgatggtttttttgtgccggatgtctcgaaaagggaagacagtactgcaacctcaacctcagagaagagtgaggtggttgtgagggagcgagaacatccggagaatatgtcagaggcagaagcagagtacaatgccctccttgatggtttaggtcctcggttttttggatggtggggtacagggattcttcctgttgatgctgatttgcttccccggacagttccaggttacaaaacaccttttaggcttcttcctactgggatgcgttctcggctaacaaatgcagagatgaccaatttaaggaagcttgcaaaatcacttccttgtcattttgctgtagggagaaatagaaatcaccaaggtctggcatgtgctattcttaagctttgggagaaaagtttagtttccaagattgctgtcaaacgtgggatccagaacacaaacaatgaactgatggctgaggagctgaagatgttaacaggagggaccttgctgctaaggaataaatatttcattgntatatatcgtgggaaagactttgttccaacaagtgtcgctgcagttttagctg

SEQ ID NO: 4938 - DNA, 426 bp, Glycine max
  Clone ID: PAT_MRT3847_104467C.1
tacggctgcagaagacgacagaaggggccgcatgtattgtattccttgaaacttttgtcactaaacatgattttcttttttgttgctgctttactggagaaaacaactaaagtgcgtggtcagtatctaaatcatccatataaagagctacataaaaaaaaaaaactagttattctacggcacgggtacatgaacatgacccttaagcacatattttaagatttgtccccaaattcatgtattttaaaaaaaaatactaaataaccttttaatctctaaaaaatagggggttttttttttattttagtcctgcattttttttattttactctttgctgggttaaaatttaaaatttataagaactaaaaatgatggttaaatgattaaaataaatttcctattttataatgaccggaagcttattt

SEQ ID NO: 4939 - DNA, 1141 bp, Glycine max
  unsure (1)..(1141): unsure at all n locations
  Clone ID: PAT_MRT3847_104468C.1
ccgcgtcnnnctcaaccctacacacacaaagtgccctttcgaaaccctaaaattcctcctcacactcctagacttcccttccaccaccttcgcatccatccacatctatgatcatgaacctttcagagaacttggcaattcctacctcctcgccggcggcagcgaaggcatcgtcgcttcccaagccaattccatccacgacgatggtcgttcctacatccggtatacttcaaagctgcagatcctttcaatgagcgccagcagagtgcttggattttaaaaatgttgatccttccaacaaccttcctttggagtgtgtcataaggagagtcttcaaaagttccgagagagatgaatgtatatgttgctctgccctgttgacacgtaagtaaccaagtggatatggagcggacaactagagtattgcatgaggatatgacagggtaaggttagcttgggcagagaagagggaagtgagacacacatgcctaaatggtcctgacaacaacaattatggagcttatagatgggttgttcagtttgtcacaaacgctaatcaattggaaaagatatttttccctatcttctggggcctaatgactctcagacaattggccatcagaagatgttcttgctcactattgcttgtgacatgcagatatattcagattcacaaccacctgctaagaagaaaagaaacctaccagggaatccaggtatcttttctctaattaacaactatctcagtttcgtaactatttttttttttcatttaaatatataaaaacatttttgtttcccctttttctttttttatttttatccccatgataattactagactaacattgtaattgagaatttgatcgcttgatgttgcacatgatatagaaacattttattggtagttacagtcagacctactctcctaaagcttaagctattaggtaatgtcactagtgacttatatctctactaccaagtctttttgtaaactttgctctgtattaactatctttgtttatatatatgatttaattgagtatgtatttagcactcaaaaatattcactcaagatcagtcttctcttatttaaagttgtattggtatttgtttctgcaatttttactgtcattagttg

SEQ ID NO: 4940 - DNA, 1800 bp, Glycine max
  Clone ID: PAT_MRT3847_104469C.1
agcagcgtccggggacacgttatgagcaggcaattccatgtggccacatggataagagaaagaggaagaggaagaagaagatgatgaacaacaacaagcaacacagcaacaccaactgaaacatcttcatcatctacgaacgaccataaattttctctctttccctttccctctctctgtctgtgtttttttataaaaaattctgtgagaggcatagaggaagatgaaggaaagcagtgatgggtttgtgagagcggatcagattgatctgaagagcatagatgaacagttggagaggcacctcagcaaggtgttgaccatagaaaagaaaaagcgctctgaaggggaagaagatgctgatcatgttcatcttcatgttcacaccaccagtgccactgcttctcccaaattctcacatgcttcttctgctgctagggttaacttcaagaagaaaaagcaggattgggagattgatccttctaaactcatcatcaaaactgttatagctcgtggtacttttggcactgtccatcgtggtgtctatgatacccaagatgttgctgtgaaattgttggactggggggaagaaggtcaaaggacagaagcagaaattgcctccctgagggcagcgtttacccaggaagttgctgttttgaatatacttgatcacgccaaagacgcaaagtttataggggcaacaatggggtcttcagaattgcagagtacaaactgataatggtctaattggcatgccaagcaatgtctgttgcgttgttgttgagtatcttgctggaggcaatttgaaacaatatctaattaagaacaggaggaggaagttagcttttaaagttgtcatccagctggcacttgatcttgcaagagggctgagttatcttcactcccagaagattgtccatagagatgtaaagacagagaacatgttattggataagacacgcacagttaaaattgctgattttggggttgcacgtgttgaggcatcaaatcctaatgatatgactggggagactggtactcttggttatatggctccagaggttttaaatggcaacccctataacaggaaatgtgatgtgtacagttttggcatctgtttatgggaaatatattgttgtgacatgccatatcctgacctaagtttctcagaaattacttcagctgttgttcgccagaatttaagaccagaagtaccaagatgttgcccgagttctctagcaaatgtaatgaagaagtgctgggatgccagtcccgataagcggccggagatggatgaggtagtttccatgctggaggccattgacacatccaaaggtggaggtatgatccctcatgatcagcaacagggttgtttttgcttccgcaagcatagagggccttgaaaatttggttataatgatttttcagtatttgaagaatcaatttgtatcatagtcagaaagcaggatttggatactagatgagacaaatacacaatagggggtacaggtaggaggagctggtgacatgtcaatatgttggtgggtgtgtaaaactgtacctctgattttcttttaccttcttttttcccccacattggtttgggttctgtgggtatgagtattactttcagcttggtggcaatgttgccagattggactagtaacatgcaggatcttcattatactattgcatactcgctcgcaatcataattgatgtgattaagttggatccgtttgctttgtaaacaataatatacaagcgttttattgaatgggaaataaaacctctttggtcgcttt

SEQ ID NO: 4941 - DNA, 1334 bp, Glycine max
  Clone ID: PAT_MRT3847_10446C.1
cacgcgtccgcggtttcaccagcagccaaccgagtcagggaaggaaggaagcaactgtttttggtgtctccctccacactttcactggttctccgaccaacacgacgccgtctaacctctctccttcttcttcaatcaatttctcacacagttcccaaaaacccaaacttcgcttttccccctcaccactctcgatccaaatccccgatcccgatcccaccaatcaccgaaactaaaaccaaaatggagcaattgaagacgatcggtcgcgaactcgcgatgggatcgcagggcgggtttgggcaatcgaaggaatttctcgagctcgtgaagtccatcggcgaatcacgctcaaaggccgaggaggaccgcatcgtgctgcgcgagatcgaaaccctaaaacgccgcataacgccgctgagcctgacataccaaagcgcaagatcaaggagtacatcatccgcctcctctacgtcgagatgctcggccacgacgcatcgttcggctacatccacgccgtgaagatgacgcacgacgacggcctcctcctcaaacgcaccggctacctcgccgtcacgctcttcctcagcgacgacgacgacctcatcatcctcattgtcaacaaccattccgaaggacactgacatccgtaactacctcgtcgtttgcgccgcgcttaacgccgtttgtagactcatcaacgaggagaccatccccgccgtgctgccacgtgttgtggatctgcttaaccactccaaggacgccgttaggaagaaggccgttatgtcgctgcaccggttttacctgaaatctccgtcctccgtttcgcatttgatgtcgctgcaccgctttcaccataagtccccgtcctccgtttcgcatttgatctcgaattttcggaagaagttgtgtgataatgaccctggggttatgggtgctacattgtgccctctcttcgacctaattgcggttgatcctagcccttataaggaccttgttgttagctttgttagcattcttaaacaggtcgcggaacacaggttgcctaagagctatgactatcaccagatgccggtgccgttcattcaggtctgttttagtgattgatctgagagaaaatgtgctgatttgaatgaacttttacataattacttatataggagaagaaagtaggaagttaaaattgaatattaggtctttcccataagctacaattaacttatgcatttcatcttgtggacaagttaaatgagatattttcttgcaacagttaagtaagtgtgtaagtgcatgtttgaatccaaaagtactacttttactctggaagctacaaa

SEQ ID NO: 4942 - DNA, 502 bp, Glycine max
  Clone ID: PAT_MRT3847_104470C.1
actttggccacttgcattgccccgttcctgggtcgtttttcctttcagcctttcaatgagaatcctctcctggggccatcattaataacgctaaggaaaatgggggctctggatgcgaacaaagtggttcacagacaccagggttggcgcctcatcacttgcatgtggctacatggtggagtattccatctagtggcaaatatgtttggtcttctagtggttggaattcagcttgagaaagaatttgggttcgtgcttattggattgctatttgtcatttctggatttgggggtagcttgctttctgctcttttcattggggaaaaagtctctgttggtgcttctggtgctctttttggcttactaggaggcatgctttcagaactccttactaactggtcattgtatgaaaaaaagctaggagctctcttcacttatgtgtttgtcattgctatcaatctagcagtgggggttctcccacatgtggacaactttgctcata

SEQ ID NO: 4943 - DNA, 353 bp, Glycine max
  Clone ID: PAT_MRT3847_104471C.1
cgagtaaacacagagtaagtgaaatcctacgtacgtgctcattccggtggaactatcatatcctctccgggatctgaatctgcgaaatgtaatgtacttcttcttctcgagaaggatccagaagaagaagaaccacactcaccaatgagcaaaatccgtctctgccagaggattctcctcctctctctcttctttctctccgtcgtcgctcctctcgtcttcgtctctcaccgcctcaaccttctcactcttctcgggagaagagagtttctcgaagatttatatcgcgctacatacaggggagatcctttgaagttaaatgctgtagaacagggaggtgctgacggattaga

SEQ ID NO: 4944 - DNA, 1030 bp, Glycine max
  Clone ID: PAT_MRT3847_104472C.1
gaaggacaatccaagaatgccatgaagcccaaatattctagattctcacagcaagaacttcatgcctggcaaccaattctaacacctagttgggtggtggaagttccattccgatatgatgatgaatgccttccacctgatcataaaaatgatgcagtggcatatatcaaagacgttgggtcaaacaaaacttgcaccaagaaattgactatacgttaaaagtagagatgataaacaactgaggagtaaagcagctgagaatgatgtaggctcatgtagtcccgaagactatacaccaaatgacatgggccataaaccaattgttccttgtggccttattgcttggagtctttttaatgacacatacaaacttacaagcaataacaaggatttggtgatcaacaaaaagaacatagcatggaagagtgaccaaaatgggaaattcgggtccgatgtttatccaaagaattttcaggctggaggtttgattgggggtgctagacttaacgagagcttaccattgagtgaacaagaggatctcattgtttggatgcggacagcagcacttcctactttcagaaaactatatggaaagattgagactgacattgaagttaatgatgtagtgcttgtaatagagaacaactataatacatacgagtttggaggcagaaagagcattgttctttcaaccacaacttgggttggtggaagaaataacttcttggggatggcatacattctcattggtgggatttccttgttattggccgcagctttcctacttctatatgtgatgcagccaaggccacttggggatccatcatacttgtcttggaacaaaaatccaggaagtctaagatgattggatttcatcttttgaattgaattgtttaacaattcattatttcccatgtctcaagaaagggatctgtcacgatgcttgtacttgggactatcttcatgaactttttaatctttgttgtttcatagaactttccccactattaattaatttatgggtagatat

SEQ ID NO: 4945 - DNA, 220 bp, Glycine max
  Clone ID: PAT_MRT3847_104473C.1
attagctgctgattttattgaaagtaaggatgtttgcaaaaactatgctgaggcaaaggatgtcatcctgggcatgtttttgtatgaatatgcaagaaggcatcctgattactctgtcgtgctgctgctgagacttgccaagacatatgaaaccactctagagaagtgctgtgccgctgcagcacctcatgaatgctatgccaaagtgtcgatgatttaa

SEQ ID NO: 4946 - DNA, 663 bp, Glycine max
  unsure (1)..(663): unsure at all n locations
  Clone ID: PAT_MRT3847_104474C.1
tacgaaattgggagtcacgttgaatatcgtggctatgtctgtagaaaattcatccacctcggtgtctgtcgcagaaggacaatccaagaatgccatgaagcccaaatattctagattctcacagcaagaacttcatgcctggcaaccaattctaacacctagttgggctatttcaatatttacggttataggactcatattcattcctgttggtcttgcttcattgtttgcatcagagagtgtggtggaagttccattccgatatgatgatgaatgccttccacctgatcataaaaatgatgcagtggcatatatcaaagacgttgggtcaaacaaaacttgcaccaagaaattgactgttaagaataaaatgaaggcccctgtttatgtctattatcagcttgataacttttaccaaaaccatcgccgatacgttaaaagtagagatgataaacaactgaggagtaaagcagctgagaatgatgtaggctcatgtagtcccgaagactatacaccaaatgacatgggccataaaccaattgtccttgggccttattgttggagtctttttaatgacacatacaaacttacaagcaataacaaggatttgggtgatcaacaaaaagaacatangcatggaagagtgaccaaaatgggaaattc

SEQ ID NO: 4947 - DNA, 257 bp, Glycine max
  Clone ID: PAT_MRT3847_104475C.1
ggcccgttggacgaagctttggcttctctggctagcttaactaatcatcaaccatgtactgtcataagaccttgctttaactaaacccttttttaagccctgtgaatagagctgtactcccagtaatttctgtaccagtgcaggtgcatctaagctctgaaacacgaatacggactcttattacctggatactagcatcaatactggcctgtagctactgtgcagatccaatgcaactttaccctactaatgttttc

SEQ ID NO: 4948 - DNA, 570 bp, Glycine max
  unsure (1)..(570): unsure at all n locations
  Clone ID: PAT_MRT3847_104476C.1
ttatttccttttttttttttttttttttttttttttttttttttttttttttttttttttttttttttttttttnttttgggggtttggaaaaaagcaagaaacattaagggggggggggacccccaagaaaattcacattttcggaaggccatgggaaaaacaaaaacttccccaaacttttttttaaaaacccccaaaagcccccaaggcacccttttttttcaggcccacttgccggggacaaaattgggggcgaaggcccagccattgttgttgacggggcccccaaggggaccaaaaggggtccccaagggccccttaccggggacaagggcccgaacaaaaacccccaccctagagaaccgggccaatcccccggtctggggttccttccccttaagcccaaaaaaagccccgggggcatcagcagggcccaaggggtcaaagctgccaccaggggaaatggggtcagggacccccccggggggcccaccagcaatacgataaccctcaacagcccccattaggataactgggggggcccaaagggggaggatgccctgggcgg

SEQ ID NO: 4949 - DNA, 531 bp, Glycine max
  unsure (1)..(531): unsure at all n locations
  Clone ID: PAT_MRT3847_104477C.1
ggctcgagagattttataatgcatgtattgctttgacatctggtaataggttttgtttttaatgttagtatcacagacagtaatcgtagtttgacatcgtgaagactctattattatctcttctcattttctagaatttgtattgattgatacccagattgacctttatctatatgttgttaatgtaatatacagactattacttcattgattttgattgataatttcttttgaaggaattctgtgtcaacaaagcggtgcttctgtaagttcgaatcctccaaagcttaggaggaatgcctctgcttcatatgatataagtagcacctcttcccaatgtggtccaacatttccaggttatactttagaactataggttaccatattaagaaagtgtggggttgctaatccaactcaaagattaatttgaacatctacttttaattctgntgtgtaccctgcaagcttcttttcaacgtactgctttaaatagtcaactacccggtcaattgttagttcatttgtaagatg

SEQ ID NO: 4950 - DNA, 749 bp, Glycine max
  unsure (1)..(749): unsure at all n locations
  Clone ID: PAT_MRT3847_104478C.1
cctatcacatgcagcagccttaccttgatgctatagtgaaccaaaatccttttgtcacttccacttccaaataacaatgtaatcaccaagggacctacaaacatgggagaaatgcagtacttagaagcagaaggaacccagaagttgggggaattgccgcacccggtcctcccaggacttgagttgcagctttaatgtcttgacattcatttggcagttataaaaccgaagtccagacttccggttgagctcattgcaatttgtatcagcccagggctaagattttctttttcctgggtttaatttcaattgctctggtatggatgaaggactagttttttgtgggttttctctggatttgggctgggttattgccagatttggtgcatcggatgtcatgattgtgctgaccactgagttcatatttgagcatgcaaaccatccatatttgcagattgaattctgagattcaagcttgcataacacacagaatcacatgtctgtattttgacaatcataatgacatcatatatcataatttgaacctagcagctgactgaagatgttattagatgttntaaaattaaagaaagcctttattaacctgtgttgctttcagatgacaggatattattttggntggatgttttaagattgaagaaagcctttactgggtacttgtgtgctttcagatgataggatatttgtccctattccccattncccatgcgttctcattatatccaata

SEQ ID NO: 4951 - DNA, 693 bp, Glycine max
  Clone ID: PAT_MRT3847_104479C.1
gggagcctcctgatgagaatggggaccacagtcttttggagtcctgtcagcaagatgacattgccactgaaaatgaagaggccggggaaacctttgtttacgagaaaactgaattagactgttcccctgaatctctccaaagcaaatattcaactgaaggagaatgtggcagtttgataggctctcctgagaatctggtttgtgaggaggacttgtattgtgagtttccacccaaaggaaacattgagaagagtaagagtggacaatcaagtaattccagtgctaaaaaggggtccaaaagaaccagaggcctgctccaacctgtgatccatgcaacagtggctgttgataaaaagggtattagcaatcttagccgcatagattcaagatcagagcggatagaagcctggcggtgaaagaagcatcactgtgatcgagtgtagtttgattctgacattgtgcattgtaattgtaagtttgtttctaggacaagtttgtgaagtggttcagattttttttttttaatttcctcggtttgtttaacttgtttgatttctagaatgacattgtactgaaataacatatcctatgtgtgtttacttgtattctcaacttctcataattattcctgaatgacaggccattcacctgtcaatgttgcaatggataaattaatcacttccggatccaaaa

SEQ ID NO: 4952 - DNA, 168 bp, Glycine max
  Clone ID: PAT_MRT3847_10447C.1
aactaaattattttttttgggggtatattggtttttgcaagtaattttttttttttcttagaagttattgggtgcttttacgattttattgaaaatacttgaaaagaagagggacactgtacgatatcactagctattggtagtgaggcaataggcaaataggacaat

SEQ ID NO: 4953 - DNA, 378 bp, Glycine max
  Clone ID: PAT_MRT3847_104480C.1
tcgattccgttccaggaaggtttcccgtcatcactgtatgacgtcctccttctttgggggggggggggggggggacacataaaacgcgaccgggaggacaaaattagtgtaaaattcgctagtatggtaacggtacacagggataagatttaggactaccgttaaagagagagcatagggggccaataattttaggggtaagtaggcagataagatacacgaaacaaaacccaaaacaaaaaacaaaaaaggaaccccaggcagtagagcagtagcagtagcgccgccacgtgaaaagcattggcctgggcttataagcccgccaacatggcacgagcgctacatgaaagcgtttgttgggtgtatgaccagtaagtg

SEQ ID NO: 4954 - DNA, 312 bp, Glycine max
  Clone ID: PAT_MRT3847_104481C.1
gcacgcaaacgtaaacttcggatcgagctcgagacttaaaaaaaaccatccccttctctatcttatatattgatctctccgactggctagccttacttgtggtggtacttaccaaggcacactccacctataccgttcttttcaccttcaacaagttcaacccacaccaaccaaacattatgctccaaaaagatgctagtatttcatcctctggggtgttacaactcaccaaagttggcagcaactgcgtgcccacctcgggatctctccgtcgtgccctttactctactcccgatccagatttgccacatg

SEQ ID NO: 4955 - DNA, 338 bp, Glycine max
  Clone ID: PAT_MRT3847_104482C.1
attccattggtccaactccacacaccttgcaagagttacaggatacaaccttgggttctttcttggcagggcttatgccgaactgggatccccctcaaaggagattcccattaaaaaaagggggtccttcaccatgggggccaaatgggaatgaaaaaagggggccttaaattggtctacctaaagatcaaagcccttcaccttacaagaaaccacatgacctcaagaaggcatggaagggtggtgttttcactgcggtcataaagcatatgttccctgatattggccaaatttgcaagcttgggagggaagctaaatggctttaaaacaaaatgact

SEQ ID NO: 4956 - DNA, 317 bp, Glycine max
  Clone ID: PAT_MRT3847_104483C.1
acattggcaaaaattttttattatcaaaccacctgttggtgttaaaaaaatgatgaacatgccaagaaagcaataacccaagcgaggcttttatatccagccactggtacacaacattgatgcttttttcacctacagaaaggacgacccaaaaagaatggtcactacacatttctaacacgatttacacttacataagactgggtcactttacagcatactgcatttttaatgatccaccgctctaaatttatttcacagactactactcatagcactgtattgggatttctgtttctcaacttgcccccaaacaa

SEQ ID NO: 4957 - DNA, 559 bp, Glycine max
  Clone ID: PAT_MRT3847_104484C.1
gaattcgagctcggtacccggggatcctctagagtcgacctgcagggggcacagcgactatgacacttaactatctgctgaggcttcggagtctttttattctgcttatatgtctcttacccgcgacgtgcggtttggccgctcacatcagggatattgcctcctttgttgagtgacaaccatgtcctgaaaaatatcttttatacaggtaagctcttccaaaaaatgtattatttggagcatcgatacgtatcgccatcccttgctaatgtgtatgatattaataatgtgtgaacattctaaaagtttataaaagctaactaaaaaaacgttatgccccatagagtgaggaatttttaatagatgtcagctacacaaacataatacctagatagtagcagtatcttatctcttgacaatatttgatacggacatgctgtatggctataaactagctcgtgctgtattgtgcttcaactacatggggttgcaacgtttgtatgcattaaatgttacctgctgcgggtgctttgcctaccacaccctaattagtattaaa

SEQ ID NO: 4958 - DNA, 433 bp, Glycine max
  Clone ID: PAT_MRT3847_104485C.1
ttacgatagctcgtaatttggctcgaggcaccatccatttcatataggaaaaacaacaactctttcttttttaacgtgctcaagcctccattatggggttgaggtctacaccatgtggcaagctctcttcaacattgacttttcaattcttctcatcgcaacagttttagtagttagtggatcactaacagcactttgacaatttaggacagattgggatctcactatttgaccccaaaatgatccttacaacttttgttttccttgtgagcatatagaactattttttaagagcatcttctgtctctgtttcttagtacttattgaccaaatacaaattcctttctcccttgttgctcactctaatcatgtcttctatctttatttggacacatttttattatcctctggtatctccaaactcatctttttt

SEQ ID NO: 4959 - DNA, 192 bp, Glycine max
  Clone ID: PAT_MRT3847_104486C.1
ttacgcgaccaaaaattgacaaggaaagccttgttctttagatgcctttcccgcatagggtcgttgtgtgattatttacccaggggaccataatgactatccccatcattgtacacttgaacacgggcctcctaagccttgtcacctagatgcattcttaattactgctaccaacactagctaaagcccaaa

SEQ ID NO: 4960 - DNA, 583 bp, Glycine max
  Clone ID: PAT_MRT3847_104487C.1
ttcctttttttttttttttttttttttttttttttttttttttttttttttttttttttttttttttttttttttttttttttttttttttttttttttttgggaaaaccccggccaaaggtccaaaaaaaaaaatttttaaaaaaaacaaaggggggggaagggggattggcctcccttttgggaaacccccccacccttaaacagggccccggggggttccaagggaaaaggggggccacatttttaacggaaaaagggggggcagggccaaacggaaggccccaaagccaaaaaaaccccttaacaaaggcaaaggacccccctttaagggacaagggttgggtcaccaagccatttttaaaaaagggggatggtaaaagggtcccaagggaaaaattcacaggttccttttcacagggggggcccaacccaaaaaaaggggcccccccaggggggggcttcacctttgccttgggggggaagccaattttgaccccccccccaaaaaaaacaggaggggggggcccatcataggggaaagacaaaaaccccttaaaaccaccacaagcccggggggcca

SEQ ID NO: 4961 - DNA, 427 bp, Glycine max
  unsure (1)..(427): unsure at all n locations
  Clone ID: PAT_MRT3847_104488C.1
ctttccactacatacagccatgggagaaaaccttctgcatataaggaacgaatatttttttcatgtgcacgttaaaccactacaggaggaaaatgtacttcccgatgtactaaaagtaaatggatctgatattctatcgacataccttacttgcgcagctgaccccgaaactacgcttggtatatagcttccgatcttggttgttcttgtcaataatctaaagaagtatttcacatttgagattcgagtataggatgataagaaagcctgacgacgaacccgagcttcaacttttcaagatgtcactcccaaatagccctacatttgcactatgccactgtctatggctgaagcatgagcaccaaaccagngaaaccaggttgattatccccagacaccttatggttctaatcaagtgcagacactg

SEQ ID NO: 4962 - DNA, 169 bp, Glycine max
  Clone ID: PAT_MRT3847_104489C.1
atcacacattctcatgctgattataatcactaacctctaacctatgcgacgaggaattcggcaatcatcaatacacatactatggtatctgatcacaatctcaagttccatcaaatgatgcaaacgtgaactaacaagacatactacatatcacatattggaaatgaat

SEQ ID NO: 4963 - DNA, 306 bp, Glycine max
  Clone ID: PAT_MRT3847_10448C.1
aggcttcagcgggcgccctttcctttttattctaattgccttttttgcttttgtggccggcatacaggggaaaattatttactacatccaccaatagaacacaaacagaactctccataacgggacaattaccatcgagccaaacccgactcatactaaaaggtggttacaaacccattacacgtgacatttgttagtaaaaagatagggaaaaaccaacatgggaacatgagacggaagatgctattcaaacttaaacccctcgcgaaaaccctacaccaaacgcaaagtagaattcttgggcat

SEQ ID NO: 4964 - DNA, 885 bp, Glycine max
  Clone ID: PAT_MRT3847_104490C.1
gttcctgggacgcatggtgtctttggtgagggcgttgttgtacatgatagcacagtgcgccggtgcaatctgcggtgctgggttggccaaagggttccagaaatcgtactacaacaggtacggaggtggagttaacactgttagcgatggctacaacaaaggtaccgctttgggagctgagatcattggtacctttgttcttgtctacaccgttttctccgccactgatcctaagaggagcgctagggactctcatgttcctgtgttagcaccacttcccattgggtttgccgtcttcatggttcacttggctacaatccctgtcactggaaccggcattaaccctgcaaggagtttcggaccagctgtgatcttcaacaacgacaaagcctgggacgaccaatggatttactgggttggaccgtttgttggagctgcggtggctgcattctaccatcaatacattcttagagctgctgcaatcaaagctcttggatcattcaggagcaacacttaattaataatctccactacctaaattatgatcatttgtcctgtgtcacccaaaacaataacagtgtttcagttcaattcttggagttccttcctttttggcttttctgcttacccgtgggtttggggcaaaagccaaataccgtgggtttggggctcttgaatttgtagataagaatgcttttatgtcaagggtgtatttgtatcccttttgttttgttttttttttttatttaatttctttctttcttccagtatttatcatcatgtgttcactttttatataatgtggtggatcattagccaaattttaccttttgcctgcttcttcgttagtggtgtattttcatcagcttcgatctgcttttgcat

SEQ ID NO: 4965 - DNA, 477 bp, Glycine max
  Clone ID: PAT_MRT3847_104491C.1
ttggtgtttttgctggaacataaatctgacgaaataaattttttttttcttaaataaaaattacttactcattcattcaatttacttcaataaaggtgttagccccacttcccattgggtttgccgtcttcatggttcacttggctacaatccctgtcactggaaccggcattaaccctgcaaggagtttcggaccagctgtgatcttcaacaacgacaaagcctgggacgaccaagtaagtaaaccttaacttttggacaaattaaggtttattttttacatgaaaaaatatatatatttgttaacaccaataacatatgattgtgattgttctttttagtggatttactgggttggaccgtttgttggagctgcggtggctgcaatctaccatcaatacattcttagaggttctgcaatcaaagctcttggatccttcaggagcaacgcttaatgaaaaaaaaaaaaaaaaaaaa

SEQ ID NO: 4966 - DNA, 400 bp, Glycine max
  Clone ID: PAT_MRT3847_104492C.1
gagcctgattataaacctatttggatgatcagagttgaatggacattattgattcagggaaaacttccctactctggcaaatagatcaatctacaaaccaaacactttaagaattggaagaagagcagcaaattttctccaattacagactatgtttaattaatacaaaatgattttcaataaccaatttatttcacttacagaatgaaaataaagcctaaacgggccatcctgcttttcaaaaaacttttcactggagtgaacataaaacataaacggctgggcttcaggaaactaccaagcaagaagcaaccccctaactttataatcaaagaaagcaggggaagggtcatattcccttcttgtttttttccagatgatgaacatcaaaaaccttttt

SEQ ID NO: 4967 - DNA, 126 bp, Glycine max
  Clone ID: PAT_MRT3847_104493C.1
cccatgtgaaaaggctcctcaggtactagtcctttggcctcaccgcatacgtaagcttagtttgaatattaacgaattaatttcaagttttcttaaaagaaattttactcatcagttacggatttg

SEQ ID NO: 4968 - DNA, 234 bp, Glycine max
  Clone ID: PAT_MRT3847_104494C.1
cacgatcaactgttcagacaagaggtttaatctgaatgactaagagcactaagccgggacatattagctagcacaccaagtcgtgtcgtcactcacactgtttaacaaattctagcttcaatgaagagcatagtacttcagactctattgctcgcaaagatacgcaaagtctcaaactccacctatgctgaattcaccactccagtttcactccaatgcatcctaagttgcttt

SEQ ID NO: 4969 - DNA, 1161 bp, Glycine max
  Clone ID: PAT_MRT3847_104495C.1
tgacttgtaatgtatgtaaagtttgttcacaacgaatgctctacagctcaagtataaaagtgatgtttcttgtgcccaagtaaagtacactcctaataccgatttgaaatgaattgtgcaatgaagtcaaagatttgtgcaagagtgggagggtggagtctgtacactacatgaaatatgatcaaggatctctaaaagctctctatcatgttcttccgatgacacacgtttcagtcactaagcttcaaagcttgcttgagggaggtacgtaagctcggaattcggctcgagcttctcttttctctttctgttttttcctggttactttctatgcctgctgtacgtcagggaaacgtgttatccattctgagttaactgaaagaaaattcattgaagtccagaaagctctaagtgctactgaagctatggatgttgatcactgtgaaccaaacagcaagttcaaaaaaactggtttccatttaaatggaagcaactatgacgtgtctacatgtggggttctccactccattggatcagatttaacaagaatgaaagtgacatctgagacaaactatagtgactccgggagtggacagaaaactataaaggcaaaagagcccgggaacacccccataagcaggccagttatctcaagagagagttttgcgcaaggcaaagagaatggcagaacaaatggaattgaaaatcaaggggacgaagctgatacaattatatgcagcaagtcttcccaagacaaacgaccaaggaaaactagcgcggtgaaggagcctatcaatcaaaatatgaagcgccagagatctgaggctcagtaagcctgaattcagatccctgaaatatgtccggatgatatagtaacaaaatctgacttgtaaacgccttaaacactatcatatgtggcgtataagacaagcatatagtagtagtagcagagataatgacttggtagaaatccctgtggtctgcttttctagccgactttttttttttatatatatattggctcacgtcaaatattgctgttagattaaggatagatgaatcattttacagattttattagaagcacttaattaatactcgttattttttttgttattatatattattttacttattatattctttttttttttccaaaaa

SEQ ID NO: 4970 - DNA, 1363 bp, Glycine max
  unsure (1)..(1363): unsure at all n locations
  Clone ID: PAT_MRT3847_104496C.1
actcgcacaagctctagggaataaaccaagaaattatatacgtatacccattaattatgatgaaatcttcttcacatctttctgcaatattcctattgttctttctccttactgccctatccccttcggatggagtttcattctcttcattcctaaagcaattaaaacagaagctggagaagagtcccaccctaaaagatttcctgaaacccaccactataggggatatttattatacgttgaatttcacagaaatcttctcttccgaagagagaagcgcaccaccggtgtctctcatcaaagattacttatcaaactacggctacattgaatcctctgggccattgagcaattcgatggaccaagaaacaataatatcagccattaagacctaccagcaatatttcagtttgcaacccaccggcaaactaaacaacgagactcttcagcaaatgtcgttcctacgatgtggcgtccccgacattaacattgactacaacttcaccgacgacaacatgtcatatccgaaagccggtcaccggtggttcccccacacaaacctcacatacggttttcttcctgaaaaccaaatcccagccaacatgaccaaggtgtttagagattccttcgctcggtgggcccaggcctctggggttttgaatctcaccgagacaacctacgacaacgccgacatccaagtagggttctacaacttcacttacttaggaattgatatcgaggtgtatggtggcagccttatatttttgcaacccgattctaccaagaaaggggttatacttctcgacggtaccaataagttgtgggctcttcccagtgaaaacggtaggttgtcgtgggaggaaggagttttggacttggagagtgcggcaatgcacgagatagggcatttactagggcttgaccactctaacaaagaggactctgttatgtacccttgcatattgccttcacaccaacgaaaggtgcagctctcgaaatctgataagaccaacgttcagcatcagtttgctaacgtagaggactctgcaggccacgtagggcgtttgggagtgagtttaattaccactttgtctcttggattcgcttacttacttctccttttgtattaattaggtctactcgtgcgtcacgctttaccttggttgtaataattttatgattgttgaatgtgcatcagtgcatgttcccccgcgcatgatttctttttgttttactcgtacgtgtcgttgtttcttattggtctttggacatcttgtatatcttaataaataaaagattgttgtttttttatttcaaaaaaaaaaaaaaaaaaannnnnnnanaaaaaaaaaaaaaaaaaaaa

SEQ ID NO: 4971 - DNA, 1068 bp, Glycine max
  Clone ID: PAT_MRT3847_104497C.1
ggctcgagcaaagcctccaccaatgtcgctgctgctgccgccgccgaaacctcaccggagctccggtaactcccctggcgacagcattccagactggatctccgaatcaatcaacggcggctccctccgccgcgtcgacctcaactccggcaccaacggctgggcgtcgccgccaggctccgtgttctccctccgctccgaaagttactttcagaaccgccaaaaatctcccgccggcgactacctcctctcgccggcgggcatggactggctcaaatccgccgcgaaactcgaccacgtgctctcacgcgcggacaaccgcgtgatgcacgcgctgcgaagatgtcaaaccctaggtcgctccctaaagagcttcgtcttcgcggtgaatctccagatcccgggcgcgaaggagcaccacagcgcggtgttctacttcgcgaccgaggaaccggatccggtccgaaccggttcactcttaaaccggttcgtgcacggcgacgacgcgtttcggaaccagcggttcaagctggtgaaccggatcgcgaaggggccgtggatcgtgaagaaggccgtggggagccacagcgcgtgcttgttagggaaagcgttgaattgcgcttactacaaaggttcgaattacctcgaaattgacgtcgatatcggaagcagcgcgatcgcgaacgcgattctgcacctcgcgttggggtgcgtgacgacggtgacgatcgatatggggtttgtggtggaggcacaggcggaggatgagttgccggagcggttgatcggtgcgattagggtttgccagatggagatggcgtcggccacggtggttgaggcgttgcacgtgccgcgcggggttgggtgggccaaggtgaatcatcataagtctgcggatgagcttgctttggatgattagatatttgtttagtgatagtagtacgaagtttatgattttttttatattttaattattcttcaatggattttaatttcttgtttattggatatagtagaaatataaaatttcttacacctagttgcctattattttgcaacactagaagt

SEQ ID NO: 4972 - DNA, 362 bp, Glycine max
  Clone ID: PAT_MRT3847_104498C.1
gactttcctaacgagaaggggagagactaatcgaagatataattgaataaagtaacgttgcttaaggtagcttagctgcttttcctgttatggttcagttcaacgactgcacttgctactctattcgatccaggtcacttcattacataagtgctgcgctacaattactatgctatgatcaaatccacatccactgcatggtatgatctgagcctttgctcagcaccaaatcctacccattgccaatccgtagattagatcgaaacaagacatgactcatgtcacgtagcttgcatttgctatacgatatgtaattggacgtgacgttgtgtagatataacctactcctgttatgacatatc

SEQ ID NO: 4973 - DNA, 974 bp, Glycine max
  Clone ID: PAT_MRT3847_104499C.1
agcacacggatttaggtagcacttgcactccacaaacttattggagcagacaagaacttaagtctgtagccatggcaatagtaatcaaagtggcggctctctctggttcccttagaaaagcttcataccactcaggccttatccgagctgcaattgaactgagcaaaggggaaattgaaggaattgaaattgagttcattgaaatttcggagcttcccatgttgaacactgatcttgagatcaatgggacctacccaccaatagttgaagcttttcgtcaaaagattcttcaagctgatagtattctctttgcttctcctgaatataattactctgtcacagctctactaaagaatgcaattgattgggcctctaggcccccaaatgtttgggctggcaaagctgcttcaattgtaagtgccggtggggactttggtgggggaaggtcacactatcatcttcgccaaattggagtgtacattgatcttcgtttcatcaataaaccagaattcttccttcttgcattcaaaccaccaccaaaattcaatgatgatggtgacttaattgatgaagaggccaaggataagttgaagcaagttcttctgtccttgcgtgcatttactctaagacttcaaggcaaaaactaagcttgaagttactttaattccacgaattattgttgaaataagctgaggatttagaaataaaccaatgttattctgaacgtgaatgatgccactatgtataaggatggtttttaaaggtcgaaaatgtgttagttctctacttctcttggtacatttggagtaatgtttgcatttgttgtcctctactctaattcggttttctcactcgtatcatatagttagttctctagtacgcaatactctgacatttttggtatataagggcacgtggtatcgtactatgtaataatgttatgtgtgtttctttatgtaagaaatacttatagt

SEQ ID NO: 4974 - DNA, 331 bp, Glycine max
  unsure (1)..(331): unsure at all n locations
  Clone ID: PAT_MRT3847_10449C.1
aaatctcatgcanngnacgtaagctcgtgaattcggntcgagatcccannaacancaacgccagntaanancactctgnncagctcangggntntactaccgatcgggaatncngagnttactgaanagcnnnagcaccatcacntanngncnattntagtccggtgtanncgnggttgcttgnngnanagnntggcntngttccnanattnnggnntnanaagnataantnccntgggttcagtatnatctggnngcantgngnncctcgaggnctanggtnctnggccantgtntctctgcgagnccgaattntanaatcctaatnccn

SEQ ID NO: 4975 - DNA, 448 bp, Glycine max
  unsure (1)..(448): unsure at all n locations
  Clone ID: PAT_MRT3847_1044C.1
gtcgtactagacattgaaggccgccaaaacacttaaatattattctttgttggtttttatgtttgaaactaaattattctcttaaatcaatcaactttgagaatatgtgacgaatttgttctgctatagtgggacagtgtgagttaattaactaatgaaaaagtttcaaaaaggttccaaatagaataaaacacatcataaagagatacatttgaacggaacagttttcagatatagaaatataattaaagtggcaaaaccattgacctcttttaattacttagtattcaaatagaatttactttctgccgacttttaaccatttgattactcgatattcaaattgaatttacttttaattacttttactntgacatacatacatgttgcatttnttaaccatttaattaattaatcacagccctgtcttgtgcagacacgtaatatt

SEQ ID NO: 4976 - DNA, 1844 bp, Glycine max
  Clone ID: PAT_MRT3847_104500C.1
gaacataataacataggcaaatgttcctcagactcaccgaactcaccgtaacaccaaacaaccaccaccaccaccaccaccgtcaatccaaaagcaaacccccaacaccaccctccaccatggactccatccccaccaccccccctctttccccttcccgtccccctttcacccgcctccaccatggactccatcgccggagctccgccacccgccgacgtccccccttccccgcctccccagtcgccgttcccccgccgcgaaccccgctggcccgaggccgccacgtttacgcttttccccgcgcgcggcctgcccctcctaaacccaacctccgctttccgcgcccgcgctcccgcggctccctcccgaccacgtccgcgcccctcccggccatgcccgcaccaagccgcgccgccccccggtgcgcggaccgcaccgccacgcacccctcccactgttgcgccttcccgtttctcttcctctttctattttccctttcactttctctctcttcaaaccctaatttcctttttccgatgccggacttccacgactccctcttcaccacgccgccgccgcagccgtcccgccccgtccccgtccgcgaggactgctggtccgaggaggcctccgccacgctcgtcgacgcctggggccgccgctacctcgagctcaaccgcggcaacctccgccagaaggactggcaggacgtcgccgacgccgtcaacgcgctccacggccacactaaaaagacgcaccgcaccgacgtccagtgcaagaaccgcatcgacaccattaagaagaagtacaagatcgagaaggctagggtttcggcctccaacggtactctctcttcctcttggcctttctacgagcgcttggacgctcttatcggccctaattttagcgcgaagaaatcaacctcttcgccgtctccgtcgccgccggtggctcttcctttgctgccgcatcggaagaaccagaaccaaaaccagaacccttcctcttctcctgcgattgcggtgccgccgacggccgtcgctctgccgcagaagcgctcctcggcagcggcgatggacgagggttacttcagaaggaattactccgccgtggctgccgcggcggcggcagcggaggctgatgaggacgatgaggaggaagacgaggaggaggcggaggatttggaggaggaggaggaggaagaatgtgaagaggaagggagagggagcgaagtggaggaaggggataaggagagggaagggatgaggaggttggcgaaggcgatagagaggtttggggaagtttatgagagagtggaggcgcagaagctgaggcagatggtggatttggagaaacagaggatgcagtttgctaaagatcttgaagtgcagaggatggagatgtttatggacacacaggttcagctcgagagaattaagcgcggtaaaagatctggctctaatgatatgtatagctagccaagtggtcgatggttcgttgacggtgctcgaaatgcttgtcttgctatggtctagtcaatgggaaagtacatatcttcaactgatatactgtcacgagggaatatctccaatagaaatttattttggagtaattttggattcttttagctagcctttaatttgttgttattagttcttataaattaattcggcaactaggcctaattcggctccgatatagaatttgctccaatcaatgtataacacttttatgccaaatgtccccccccttttcccttttcaatacctggctgaccagttgcttctttcaaaacatatatatacacgttttttttaaaaaaaaaaaaaaaggcgcggccg

SEQ ID NO: 4977 - DNA, 681 bp, Glycine max
  Clone ID: PAT_MRT3847_104501C.1
cagacaagaacttaagtctgtagccatggcaatagtaatcaaagtggcggctctctctggttcccttagaaaagcttcataccactcaggccttatccgagctggttccatctctctcaattatcttcatgttttgtttttaatttttgtttcatctttgatatatgcttaattgcaaattattgtggtgttgttgactttggtgagtgttggtgatgatgatgatcatggttgcagcaattgaactgagcaaaggggaaattgaaggaattgaaattgagttcattgaaatttcggagcttcccatgttgaacactgatcttgagatcaatgggacctacccaccaatagttgaagcttttcgtcaaaagattcttcaagctgatagtattctctttgcttctcctgaatataattactctgtcacagctctactaaagaatgcaattgattgggcctctaggcccccaaatgtttgggctggcaaagctgcttcaattgtaagtgccggtggggactttggtgggggaaggtcacactatcatcttcgccaaattggagtgtacattgatcttcgtttcatcaataaaccagaaattctccttcttgcattcaaaccaccaccaaaaatcaatgatgatggtgacttaattgatgaagaggccaaggataagttgaagc

SEQ ID NO: 4978 - DNA, 490 bp, Glycine max
  Clone ID: PAT_MRT3847_104502C.1
ccacgcgtccgagaaaatgaaatatttggtaatgaaaatgataattttttaaagaaattttatgataatttattttaaatattatgatttttaaagtgaaattaaataaatggtagaataaaataaatattattttctaagtgagcatataaatatgattatacctatttaattaagtgatatatacatatcgaaactatacgattattaacatcaattgacataactaaaatataatattcagcctattatctttttaaaaatatgtataatacagatttaaaaattaaaattttaatttattttttaataagcccccccccgggggtagaaaaaaaaaaaaacaaaacaaaacacaacaatagatatgctcccctcttcccaaaaaaaataaacccccccccacacaaatatctcctctccattactttaataaaaaaaaactattttttttttttacccccccccccccccccccccacccgcccaa

SEQ ID NO: 4979 - DNA, 283 bp, Glycine max
  Clone ID: PAT_MRT3847_104503C.1
cgggaaaaatcaaattatgttcttaggggaatttattgggaaagaaatgttattttggttctttggaaaaaaccttattttatttattttctacataaaaagggggaacccattgcttgagctaaggcaggggaaacccgaaaatattttaacacaaaaggcctttgggttttactcccccaatgaaaaattcttaagggccctgcccctggaaaagaagggggaaaaaaaacctctccggcctaaatcttgtgttcaaggtcccttcgcaacattgtacctt

SEQ ID NO: 4980 - DNA, 928 bp, Glycine max
  Clone ID: PAT_MRT3847_104504C.1
ctcgagccgaatcggctcgagtacggctgcgagaagacgacagaaggggaacgcagccaagaaaagaaaatcctcacccattttcttcgtagccaaacactctgaaattctcagttatgtcgtggcaagcgtatgtggatgatcacctactgtgtgaaatcgaaggtaaccacctcactcacgccgctatcatcggccaagacggaagcgtttgggctcagagcaccaacttccctcagttcaaacctgaggaaataactgccatcaataatgactttaatgagcctggatcacttgctccaactggattgtatatcggtggcaccaaatacatggtcatccagggtgagcctggtgctgtcattcgagggaagaagggtcctggtggtgttactgtgaagaagaccggtgcggccttgatcattggcatttatgatgaaccaatgactccaggtcaatgcaacatggtagttgaaaggcttggcgattatctcattgatcagggtctctaatctttgctttatgtcttgttatcgtgcatatttcattggcttctgtacaagtttttgcatcgacctggactggaatgctttgattgcagtgtaataatcttgttgtgagtatgaaaagtcacgggatctgcgtgtagtgaagaaagtgtttgatgcttgagaaatgatgactataatctctatctttgtacttttttagtggggtacctgtatacattacagtggttttaaaattttaatgctatgttataatggttggcatatttatcaaaagtttgcttattctatctggcagaaagccttcaaaaaaaaaaaaaaaaaaaaaaaaaaaaaaaaaaaaaaaaaaaaaaaaaaaaaaaaaaaaaaaaaaaaaaaaaaaaaaaaaaaaaaaaaaaaaaaaaaaaaaaaaaaaaaaa

SEQ ID NO: 4981 - DNA, 911 bp, Glycine max
  Clone ID: PAT_MRT3847_104505C.1
gttaattcagttagaatacagtagtataaatatgtaaagaagcggaattccaaggatataagaaacgcgtttatctgaattagggtttcttttccccttttggcaatgatgaacggaggaggaagacgacgaatcgtgctgataactggagtcggaaaaggactcggaagagccctggctcttgaactcgcccatcgtggtcacactataattggctgctcccgttctcaagataacctcaattccctccaatcccaactctctttttcttcttccaaccatttgttactcaacgccgacgtgagctccaatgagaacgttcaagaaatggcccgcgttgtcatggacaatagatctgttcctgatatcatagtgaacaatgcaggtacaatcaacaagaacaacaagatatgggaggttccgccggaggacttcgacgcggtcatggacaccaacgtcaaaggcacggcgaacgtgctgcggcactttatccctctcatgatagccgcgaagaagatggaggccgtcattgtgaacatgtcctcgggatggggaaggtccggcgccgcgctggtgtccccttactgtgcctccaagtgggccattgaagggctgagcaagtccgtcgcgaaggaggtgccggaagggattgccgtggtggcgctcaaccccggcgtgatcaacaccgacatgctcgcctcctgcttcgggccatcggctttactctatcagcagccgcaggcgtgggctctcaaggctgcaaccatgattctcaatctcaccccggctgacaatggtgcctctctcactgtatgaacttaataatccgtgcttacattgttgagaattctatcatttttagagaaaactaacttgttggaagaatgcttagcttttacatgttcgctaat

SEQ ID NO: 4982 - DNA, 830 bp, Glycine max
  Clone ID: PAT_MRT3847_104506C.1
tacggctgcgagaagacgacagaagggggcagccaaagaaaagaaaatcctcaattttttgagcagccaaacactccctctctgtctctcgaaaattctcagtttgcagagaaaatctgaatcatgtcgtggcaagcgtatgtcgacgatcaccttctgtgtgacatcgaaggtaaccacctcactcacgctgctatcatcggccaagacggcagcgtttgggctcagagtaccgacttccctcagttcaaacctgaggagataactgccatcatgaatgactttaatgagcctggatcacttgctccaactggattgtatctcggtggcaccaaatatatggtcatccagggtgaacccggtgctgtcattcgagggaagaagggtcctggtggtgttactgtgaagaagaccggtgcggccttgatcattggcatttatgatgaaccaatgactccaggtcaatgcaacatggtagttgaaaggcttggtgattatctcattgaacagggtctctaatctttgcttaatgtcttgttatcgtgcatatttcattggcttctgtacaagtttttgcatcgacctggactggaatgctttgattgcagtgtaataatcttgtgagtatgaaaagtcacgggatctgcgtgttgcgaagaaagtgtttgatgcttgagaaatgatgactataatctctatctttgtacttttttagtggggtacctgtatacattacactggttttaaatttttaatgctatggtataatggttggccttttttaaaaaaaaaaaaaaaaaaaaaaaaaaaaaaaaaaaaaagaataaccc

SEQ ID NO: 4983 - DNA, 495 bp, Glycine max
  Clone ID: PAT_MRT3847_104507C.1
aagcacacaatctaatagggggattgattaattagtctcccaacattggacactattccatgaattttccattacacgaccacaacaacaacacaacaacaacaggaaaaaccaaacttacaaacaggaattcccggggggggcgtgtcgggtcatacatccaaattctgcatctgaatgctgctcttaagaggcacgtatcctccaaggtgcccaccaagatgaacatgcaaggggctgttatcaataccctgaggaggaaagcttttggcaacataggaaaaaacactgtgcaccaacaacccgcggagggtcaaaataaccaaaagccccacaaggagccctcccaccacgattgtggggaaaaccccatagatcctccgtggggggggccggagccacgctgaaaagccgggagataaacccgcggaggggcaaccaaatgggctcaaacaaggacagtggcgaaaccggtacctgccccttgaggagggg

SEQ ID NO: 4984 - DNA, 2951 bp, Glycine max
  Clone ID: PAT_MRT3847_104509C.1
ccacgcgtccggttgagaagatgttcaagcaagagcaagaagaattcgaggcaaacatcaagactgctgttgctaaaaaaggggatccagaccaggctgccttcaaacttctcagtttaaaccgattgatgtgggatcttttgcttcaatcctatgtgtgggtccggcgcttgtacccattacactcacctgatggtttaagacttgaatctgatgtctctgagaaagttatgcatgaacatgattattcaaaggtggaaggtattgctagtagagaaactgggtctatgggtaattttatggaagatggggatgccaatgtaaaaattatgtttggctcatctgtgcaagtaaatgaactaccgataaaggaaattcctatcagtggaccttttctatagtgcaatgaactggctgatccatctaacgcacagaatggcgtccgaccgattgttgatgatttgagatcaagaagatcttctgaccaaaacttgaatttgagtctggatgttataccaactcatcttgaagtaggtgaaaactctccagtttctacagatattcaaactaatcatttggttgctgatttaaaggtattaaacaaaatttcttcctttcattcaccaatttccaacatgctggattcaaatgattggttctggaagccatttgctgacattcgacagataggcataaaggaattccagaaaagattattgccaaaatttgaatttgtaagcagctctattgctgaatatatacccacagcccatcaattaatcactgaggaaggtacaaggttgcatatccctctcaagactgacaatcatgttgtgtctgacttcgagggtgaaccctcaagcataattgcttgtgcacttgcgttattgaaagatgcatatgaggtgtcagaaattgatgatgaggatgacagaaacgaaagtggaataacttcaaactcaacagaaagtttgcatggcttgacccatggcgctaccttaacttcttcacactcattttcaagaagttcttcagattcagattctgtgcattctgcaggaagcacttcttcagaggagtcacgagcctctcgtgctacagaaaaccatagcatagagattgctatgggttatgcaaaatcacttgggagggaaaaatattcagtgatatgtcattattttaagcagttcccgtgaacttagaaattggtgttgcccatctgagcttgattttattgcttctttaagccgctgtaggaattgggatgccaaaggtggaaaaagcaagtcctattttgcaaaaacacttgatgacagattcatcataaaagagattaagaagacagaacttgattcatttttggggttttcttctctgtatttcaaacacatgagagaatcatttgaatttggcagccaaacttgtcttgcaaaagtcttggggatatatcaggttactaaaagacacgtcaaaagtggaaaagaggttaaatatgaccccctcatggtgatggaaaatcttacctacaatagaaatattacacgccagtatgatcttaaaggtgctctttatgcccggtacaattctgctgccgatggtgctggagatgttcttttggatcagaactttgtgaatgacatgaattcttccccattatatgtcagccataaagcaaaacgtgttcttcaacgtgctgtttggaatgacacatcttttctgaattcaatcaatgtgatggattactccttgcttgttggagtagattctcagaagcacgagcttgtctgcgggatcattgattatctcaggcagtatacttgggacaaacatcttgagacatggatgaagtcttcacttgttgtgccaaaaaaatgtgttgccaactgtaatctctcctaaagaatacaaaaagaggttcagaaagtttatgtctacatattttttgagtgttccagatcacctggtgttcccagaaatcctccaatccttgcaaactttgttgctcaggggaagatgacccttcccagcaaaagccctagcacaagattgccaagtggtttctctgtccaaatctttttgattcaatttctcaaaagaaaaaaaaaatacaaattgagaatttatgcaagtagttagcagtactgtatatagacagtcaatattgattataaatctagccctgctattctgcgatttttagcgaatttctagggatgctgtcatttacaggtccaccctctcccagtatgagatgagtaaatttttgtaggcctaaggtaaatgtaaaggtttatttaatcaaagcaaagcgtagttttcaacgtgctgtttggaatgacacatcttttctgaattctatcaatgtgatggattactccttgcttgttggagtagattctcagaagagcgagcttgtctgtgggatcattgattatctcaggcagtatacgtgggataaacatcttgagacatggatgaagtcttcacttgttgtgccaaaaaatgtgttgccgactgtaatatctcctaaagaatacaaaaagaggttcagaaagtttatgtctacatattttttgagtgttccagatcactggtgttcccagaaatcctccaatccttgcaaactttgtggctcaggggaagatgacccttctcagcaaaagccctagcacaagagtgccaagtggtttctctgtccaaatctttttgatttaatttctcaaaagaaaaaaaaatacaaattgagaatttatgcaagtagttagcagtactgtatatagacagtcaatattgattataaacctagccccctgctattctgcgatttttagcgaatttctaaggatgctgtcatacaggtccatcctctcccagtatatgagatgagtaaatttttgtaaagcctaaggtaaatgtaaaggtttatttaatcattgaaaagtacagttgct

SEQ ID NO: 4985 - DNA, 466 bp, Glycine max
  unsure (1)..(466): unsure at all n locations
  Clone ID: PAT_MRT3847_10450C.1
ccacgcgtccggaagaatctctgcttactctcttcactgctggtaatattcataacatagcctttctctctgtagaatttaattagtgttttgatcattcaagtttagtactttgattctcttcttcttgtacttcttcctcttccatgtaaattttgcagtagtggtgtgttgttgctactccttgtgttgtatgattgtcattgttgtatagaattttttagttggtgtgataatgacccaattgggaataaaaaaattaaataaacctctcatgaacagtgcgagtcgctttctttctatgtaagagagggcttttttgcctttttttttttttttatatggtttaagatatccaacttgttgatcctctngtgtggggatggngntgataacctagaaccaggtgttttaagttgcatcccttcgtgggagttgggatacccttatccctttgcttgcttaa

SEQ ID NO: 4986 - DNA, 360 bp, Glycine max
  Clone ID: PAT_MRT3847_104510C.1
ttttgtttttttttctttttttacatcaaaacccttcttttagggtgggctttcttggataaaggatcatcttccccccagaggatcctaatacaaggatttctacgaaccctgtcaaccaccccgaagaaaactctattttcccagggattgatccaccagctgtacaatctgtggtcaagcctgaacattggttccaggttactcttgcctctaccccactattggttcactcgttgcagacatctgaggcacgcatctgcgttctgctcctcacagaagtggtggaaagctatgcaagcagtttttcaccctttgtgcgcctatgcttgaactgcgtccccttaactggggcacatg

SEQ ID NO: 4987 - DNA, 314 bp, Glycine max
  Clone ID: PAT_MRT3847_104511C.1
ggggggtggggctcgagatccaaagaagaacaacaacgtgggatcctgtctaacacacacttcccacgggggtgctctggggaaggcgagagggctcaacaacatcacaaccccatacacaaagacaactttgcaatgagcaaaataccagggaacctgggtggacccagaagcatagccaggaagcaaagcctgccagtagagagaaccaaagtcaaacggacagaggaaactgagaccatgcaacaaaaggataggggagcggagcctcacgctagagactaaagggagaaagcggggagcccagagaaaag

SEQ ID NO: 4988 - DNA, 557 bp, Glycine max
  Clone ID: PAT_MRT3847_104512C.1
tgctcagatctcatctccgagattccactacccgtaaattttatttatttatttattttaatctctgcttatcagatccgaaacgcttctagatttaagtttatcgtttctgtgcggaaagcgtggtttatgctatagatcccgatgcacagaatctacatctaggaaaaaccggtttctgatttgctttttccttgtttggattttcacttgacgtgctacctttcatcgattagattaataatcaagctgaattttttttattcaaattgaaaaaatcatggatttattgtattggtataggttaagctaattgagattgcgagtcggttggaaaaaaaaaaacattttgaggttttctgatggtgtttgggccttggttgaattaaactgcatgctacggttgcaagtgtttaattcgatgcattccattgcggtgcttgtgcgtattctagttcgagctatttcatattatttgaaatcgcttttagaacggaagccttaagtttaagaaacacttgtagatgaattgtgtaggatattgagcattaatgaat

SEQ ID NO: 4989 - DNA, 873 bp, Glycine max
  Clone ID: PAT_MRT3847_104513C.1
agagaaaagtaagtttttttatataaaaaaagctccacaaaataattaaagcttcacaaaaatatgaagaaaacgataacatataaaacacatggaagcaaggaatcaaagcatctcccatgctagtttgttaggaagaagttgcacccatgtaggtataagacaacaaggtccatattattaaaaatatttttcaagcaaaagttatacatgaaataatagcagcacttagtgtttttttttttttttttgccttacttggctatttgttatcattatcctcggctatggaaacaatttcagtgttggtttggcccagcaagctgcttatggatcgagctttcaccattccaagcttcatcctcctctttgtgacaatcactggcttcttctcatcattgttttcagcatcatttcccaaagggtactcttcatgagtgacactactactagactttgttgtttgctttccgaatgaattctcggattgaggcacaatattgatattgttctttggtgcaacacttgttgtcccaatggacttgtttctcacacttgtcatgcttctcaaccttcctttccctaagtgatgctcgcaaagagagtaacccaccaaggtttgttggcaacacctccatcctctcccatttacacgactgcaccttgaaccttccattagtgcaccaccccttaccctcttcttaccaacgttttcttgttcgggttttggtgctcttgttgccacctcttcctcgttctctcttacctcttcttctatcctcttcttcatcttcatcttcattctcttcgtcttggtcttcgaattcttcttatcagtgttatcatcattgacgttgatatcttcgggtgcat

SEQ ID NO: 4990 - DNA, 288 bp, Glycine max
  Clone ID: PAT_MRT3847_104514C.1
aggagcaagaacaagctagcttttttggggggggtattaaaaacattttcactttcatggataacagccctaccccccttctttggccttttgccatgggtgggggcgcctacatgccttcataacattgtgattaacaccatgaacatgcccttttacccaattttaacctttttgcacaggtctttttggaataaaaaataaaaaacccaccttccctaccggggtgtcttcgggagattaaaaaacaaagggttttaatccttggatccccatgaacccggtggg

SEQ ID NO: 4991 - DNA, 159 bp, Glycine max
  Clone ID: PAT_MRT3847_104515C.1
cgtaaaggggctgatcgccgggcaatttaaccctttttattaacgcgcaaaaataacccactctagcggttccaagcttgcctcccctttcgtgccacgtaatagcactcctctaggcggacctaaatcaaatttattggcggcctaaaataacgtcac

SEQ ID NO: 4992 - DNA, 494 bp, Glycine max
  Clone ID: PAT_MRT3847_104516C.1
ggctgcgaatgacgacagaagggctcctcataaatgggggctactggtgtgagaaagggagagactttcctttgaagggaagacataagtctctgtctacagttgtatacacgatagttcgtacaatgaaccatcaccagaaaaaaatatatataatttttttaaaaataatatcttatatacctcaaatcaagttgacttgtttgatattccaagagattatccttttgatagccattgaatgatccacaaaacggccttgttctcaactctccaatccttctgtaaagcccaaaaatagttagagacaaaatctaacattcacaaaaacaaaaattagaagaaaaaggtagcagaagaacactacttttctttccagaagtaggagatcaaataaaagcaacaaacccaaaaattgaaaattgaagaactaaaaaaaaaaataaagaccaacaaaccttttaagcaatatatgttgtggcttaatcttcaaa

SEQ ID NO: 4993 - DNA, 390 bp, Glycine max
  unsure (1)..(390): unsure at all n locations
  Clone ID: PAT_MRT3847_104517C.1
ggagtaagaataatacaaaaaatataccacggacccgcatatcaccggtatacccacccctctttccactgtaggagggactggagagtcagaaattggaacataagattgagacaccaaaatatagcttactatacacaacactgtgttgtgcttgtgaatctgccttcgaagagaatcagcacagcagcaacaatggaggcgccgccatttgcttattctgcttccacttcctctctcttttctcttcgcaacaagccactctcatcccctacaatcacccatttgggcaacaccaaaccatcaaagagcttctcggttggtgcctcctcttctagggattctgttgtgactntgcttgattacggtgctggcaatgttcggagtgtc

SEQ ID NO: 4994 - DNA, 398 bp, Glycine max
  Clone ID: PAT_MRT3847_104518C.1
taccgtccacgcgtacgttggagctggctcacatacttgtgaagatacctctgaaccagaagcacaagaaaaacccactaggattgatgcctgattgagacaaagaatacatcctgaataccgagaggttcaggctcagatggaaacactttgggctaaacagactcttgatgatgcagaaactcctacaggctccatgtaggatctgaacactcttcaatctaaaataggacttcccaaaaacacagaaaggaggaaccattctgcgtaaggatctattggcatatcatgtgacagagggcaatatcagagcatgtgtgcgaccagcctcgcactcatggtatgaaaggaatgattagactggtggacacatgtggtattcctgagaatacaggtat

SEQ ID NO: 4995 - DNA, 629 bp, Glycine max
  Clone ID: PAT_MRT3847_104519C.1
gctgagtcgctatgagtcacaaaagcggcgagactggaacacctttggacagtacctgaggaatcagagtcccccagttccactctctcagtgcaacttcaaccatgtgttggatttccttcggtacctcgatcaatttgggaaaaccaaggtccacttgcacggttgcatcttctttggccagcccacccctcctgcaccctgtgcctgccctctcaggcaagcatggggtagcctcgatgccctcataggccggcttcgcgctgcctatgaggagcatggcggatcgccagagactaatccctttggaggaggagccattcgggtgtacctgcgtgaggtcaaggagtgtcaggcaaaggctagagggatcccatataagaagaagaagaagagaaacccaattctcaaggggactcaaagagctaaagatatcgagcaacaagcttcttgagatgatatatatctatatctatatatatatatatatgatatgaacgggccatatacgagcgagttaattggatatagcagatttggcactttgaaaaaagagcatctcagctgcttggaccaaaattgtacagaaaatcacagtgatatttcactaagtagttcagaacagaata

SEQ ID NO: 4996 - DNA, 200 bp, Glycine max
  unsure (1)..(200): unsure at all n locations
  Clone ID: PAT_MRT3847_10451C.1
cacacactgctttgcagaaaagattacagccgtgaggatactctctgggaagatgttgctgctgtcacagatccctggatattgtctagacctccatattgtgacgtgtatgggagactagtgcctgtcatangatcttgcaagggtcctgcagaccatgtcacgacatgatgcagtaatttggttacggccaggagaat

SEQ ID NO: 4997 - DNA, 330 bp, Glycine max
  Clone ID: PAT_MRT3847_104520C.1
ggctcgaggctttggtgtatgcagcgactgacctaatgttttatttgcgctcactgtctcaactggggggggactctcttgaaacttttatcctttttgacaaatggtacaacaaacctttctatagacacctgacccggaacactgagggtcaccccgacaagctgagctacctgatgctctgatcactacctggcattatggactggcacgagcctcacccatggttgctggggtatatgccacattacctacttggttgggtcttctgagagaacgcgacctaggcctgccgtgcgtatgaaaagatctgctccggagccttgccgc

SEQ ID NO: 4998 - DNA, 786 bp, Glycine max
  unsure (1)..(786): unsure at all n locations
  Clone ID: PAT_MRT3847_104521C.1
actagttctagatcgcgatctcgaacccccgaaccgttagccaatcagagaaagaaagataaaattctcaaaatggcagccagttcgatccccatccgagtcgccggaatccaaccgtgctccacctccggccaccgcaggaccgatcccgatcgccggagagcctcctccaccagctggtggaccccgctgttcggctggtcctccgaaccggactacattgactcaaacaacagagcatcgagtcttcaacggaccaagccggaaccggttacggcggcgacggagtcgaaagcgccgagaccgcgcttcgccggttgcttcacggaggagaaggcgaagcagctccggatgatgaccagcaagtcttttcacgacaccatgtatcactccgcgatcgcttctcgactggcctcagacttcaaggctcgctccgatccgtaacacttgaacagtttactaattcttctttggtgtattttgcggattgtttgtagccgaatttttagggtttcaaatgtaaccgttgacgtataatggattagaattttagaatttaggttatcaacatggtgtatataagaaggatttaagagtaaaaatataaatataattgacgattgttggagtaaaaatataaatataattgacgattgatgaacgatgattttgttgtttcgaattcaaattgaagtgttcgattcagcattatttaaacaaatgtagcctctaagcagacaataagtgggtgaaggagcgttaataannnnnnnnnnnnnncccnnn

SEQ ID NO: 4999 - DNA, 384 bp, Glycine max
  Clone ID: PAT_MRT3847_104522C.1
ggagtaggtttgaggaggagcaagaagaattggcctttgaaattgaaacagctatattgcatagtttggttgctgatcttcttgacctggatggttaatacttaatagtttttcttttcaaagttcaaatcaagttctggcaattgcttcctccacagttgtttcctgcaccttcctaagcttacggaacacctaattgggaatgtaaaattacattccgttaggtgcaggaagcaattgtctcaattttcaatttcttttaagatctctgggcctttagcctcacttttctcaacagaaattatctggcccactatagcacttgaagcccaaatcagaaaagtaggtctcctcctacagcatccatttagacctaccaaccac

SEQ ID NO: 5000 - DNA, 683 bp, Glycine max
  Clone ID: PAT_MRT3847_104523C.1
cggccgctcaagccggccggacccctaaccgttactcaaaccgttcccaaacagaaaaacgaaagaaagataaaattctcaaaaatggctgcgacttcgatccccatccgagtcgccggaatccaagcgtgcgccacctcgggccgccgaagggccgatcccgatcgccggagagcctcctccgccaactggtggaccccgctgttcggctggtcctccgagccggactacattgactccaacaacaaagcatcgagtcttcaaccggcaaagccggaaccggttacggcggagacggagtcgaaagcgccgagaccgcgcttcgccggcggcttcacggaggagaaggcgaagcagctccggatgatgaccagcgagtcttttcacgacaccatgtatcactccgcgatcgcttctcgactggcctcagacttcaagtctcgctccgatctgtagcacttgaatagttaactattccttctttgttgtattttgcggattgtttgtagccaaatttttagggtttcaaatgtaaccgttgatgtataatagattagcatttagaataatttaggttatcaattgatgatacaatcaatcatggtgtatgtaagaaggatttaggagtaaaaatataaatataattgacgattgatgaacgatgattttgttgtttcgaattc

SEQ ID NO: 5001 - DNA, 286 bp, Glycine max
  Clone ID: PAT_MRT3847_104524C.1
tccacgcgtccgatgacgcgtgggcggacgggggggttttgataaaccgtcacctcaggctgccgcaccttaaaacctgaaacaaaagcaattgttccttgatctcaagaatctatcatttgcctcctactttcttggtggacgagaacttaagggaaagaaaactactctctgtgctggtcacagacttcagtgattcattgccttttcgcacacttagttttatttgcagaacatcttctccttttgataataagctttactgtcacatttaaactcactgtgt

SEQ ID NO: 5002 - DNA, 1849 bp, Glycine max
  Clone ID: PAT_MRT3847_104525C.1
ccacgcgtccaaccataccaatagctcaacgccgcatctgttctccctccaaaagaattcaggtcatggatgtgttgttgttgttattattatgtgttctcttggttggtttgccaaacctggctattgtaaaaagtcgcagggatcggatactttactactttgagttgttctcttggagctgcagagcttacagtgcctcgttggaagaatttggacgggttggctatggaacattgaggaacattatatgagctgcagagcttacagtgcctcattggaagaatttggaggggttggtgatggaacaactttgaacacaaaagcttttcaggcagccatagatcatctgagtcagtatgcatcaagtggtggttctcaactttatgttcccccaggaaaatggttaactggcagtttcaatctcaccagatcctttctttagtcttgcacaaggatgctgtgatttttggcctctcaggatgagaatgactggccggtgattgatcccttgccatcttatggtagagggagggacacacaaggtggaaggtttagcagcctaatttttggaaccaacctcactgatgtaatcataactggggacaatggcacaatagatggacaaggtgatctgtggtggcaaaaattccgcaagggggagctcaagtatacccggccttacctgattgaaatcatgtactcagataatgttcaaatatccaatctcactttggttaattctccatcgtggaatgtacatcctatatacagcagcaaccttgttgttcaaggaatcacaattcttgctcctgtgacatccccaaatacagatggaatcaaccctgactcttgcacaaacacgcgaattgaggactgttacattgtctctggggatgactgtgtggctgtgaagagcggttgggatgagtatggtatagcttatggaatgccaacaaagcagcttgtaattagaagactcacttgtatttctccattcagtgctgtgattgctttagggagtgagatgtctggtgggattcaggacgtcagagctgaggacattgtagccatcaattcagaatcaggggtcagaatcaaaactgctgtaggaagagggggttatgtcaaggacatatttgttagaagaatgaccatgaaaaccatgaaatgggcattttggatgacaggaaattatgggtctcatgctgatgacaactatgatcctaatgcacttcctgtgattcagaacattaattatcgtgatatggttgctgagaatgtcactatggcagcaaggttggagggtatatctggtgaccctttcactggaatctgcatatccaatgtaaccattcaactggcaaagaaggctaagaaagttccatggacttgcactgatattgctggaatttcaagtgatgtgactcctgctccttgtggtctgttgccagaccagggagaagagaagattggggcatgtaccttcccagaagaaagtttgcccatcgaagatatcaaggttcaaacgtgcacttacagaaggaatttatgaatgtaaaaggaatgaccaagtttaagggaacaatccaaagcaatgtaatacttcaaaaattgtatttaaaaatattgtgttcttataaagactctgaacaaggcaatgacaacaatgatacagaaatgagtcaataataaatacacattttagtcgtctactagttctagatcgcgatttttgcacggaccttgcaaaacataaataggtagaagtaacgagcacacagttttttgattgctattgctgcattcaaaaggaagatagtttcattatgcagactcattattgatc

SEQ ID NO: 5003 - DNA, 539 bp, Glycine max
  Clone ID: PAT_MRT3847_104526C.1
gtccctatgaaaccataccaatagctcaacgccgcatctgttctccctccaaaagaattcaggtcatggatgtgttgttgttgttattattatgtgttctcttggttggtttgccaaacctggctatagtagagagtcgcagggctcccgttctggactactttgagtattgtgctatgagctgcagagcttacagtgcctcgttggaagaatttggaggggttggtgatggaacaactttgaacactaaagcctttcaggctgccatagagaatctgagtcagtatgcagcaagtggtggttctcaactttatgttcccccaggaaaatggttaactggcagcttcaatctcaccagccatttcactttattcctacacacggatgctgtaattcttgcctctcaggatgagaatgactggccagtgattgatcccttgccatcttatggtagagggagggacacacaaggtggaagggttagccagcctgatttttggaaccaacctcactgatgtaatcataactggggacaatgg

SEQ ID NO: 5004 - DNA, 254 bp, Glycine max
  unsure (1)..(254): unsure at all n locations
  Clone ID: PAT_MRT3847_104527C.1
ctcagatgaccacagcgtggacaatctancaaagcaaagtgctggaacagaatgggcgggacttttatgaaggacgtacaaatttgcgtaatgctgtagcgagctggcaaactagctttgatccgcagattaacaatatgggtaaccccgacgttaggtcatttttatcactatacataggttaactgcatttaacttggctaactgaaacaaataattatctacaggaaaatgaaataacttagatttccaaa

SEQ ID NO: 5005 - DNA, 153 bp, Glycine max
  Clone ID: PAT_MRT3847_104528C.1
cggatcggtcgagctgtatctgtttgcagtaaacagaaagcttattgtactatttggaacttatattgacagatatcaacagtgattcacgggaagagtgtgcttcagcaacaagcacatctgagacaagtcagtacgtgagcatcaggtgtc

SEQ ID NO: 5006 - DNA, 264 bp, Glycine max
  Clone ID: PAT_MRT3847_104529C.1
tgttcctttgcggcggccaacagtccatgtgactacgatagcacggattgaggggctcctttcaagcctgagggtgatgattgcttctgccctgaatgacaatgcctgatccaatgttgagcatagatatgttgagtttacaaggggccggtatagttttcccacccatgattgcttttgttgataagcttgcgttggctaccacgaagagaacatgtggaggctatcatccatgggacatctggttaacaatagttgtaaatc

SEQ ID NO: 5007 - DNA, 339 bp, Glycine max
  Clone ID: PAT_MRT3847_10452C.1
gaggtattcagatcatcaactgaagacaatgacattgggccagttgtcgcagagaactcacatgaatttgcgcaagagtagcagcaaaaaccggaatttgcggagctcatgctatcactgggcgcactgggagatggcaaccaatatgaaggtataccctctgcagaggaatgggaggcagcatatttatacatgtcagttgcacagagaatgcgacgtcaacctgacacaacgcagcagagtggcagaaggaagcgacggtcaatgcacatgttagacgaagacatcatgtacattaccactgatgactagacgtgaataacaaacagctagtgactg

SEQ ID NO: 5008 - DNA, 241 bp, Glycine max
  Clone ID: PAT_MRT3847_104530C.1
ggagggtgtgatgagttattaaatacctgtttttaccgtggtcggatgccaacctaaacggggtcgctttcacatgcatcgtcggatttccattcgttgcatcgctggctcttgagatgcacttacgctttatattcatggccatcaacgtgattggaagttgtcatatctgagactgatggcccatacagctagactcgcatgcgctgtaagagtatacttcaacttcactaactatgac

SEQ ID NO: 5009 - DNA, 282 bp, Glycine max
  Clone ID: PAT_MRT3847_104531C.1
agccaccgtttattcttttgagagaagcacgcactcaaccgagcatcagtccactcgactaatacatacatggcaggcccagacccaaaacatgtatgagagctctgcggatgatgcacagaatggtggagttttagactttatcttgctgatataggatgaagaagacgcgcctactccacaggaggaggggattggcacggagaggcagatagttactcggtaagaccaaggggagagacacagcacagcctgttagaaaagtttaagcgatctgacagc

SEQ ID NO: 5010 - DNA, 437 bp, Glycine max
  Clone ID: PAT_MRT3847_104532C.1
ctctttttattgcagcaccatccaacccttctcttctaagtgaccaacttcatttcatttctcacacatggcgaggcctcttctcagtaatcttctactctcctccatgcccatccccacacttttcttagctatactctcagtcttgtgtgtattttccatcatcacttttctctgtggttctgacaaactgaagaacctccacaaagaagcagagaaagcaacaacaagatcatcgaattcgaaggagcacaaactgatttcgaagctgaacagcaatattaataacagggcactctccatggtgaagatgatttcttggaggaaagtgcgggagggagaagtggagggagattacagtgaccaagatgaagaagccctttggaggaagaacatcttgatgggagaaaagtcgcccgtctcttaacttttctggg

SEQ ID NO: 5011 - DNA, 422 bp, Glycine max
  Clone ID: PAT_MRT3847_104533C.1
cccacgcgtccgtacggctgcgagaagacgacagaagggtattaaaaattatttatatttttattaaggtttaattacttatttagtttctatagtttttaaacttatttattttagtctctatcgttaataagttgattttttagtttctaaaatctacattttaattcccaaacaatttcaactgttaaaattatttaactaatgaagttaaaaaaattttaataacattgatattttaggaattaaaatgtaaattgcaggaattaaaaaatatacttattaaatttcaaaaattaaaaaattcacttattaaatataagaattaaaaggaataagtttaaaaactataaaaactaaatggataattaaatcttaattaaataactttttgaatcaacattttcattaaataatagaca

SEQ ID NO: 5012 - DNA, 1003 bp, Glycine max
  Clone ID: PAT_MRT3847_104534C.1
gaagactcctgttgaatgggatgagataaatgctgcctggggccaagcttgcctccgtcttcatactatgtgccaatatttccgaccgaagtttcaatatcgaataaagataattcctatgggtagctaccctcgtatcacagacaccaataacagtaccgacgagctgtttggtcctgtcaacttgttctggagtactcgctatgacaaagcaatgactttgttcaaatgtgctcaatgatgccttccccatttctcatgatggagagtttggaacaattaacaattttcgacttggaagacttcctaaaattcctgttgaatgggatgagataaatgctgcctggggccaagcttgcctccttcttcacactatgtgccagtatttccgaccgaagtttcaatatcgaataaagataattcctatgggtagctaccctcgaatcacagacaccaataacagtacttacgagctgtttggtccagtcaacttgttctggagtactcgctatgacaaagcaatgacattgtttttagcatgcctcaaggattttgcagactttgccaaatccaaggatcaagagaataacataccacctgagaaatgtttcaaactgccttacaagattgagaatgacaaggtggaaaactattccatcacccaaagcttcaataagcaggaaaattggactaaatctctcaagtacactctttgcaatttgaaatgggctctctattggtttgttggaaatactaacttccagcctctttcagcaatggtatcttcgcatgctgaagtgccggcggttgggcctctgtacacgaagcgtggtgttgatgccaaatctgaatctcgaaactgaacctactaaacatatgctaggttaggctacatagttaggtctcatacaaatgtgtacatagaactacaataaaaaattgttgcttgatcaaaatgaaaaggatgtgtttggagtttggcatgaaaaaaaaaaaaaaggaa

SEQ ID NO: 5013 - DNA, 783 bp, Glycine max
  Clone ID: PAT_MRT3847_104535C.1
aattcggctcgagccggtcccaaatcatgttgggcgtcccatctcaaaccatggtagaagtggtgattatgggagcacagaaatgaaacatagggtggaaggtgatgccaaaggcaatcaatatcctgagcgagaatctctaccatttaaggaaaactctcatgaagctcaagacatggtgaaatttcgatttgataatggtgaaaaagagcacgaaagcaatgctggagggactgaaacaaaagaactgactgaattgaaagacagacataatagcagaaaccttgatcaccgagaggatgcatttagccggcctcctcaggaagccattaagaaaattgatactgacaaagtaaaggctgcattagaaaaacgaaggaaagcagctggtcatataactaagaaaacagatgtcatggatgatgatgatctcattgagagggaactggaagatggaattgaactggctcctcagagtgagaaaaataaggataagaggcaaagctggtctaagccctctgacagatctgattatgataacatgcgtggaagacatcaagaccatgaagatgagcaatatcatggagtaaagggtttgtcatcatatgaaccagatctaagtgctgttgaagaaggggagtatccgcacttgatgacatccatcacctaagtcaagcaatcgcaagagaaaagcaggaagctcccctgaaagaggggtggaggggaaacgtcataattatggccccgggcctcaccacaataatcgatttgattacatggggg

SEQ ID NO: 5014 - DNA, 309 bp, Glycine max
  Clone ID: PAT_MRT3847_104536C.1
ggtttggcgctaagcttatctaattgtatctcaagctttcgagacaagcatttataataaaggtcggccgttatgaccatagattcgaactgtataccttggccgacaacatatactcgaggctttctaaggacgttgtaagccaacggacatcttgaaggctgactgtgccaggattgaatcttaaggtcctggggagcttctaatgactatagggaacatgaccattgttctcagctagggcataaacacataatcccattgggcgaacacaaagaggggtcgattaatcttactctagcatgtgcc

SEQ ID NO: 5015 - DNA, 448 bp, Glycine max
  Clone ID: PAT_MRT3847_104537C.1
ggatgagcctggctagctctattcaacctcacacacgtatagatacacacacgctgcccgtgtcttgatcttattctaccttgacaaggcatacatgtgtatagatggcactaacattgactcatttgcctaaaagtcaggtgaacgagggacaccctgactagctccgcgaccatgtctacgatgctaggctacacggctcgcctcgagcaagacccagacagcatatgatgtctgcgaaacatgcaccaaaacgaactgtgggatggtcgttcagagaaatcacgaccaaggccgacgtcgactactagaagatagtgcgtgacacctgcaagaacatcagcttcgcctcaaatgatgccagactggatgccgacgactgcaatgacctcttcaacattgagcagcacaaccctgatattgctcagggtggacacgggccccttac

SEQ ID NO: 5016 - DNA, 433 bp, Glycine max
  Clone ID: PAT_MRT3847_104538C.1
gtttttcttttgttttatttgtttttttcttttttccgggagagcgatatatacctcacagggctctgcggcgctttccctgtcctccccagctcatataaacaaggaaaacattttctttgacaaactggtgcgcgagcacttgtatgcgatctcaaccataaaccttgttgctcccctccactcttattcgaaatgtgatggacgctggaatacttttcctacaggaatgacggggccccaatggcaaatatccatggtgatcgaggtttgcgggggggagcgcgtaagcgaccttcttccctgcttgtggaattgggcctcgatcttcctactgcccccgcagtgtgccctcccttggcgccttatgcggttcatttcccgagggcaagccgacttccttcccctaaggtgttgacccctaaagtttgtt

SEQ ID NO: 5017 - DNA, 411 bp, Glycine max
  Clone ID: PAT_MRT3847_104539C.1
aactttcattgctttcactttctgaatgctattctttttgctttttaacctttgacataacaaattctttgatggggtgccttgtcatatcttgattgtgtgtgtggtctttggtggtggttcgtggttgtaccgtgaattaacaatttcagcctttggtgtgtggcttttgctgttgtaatgaaacttgtaactccctcatcacttgctctttgtcccatgttttctccaaaattgtttcttaatgtatgttgcagaggtagaagactgtctttttctagtcttaatctgactgataccttaattctcagaaaggatcagctatttactattgcgtttgcttatccataaagatgatgatggtagtcatctgagtgctcaaatgagacgattttttcttcttcaacttgc

SEQ ID NO: 5018 - DNA, 241 bp, Glycine max
  Clone ID: PAT_MRT3847_10453C.1
aataaatctatattagttagattactatttaatgatggcgacgagaagaataggaaggactgaaggagagcctgtgtctgttgaaatgaaactgaagcatctatgaatttattatagctggaacagagtgcagataaaaatataaaatatatttcaataaaaaaaaaaaaaaaaaaaaaaaaaaaaaaaaaaaaaaaaaaaaaaaaaaaaaaaaaaaaaaaaaaaaaagggggggggcccc

SEQ ID NO: 5019 - DNA, 294 bp, Glycine max
  Clone ID: PAT_MRT3847_104540C.1
ctgaaatcttagtccataagtcaatacccaaattaagccgaatacgttcatattgatgaattttcaagtgtcatctcacggccaagagaaatcaccttgaaatttgagcaccaggacactggaaaaaataaatacatgggggaaggagctcattccgctgttaaagttccttcattgacaacatgttggactcgggaagcgaacaaaattctccatccgactctgtgcacaacacattcttatgtcaacgccgtcaagttctgatcccaccatcgctaggtaacgcaaaaactc

SEQ ID NO: 5020 - DNA, 545 bp, Glycine max
  Clone ID: PAT_MRT3847_104541C.1
acctgagtgacaacattcaaatttcaaaaccttgcgtataatatgcaaaatcactgccctattaccagatcatattataaaacttacaagcataatatcgccgactcctcgctaatgaggccataaggttccaaatctgtaatgaagattgattatatagcatatgaacaactataccccaatttaagggtaaaaaacgttgaggatcgcgccacttaatgccaaaccacatcttcttgcttacaacctgggcagaaattgttatgcacatgccattgccttataaaccgaaaatgacagctgcggtcacacttaaatcgacccagctcatgagccgattgatactcgtactgacaaacactgggcttggtgtcttgtcgatgctctgaagcaccatttgaactggaaggcttaactctgcctatgtagagtcccaactcatcttctttgtgcccaccggtgacatagccgattctctcacccattgcaagctatggctcgtgtgacgtgtctataacatcaagtctgcaggctgtaaactgggc

SEQ ID NO: 5021 - DNA, 445 bp, Glycine max
  unsure (1)..(445): unsure at all n locations
  Clone ID: PAT_MRT3847_104542C.1
tcgtgncgatttcacttcccccgcccattgtattcccccacgcagccgcgcacacgacggggggctttattaacagcctgcgtggcggtgctgaaaaatacgatgcgtgaaaggacacacgctgcctgttggccttgttgttcaaggatggcaatttgtcagaaagatgttcggcgagctgcatgtggaaccccttctggatttccgctcacagctatgtgcgatagcatttttaatgagatgctcattagatatagctatgaacaatcactgcgccaggctcaagctccaagtatgtttgtacaatcttgcaaaaattttgtttctttgagtgtgtatggtgatgataactgaattagtgtacatgactatgtcatgccttactctaatggttctaaatagaaaagctttctaactggtcatcatatcaccattcctgatggct

SEQ ID NO: 5022 - DNA, 446 bp, Glycine max
  Clone ID: PAT_MRT3847_104543C.1
gccaccaagggctcattttcaccaatggcgcgcaagccgtcgaggtgtttacccgcgagcgcccgcaattggtgttgatggacgcccttatgccggtgatggacggttttgaagcggcgcggcggatcaaacagttggcgggtgaggcgctggtgccgatcatcttcctcacctcgctgcgcgaaagcgaagccctggcccaatgcctggatgccggtggcgatgatttcctgcccaaaccctacaacccgctgatcctggccgccaagatcaatgccatggaccgtctgcggcgcctgcaggccacggtgctgcgccagcgcgaccagatcgcccggcaccacgattacctgttgcatgagcaacgcgcggccaaggcggtgttcgacaaggtagcgcattcgggttgcatcaatgccgcgccgaacattcgttacctgcaatcg

SEQ ID NO: 5023 - DNA, 175 bp, Glycine max
  unsure (1)..(175): unsure at all n locations
  Clone ID: PAT_MRT3847_104544C.1
gtactgttagatgtcgttgtganaacactgcaacgttgggtganagacaaaatgttaaccntcctggtntngtggtggntctncccacacntnctganaaggntanggnagacattcttggatngggtgtaccancaanattgacatnattgcnctttcntttgttcgnaaaggc

SEQ ID NO: 5024 - DNA, 214 bp, Glycine max
  Clone ID: PAT_MRT3847_104545C.1
tgtcctacgccacgctttactgtactactgcgtacgaaaacacggcgcgattcctcaaacagaaactaccctctatctctctcttttcaagccttaaatgagataaacagagtgaagaatggaaagaaaggagcaccattcttggtttgagaaacataacttagcacgatagtcaaaatggggaagagagagtctaaatgcgtggtgttgatga

SEQ ID NO: 5025 - DNA, 180 bp, Glycine max
  unsure (1)..(180): unsure at all n locations
  Clone ID: PAT_MRT3847_104546C.1
tcggactcgaggagtactcgtttctgaatacaggttgtgactagagacagtggagaagctcatatgttaaangataatggatgtcggacacgagaatagaggttctagacaacgaaaagggtaaagggacagaggaaaggtgagaggatctgacagtagctaagagagcataagatagag

SEQ ID NO: 5026 - DNA, 178 bp, Glycine max
  unsure (1)..(178): unsure at all n locations
  Clone ID: PAT_MRT3847_104547C.1
ttcattnctcattcaattgtttagggatcacagctgccccattttggattttaagtgaatgatgatccattgtggttgattggcgatgggacagtaacaaggtttttaaagggtagcctgtctttgcatggatctgcctttttggtcttgctacagcataataatagtttaattatta

SEQ ID NO: 5027 - DNA, 873 bp, Glycine max
  Clone ID: PAT_MRT3847_104548C.1
cctggtacggctgcaaattaaaatcggatcgggataaacccttttgtaaaaccctaacaattgacctcaactttctcgacaagaggctctctgtcggtgttctctcccttccctttggtgtcgtgtcttccaaatggcgaagcgtttgattcctctgttcaatcgggttttggtggagaaaatcgtgcctccatcgaagaccaccgctggcattttgttacccgagaaatccaccaagctgaattccggaaaagttattgctgttggccctggctttcacagtaaggatgggaagctaattcctgtggctgtaaaggaaggtgacactgttcttttgcctgaatatgggggaactgaggtgaagcttgataacaaagagtatcatctgtttagagacgatgatatactggggacattgcatgattgatgtcaaaatcattcgtggaaatttacatgctaggtgctctgctacatttgaggagtttctttatgttctgatttttatgtatgatgtctaaatcaacattttggtgtggagcaaacacttggaactttttttgggcttaccatgaatgttattttctgcaacaactggaaaaactattttgtagctcatgaaatttattgccttaacattttgtagttctgttttttttttgcttggttaagagtatttattgttgtcactgtgccagggggggggggcccatgcgaaaaaaaaaaaaaaagacaaataaaaaaaaaaaaaaaaaacaaaaaaaaaaaaaaaaaaaagagaaaaaagacaaaaaaaagaaaaaagaaaccaccaaataaaaaatataaacgaaaaaaaggcgccgcttaagaagttaccagctagaggcgcctcaa

SEQ ID NO: 5028 - DNA, 489 bp, Glycine max
  Clone ID: PAT_MRT3847_104549C.1
gccctggtcttccttttttcgaaatgacgaagcattctttagatgcctatcgataaacatacaagtgcatacatgctgccaacgaaatagtgaaccctttccatctcccatttcaaccagacccttccatgggcagcctgtattacgcctgagccttcgtgacattcattgccttgcgatcctgttcctgcagcacgagtttgcctccactaatactgtacactttcggccgatcatgtagtcagctggcatttcccacctcaacaggtcgcgactctcgactgaaatcgcgcaaaggatacccatctttagtctcctgctgttgttgcgaatggagtgggtattcggattcggatacatgacttaatgtcctcatacttctgccatctccttcgatggtgtgaaggtccgaatggtcttgcatcccaggtttgatttctcgaatgacctcgacataatcgtatgcgaattcgcccagttctgcgtcgt

SEQ ID NO: 5029 - DNA, 562 bp, Glycine max
  Clone ID: PAT_MRT3847_10454C.1
ccggggaagaagatatcttgtagtcgaaaatgaaattaactcatgattattattcactccaaattgcaaactcataccaccaaacctatggactataatatcctctacagtaatgccaacattgtcccaaacaatttatctgtgtgtgggttttttggagcctatatagtaattcatgggagcagaatatagtgggaaaaaaatgacactgcagtttcatagtattaccattgccacaccaaaaatattgtcttaccactgatttttcttttttaattttactttataacagaagtattacgttaattattaataaaatttaaggaaaggtcagcatattctgctgtagtaatgtcactgcagaggatcattcctagtaattcatgtatatcaaacattgaaattatctaacttacctcaagtaaaaaggataaataatcttataacatctcattggcgcaatgatatttacaacaatcaaatgaagttgtttaattctatttttactttaacatctcttatattttttttaataacgtaactactctcatatatttacttt

SEQ ID NO: 5030 - DNA, 486 bp, Glycine max
  Clone ID: PAT_MRT3847_104550C.1
gttataaattaataatataaattcattctttcgattatgaaaattggagggagatgactactatacattaattttttttttgaagaaatatacactaattaattaggtgaaaagaataagatgatgagtcacaataattttgaccaaataataaaaattattaataaatttaatgttaataattaaatcaactaattttcttaataggtgtttattagttaaatgagtcacaccctttgggggccccttgtataaaaaaggttaaatgagtcatacaaaaagaagtagcaattaattttctatttgtattgaaattatttatttttttcttctggagtgtaatgattatataccgttagtataaaactattttatattctcaagccaattcaatttttatatttctccatttagaggtcatatcattttaattaaattaaaaaacctaaaagatggggtttagattttgagatagagaagtgggta

SEQ ID NO: 5031 - DNA, 425 bp, Glycine max
  Clone ID: PAT_MRT3847_104551C.1
agacgtaatgattctagtaaaaagggcgcgggattgttatacatcagaacactagattattttgttgtcactattaccaacaatacaacagctgtgacatgtctttgcttatccacatctagatcagaccctaacaaacaaaaattatttctcacaaaaatattatcgaattcggagcactagagcgtataaccagtcgctgtttctggaggggaatgaagaacccggaacaccacgggggggggaatttgaacttgccatataagacggcgcataaacatggcaattgaccttgtatcttgagagactcagacagcctcggtaagattcacagggaagtgacggaaatggcactgggtcttctcgtaaaccataaacgtgtggcttcaattgggccattaactggcgactgcatgtatctgtgt

SEQ ID NO: 5032 - DNA, 388 bp, Glycine max
  Clone ID: PAT_MRT3847_104552C.1
aaacgaaaggcaaatccaaaagggcatggcaaaaacgggttgcggccttttacaggggcccctagcaaaaacattactccgggtccctaaagcctaacccatgggaaaaccctttaaatccctcaaaccttaaaaacagcccaaaatttcagaaaccccccaagggaaccgaagaccaacaaaaaggccttctaagattaaaccgctttttcctaaataaaaaatttttggccaaggggccaaacaccgggaccctttccaaccctttctaaatgggcccccttccctgaagagctcctaaaggactcaaccgggccagaaaaaaactcgttttcaatgaaagccgccctttggggggtattgtggggaactgccccacagggcccat

SEQ ID NO: 5033 - DNA, 405 bp, Glycine max
  Clone ID: PAT_MRT3847_104553C.1
cataaaccccatagcgcatggcgacttctactcctaaaaccaacttctttttcatagacaccaacctcgatacggacttttccctcgtggggccgagctctacactttctccaacctcaaaaagattattctgtcttaacatcccttatgctttcctaaaattgggaaaattcagattcatgttataaaggttgagcgcaaggagtacttttaccaccttacagattccattcctgttataattgccttcaatggtgtcaactatagctcgtttctcactatttatgtttctgttttgaaaaattgttctcacaatgaccaattattttatcttgacattgcaaataatgctttgactgttgatttttcatccaaaatggggtgcacccttttacaattttaatt

SEQ ID NO: 5034 - DNA, 203 bp, Glycine max
  unsure (1)..(203): unsure at all n locations
  Clone ID: PAT_MRT3847_104554C.1
ccaaggcttctcttcaccctttccctagctgcctcaccccacctcggttcttgggagggcctccggtaagaacctgcnnnnnnnnnnnnnnnnnnnnnnggtttgttgggttattgtgattgggtttctctcttcctttaaggtatttgatacaatgtctattctaattagcagtagcttctccttcatcggtttcgtaaatc

SEQ ID NO: 5035 - DNA, 326 bp, Glycine max
  Clone ID: PAT_MRT3847_104555C.1
atccgatacatgatccaatgcactaggtgcatgtctaccatgtcctgcgtgctcatcgacacatgggacaacaacacgtgttggaacaacgacactgccacaacctactgtgccactgaccatggcacgcaaaaaagcaactttgcagcataaaccttcagaggattggagtgcaccgtcctagcgtagtagcacgtgtcggtgcccgctgtgatactctcctgcgactattggcaaggaaagcattcaagaatgacgatgcacaagagaagcagcagtagcagcaagaacaagactttccatggatgggtactagaagggttcaa

SEQ ID NO: 5036 - DNA, 321 bp, Glycine max
  Clone ID: PAT_MRT3847_104556C.1
ataaaaaaaaacccacctttcccagcattttatgcaatataaaagaggggggggattttttaaaagggggcgaaattttacacgagggggggatccccaatttttttttttattttaaaaaaaaaaggggttagactttaaaccgtttaaacctattttaagatttttccccgcggtggtgaaattttaagagttttttttgaggggccctaaatttttttactgtgggggatttttaaaacggggctaatggaaaaaccttgggggtacccaatttaaagaatttgcaaaaaatacccttttttaagattgggttaataa

SEQ ID NO: 5037 - DNA, 563 bp, Glycine max
  Clone ID: PAT_MRT3847_104557C.1
ctttttttttttttttttttttttttttttttttttttttttttttttttttttttttttttttttttttttttttttttcaccccccaagggaaggcttttttataaacaaaacaaaaaaccccccttgggttggaaaccaaaaacttagggggcgggctaaaggaaaggcccaggggtaaaaataaacaggttaaagaggggcaacaaaacggggggggggggaattccccgggaaagccgggggaaaaaataaagttttgggcctttttaacttggggtaaaaaaaaaaaattcaaagctggaggggggggaccctttccccttcctcttggagccccccccacccaaggaaaaacctccctcggggccctttttaaaggagggcccaaaaaccccccccccccttggggaaaggaaatataaccatatgggcgggcggaaaattagaaccagggccccaaaaaaaggaatccctctttttttaaaaaaccgggaccctttgaaaaaaaataagggggggaaaaatggcccccagggggcccccccccccggggatttcc

SEQ ID NO: 5038 - DNA, 1007 bp, Glycine max
  Clone ID: PAT_MRT3847_104558C.1
actacacaaacagcaatacatacatgcacaccggtccctttgagtttgtttccaattattgcaagagcaagaagtggccttttccttaccttcaattaagcaaacatgaagcaaaaaatagttatcaagctgcaaatggactgcgacaaatgcagaaacaaagccctaaaaattgcagcagaagtacgaggtgtaactacggtgtccctggaaggggacgacaatgatcgcgtggcggtgagcggtgtgaacgtggacatggtttgcttggccaaccagctgaagaagaagttcagctccgtgacgattctcaccgtggtagacctagttaaagaggaggaggcgaagaagaagaaggacgaggaggagaagaagaagaaggaagaggccgagaagaagaggaaggaagaggaagaaaggttgaagaagatgctgcgttccgttctttgcaaaaagtgtaaaagctccagttgccatggtaagtgtgacactgcatgctgcacaaagtgtgaaagcatccactgtggtggagactgtttcatcgtttgtgttaattgtgatagccccaagtgttatcgactgtaagccatgtatctaagctctaagcgtgaagtgtgagtgtgagtgcattccctaagcctccttcaccctgccctaaatggagcaactgtcataaatgctatgtgccctatcaacaaccttgttattacccttatcctccccaagtagtatgctatgatacatgccctgattctccttgctccatcatgtgatccaccacctggtcttggtgtacaattatcgcatgcatatttgaatttatgacctcatatatacactccaaatcctacctcttggtccacctagtggttctatgaaatcacatggtttaataataagatatttgtatttgatgatatgtttgcaatactgtcccctctttaatatccctcggggcacacaagtacgtgcaccgcactgtgttaatttggttaatttgttcatgt

SEQ ID NO: 5039 - DNA, 335 bp, Glycine max
  Clone ID: PAT_MRT3847_104559C.1
gactcaccacttcagaacactcataatacaaagcacaaagcagagctcatccttgaattaaattatggcatgcagcttcttccatggctctctcatccccatccttggctggcaaggccgtgaagctgggcccatcagccccagaagtgggaagggttagcatgacgaataccgtcaccaagcacgtctcttcatgaagcacatggtactgcccagactgagtcaagtaattgggcctattctctggcgagctttcgtactacttaatcggtgagttcccaagcgactacggctgggagactgctgcgctttctgcatacccaaaaatcttcgcc

SEQ ID NO: 5040 - DNA, 436 bp, Glycine max
  Clone ID: PAT_MRT3847_10455C.1
ttggcttggaacctttgggctgatttatgtgcttgcatggtcgtgagaagatgatagaccgggaggtggaactcaggggcaatgttctgaccacgagcttccccttaggtgcggcccccattcaatttcataacctgttgacttccttagccggggccccctgtccctagtgaagagtggcgcacacagaaatttcacctttttcacgtattaggggaaccgaacacagaaacaagaaaaaggtgaaaaaaaaaaaaaaaaaaaaataaaaaaaagtggtttctcagaggacttaagtccatgcatgtgcgtacgtgatgctacagtctcctcacagcgctattcaaacctaacctatcggttgctgccccataatgcttcgatcgggaaaatttcggtgccatttaatccaactgttccgtactatactttttcc

SEQ ID NO: 5041 - DNA, 1490 bp, Glycine max
  Clone ID: PAT_MRT3847_104560C.1
ggcaactaggctctagcggcggggacttgttatgtgttgaaatacattggtttatgggaagagagcaaggcaggaagtcagtgtttataaaacgacagtaggagcctggtctggtcggtgtggcactcaaacattgtttgttgtaggaagaggaatcttgagaaatggcaggggacagcaagagcaagattctgttcatcggagggactggttacatcggaaaattcatcgtggaagccagcgccaaagctggccacccaactttccttttggtgagggagtccactctctccaaccccgcaaaatcacccctcatcgacaatttcaaaggcctcggtgtcaatcttgttttaggagatctatacgatcaccaaagtttggtgagtgctataaagcaggtcgatgtggtaatttctactgtaggacacctgcagctagctgatcaagataagatcatttctgcaattaaagaagcaggaaatgttaagaagttctatccatctgagtttggaaatgatgtggaccggactcatgcagttgaaccagccaagtctgcatttgcaacaaaggccaaagttcgccgagctattgaggctgaagggaattcccttcacttatgtgtcaagcaacttctttgctggttacttcctgcccaacttgtcacagcctggagccacagctgcccccagagacagagttattatcctaggagatggaaaccccaaagctgtttttaacaaggaagaggatattggaacttatacaatcaattctgtggatgatccaagaaccttgaacaaaattctctacattagaccaccagctaataccttgtcgtttaatgagcttgttactctctgggagggaaagattggtaaaactcttgaaagaatctatgttccagaagaacaactcctgaagcaaattgaagagtccgcaccacccgtgaatgtgatcctgtcaattaaccactcttcttatgtaaagggggatcatactaactttgaaattgagtcttcttttggagtggaagcttcagctctatatcctgatgtgaaatacatcactgtggatgagtaccttaatcagtttgtctaaggtgcaaagcctagctgataagtttgtttaattggtaaaactttgttttctaaataaagagaatcatgtagtaagactgaattgctgcatgtgctcctcaaaagaacaatgtatgaaatacctatgctatgctatatgctatgatacctttattacatgcatattggtgtcatcgattttaattttatttaagttctatcacacgaatcattggtggggtcgcgcctcccgctcttgtgagactgttgattatccactattattatgtcttggtggatcttacttccattgagattgatcgtgcgcatcatgagtatacctgggtcaactaccgggtgagcacacacaagaaagagatggggtgtgaagagattgggttctgtcatgaccct

SEQ ID NO: 5042 - DNA, 415 bp, Glycine max
  Clone ID: PAT_MRT3847_104561C.1
gaggatattggaacttatacaatcaattctgtggatgatccaagaaccttgaacaaaattctctacattagaccaccagctaataccttgtcgtttaatgagcttgttactctctgggagggaaagattggtaaaactcttgaaagaatctatgttccagaagaacaactcctgaagcaaattgaaggttagtaagtgatcattattcaggttatgtgctggatttaacagtgataacttatttccttcttttttcagagtccgcaccacccgtgaatgtgatcctgtcaattaaccactcttcttatgtaaagggggatcatactaactttgaaattgagtcttcttttggagtggaagcttcagctctatatcctgatgtgaaatacatcactgtggatgagtaccttaatca

SEQ ID NO: 5043 - DNA, 425 bp, Glycine max
  Clone ID: PAT_MRT3847_104562C.1
cagaaggggggggctgcttataagacgacagacgggtacggctgcgagaagacgacagaagggtacggctgcgagaagacgacagaaggggggtgtggcactcaaacattgtttgttgtaggaagaggaatcttgagaaatggcaggggacagcaagagcaagattctgttcatcggagggactggttacatcggaaaattcatcgtggaagccagcgccaaagctggccacccaactttccttttggtgagggagtccactctctccaaccccgcaaaatcacccctcatcgacaatttcaaaggcctcggtgtcaatcttgctttaggagatctatacgatcaccaaagtttggtgagtgctataaagcaggtcgatgtggtaatttctactgtaggacaccttgagctagctgatcaagata

SEQ ID NO: 5044 - DNA, 350 bp, Glycine max
  Clone ID: PAT_MRT3847_104563C.1
gagtacgtataatttcatcatgcatggggttgtgtctatttcaggcattgggttctgtccatttgaggacatgcgcggaaaaatggtttctttagataaaagtggggaaacgcaaacgatgagcctgccgagggacatccttagatccctacgggtatgtttgaaaacaagaccaaagaatgagattgtggggactataaacccttgtaaataaattttgaataggaagagaatataaccccttcaatgctaaacaatactttttcttacaaacaagctctacaggtcaaaaatatccacttctcgaagctctttggttgggcaccagacaaacaaataagcttattttt

SEQ ID NO: 5045 - DNA, 311 bp, Glycine max
  Clone ID: PAT_MRT3847_104564C.1
gggagacttaaagttgtaaaatttgactaacaatgtttgttgaccccaaatttaagtggttgcaagaaagctgcaactcctggccatggctatgccaggttccctttacatatggtccattgtggttggcatatgctatgcggtgccgcttgccattacactgccaactgcctcagagttatttggcctcaaaaattatggtcttatatacaacattctcaattttaaacttccctttgggtcgttcctctcttctggtctccctgctggcattctctatgatttggaggcaactaccaccgcacgaagag

SEQ ID NO: 5046 - DNA, 398 bp, Glycine max
  Clone ID: PAT_MRT3847_104565C.1
cacgcgtccgcgatacctctcttggaggaagcagcgatgtcgcagcaaggtcaaattccgataaaccccatggtccctccgcagaacccgatggccaccatgcaggtccctatgcccatgcacatgcagatgcagatgcagatgcagatgcccatgcccatgcacatgcctttacccatgcagatgcagatgcagatgcccctccccatgccgctccagattcccttctccgtccaggacaccgccccctcctccgggaagcgccgccgcgacgacgagaattccggcaccgcctccgcgccggagcagtcggcggcgaagcgtgccaagggacaggacgtgatattgaggatcgtggtgccctggggccaggatcgggaggtgattgtgaaggaagg

SEQ ID NO: 5047 - DNA, 730 bp, Glycine max
  Clone ID: PAT_MRT3847_104566C.1
ctgcgagaagacgacagaaggggattcgaaatcatgtcggaacccaagatacgtgatgtgctgatcagctgcgccgaagacacacaccaaggttttgtgggccatctctttaaatctctcacagatctcggattctccgtgaaggtagtctcaggagaccatcgggatcttaaggaagaggaaattgaatgcttcagggttttcattattgttttttcccatcactatgcaacttcttcatctcgcttggataaacttaccgagatcataaataagtacggtgcggcagaagatcgacgcatttttccatttttcttcgaggtggaaccgaatcatgtacggtttcaaagtggtagttttgaaatagcttttgattctcatgccaaccgtgtggagtctgagtgtttacagaggtggaaaattactctgaaaaaagtaactgatttttctggctggagtttcaatcggtccgagaaaacatatcaataccaggttattgagaaaatagttcaaaaggtctctgaccatgttgcttgctcagttggattacattgtcgagtggagaaagttaatgatcttttgaaatctgaatctgacgatacagtgagggttttggtatatggagaatctggaataggcaaaacaactgtagttcgtggagtttgtcgttccaatggggggaaatttgcctattattgctttcttgagaaggtgggagaaaatttaagga

SEQ ID NO: 5048 - DNA, 536 bp, Glycine max
  Clone ID: PAT_MRT3847_104567C.1
ctttttaatgcttttatatctctaacgtgtccatggtaggaaaatcttttgggcataaaggatggatggacaaagcacaggccataacttgtactgaaacttttagttatgaaaaataggagtgccaaggatcaaactattgactacttggtcataaggcttttgtactattttgagaaccaaatcttgctaaaagcttacagccttacactcttaggttagtcacccggaatttcttttatctaactgttcacaatatttctttctcctggtttagttataattttggttccaattgtcttgattttaattcattattaaagctgagttttcttttttataattcagctcttcttattgagggattttttttaagtgtctctatatttggtgctaggaataaaagattgacatatttttagcattgagaacaccgtgaatctatgtttgcactttgtagtctattattagctgatgaaatggggcgattttccaataaagtataccttaatgcacaactggagatgataatcatc

SEQ ID NO: 5049 - DNA, 224 bp, Glycine max
  unsure (1)..(224): unsure at all n locations
  Clone ID: PAT_MRT3847_104568C.1
aaaggctgcactctcttttatccctcaaaaaccaaaaccctaatggcagagcgcggaggtggcgaccgttgcagcgaccgttgcggtttcngacgcggctttggtgggcgagggcgcggaggttacaggggccgaggccggctccgtggtccctgtcgcgaggaataggagaaatgggttccagtgaccaaactgtgtctcctttttaaggatggaagaattct

SEQ ID NO: 5050 - DNA, 500 bp, Glycine max
  Clone ID: PAT_MRT3847_104569C.1
atcaaattccctaccatttctttctgttattgttcttcttcttcatgtctctaactctctaactaccccaacaagagagtccattcacgacacttttcttcattgtcttcaaagccacacaacaaaccaaccagatcatgtttcaaacatagtctatgcgcaaaccaacacatcctacacctcagttcttcgagcctttgctagaaatgccaggttcagcgccccctccacgcaaaagccattactcattgtcacacctctcagtgaaaaccaagtacaagccactgtggtgtgcgccaaaagcattggccttcaactcaaaatcagaagtggtggccatgattttgaaggtgtttcatacatctcccaggtaccttttatcatccttgacatgttcaattttcaagatgtcacagtggacgtgcataatgagattgctgtgattcaagctggtgcaagtcttggacaagtttattacaggatttgggagaagagtaaag

SEQ ID NO: 5051 - DNA, 139 bp, Glycine max
  Clone ID: PAT_MRT3847_10456C.1
cccacgcgtcctaccacgcctgcgcttaaattgtatgcacaacacggatagtaacgtcaagggtcatttatgattacgtcctgcagcttatcactaccatctaacacagcgatagtgataacgttcataacatactcta

SEQ ID NO: 5052 - DNA, 386 bp, Glycine max
  Clone ID: PAT_MRT3847_104570C.1
ctacacttaactccattcacaaactaaattattttttctaaccataaaaaaaatcataaacttggggaataataaaaatatcgatcgttatacccatttctacaaacaaaacaataatatttttactctcttcatcaagatcaatcaacaatgatagcttctctttccatacttgtaataagaacatatactactacatttacctatttccacttaaattccccatttctaaccttttccctcttttcaaacactacctttataattttttaaacttccacaccttacgcacctcttacattccttatcttcaacttcccaccttccaccactccctatccttatttcattccctacaccactctttcaacacacccaaatttttc

SEQ ID NO: 5053 - DNA, 405 bp, Glycine max
  Clone ID: PAT_MRT3847_104571C.1
cacaacttcgttcggcgactcataataagaaagtaagagatatgattgatgatgaagccttgggagccattgccaactttcttggcatcttcatttttgctttggttatagcttatcacctggtcactgcggaccccaaatatgaagccaagtgggatttggacagtttcccaggatggttctattccatgaacccaacccccaaaccaagatcatctgatcctacttatcttcaactgagaagcgacctatggtcctatgctggggagactgaaattgctagaacgctttgattacaacgcatgtgttatcctacatatggagcctgaattgctctttggcttgaactttgaagtgtaaatgctacttttgaagtaatatcaaattaattagcccttgaaagat

SEQ ID NO: 5054 - DNA, 606 bp, Glycine max
  Clone ID: PAT_MRT3847_104572C.1
acagaacatcttttttcttttcatccccacaacacaagtttcccgctcttgaataccctccaaagcagcaaactagttaccatatataccttcaaagaacaagaccatcactattacttcacagttcataaaggttacaagtccaacatgggaaactgcttgttggggggcatgtcagatcctgatacaataatcaaagtcacaacatctaatggttgcatcatggaattctatgctcctattactgtgagtttcatcactagcgagttcccggggcatggcatattcctaagccatgacctattttgcaaaccacttagccaatttgatgagttggtggcaggacagtcatactacttactgccacttaacaaccaacctgaacacccttctgcctccggccacatcggtggcgacaaccgagccattcggctaggccatgttcgatctcatagtgttcctacaacaccctaccctcccccatatagaatgtccttggactaccaacaccatcaaggaatgaggtttctcaacaaaacctccacagaacctttctcttgtaggactagtactattaaaaggagcaaaattactactagtagtaaa

SEQ ID NO: 5055 - DNA, 310 bp, Glycine max
  Clone ID: PAT_MRT3847_104573C.1
tattttatttttttttattttttttttctccaccaaaaaaaggggaggtgcttggcattatacaaaaacacaagtctgggggtggagggcataaaaaaagaagaaaaaagggcctcggttcaaaaaacaaaaaaaaatttgccctttgatatgacatattctaattgtaaggggctaccctcatcaccttttaaaagtttttggggggcctccatctcctccctgcactttgacatggaacttgggggagggaaaaaaacaccctaactcttccttttactgaaggatccaagttattaggaggcaagaa

SEQ ID NO: 5056 - DNA, 376 bp, Glycine max
  Clone ID: PAT_MRT3847_104574C.1
aggaaaaaagtgcttccgctcttaccccttttttttcgatttttttgcagatcttttttgtggtgtttttggtgtgtttgaaaaaaaaaaaaccttaaggggggaacagcaaatcgcacggaactgggcttttttttggggttttgtgatccccccatgaccaagaaaaaattgctaagggggctcccttctttgaaagagcccactgtttttgccaactccacgttgttcccaaggtattgagaaaaattcatgttggtcaaaatacaaaaactttttgtgtttgatttccctgaacggacccagtttttaacttggggggggaaaattccttttcaacttttcacaagactgagaagacggtttttaccctggg

SEQ ID NO: 5057 - DNA, 222 bp, Glycine max
  Clone ID: PAT_MRT3847_104575C.1
cccacgctttcgaatcaacagaaaaacatttcactagtagagagacatgagcatagtatagagaaataatggaagcttggacttattaggtgaagtgactatgccttgtaagagagggggagccggaaaggcctattgcaggggaggagagggctagtgaatgtgggatatagtccaccccagataagggggcttataagcttgcaccatgtgccctagcag

SEQ ID NO: 5058 - DNA, 626 bp, Glycine max
  Clone ID: PAT_MRT3847_104576C.1
ccacgcgtccgctctctgctatatctgctcatgttcttcacgctatgcctttacagtctccaaccggtttatgtttctctcactcatcctccttctataccagggagagtagcgtgcttaataagacgacgtctgacacgtcaagcctcccgctactaataaggtgatgtactaccgatgtcgtgaagcacatcgcatgagtcacaactgaactaaacatcttgcttactacattaaacaggactacatctggccattaggctgctagaagcactctgtgcacagcttgacagagctgtacacgccattacacttgtcaaactaacatatatacttcatattacagttgaatgcttgggaatctttccaaactaaacaagctcaacatgtatgtatacacacctatgacatatttacactcaagatgttccgatgaacactaattagacaacaacaggaacgctcatagaggaacaaacaagcagaggtagacactacatacactgctgctggtaccatacactgatcgataagctttgctgagaaaacagcagatgggcaggacaacgcaattaactcagctcagggtctgcgacacgagtctataaaacacttgccaagtacct

SEQ ID NO: 5059 - DNA, 324 bp, Glycine max
  unsure (1)..(324): unsure at all n locations
  Clone ID: PAT_MRT3847_104577C.1
cncnngcacgcgtacgtaagctcggaattcggctcgagncaanannncannnananncancncanacannngcgnctnnatanacgctctnntctganaaaacctnnnttcnnctnttctncnntnctntnncgnntcgntcttcnnnctctganaatgagnnagngcatntcaatncanancngtcaggccggnattcangtcggnancgcctgctnngngcncnacngcntcnancanngcatncancctgnngngcanntacnangtgnnangactgnnngtcaaagtgnngangnttacanaacnntctncagtgagant

SEQ ID NO: 5060 - DNA, 467 bp, Glycine max
  Clone ID: PAT_MRT3847_104578C.1
agtacggctcgagccatgtgtgatttcatcccaaagctaattcatgatggggttatagattcatatggggttcccatcagaagacaagagatccaactctccccaaatatgcctatgatggacacagagaactttccatggcgtggccatgataagttgcactttgaccatcttgtgcaagagatgcaaactatgaggctaggagaatggtggctttgcaactctacttgtaaccttgagcctgcagcgtttttcatatcaccaaggctcctaccaattggtccactgatggggagtgagagcaacaaaagttcattctgggaagaagacacaacttgtctggagtggttagatcagcaactacctcaatctgttgtgtatgtttcttttggaagtatggcagtgatggaccccaaccaatttaatgaattggctcttggacttgatcttcttgacaagccttttat

SEQ ID NO: 5061 - DNA, 1848 bp, Glycine max
  Clone ID: PAT_MRT3847_104579C.1
tttttttttttttttttgaattacattggcaataatttattctggatttaatagaagctcatatggtgtaaatgattcatgataattcttataagtataagtgtaaaaaaacaattatttaataatttccttgaagcacaaatgatgtagaaggttcatgataattcatatgaactaaaaaagaaaaagtttcattataattcttataaataagcagaactaccttggtccagtctacatcctcggttggtatatgagaaatgtttggacagtcttctgctcctgggttctggttaggctagttaagattgggcaatctttgccgagagaagagatgacagatggctttgtgaagaaccttttctggaaggagatggaagttggggcagtgaccaagaataaatagtttgagaaaagcgtgatgacaaagacattctaaatccagttctgttagagatagaacatccaaagatggatcatcttgcaaaacaaattggaaggagaccatgagtcggaacagatatcttatcatgctgcatcttcttcaagcttgatggagaacgattgtctcccaaagacccttccattgaagccacgagtacggacgagcatttttagagatgcatttcttttaaatgtgatggattacctccttcagcgaacgactcaactcttagacaatcacatatcgttagctcctttaaagatgtgcttccaggcaatgattctaattgagggcaccttctgattgtcagaaattcaagatgattatgggtctgatcctgtgtaatcatctgtagattacgcaagccattgagatcaagggtcctgagtgctgggaagaaatctagcggaaaagtcttttgagagtcacagccatcatctctcatttcacaatcgcaatccattccatctttcgggcaacaataaatattcagttcttccaaagtatcagactttaccagcaacaatgcttccttgtagttgctgtatgcgcgcatgctgagatttttcaaagtagcccagtcaagttgcagctttccaaagtcttgttgttctagttctagttttagttctagagccctgggagctgaagcctcaagttgtttgcactcactaatttctagcttctttaaaggaagaagttgctctgggaggtcacctttcagcttgggacatttgcttatagaaagatatttaagacatggaaaagcacctgtcacagcttcacattcccatttttcccatgctttcatagaggagaacttcaatatttccaacgatggaaatgaagaagtgctattcccatgaaaatcagcaccaatgctcactatcccatcaagacttgaaatctccaggttcttgagaaatggcaaaagtccaagggaaggcaaatgttggcaagattgacagttgtccaactctaaggacaccacatttgataaagaattatcggataaccaattagggaattgtttaccaccatagttgatgattgacaacttctccaggtgttttgaaggttgtagattctcaattacaactacatccctttctttggcatgatcatcatgtttcccgtgcgaattccatctaaactctagtttcacacggccgcttttatttttcaaatctgcagctaatgcatctgacggattcttaatattctgcaactccataaataggcttccatgaagattgagctctcctaattgctgaatagtgaaatcgctacttttaccaacaataaaccctctcatcaatacttgaagattcttcagctttcccagatgcggtggcacctttataatttcagtatctacaaattcaaggcgacgcaaattgatc

SEQ ID NO: 5062 - DNA, 204 bp, Glycine max
  unsure (1)..(204): unsure at all n locations
  Clone ID: PAT_MRT3847_10457C.1
ggttttgtttttttttttttttttttttttttttttggttgtgtttnnnnaaagttaaaaatcatcccatattcaatcgagagacctgccttggttccaattaaagggcagagagacacattgaaacctgcgtaaatagttccccccattaaaaaccgccggcaagaatgctccccaaaaaataaaacccttccgggcaaaggg

SEQ ID NO: 5063 - DNA, 347 bp, Glycine max
  Clone ID: PAT_MRT3847_104580C.1
caggagatgtcactgaatattccatgtaaacgcgatctggataaggtgaaaagtgtgggtgagacatagcttaccaacccagcagataatcgatcttcacaagatccatctatgattgatgaagcatggagggcataagtggtacaagcttaccaatgtgcagcaagtgaaagaaagctgaatgactcatgtatctgatcaagtgcttactaggagtctttgctttgggcgaaagcgtagattttcttaaaacctgctcctatatctgtatgacttcttctttgtaggaagatagtgaagatagctcacgtcacactgtaataaaaaatgagggtattgtttctatt

SEQ ID NO: 5064 - DNA, 432 bp, Glycine max
  Clone ID: PAT_MRT3847_104581C.1
atacattcgacaccactcttaattcctacttgcgatatatctctaggggtttgaaagatcatggactcatgcctgaggagaatccatgcctatacagtcacacgctgacttatttcatgaaattaaaatatcaaaagttctaattaagtagaactggatcctattaatcgagagaactatcttgagttggtgcacgatcactttccgcagtgctatagcaaaaccttctgcaacctccgttgtatggacgggcaccgcaacaggcatgactacagtatccaacaccaccgccagggtagctcttcactcatgaccagggggggcaccaccatgaacaggatttccaccaccagccgccatggacagtataaccggcaccgccatgtgcatgataaccgccaccgacatgacctggggaacccccttcatagc

SEQ ID NO: 5065 - DNA, 744 bp, Glycine max
  unsure (1)..(744): unsure at all n locations
  Clone ID: PAT_MRT3847_104582C.1
gaattcggcaccagtgtagccctaaaatgaaacatggagaactagcttggttcttgtcatttcttttgattacttcaaataatttccttataacatattattactcgtgtggcatataatatttttataactaatattgccttttttctttatgctggtagcttctgtgcgggtgactttgaagttttgatggttttctccattgtgaaataaaacagatcgaattgactaaacggagttcctaactgaaggtacttttgatcatgcgaatactttctcaatttcatcattcaaaccattgtttcgttttgttcttctattgtcggccattttttcccagatttgcccttgctgtttgagtttacctatttatacatgaggtaagtaaaccttctattatttttgccgttagaaatatacatatttacacatatgttatcaatgcatcaagcattaactaggaaggaaatggtgatatatatacaaggcgacatgttattttattgatatatcattacatacgacgcgcttgtggacaatgagatcataaacatcaccaggttggtgaatatgggctatatgaagtcggaaataataggttatcaaagaggaatactaaatatcaacattttttgttacaatatgatgatgaaatataatcattcttccttcgttgagctcaagataagaattttccttctttttagtcaatatatatatcaactccgatnnnatcgaacgnna

SEQ ID NO: 5066 - DNA, 299 bp, Glycine max
  Clone ID: PAT_MRT3847_104583C.1
cgcgtccacagcgcacgaatatcttgctgatcgtttcgatccgagaaaaactctgtaaacatacggactgttcaatacctccttacgggtgacgagcttttctcttactccttccgttacaagctaattccaaatgacatgctactcaaagttgagggaaagtgttttattaacagagcagttaatttatacattattgcaaaccctcctgctgagaatgaaacataatatcactactctaatcatacagctaatcaagatgcttacacttgtgacacattcatacttcatcatcaacc

SEQ ID NO: 5067 - DNA, 265 bp, Glycine max
  Clone ID: PAT_MRT3847_104584C.1
ggctcgagcactatcgtagaccctcacttttttaatctgttcccgcaacaatggccccttaacgatgcctgtccaggagtgacaccaccacacgggaaagaagcacacactctggagacccatgttttgcggcatatcgcaattcggccagatcgagtcgctaacagattttataggtagggcaacacaacaggcttgcaagacaaccataatactgcaagacgggaccgggtacggctaaaacggcaccatggcacaacttctc

SEQ ID NO: 5068 - DNA, 933 bp, Glycine max
  unsure (1)..(933): unsure at all n locations
  Clone ID: PAT_MRT3847_104585C.1
tcaaattttctggtttggggatttgaattatcgtatcaatatgatggatggggaggttcgaaagctggtagctctaaagaattgggatgaactgatgaattacgatcagctaagtaatgaattacgtagtggtcatgtgtttgatggatggaaagaggggttgataaacttcccacccacatacaagtatgattttaattctgataaatacattggtgagaacccaaaagaaggggaaaagaagagatctccagcctggtgtgatcgtatattgtggttaggaaaaggaataaagcaacttcaatacaggcgttcagaaaataagctctcagatcatcgaccagttaattcaatattcgctgttgatgttgaagtatttgaccaccgcaaactacaacgagcactgaattttacaaatgcagcagtacaccctgaggttttccttaaagaagatggagattggtcatattagatatccaccaaaaagattggggtctataaacatactaattaccgggtgaaagaaaatgggctttagctttgaagtcagacagataatgaaaaagatgtcaaatttaagggcacactcaccacaagttctgcaggcagttccttttttaatctctttttggagtcttaatcattacattagagatagttataacaagcaaatgtacataggcatacattaggatattgtgtgacactgagtttttttttcctctgcattgtgtgacactttatttctttttcttttttttctttctctgtatttagcatccgaaaacaatgtttgtccaattttgatctaattagcttccaagttaaatcttaatatatcttttgactaataaaccttttgttaccaatgtagacacaacaataacgtgataatttttagagtatctttagtacttatacccnngcgngaaa

SEQ ID NO: 5069 - DNA, 762 bp, Glycine max
  unsure (1)..(762): unsure at all n locations
  Clone ID: PAT_MRT3847_104586C.1
catgaatattaattgatttcaaaacctgaattttttctacttaacctgaagatctccaaaaatattgtattattttttaaaggagatcaaagggtgattaaatataaaatactaaccaatcaatgacttgtctatttttgtgccttgtcgcttttcatttagcattttccttgttttattttacaccagcattttccttgttattataggtgaatcgcaataattgccacaattcgtacaaaatttgtgaataccatttgtttccttttaaatttttttgtttagttttcccatcagtctgttatttacggctatatatatttatggtgcgggtggaacaaggaaggaaaagaagatatcaagtttcggtatccaaattatcattcaaagattccccagatgatcagtgtttgcacgttaaagttgaagtataaacatttagcatgtgggtcacacacactagtcactattttagaatgccaacaaaaattagcaaatttcccaaatacttaaatgtgactcagataagttcaaattatctctctctctctctatatatatggntacaaggagagcctaaaaaatgtatatatcttattactttaagaaactattttttaactcataagaaaaataaataaaaaactaattgtatttttttaaaattattatttacaaaattntaaatgttccaaacaaaataacagtgggacatganaatactgatagataccaaagcaaagaccaaatgggtagattcat

SEQ ID NO: 5070 - DNA, 160 bp, Glycine max
  unsure (1)..(160): unsure at all n locations
  Clone ID: PAT_MRT3847_104587C.1
cttntcgtgtncatttttccgggaaanaaaacaggnaccccaagntgcagcacctcaaccaggttccccgtacttnctcagnaaaggnctngcccccancagagtaagtgttgngtgaagtctcaagncagagnagctggttnttcttnagttgggnggn

SEQ ID NO: 5071 - DNA, 1055 bp, Glycine max
  Clone ID: PAT_MRT3847_104588C.1
cacttacccacagggaggcgaacagagaaactcagagacccgaaggcagatttcaagatgaagttcaacattgcgaatcccaccaccggttgtcagaagaagctggagatcgatgatgacctgaagctgcgagcattttgggacaagaggatctcacaagaggttgttggtgatgctctgggtgaggaattcaaaggttatgtcttcaaaattactggaggttgcgacaagcaaggatttccaatgaagcaaggagtgttgacccctggtcgtgttcgcctcttgctgcatagaggaactccttgtttccgtggttacggaaggcgcaatggagagcgtaggaggaagtctgttcgtgggtgcattgtcagccctgacctctctgttctcaacttggtaattgtgaagaagggtgaaaatgatttgcctggcctgacagatgttgaaaagccaagaatgacgggtccaaagagagcttccaaaatccgcaagcttttcaacctgtctaaggaggatgatgtgaggaagtatgtcaacacctataggagaacatttacaactaaaaatgggaaaaaggtgagcaaagctccgaagatacaacgactggtcactcccctgaccctccaaagaaagagggcaaggattgcagataagaagaagagaattgccaaagcaaaatcggaggcagcagagtaccagaaacttcttgcctccagattgaaggagcagagagatcgccggagcgagagcttggctaagagaagatccaagctttccagtgcaactaaacaagcagccacagcataaagctgctttcagacagatgaagtttaatcttcgctctagtttttgataagtctcatttcatgatccctttcttttggtattttggtattcaaatacttttttaaggtattacttttatgctttgctcgacagtttaattgaatttaagtttttttttccttgttggaattagtgtgaccttttgaagatgatatttatagactggcatatttctttctaccctgatttatctgtgtcattataaaaaa

SEQ ID NO: 5072 - DNA, 484 bp, Glycine max
  Clone ID: PAT_MRT3847_104589C.1
ccgctcctgaattcccgggtcgacgccacgcgtccgagacgacagaagggggaaaattcatcaaatcccccttcaagtggtttactgccgagaattcattaactatctctcaaatttgaaattggtcttggatatggaaacaacacttactagagaatatattaccctccatggtagcctgcccactaacgtttttcatgtctttacatatatgtctataaattcttcttgtaacaagtgcgacaatgacaagaatcaacaaccaatgtgcttcaggactgtgtcttttctcatcaagtgtggcaacacttgaagcttgacctacacattgcgttttatattgcaaagttaattaattcaagggtatagtaaaatcatgtttgcaactacttgctggacgttctgaaaagctaggaacacaactatctttcaagatagcatttgagacatgtggcatgtgggtagaggtgacaatgcagtggct

SEQ ID NO: 5073 - DNA, 257 bp, Glycine max
  Clone ID: PAT_MRT3847_10458C.1
cacgcgtgcgcacgctcggaatcctgctcgagcgctcgagctccaacttgtttgctctggttgacaatgctagctcgggaccggatcagcatatgaggtgccatcgctcacccatattggctgaccgtactccaccaacatggttcgctcgggatgagcgctgccaagcgattgcaagatgctttccggttctagcgctggaaccccttgcaccaggtctaaggaccgaagatgtcctgcgcgaactctgcctatgc

SEQ ID NO: 5074 - DNA, 175 bp, Glycine max
  Clone ID: PAT_MRT3847_104590C.1
gaaatcgaaagtgttttggaaatagcaaaaacgcactttctctctcgtctcgttgctggcagatttctctattcggactctctctcactcttcaatctattccacaggggcttcgaacttgtcatcactgcattttgcctttctatgggaatttgaaaagcctaattttcgtttt

SEQ ID NO: 5075 - DNA, 597 bp, Glycine max
  Clone ID: PAT_MRT3847_104591C.1
actcttttcaaacagcacctcatagtacacttcttttagggttaattacttcaaagccttagaccagacatctctttgaaaaccaccttccactcttgtttattttcttttcttttcactggtttttgttaaatcttgaggaggcaaaacaagggtctctctctttttctcttttctttcattgaacagaagattaggctttgttctagaagaaattaaacagtttaagacatggaagagagaaatcatgatggtgagaaactagatgaggttatgctaccgggttttaggtttcatccaactgatgaggagcttgttggattctacctgaagagaaagattcagcagaggccactctctattgagctcatcaagcagctagatatctacaagtacgatccttgggatctttcaaaaatggccaccactggggagaaagagtggtatttcttctgccccagagacagaaagtacaggaacagtgcaaggccaaatagggtaacaggagctgggttctggaaagctacagggactgatcgccctatctattcctcggagggctctaagtgtattggcctcaagaaatctctagtattt

SEQ ID NO: 5076 - DNA, 433 bp, Glycine max
  Clone ID: PAT_MRT3847_104592C.1
aagtccagagcacgttatcgtctttacatagccaaagttccagaaccaatattgacaaaaaaaattgaaatttcaaaaccataaaaaaacatcaacaggaataaaaaaagaggataatttgagaaccaatttaacgaaaaataaaatgaaatttaagattcgtcaagccactcgctctccttcttaagctgctccacgagcgtcgtaggctcttcaatgaaagaatgggtgcgttcggagcgtttgacggcgctgggggctgaagcgttgatggcttggttgttgaagcgattgagaccttatcgcaagcggcgagtttgaagaggctgaaaagtggttgtggcgccggagcggtggcagatacaggtggtttatgcacatggcgcggcgaagtggttggcgttgttgtacattgcttcgcctcccctgtgtt

SEQ ID NO: 5077 - DNA, 2621 bp, Glycine max
  Clone ID: PAT_MRT3847_104593C.1
tcgccacaatatttgtgttattcgaaaaacgagccgattcggctataagcaaaactctatccgcaattcagcctctccggggcgggaggcagagatgatcaaacgaaccgtagggcgctgcattattacagaataataacacaaaccctagtcccaaaaatcaaaaaggaaaaaaaaatcagataacaaacttatcacttcgctgcgagattcaattcccatctttaaaattctcaaatccgaattcgattcccaattccgcctcttgttcagaaattgattctgtgtcgttacaggggaaaatttctctgcacgacatgtctgatgaacgagcagtgcatcctgattgccggaatgctagtaacccttatcatgaatgtagtgattactgttttagagtaatagctgaagccaaaattaggtcacaacaacaggaatcagaagttggacaagctagtggtggaaacaactctaagcaagccatcccagatgaatcctatgtggaaaaggaaatacacaatggcagacccgatcttgaagaaaactctgatagtgatcctgaccagcctgctgtgcaggaagcagagcaagaggttgactacacaaaactttctgcgagacagaaaaagtggatggagttgagatccaagatgcaagaagcaaaaaagcgtaatcaaattgaaatagctgctgagaaaaagaggatggaagctccaaccgagtctaggggtgtttctaaacagaagtggctcgaggataggaagaaaaagattggaaaacttcttgatgcaaatggattggatatgacaaaggcatatatgcttgacacacaggaggcagcagaagaaaaatacaagaaatgggagaaggatcctgctccatttgggtgggacgtctttaatcagaagacattatacaatgcatacaaaaagcggaccaagaatgttgaagtcgatgtagaagaatataatagaatgaaagaagctgatccagagttttaccgtgatgcttcaagtctccagtatggaaaggcaccaaaaatctcagaggagaagattgataggatggtacgggagctaaaggatagggatgagaagcgcaactcttttagcaggagaagacgcttccatgaagagaaagatattgactcaatcaatgaccgtaatgagcatttcaacaagaagattgagcgagcctttggtaaatacacgctggagattaaaaataatcttgagcgaggaactgcattgcctgactaaggtacttatgtagtgatgtgttttatttcacactgtcctgatagtgataagtttcagtggtggattgcactttttagagtgctttttaatcatgtaatactatagtctaatattttgcaatgcacatggagcattgcggagtcatttcgaacttcaaacattatatgcttgcttgagatatgggttcttcttagaggtactctttccagtcattatgtagatatggaatttatacctccccacgtatatgtaagtctgagtttgatcggggttaggtttttttccctctcctttcatttgggatcgtgatctaatgcatttgggatttaatttgttatcacttttcgtagggctctaaaaattgtagttaactcatttgaattgatggaaaggagtaggaatagaatgaaatttaggctttgtttggattgaagaaatggcatgagatgaagggaatgaaatgaacttttaattagttctgttgtttggattacttaaaccacaatggaatggaaaagagatcgaacatttcctttcaattccatccaaaacacttatttttttcataccctccaatatgggaggtagaggacaatatgttggttgaaattaaatgaaacgttgaaaacttaacctgctcattgagggttcttccgtttcagttggccatgcacattgacacacggtcaaggaagtcttcctgaactatttagtacctcactcattttttaaacagtgaaatggatttttcttttcatcataaagtatccaatgaaatggtttgatccgctgcatggtccttctcatcacttatcagaaggaggcaattaagttaccatgcagtggcaatcaaaagcatgttacagggtgcaacatcaggctgccagaagcatcaaaaacatgtaggaaccaaaaaagataaaccttactcccaacaacagccatttaccacttttttctagtggttttccaccatatcaggaggaaaagagacaaggattgagtgtccaacatacatacatacatgcatacaatcattggttacaggttatcaaattggagacactaaaactggggtatttccagtcacaggctggagactggctgcatgctctagttgtttccatgcttccttccgcttctccgctgctgtgtttagcattgcttcttcttccttgaactgagaatgagaagccaggaacagcttctcatccatctccacaaacatttttctcacgttatgagttaggttgagcactgcctggctccagtggccctgagaattcttctctaaggctggaaatatgattggcaggatcacttgtcggttgtgagcgataaggctcgagccgaatgccgagc

SEQ ID NO: 5078 - DNA, 401 bp, Glycine max
  Clone ID: PAT_MRT3847_104594C.1
aaacaaaactaacccaattacatatgattcatttggatttatattacctaaatcactaaatttaaaccaaaccaacttatgaataccccttgcatcatttatgctttcacgcataaaaaaaattcatgggggaccaaaccccatcacatttaaggggtttttacaagaaaaagcttaacacattcccaagggcaaactatgggccaatcttcagctagatctccaattgggcaggttgggatcaaaccaatgcccatacaagaattactcattgaactaaaatgtaatgatgatgattggcaatacaaacttggaaacaaaagagaacgattcttacactgatgttcgacaggatttttgatttgttaacaaagcatcaagacatttttttgcctattctt

SEQ ID NO: 5079 - DNA, 396 bp, Glycine max
  Clone ID: PAT_MRT3847_104595C.1
cccacgcgtccgccacacgcgtccgtggaaatggatgatcataacaataagccccaccatcataattttggcttgaccgatttagggcagggggggaataacgggccggggccggccaatacaactttcccttcaatgcggccgaacccaacgggggagtttttcccgggccaccacaaccgtaatttaactcttttacctactaataatcccaaacaccaccagaattttagggttttgatgttgggtcaagacataatgccacctggctttaacaactttgtttccacacccaatgattttgttgtggttaccacaaccataaccttacccattcaaccggttacttgcggttttaatgccgttgagggggcaggttgcatcggtggagacccc

SEQ ID NO: 5080 - DNA, 271 bp, Glycine max
  Clone ID: PAT_MRT3847_104596C.1
atctcgtatctttctctgtactattcctactatggagtttttttgttcctagatgaaggttttttaaactgttaaggtacatccatcctaattctatgcatgcatacacctttctcatgcttctcttgtatatgcaaataaagacactatcaaattaaccactttttctctactttaaagtttttcaacacaaaatttttatgtgaaccctttccattgataaaattccttaaatacctctttaatttattttttaaaatgaattttatct

SEQ ID NO: 5081 - DNA, 246 bp, Glycine max
  Clone ID: PAT_MRT3847_104597C.1
atatagttctgacatcggtaataatatatactataatacataggtcattgatgcatgtactgtgcataacggctgagttatgtacttatgttaagaataaaataaagtgctgttgttgcaaaaaaaaaaaaaagaaaaaaaaaaaagaaaaaaaaaaaaaaaaacaaaaaaaaacaaaaataacaaaccgcacaacatgagagaccaaactggggtcgaacaaaacgcaacttccaccacaaagga

SEQ ID NO: 5082 - DNA, 160 bp, Glycine max
  Clone ID: PAT_MRT3847_104598C.1
aggtatatattacctatggctaccacttccattatcactcaccacactgatctggatcgaggttattctcattggctacctacatttccacaagaacgcacaactggacccatataataggctgctcccaggtggaaattactgtaacccactgggcctg

SEQ ID NO: 5083 - DNA, 357 bp, Glycine max
  Clone ID: PAT_MRT3847_104599C.1
ggccgcacagcccgatgttgatggatttttggttggtggtgccaattctttgcagtttcctccatttacagaacctccatagataattcttacagatgcagcaactgcaaagaattggccgcacagcccgatgttgatggatttttggttggtggtgcctccctgaagccggagttcgtggacatcataaatgctgccactgtgaagaagaattgaaattcgtagttaggaactgatataatgctgcctttcaagctgcttcggaaattgctgtttttgagttttggatctgtgctttgtggccaatgttttgaactctgtttagtactgaataaacacgctttcctttgagatctc

SEQ ID NO: 5084 - DNA, 375 bp, Glycine max
  Clone ID: PAT_MRT3847_10459C.1
ccacgcgtccggtataactgtcgggtactcgacatgtcttttctacttagtctctgatctcacaaggataggtctcatccccattgtagactctagtactactttctcctcgatacactctacttcttctatgcacagtgtgaatggcgtctgaatgctgcagaaacaagctatataataacatgtacatatctctacttacatgcaatcatgattgatctggatgaacactccctacattctacgttcaactaaataaggatgctgtcaaatcatcttataggatcactacagccactaattgaagataacattgactccatcactctcttaagagactccaccactgttgtgtgcctggatgattaccactct

SEQ ID NO: 5085 - DNA, 1220 bp, Glycine max
  Clone ID: PAT_MRT3847_1045C.1
gctttgctatcatcctttgccttgtcctcttcccttgtccttcttcctactatactatattttctctctctaatcaatcatagttctgattttcatacacttaccctgaaacctccattctcagatcaagcttgcaccaaaatacatacatagctatggacaataatactagtgcctgtgcctacccccaacttgagtcagaagaagcatcttcagagcacaaatcagaaactcaaacatcaaagaaaaggaaaatggttgagaaaacagttgtggcagtgagggtaggagagaaggttggcaagctaaagaatgaagggctaccctcagatttttggtcttggaggaaatatggacaaaaaccaatcaaagggtctccatatccaaggggctattacaagtgcagcacatccaaaggttgttcagccaaaaagcaagtagagagatgcagaacggatgcttcaatgctcataatcacatatacctctacacataaccatccatgtcccactcccatcactacaaaatctaccaccacaaaggaggaagaccaagaacatatagaactagaagaagaagaagagcaaagggataataataataataagcccagtgatgaagttactaatgaagaaaattttcattacttgcaatctccaatacgttgctccagccaagatatcattatagaacaagaagatcctttcaaactaaacacggagaaaagccatgatcgaatggatctcctcttagaggaagagcctctttgttttgcacagctcaagaacttgtctgcttccaaaaacgaagaacttgactttttcgatgagcttgaggagttacccatgtcttcatctttgttgcactttacgaggaacattttttccgatgaaaggattcccgttggcccttcttgattctagtgttgttttctcggtgcttgctatgctagtgacagtgtatgtattgttttcatccatgttatatatccattaatttcagctagtttttcaattcggaacttttctttttcttttgtaccctttatttatatgattatatcctatacttttaattaattattggttcacaactaagcatagttcatcactttggcgtgagcagggttagtgtgtagacaaaatcatcagctcttgcaattaaaattaaagaatgatggtttggctcacaatcaatggtatattgttcattctgtattc

SEQ ID NO: 5086 - DNA, 412 bp, Glycine max
  Clone ID: PAT_MRT3847_104600C.1
cccccactccattttttaaaaacttttgtagcattctttacctcaaagtgaaacttaaatttacatgtttgacgctaggatataggttacaaaataactttggttagctgcaaaagaaaaaaaaaaacttggttagagctaccattaggcaatgagtaagtattaaatgaatcatcaaaacctttgatatcttaaaaaaaaaaaaaaaaaaaaaaaaaaaaaaaaaaaaaaaaaaaaaaaaaaaaaaaaaaaaaaaaaaaaaaaaaaaaaaaaaaaaaaaaaaaaaaaaaaaagggggggccttttaaaagaaccaaatttaataaccggggtttggaaacgaaaaattttttttttggggccccaaaaataaatttcgggggcggggttttaaaaaggggggggggggaaa

SEQ ID NO: 5087 - DNA, 541 bp, Glycine max
  Clone ID: PAT_MRT3847_104601C.1
tttcttcgtttttcttttctttttgtttattgattttttcttccttttattttctgttcctatttttttctccttcatcattgcaccgccgctctttcatctttttccttgggagcggccgctttttttttctttcttttttttttttttttgcgacatacataaacattttattatacaggggtaaatgtacgtatgatttttatgtataaaatgaagggatgcggacatataatattgttgatcattttcaacatcacgaacaagaatgattctatgagtaggatttttagtcccacagatacaatgaattttcttatcagatttcttgcaacatttttatcatttaaaagttactttttctttttgttagacccttccttggtggaaaattcttttcccacatgttcttattttagtttttcaaaaaccttttttttgcctaaaccaatgtttaaatgattctctggaaaactccttgtctcccatcttatttctcttaccaaaaaaacatgttttatcaacaaagtcttttaattct

SEQ ID NO: 5088 - DNA, 258 bp, Glycine max
  Clone ID: PAT_MRT3847_104602C.1
ctgatggaaggaatgctgttagcctgagactcaggaagacaacttctgcagggtcactccctggcttctggaggaaagagaaggagggcagtgctccagtggtacagaagtgagacataatggaatcaggcttcacctccaaggacacctatctaagccattttaaccctcgggattacctagaaaaatattacaagtttggttctaggcactctgcagaaagccagattcttaagcaccttctgaaaaatcttttca

SEQ ID NO: 5089 - DNA, 255 bp, Glycine max
  unsure (1)..(255): unsure at all n locations
  Clone ID: PAT_MRT3847_104603C.1
cacgttccacctgatctacctgangattttcctagcttcgaattatgcgttttttcgttctctctggcatcagatgttatgaatcatacgnaatttgtgtgccttctgcggctacttntgcatgncaaatagaatnccagttcccgatctctgaatnatgtcttttgtgcggaattatcaagcngaagattgtagtttacanngtggttactggnncacctttganggaaanaactttgggcaacagcaagtagg

SEQ ID NO: 5090 - DNA, 358 bp, Glycine max
  unsure (1)..(358): unsure at all n locations
  Clone ID: PAT_MRT3847_104604C.1
gtcgacctgcaggggcgtcgtgggggaaaactcttgataagcggagcagcgggcnntttgtgtggataacatctacatacaaaatttatgatatgtcactcagtgcaagctcagccaaatctatttcaaaggaatacataggcagaatcacatagggcgttgttgttgttgttttttcttagcaaaatcacatacgcgggcgagggaggcgagtttttttttatccatccccctcttccaacgcagactgggattggcagcgttttgggggccaatcatactccccttctataacccattccgattaaggccggtccgtggaaaatgacctagcagacgaggcgttgctcctggaaac

SEQ ID NO: 5091 - DNA, 334 bp, Glycine max
  Clone ID: PAT_MRT3847_104605C.1
attataaaccagtaaaccttttcactcagttggataactcacattgtacacggcaacaggtctaaaaagaggagctgccacaccgactttgccaaatggggcatataagaccctactttcaaggatcggatactatcaaattccaataagcctttggcatgcagctgcgcttggcctggaagggaaactcctgcatcgggggctattgaaaccaaaaattaacctgtccacgtgtcactgcttaaaccaggcggcaccgttttgtggcatctgctttgaatgcccttgtgctgcactaggctgataccaattgtgaaatacagagcctaatggg

SEQ ID NO: 5092 - DNA, 334 bp, Glycine max
  Clone ID: PAT_MRT3847_104606C.1
cgcacccttaaaaggggcggctaaacattgatggcatccactaagccaaccacttctaaggaaggcctaagaagacagcttttctttcccgcccaccgtaatacgggaggcaaactacaaaatgggggaatcttttgtgttccatggaacccttctttatttaccgtattccgggatctaaaagcgggtgatataaatgctccaagcggtgagcccacaataccagcccaattctcctggtggcgtatgaaccctttgtttttttcccactgaagagaaaaaaggcaggggctaacacaacgacttccttgctaacaaggcctaacaataaatc

SEQ ID NO: 5093 - DNA, 919 bp, Glycine max
  Clone ID: PAT_MRT3847_104607C.1
catgcaagactgggaaatgaatcattgaagttaaatcagcttgtgacaaaataatcagttaagtctcgggcattcttgtttgtattttgcattacatgaataggtcaaaccaaaaatttgaatttaattgcagtagtttttgccgttagccagcacttagtatctcagaatataattgtaccattgtggcaacagttatagtgcttccaataagagtttctctgtaagagctttggaaagtcccatcacggtatcagttgacccaactactgcgtccacaaagggcaatgtcagtggatgttccagcatcaaacctccagcaacgttgaatgtaatcccctcgtcaatctgagaaggctcccatcaaataagaaaactcatatagtattcagttggacaagaatttccagattatcaatgacctcatctggaatttcaagaaagtaaacctctgcactgtcccaagcccccacaacgttttccagttgcaaggttagttacaacaacagatcctaccactgctgcatgactaccagaatatcctttgatgaaatcacgtgcttctttttcactagttggtttttcccttattactcctcgatacaccacaaccgtgtctgcagtaattaacagtgttgtagaagcatcttcctccaatgggcctccagtagggagcctttgcacaatagcatcagcctttgcctcagctaatgccatcaccaaatcttctggcttttccctcctaatacatttctcatcaatgtctgcagtcattactgtgaactcatatcccatctcagaaagaatctctctgcgggcctttaagaagagcccagaattatcttgaagggtggatttttggtagccatgtccacgaagctcttaactgcagctgcagaagagtctagcggacgcgtgg

SEQ ID NO: 5094 - DNA, 165 bp, Glycine max
  Clone ID: PAT_MRT3847_104608C.1
tcgttaagttcgagatgatcttagcatcttctctttgcaccttagacattgagaatgctaagtatgtcttaggtgcaaagagatgatgctaagtttgagatgatcttactatatttttcatattggaccgtcttcctctataattctgagttacagtgtccactt

SEQ ID NO: 5095 - DNA, 376 bp, Glycine max
  Clone ID: PAT_MRT3847_104609C.1
cccacgcgtgcgggatcccatggcttctcttaattggccttcttggaggtatggattgaggcattgataccggctattcaagcagagaatcaccaaggaaggtcaggaggacgtagcagaggactggatcgagaagtatagcccctgggatgtcgtgaggcatgacattttataccccatcagagtctatgctcatgttgaggttaatcctgattgaagccgaaaatgggttgtacgagaggttgcgcatgcactggcttatgaagtgccaattacaggttaccacaccaagatcaccatcagtcttggtctatcgaatgcaaaagctagtgctgaagatttcaataaatatggatataatgatgctcatcatgat

SEQ ID NO: 5096 - DNA, 397 bp, Glycine max
  Clone ID: PAT_MRT3847_10460C.1
ctcgagccgaatcggctcgagacggctgcgagaagacgacagaagggggtgtgtgtagtgtgtatgtatgtgtggcttatgttatgttagtatctgggcctcctctgactcagagacagagagagagtatcaaagttcactccaacttcgatattaaaaaaatgagaaaaaagaaaatgagttttgatctcataaatcgccttgaaacatgtccctttacatctctattccaaaccttcaatctctagctcccctctattgactcttgagagatgaaatgtttatgatttcgtgtcttcattctctcactttctcttgttgacttggtttgtgattgttcagagaggagcacattcaatgaatgaaagcttttggttttgagtttctgggagtggat

SEQ ID NO: 5097 - DNA, 1928 bp, Glycine max
  Clone ID: PAT_MRT3847_104610C.1
agttgctgaagatttggttaccaagaactttgtaattgctgaggaatatgtaagacacggatttccccagaagatctacttggtgttcttcgagttatctggaatgacgtgctcctgatagatgaagtcttacaggaattcactctctctaaccattctcttgaggctgcaaaggttgctgtcacgtcgtttgttagaagtacattttctcatcttctgcaagacatctcagattccctcttacaaatcctgaaaaaggatggagcagaacagtgcactcttgatgttgttcttgatgcaagtacaaaagcagttctccaaggaggactgaatgtgttgctggacttccgcaaaattttagatgatgactctgggatcctagttagattaagagagttaattactgattgggttcaagaaggacttcaagacttttttaggcaacttgaggatcagttccttctgttttcgggaagaaataattcatctattcaagtacacgctttggcagagggagctcaaggttataaagcttttgctggccttgtcctagtgctggcacaattgtctgttttcattgaacaaactgtcatcccaaaagtcactgaggaaatagctgcttccttttctggtggtagtgttagaggctatgaatctgggcctgcctttgttcctggagaaatatgtcgaaaatttcggtcagctggtgaaaaattcttgcacctgtacgttaatatgagaactcagagggtatcacttctcctgaagaagaggtttaccacccctaattgggttaagcataaggagccaagagatgttcatatgtttgttgatctatttcttcaagagcttgaagttatagttaacgaagtgaagcagactttgcctcaaggtagacgtaagcaccacaggactgatagtaatggaagtagtgtttcatcaaggagtaatcccttgcgggaggagaaactgggtaggtcaaatactcaaagggcaaggagccagcttttcgaaacgcatctagcaaaattgtttaagcagaaagttgaaattttcacaaaagtagaatatacacaggagtctgttgttacaactatagttaaattgggccttaaaagtttacaagaatttgaagtgaagcagattttgaatcaaggtagacgtaagcaccacaagactgatagtaatggcagtagtgcttcatcaaggagcaatcccttgcgggaggagaaaatggttaggtcaaatactcaaagggttggggctaagcttttggggtgtctagatccgattccattggagcctcccatattggataaacctaaacgagcaaatacacaggagtctgttgtgctaactataatttcttcataaacattctttttggaagcaaaggatatatataaaacgtgtttcccatctcgtagaatttgttatggttttggccgttgaaaagtaacttggttcattttctgttcattttgtaaatctcgtaagttatagtagcatttgtcatattgcaatgctgttatttgtggaaacattgaaacatgagaaagttatatccatttttgcatagtggacaaacttatacgagcaaagttggctaaaaccgaggagcaaaatacaatttcttcataaatattccttcataaacttatacgagcaaaattgtgtttgctgtgtttgccatctcgtacaatttgttagggttttggccgttgaaaagtaacttggttccttttgtaaatctcttgtaagttgtaacatatgtcatattaacatgttatttgtggaaacattgagacatgagaaaattatatccatgacgggaggctagagtgggagaccttattgggtctctcaccatgggaaagaatttttagcccttagattttaaatgaaaaattgagatttttctttaaaaa

SEQ ID NO: 5098 - DNA, 206 bp, Glycine max
  Clone ID: PAT_MRT3847_104611C.1
cattttattagctttgattaatctattgtaagttgtaaccaatagtttacagctttcttcttcattagaaaagaaaaagaaaagaaagatgtatttttccccatgttatttgacttggagttttactttccctgtaaataattacttcacctaatttgttatttactttttagctcctgctgataaaagtacttatcttttgctca

SEQ ID NO: 5099 - DNA, 1652 bp, Glycine max
  Clone ID: PAT_MRT3847_104612C.1
gggccgtgcaggcacgcgtccgcgcacgggtccgtacggctgagagaagacgacagaagggggtaaacagaaagagaaaggcagagaggaaagactttaccgagtccttacgcgttgtttgtgtttgcgtcggaaggaagagaagatgagtgagaatttgatggagaaagtgagcgcactgggagagcgcctgaaaatcggaggcgtggaagtggggagaaagatgagcgaggggatgagctccatgagtttcaagctcaaggagttcttccagcctgggcccaatcaggccgacaagcttgtggaggacgctacttccgaggccctggacgagcccgaatgggccctcaatctcgatctctgcgacctcgtcaacaccgacaagctcaactgcgtcgaactcgtccgcggaatcaagaagcggatcattctcaagagccctagggttcagtacctcgcccttgtcctcctcgaaaccctagtcaagaactgcgagaaggccttctccgaggtcgccgccgagcgtgtcctcgacgagatggtcaagctcatcgacgacccccagaccgtcgttaataaccgcaacaaggccctcatgatgatcgaagcctggggtgagtccaccggcgagttgcgctatctccctgtctatgaggaaacttacaagagtctgagatcgaggggtattcggttccctggccgtgacaatgaaagcttggctccaattttcactcctcctcgttcagtgtcttctgctccggaggctgatgtcaaccttcaacagcagtttgagcatgatattcctgagcagtttcatcatgatgttcccgtgcttagttttacgcctgaacagacaaaggaggcccttgatgttgcaaggaatagcattgagcttctttccactgtgttgtcgtcttcaccacaacaagatgctttacaggatgatttgaccaccacacttgtgcagcagtgtcgtcggtcacagactactgtccagcgaattgttgaaacggctggggataatgaagcagtgctttttgaggccttgaatgttaacgatgagattcagaaggtcctcaccaaatacgaagagttgaagcagcctgcaactactccacttcatcctgaaccagctatgatacctgttgctgttgaaccagacgagtcaccctatcatagtaaagaagatgctttgattcgaaagccagctggatcaaggactggtgtcgagggagggagcaatgatgacatgatggatgatctcgatgagatgatttttgggaagaaaggtggggaagcatcagatgggggacacgagacaaagaagcagccgtcatcgaaagatgatctcatctctttctaagccgcaatatagtctatgctgaatataaaacagagtgcctttaatttcatgccactacttttatatctagatgttgatgttgactctgaactttgttcagacttcagattgcttggtccattatttttttgcacattgtgtgcaacttatgtttgaattatggtatataagttcttgcagggtatacatgggaactctatggagaatttcaatgaggttgtctacttagattattcttcgttgataaaaaaaagaaacactgaagaaactggaactctgaaaagaaaac

SEQ ID NO: 5100 - DNA, 290 bp, Glycine max
  Clone ID: PAT_MRT3847_104613C.1
taaaagactatctttagattcgtttggagcaagagtttatagacaatctcttctctcggcgatgacaaagttgtgtttcaatggacaataataatattctgggtcttctcaagcttcgaattaaaagaggcattaatcttgccattcgcgatgctcgtgccagcgatccttatgtcgttgtcaacatgggcgatcagaagctgaagactcgtgtcataaaaaaaaaactgcaatcctgactggaatgaagaattgaccctctctgtaaaggacattaaaaccccaataca

SEQ ID NO: 5101 - DNA, 710 bp, Glycine max
  unsure (1)..(710): unsure at all n locations
  Clone ID: PAT_MRT3847_104614C.1
ccacgcgtccgaagagactacacttgaatgagagacgggtagagttcaaatgtaaagatgaagtcccaaattggtaggaatgagcaagttggataacttatacaagtgaaagaagtgtaaacctaatgcctcaaaaggtttagggttgaatgtaatatcaaattcatttgtgtggttagcctgtggaccattaacaaagattttcctagtatttgtcccctcgtattctcaacatttcagaatttagtttatgaaaatgggtaattttgagtaaaagtataaaattacatgagggaggtatagttaacaaacaaagaggagcatttaccaattggaggcatatttcacttgaggttgcactttaaacttttaacatgaagacacatttaattatcaatgttcttaatgaccaaacaatgttatttacaacatcagcacaaactatttcaactatcaattactaaccctagacaagtaaaaaatgtaatttaggcttaattaaatacatttaaagtccctaataaattattgantttatgtgctgtgtttgatccctaatatattaaaactttttttttctcactccctagtgcaagntaagtgattacttgacaaagntataagggtgacttggttgtaaaaggaaaaggagggaggaaaaggtcattggcttgattccncctgccaacaaataacaactaataattaac

SEQ ID NO: 5102 - DNA, 215 bp, Glycine max
  Clone ID: PAT_MRT3847_104615C.1
gaggggttgtcaaacccttcatttctttttaaatgccgttggctgttttttccttacagaaattccccatgaaatgaaacccagcgagggggcaccgatcattatcacttttaggacaatggccccctcaaaaaaaaaaaaaaaagatttcccatttttgtttaacatgcgtgcctgatctccataaatttattaattttatgtcatgggtaatt

SEQ ID NO: 5103 - DNA, 378 bp, Glycine max
  Clone ID: PAT_MRT3847_104616C.1
gcttccctaaaaattttggcctgttaaatcccttgagttgaaaattctttttttttttggttctctatgaacatttctaaatatttagtattttacttttttcttaattattataaatttctgttattttttaataatatggttactttttaggatttactcttttaatattttataactaatttatcaatatcttaattaataagtgaatgcttcatttagttttctaagttttttagtagtttcattttttgaaacactacttttttaaatgcaagtttctattttctaactttatgtttctttcattttgatcttcaatatatttatctaatttcatgattatctttttaaataaatcatgatttattatttttt

SEQ ID NO: 5104 - DNA, 1665 bp, Glycine max
  Clone ID: PAT_MRT3847_104617C.1
gtcaagtggagagaaaaagagcagatggatcctcctaatccctaaaataggccttcttctgtaacagcaaaaacaaagggccggctattctttttgttcaatgaaaaagcattcgttcatagtagctaagaggaatccgaacttattattattcaatttatagcaagcaatctctgattggaaatagacttgatctcgaccatcacctaagctatttgagctcctgtctaaactccccgactctatgaaacccaaacccttcatcttcgccaagcgcttcccaattttggaccttttttcttttccattttctccgcaacaacaacgttttctcttctccactcacaatcgccactccttcgacgaagccgttccaggttgcagcgccgtttaccaacacgtgctcaagttccagcgtccaccgaccattcggtggagcccgcacctcgagaacaccgctagtttcatcggcaccgtcgcccgcgaaccgacgcgcgttaactcaacaaccggtaaattcggagtttacaccgtgcttaaggttccaaaatccaaccaatcaaatagctcctttttccggtattattgttttggctgggaaattttgaccgctaggacattatgcttccttcgttgtaattacgagtgcttctgatgatgcggaacaatgtggcaaaacttgcttcggaacacttgaaatcgaatgattttattcatgttttaggttctttggggtctttcacgaaacctgatgccaatggaatccttagattgaattacaagttagaggtgaaggagttcgagtttgttgctcaaaggtctggttatctaggcgacaagaaattggaatctgttgaagatgctggcatgcaaaaaaatcaaaatcggcttcacctttggcaagtgtttttttccaatccaaatgagtggtgggatcaaagaaagagcaagcgaaatccaaaacagcctgattttaagcacaaggataccggcgaagctctgtggctaagtgagtatgatcctccatgggttaaaaggcaactccaattgtttgactcaaaaattgctggaggatctgcaggtcgtcgttcacgtgtcaccaactgggtttatgatgagtagctgattgatatcaataaaagaagacaagtatgggtaattgaaccttatacacgacaattttgtacttactgttaccatttgcaacacagcttagtgaacttgggtataatttatgtaagagaatggaaatcactgtaattaattggcgctattctctaggcaaaacatatcagctgtgagaaagcttagctcacttgataattactcagtagctgaaaagaatgaaagggttaaagttgatgacttgaattcttggtctaacctgaaaagcttgcggtgtggccaatttagtgaagaaataattttaaactatttttggagtatgtggtggtagtggagatgttgggctgataggcccgagacaagagcccacaactgatccgggtggggatttgtgggctccgtcctgtgatatggaactttatgtttttgagttaggattttatgtacactataataatagttctatagtaactgctctttttttttttttttgttttccttgtaccaattttgatagtgaaatattttttctttgaccgt

SEQ ID NO: 5105 - DNA, 325 bp, Glycine max
  Clone ID: PAT_MRT3847_104618C.1
gcacgctgtggctacagcgaggggtctttttacgtttcaacaccttaatctgcacacgctgcaccttaagcttgaaccaagacccacgtcaccatggctttcacaggcccgtatattaacataagcgtgcgcacgggcaagcagtgccaccagaggattctttaccgtgggcgatgcgactactagaacaggaccctgccagcagggatgcaggccctattggcaccgataagaacatgggcatggggctatgaagagaacacaacgatacagacacttacaagatgccaagtatgtacagagacatatcggctgtgcaaggctt

SEQ ID NO: 5106 - DNA, 201 bp, Glycine max
  Clone ID: PAT_MRT3847_104619C.1
gtatttgcggagccaaccacacaaaaagcacttcactctttctatgttgtgagtacagaagcgccctaggactagtcatcatccctaactcaaggagcctccatctgtaagattattctccctcttgaaccacgcaggctggtctctagtacctgtgttttttacaaggagggggctacagcaggaacagaaactgttaat

SEQ ID NO: 5107 - DNA, 1143 bp, Glycine max
  Clone ID: PAT_MRT3847_10461C.1
gcgagacgacagaagtggactgacaaaatacaacaatttcctatttgtagagccgaccttttctgtgctgacgttatgttagtatctcggcctcctctgactcaaaaacagagagagagtatcaaagttcactccaacttcgatattaaaaaaatgagaaaaaagaaaatgagttttgatctcataaatcgccttgaaacatgcacctttacatctctatttttatgatctctctctctctatatatatgcactatcacacgttatagagggacacataagccaccacagtctcacggtgtagggcggcgctcgcactcaccgcgtgctcatgtcccaacgtccgatctctagctcccctctattgactcttgagagatgaaatgtttatgatttgatgtcgtgtctctctcactttctctgtttgacttggtttgtgattgttcagagaggagcacattcaatgaatgaagctttttggtttttgagtttctgggagtggatcaagttggcccccagatcttcaatttgtttgattgttgcaaagtctcatcctttcttctggtagtgtgacacttcaactcggtttatctttttgtcattgagaaaaaaatgttgacttgcatagcgtgtaccaagcaactcaacaatggatctcttcgccaagaagagggggaagaagctgttcacactcccagcaccaagcaagccatcaaggctctcacttctcagatcaaggacatggcagtgaaggcttctggggcatataagagctgcaggccatgttcaggatcttcaaatggtaacaggaataggaagtatgcagactcagatatggggtcagattcagcaaggttcaactgggcctaccgaagaactgggagctccaattcaaccccaaggatgtgggggaaggaagtggaaaatgggggtagggtgaaagggctttcaagtggagaaggaacaccagcatcagtgagtggaagaactgagtcagtggtgttcatggaggaggatgagcctaaggagtggattgcacaagttgagcctggtgtgcttattacttttgtttcattgactcagggagggaatgatctcaagaggatacggttcagtcgtgaaatgtttaataaatggcaagctc

SEQ ID NO: 5108 - DNA, 960 bp, Glycine max
  Clone ID: PAT_MRT3847_104620C.1
aattcggctcgagtacgttaccttacatattccatttgtctctgatcttccaacaccttattcctcagagaagagacaaaatggatcaccatttcacttcagaaacctctctcattattcttctcctcatcacatccctctcctcccttgccaccgccaccaacatcaatatcctccaccacgacctccaatccgacatcaccgaattctgcaagaaaaccaccaaccccgccctctgtgccgagaccatccatccccacttcctcaagaacagaatcgagcccttcaaggcgctcgacatagaagtggacgccaccctggcgaaggcaaaaaaaaccctagccaacattcaaaccctagaatccaaaacgggcaccaccaaatcgtccaaggactcgttcgacatttgcaaggaccagtacaagagcatgctcgacgccatcaaggaaaccaaagccgcgattgctaataaggacatcatcacggctaagttcaagttcagtgctgttttgtcgttccaagcggcgtgcaaggacgcgtttgaagatgggaaaatcccgttctttgaagactccgacgcggtttacaacctgggagggaattgcttggatattatcgctgatatggagaaagctcagggtcctcagaaaatgccaccggtgcaacaaagtgccccttctgcatttagcaacgtcatcggaaccgtctcataaatttttggtgacgaatccatttttttacgtgaatgatgatggaattgtcaagtgcagtattgtgtcattttctttttgttttcttttagtaaaacgaatgttttgggttaggggagaatggagattaattcttcctcccatctaaaatgttactgtcttgctgaattattttttattctagttactatttgattgatatatatattatgaggatttaaattattataattaaggatttatttacaac

SEQ ID NO: 5109 - DNA, 659 bp, Glycine max
  Clone ID: PAT_MRT3847_104621C.1
ttggaatgaaaaaaagaaaaaattgaatattattttagataatgcttaaatgagcaaaactcacctttacatgaatacaattgtatcttatataactaatactaataagttgttacataattggttacaagaataactaacttgtaactaattaaattaataactaacttgtaactagctaaactaataactaactaatgctagtcatctatatctttaataccccgcaagtgggaaggtgtttacacttcgagcttggagaagataatacatctacatcatagaaaatgaaaataaagtctgaaaaaattgaaatataactaaacatgtcgaaaatacatcaatcaaaatagaaatctagaaacaaatcaaagtataggttcggcaatggtgcatagctcctagaagtcttcgatcaacatttgctttttcaatcttcttccaagagttcaaagcaagcatcaaagcaagcaaaggcaacaacaagaccatttggcataagctcaaaacatcaaagcttacggacgcggggcaaaagctaaaatcaatgcttaacccctcaagggagaagcaaaacaacaattcaatgcttaatcatccataacaaaaactcaaacaatgcttaatcaccatggacaaaagcttacatcaacataaag

SEQ ID NO: 5110 - DNA, 741 bp, Glycine max
  unsure (1)..(741): unsure at all n locations
  Clone ID: PAT_MRT3847_104622C.1
cttgattccctttaacattttgataatcatacatcttggattctacaaattctcatcatcttaaccatgttacattagaacacccgaaattaaagcatgcagttgctgcaagaataatttggagggactagtgtggaaagtagacacagaaagaaatgccatcaacagtgagggatcacgggattgttcgaaggatggcaagtcttcctcgaagcataatgggagggatttcaagagcaatgggggatggaatgggctttataggaagaggaagaagaagaaattagcacacaaatattcctttgcagcctcaagaccatcatgttccacaaccacatggtcaagtagtagttcaagatgaatggagttttctagagagttttgagtagcaatttggcaccaaacaccctttcttctatgctttccgtttcgtcgaatccatgaagttagctgagtaagatcacaagttcttgttcatatacctccactcgcctgaccacccgttttctgcaaggaaacgctgtgtttggagccggtgatccagtttcttgacgtgaattttgtttgctggggtggacttgcggatagaggagagggctaagcangaagaaaagatccgagcagaccgtaggctcagagaagaacaagatgctgcatctctggcaactttacaaattgacaaggtctactcctcttccactttttatattttttacctactaagttaagccttaaatctca

SEQ ID NO: 5111 - DNA, 325 bp, Glycine max
  Clone ID: PAT_MRT3847_104623C.1
ctcacgcgtacgcagaaagcaagctcatactaaaggttcaaaaatgtcaggggcctcctgcgggactatctctaacccatactcgactgtcaaggccgcgaagctggaaccatcagaccccgaatactgcagggtcagcatgacgtagaccgtcaccaaacaggcctactccggaagcccatgatactgcccagaccgtgtcacgtacttgtacccactctctagctagccaccgtactacctcactggccagttcccacgtgactaatgctgggacactggtgggctttcggccgacccaaaaaccttagccagaaaccgtgag

SEQ ID NO: 5112 - DNA, 111 bp, Glycine max
  Clone ID: PAT_MRT3847_104624C.1
ctcgagccggctgtgggagagaatggatattacaagatctgcagacgtccaactgtgtgtggactagattccatggtgtcaactgtagatgctccatatccatccagccat

SEQ ID NO: 5113 - DNA, 393 bp, Glycine max
  Clone ID: PAT_MRT3847_104625C.1
actgccaaattatgtggaatttatagacaactttcgtgtgaaaaaagtcctaattgcggccaaattgtccgggaaggatattaaggcgattcctcagcttcctccaacaaatctcttcccattgggacaagcacccgctttcgatgatggaaaagtgtgtcttttcggtgccgaggcaatatccaaatatcttttgggcactggttcaatttatttgccacaggttttaatttttattacacaattcatttgtatattttagaaccccggattggaccaatggattggttggactgcttcttctttgcaaccaaatgtcctttcctatgttgtgccttgcgtttccgctgccaaaattgaccaagatgctgtagagacggcaaacaatgaatt

SEQ ID NO: 5114 - DNA, 819 bp, Glycine max
  Clone ID: PAT_MRT3847_104626C.1
catcatggtattattagtgaagaaataaactgcctcaacaaacaaaaatctctgtcacatccaaggtctaatggagcatttgaagcttgcaacatctagcatagactcattatacatgcacaaatcaacacatcaaatagatgtgacactcaaggaaaaatttatcattacaagttacaacatttatcaaccactcagaccagtctcacactacttttatcataagaacaaaaataaaaatgcaaccacaaatctatttaaagtatgcattaatcctatctatcatcacacgtaacctacctagcataaaaagcacataatattaaaggggacctctcatatccttagaacacgtaatgaattgagctggaatctcacatcactggtcttatatttgccggacgtactactacgggtaacaacttcacatagatagaaaatgaaggaggcaatgcaatttttgcgagtacttaatgtcacagcaataaaggcaaacatgaattcatagttgaacagatattaatgccatggcttgatagggacacaactctctggttgaaggcaaccttccaaaacacggacactttaagaacttttcctggatttctatttagctttggaaggtctctgaaatgcttcccatcctggtacttggtagcaggtcttgatagcctgctatatcttattcaatgcttggtatccagcctatctaaaacggggtttacaagcgtccagatatagtgaatcaatctctcattgagatctaaatcaagtgtagaaacatgttgctcctgaggaagcaaatctggaaggagcttg

SEQ ID NO: 5115 - DNA, 442 bp, Glycine max
  Clone ID: PAT_MRT3847_104627C.1
ggctcgagaaataaaaaacatttttattataaaccaaaaaaaaaaaaaagaaagagggaaaaatttgaaagagacgaggggcggccgccgaccgtcaagcttactgtcctgagtagccatatcatcccggtccatggctgcgaaccaacatgctttattgcatggtgggtatggtctggtgaggtgataaaactcaactggtccatgatggagtgcgcccattgctcgcctagtcacgcggaatactttgcttctgtatgaggcaagcttcccttcttgtcttttgccccactaacctagctttatttgcttgctaccctattactgttattcggcctgcaaaacagccaagcgagctcgcttagtgcttcttccttcatccaggctgggtgagacatgttattgtaatggcaacaggttaaacattctatcaagctttcgg

SEQ ID NO: 5116 - DNA, 298 bp, Glycine max
  Clone ID: PAT_MRT3847_104628C.1
ctaaccaaaataatacgaaggttttgcttaaatatgtggttctacatgtatgaatgtatttttttacatgtatgacctacttaaacatttttatttagcctttaaaaaataaattaaatttgtggtttgggggagaaaaaaaaaaaatttgtccgggtccaacataaaatgggaatgctaaggcttaattaatttttaattgcaagctcatgcatttttgtttgcccgatttccacgggtggagtcaagagggcctcacacacctgagatgcattttcttaaaaagggtcattattta

SEQ ID NO: 5117 - DNA, 265 bp, Glycine max
  Clone ID: PAT_MRT3847_104629C.1
aagaaggcgtcttcataaacgcctttcttctccgtttccgtttcctcgttcgaattcgctttttgatctgcgaaaatgagagagtgcataccgatccacattggtcaggctggtatccaggtcggaaatgcttgctgggagctctcactgcctcgagcacggcatcgggcccgatgggcaaatgccaagtgacaagacagttggcactggtgatgatgctttcaatacattcttcagcgagactggtgctggaaatcagtgccac

SEQ ID NO: 5118 - DNA, 493 bp, Glycine max
  Clone ID: PAT_MRT3847_10462C.1
accagattacgttgcgaaagagatgaaagatccttattatcatcaaactacttactctgatgttggctctgataaaaacagaggactttatactactgaagcagatcgtatctctggaggtagtcaatatgaaccccctcgaggtgtgggaacaactacaacgactacgtcatcaactacgacagaggaaggaggtattcttcaatcagcaaaggaaacaatctcttctgcttataatgctgttgctgcaaaaatttttgaaactgccgaagtagctaaagaaaaaattgatcattatatgcatcctgatcaacctcatgttgttactgaaaagacagaatataccccgaaagttggtgaggaatattctactcgacctcctggtaatgtgagtaatctctcagagaaagataaacacaaattataaataataatttggtgcttttattaagtgataatttgtttaagtcattttaaaaatgatttaaaaaga

SEQ ID NO: 5119 - DNA, 248 bp, Glycine max
  unsure (1)..(248): unsure at all n locations
  Clone ID: PAT_MRT3847_104630C.1
cctctagagcggncgnccttttttttttttttttanctgnccaantnangggattgggagatnaanttaaaggtttggaccctntncgatggctaggaatggaatnaacatncgacttgaagggatggnctttaagggaaaaacaatatttttttttataacaagcgaccttgnctccacaagctngnangtnnannannatnaaagatccttaggactaaaactaaaagctctaactcttnnaccgt

SEQ ID NO: 5120 - DNA, 337 bp, Glycine max
  Clone ID: PAT_MRT3847_104631C.1
tatacacataaatccactgcgtttttgcattaccacactctgtacctcacataaggctacagtcaccataacatctatcaggaccgtcaatcataccactaactgctgataaagaacaaccttgactgctatcaacctaatacaaatcggtctcactctaaccgacgccgacgataaccttcccgatctgtccggaaaccttttcatttgggaatttaacactcgtgacttcgacgttacgcgtcacacctacgcacttgacttcatcgatgtactacctcataaaggaatctatactctgcattacgccatcgaacatgtaaattccacccacttc

SEQ ID NO: 5121 - DNA, 252 bp, Glycine max
  unsure (1)..(252): unsure at all n locations
  Clone ID: PAT_MRT3847_104632C.1
ctcgagcntgnaaaaatgatttctgcgatttcgtgggtgtccaaaggggttnngaagtnggancttgtngtggctgaaactnctancgaagaggnnattcaagagataatagcnaaaccatgcaaccnnagtggagacagtgncaatgaagacgtaacacacnatnnacgttgtggcacaagncnttaaccgtagcagaggcattgggaaggncncnactggaacctnagaggtnatnanccttgcgtngaa

SEQ ID NO: 5122 - DNA, 329 bp, Glycine max
  unsure (1)..(329): unsure at all n locations
  Clone ID: PAT_MRT3847_104633C.1
cagcangcacgcntacgtnagctcggaattcggctcgagnntctanncagatcnnnantactnntnncactccantgtnagatctcaatccatcggntaccattgtgtagganaaaggacccgccagntcnttgncagncgtggcnanccanacgncgnngngnaanagncntgntccganngnacntatgncannnctnctnnnncangnggtncntcnncnggnattnntgaggcccggganttnagagnngnaggatctgactacctcagaaanggcgtnncgaangcagttcacnnngngaacnccatnatngcnccnncnttng

SEQ ID NO: 5123 - DNA, 351 bp, Glycine max
  Clone ID: PAT_MRT3847_104634C.1
ggctcgagtggtgccactctcaatggacttctgtattctacatgtaggaatgttacttaacacatacgtctctctattctcgctcatcatcaaccgaattggcgtggtcaagtagtttatgatgactctattcgataaaacttgtctgatctggggacctatctatgatggagtggcactgcgcaccgtaaagggcaacattaacacgacggaatacacacatctgtgatggctcatacactgcggcggggattgttgctgcacatggattctgggctgagaatacacacgagggcctctactgctctcactgtagaccctgcactgagctggcgctgagcgcttagcatt

SEQ ID NO: 5124 - DNA, 1409 bp, Glycine max
  Clone ID: PAT_MRT3847_104635C.1
atatccatcacccctttactcgtgaaggccacaaactcgctgcttattttgatttgaactttgaagtttagttgttttgtggaatggcagcgaagagcaaaatcctagtccttggaggaacaggatacatttggaaaattcatagttaaggcaagcgcagaagcaggacaccccacttttgccttagttagagagaccaccctttctcatcctgaaaagtctaaacttattgagagcttcaagaagcctctggagttaactcttctttatggtgatgtaaatgatcatgaaagccttgttaaggcaatcaagcaagttgatgttgtaatttctacactaggtggacagcagatagatgatcaagtgaaggtcatagcagcaataaaagaagccggaaacatcaagaggttcctcccatccgaatttggactagatgtggatcatcacaatgcagttgagccagtagcaagctttttcaacaaaaaagtgaaaatcagaagggcaattgaagctgaaggaatcccatacacttaacttatgctcatatgcctttgctggttacttcttgcctacattgggacaacaaaatgtcacagcccctccccgtgataaggttgtcattctaggaaatggaaacgtcaaaaggagtttatgtcacggaggaagatgttgggacttataccataaaagcagtggataagacccaagaacctttgaacaaaactctgcaccagaaaccccctgccaatgttttgaccttcaacgaactcgtggtccttgtgggagaacaagattaagaccacccgttcgacaaaatctacgttccagaagatcaaattcttaagaaaatccaggagtcttctttccctgccaatttcttaatagcattaggtcacgcaatgctggttaaggaagcttttaacaatgagattgacccttctgtcagtgtggaagcttctgaactttatcctgaggtgaaatacactaccgtcgacaactatttgaatgcgtttgtctgaaatcaagcgaatgcgttattattgccaataaactattgcacccaagttgatcaataaaatcaaagcatcttgttgtgtatggctggagaatatgtactgtctttctattatttagttacttgtgcttgtgttggcgtcaaaagagttcttccttactttacactgtaaactgtactgttgttcgcttagcatggtgttgcttgaaagttcttctaatgtagtattacgattattttgccatattatggctccgttgcaatttgttcatcaccactctgatcctagtggatgtgcgttgaaactcaattgccaacaagtattacagtgtgattatctcgaagttcttataaattaatgtcaaagtttttcaaaaaaaaaaaaaaaaaactc

SEQ ID NO: 5125 - DNA, 457 bp, Glycine max
  Clone ID: PAT_MRT3847_104636C.1
tgttcatgctacttttgtcacctatgtctcctccataactaggagtggtggttgcactgatgacgttggtatataacatcatcccaccaatgtctgcggaggagacactggttgactaactcttagctgtggctacgatggtgacactaataatcattatggaactactgctgtctatactgactacatccatacacattatgtaagtactggctgctatagcctacacatccatccgcaccaacttgtgactactggtgattttgctggactgatttgtactctgcatctgaagatcatgatatatttctatggaatctacgccgtggacactgattctgctgccttaagtggaaccatatgcggtactagttattgacgcactgccagcgctgattatgtaacaactgcaggcactggtgatggaagcggaactgtgtctggagaactcactggt

SEQ ID NO: 5126 - DNA, 476 bp, Glycine max
  Clone ID: PAT_MRT3847_104637C.1
gcccttcatctccgttcttctagagtcatgaaaattcttgaagaaagtcaaaatgagaggttccagcagttaactaactttgagaagaagttcaaggaagaggttgagagagaggaggagcaggccttagagaaaattgcagaaattttggcagccttgacatctaagaaaactgctatggtctcagaggcatcaagacatatgcaggacacaagcatgcaacagtctaagagattgcagctagagatgctcaacatgcagcaagtttcaaaagatggtactaaggaagttggtgagtatgtagagaatgtgaaaagtcattatgtgcaacaaatattctcagccagtgatattaaagctaccatggagaattgcctcttggagtgctcaaaaacagtggacaattctaagaagcatatatctttctaggaatctatgaagaatctatcacaaaattatttaatattgatttaaaa

SEQ ID NO: 5127 - DNA, 152 bp, Glycine max
  Clone ID: PAT_MRT3847_104638C.1
ccttccttagcctcggatttcggttcgggggccattcattgtgaaggccagttccagttgggaggttccaccttggttgttcctggtttccaattttggtggtcagggggggttgtcctcgattaaaagttacccatgttggtccttaggct

SEQ ID NO: 5128 - DNA, 479 bp, Glycine max
  Clone ID: PAT_MRT3847_104639C.1
tttccctcgcgtccgcccacgcgtccgtaaatatgtaagttattttactttttaaaccaccgaagaagaacaagattaaagaacgcttggtgagaaaccattaaaaaatttgtagatctaaattactcgtatttggttgtcaatgacatagtttggtacatggtcgacctcaactaggaggataaggcttgtctcgtgttgctgtatgagttgactaatcatggagaaaaccatatccaattcataagatattctctgttgccattgtgtgcatagaaaacctttgcaatcctatattgcttgtgcttctgtatatagagactaacgttggcatctccttaactgtgcagggcctattttgatgcttgacgaactggattgttctggttattgctgctttgaatcataataacagcattgcttacgcatttggttggaaaatcctgttatcaagactattttcctaatgatattcacat

SEQ ID NO: 5129 - DNA, 250 bp, Glycine max
  Clone ID: PAT_MRT3847_10463C.1
atggaaagctgcggataaagtttcggtggatggatagactttggattggggaccctgctgctattgttcttgatgatgtccacttattgacggatgcttctaatggcttggcgttttgttcataggcttgtggtattctttcgataccatatctgatatattgcacccatccattgtgcagcatttcgaatttagcaaacatcttaacctgcagtggacttgcaagttgcacataactatcatcgcatcg

SEQ ID NO: 5130 - DNA, 456 bp, Glycine max
  Clone ID: PAT_MRT3847_104640C.1
cctgagtcagatctgaaccccattcagagacagaccgattatcgagcgggcgtaggctccacaaaatgtacgagcagatgtgacaaggctacctgcacattgcatgcccactacgagcgactcgactggtgcacagtgatgccagcccttgctttcactcatcaaaacacgtcagcgtggccctttaatggagttttatgtacagaggggagggcatatggcagaggggacttgatgtatatgcctctgtgttctgacaacttttgaagtgtgaacactttgtgcttgacatgactgacagagcgtggagggacctcacatccatactgttggctgggctgatcagcacataagacgggaatgactatagcttggatgttacgtcagtgaaacatgcggagcgagactgtacgtaagaggcaaacaggcatatttggggaaattggaccgcatcac

SEQ ID NO: 5131 - DNA, 226 bp, Glycine max
  Clone ID: PAT_MRT3847_104641C.1
ggctcgagcgcaaacactacttctatttctttatacccgcttcgaaacgtaacaattttatcgcgatgaatttcatcacgcctggaataataaaattctagcgacaacgctatttataccaatagatggggctaccgttgcgttacgatatctgcctatcgaagtcctacgtcaaccgtgcgccacaaaagaagaccccggatgtgatggagacaaccatcgacta

SEQ ID NO: 5132 - DNA, 474 bp, Glycine max
  Clone ID: PAT_MRT3847_104642C.1
tcattcatatatgaacatttttgcctccttatttcttgaaatgtgggatttggaagcaacaaaagactagcgatcggagtccctttgactaaaggataggccgaatactataacacatagttgcaatacaaatttgagcactgacgactctttaggggaagaaaatgtgaaattggtggtttgggatgcattcccattaaatttcctttggatttaggctagggggaattggcctctcccaatttcaatacctatgtgaacatttttgggtacttatgtctcgaggatggggaggggccattctcctttgggataactatggaggcgttctggggacacgaaaacttgcctctcccttgagtgagggaaaacccgtcactggcccgtgatgtacttcgaagagagggggaaaaccacgccgtttccaaactccatctttttgaagaacattctccgttttccagggggagaaat

SEQ ID NO: 5133 - DNA, 518 bp, Glycine max
  unsure (1)..(518): unsure at all n locations
  Clone ID: PAT_MRT3847_104643C.1
gataaaggaaaggaactttcgttgcgaagttgattcaaaagttttaatttttaaacagcagctaccatgatctctttgtcctgcagagttatgaatttgatgttgaagcagcaataattatcttagcatggagacagagcaagaattggaatgggctgaagcccagaacatggtgttcttaagcgaagacctcgtggccacggctaagcaacagcttctgtttctggcagaggttgataggaatcgttgcctttatgatggtccagttttacacagagctaactacaggtataaatattgttggcttcctttactagccaaacatgctgagtcacatgtgacacaagacccttttgttgttcctcttgactgtgaatggatttggcactgtcataggcttaatccggtgcgttacaaaacagactgcatggaactgtatgggagaatactangtgatcggaatgtggtatcttcactcagggaaccagcaagaggaagtgaaaaactctgggagacat

SEQ ID NO: 5134 - DNA, 367 bp, Glycine max
  Clone ID: PAT_MRT3847_104644C.1
cttccacttatataaacaaaaggatgtgctcatcacttgggaaaggtaagaaaagcggctgtgtgactagactggatccgttctcagttactttactgactgtgggtttggaagcacagaatgaaaggcgcagtataaacgccgctaatgctattctgaccctacttcgtaaaaactggtagagcctcaaatatgtggaggacgagatgcactatggcatatgggaactaacatgtaatgtttgatatactcagacaaagcgcatgactatctgcaatgagtgtgtttaaatacttactagacattgctctcaccaacaagcttttcactgagggaactgatattcactggcatggaatcagacagg

SEQ ID NO: 5135 - DNA, 465 bp, Glycine max
  Clone ID: PAT_MRT3847_104645C.1
gctgaagcctataaacaccatagtgaaaacccaatcaagctgagcggttctagtatcaaattattacgacatacctgttggacgatgctgataaaatttatatcaaaaatcgctattgtacatacttacttgcttaccgtcaaccttctctccgacaataccctctgatctcacacctgagttgctgccacacgccagaaggtgatccttgtgagcatgccctcggccaactccgatactgtccatcttattcaccggtatattcttcttacccaattgttagtccatactgaccatttgaacaactgactgctcttaatctggaacgtgctcgttaccttccaaatgaccacaccctaattcatacaaagggcttgccacacatacgcctaatgcactctagtgaactattatttccacttcttaaccaatggatctgtacgatctttagaatccatggctcta

SEQ ID NO: 5136 - DNA, 418 bp, Glycine max
  unsure (1)..(418): unsure at all n locations
  Clone ID: PAT_MRT3847_104646C.1
caacgctctctcttcagcctccattctacgctctcccaaccgccaggtacgtaccaacgcaacgcaacgctacgctacgctacgctagcccctccaattttcaatttcactttccgattttatttgattggtttcgattttttttttcttcttttttcttttttacagtctctgacccgaagagcgaaccataatggaagagtaaattaccggaaaccgaataaccgtttctccgtgaaagcctccgccaaagagattgcctttgaccagcattcccgctctgctatgcaggccggcattgacaagctcgccgacgctgttgggctcactcttgggcccagaggtgggcttttttgcatttctagatttgttttgtttttttaacattgagattaaacaatanacaatacttagcaat

SEQ ID NO: 5137 - DNA, 412 bp, Glycine max
  Clone ID: PAT_MRT3847_104647C.1
gtgacgctttgccgcccggtttcatttcatttcaccgcagccacttcgtctcggtgactccataattcccaatcatcaccgcagcaaccaaatagggtctgcgtttcgtgcaatcaatccattacattacactgcatgttatataatcatacacacacacacacacacctgaaccaatttaggtttagaggaaacggcatcgtcgatggctgagaaggatgcgacgacgcttaagctgaagcctcgaagactcaagggtcacgacgacagcacaacctgctgcattgcctcacgtgaacgctctcatctcatcgtcacttccggcgatgatggtcgtgtttgctggtttgacttgcgatgccctgatgagccgagctggttatggatgttagcgtggagccagtttcctccc

SEQ ID NO: 5138 - DNA, 422 bp, Glycine max
  Clone ID: PAT_MRT3847_104648C.1
aaccctaccgggccctaaaaaaatcttgggacctaccccttggtacctggggaaccatcctggaaccctttattccttgggtttatgaagggaaaagaagaaatttcaccagttctctaccccctattttaactttttgaagaaaaaaatattatggtggtttaactgcaccttattactattttaaggccattcctgaaatgattgatttttcaacttattttaaaaatttggtttgggaaaccaaaaccaaccctggaccaaaatggattcccccaatttcaagggattttaaaaaacctggtaaccagtggcttcaaaaccttcacctgcctttctaaaaattttaattgaaaaggcaaaaccttaaccatttttattttcttatttaattcgaaaacagaatttattttaccaattcc

SEQ ID NO: 5139 - DNA, 477 bp, Glycine max
  Clone ID: PAT_MRT3847_104649C.1
tggggaatctaaatatttgaacaacttagagtaaaaaaaaagtaattatataaacatgtattcaaagacacgttaattaccacattacatgcattatctatgttgtcacaactaggtaaattaaaaacattgtccaaacaataacaagaggttcaatcttcttctaaatcaacatattttgtggtcaatttcataaaattggtatactggtgcattctactaatataaggactaggccactattttgcttgataatgacaatgtgttgaccataacaaagttgttggcggcaagggacaaccgcctcttagaaatacatgttacatagacaaatacacgttcaaatgttaataacacatgttataataaaaaaaatgaacaaataggatggtcattgttttacctgaacaaaatgattgccatacacatgaccaataccccttctgtcgtcttctcgcagccgtacggacgcgtggg

SEQ ID NO: 5140 - DNA, 332 bp, Glycine max
  Clone ID: PAT_MRT3847_10464C.1
gtgatttataaccatttattagtgaaagtgtttttaagcacagtcagggtgtaaacagtgcagcattcctgctcccctccgtgggagcagcgtctccttttcaattcatgtgactacagaaggcacttggtgaactgtgcctgtctgaggtgtggaaaccaggagagggggaaagaattctcaaaggcctgacctgacaagttggaaagggttgcagggtagggaatgaattgggagtgggggcccggcgcacccatttccgtgactttctcccctttcatggaaaccgaaatggcagagaccggctaccggcgatatgttttttttaaaaa

SEQ ID NO: 5141 - DNA, 459 bp, Glycine max
  Clone ID: PAT_MRT3847_104650C.1
gggggggtttttttttttttttttttttttttttttttttttttttttttttttttctttttttttttaaaagggaaagttctatttaaaagagttttctatattttttgacacactcttattttaatcaaacagtccctttaacacatttggggggggggggggatcaactttaaagccaaggacatataaacatgaaggcggacggacccttcacctatttgttctaaaattcaaaaggacggaaccaaaaaaaattaccctctataaaaggaaaacaaaaaaaatgcaattcccaccaaaatcaatacaaaaaagaaggctaaatgccggcgccctccggaggttggacaaccttccggggagggggaacccccatttccttcttcagctgggtcaccatgacccccatggggaactccccctgccaatttgcaagaagagcaaaattctttggcc

SEQ ID NO: 5142 - DNA, 403 bp, Glycine max
  Clone ID: PAT_MRT3847_104651C.1
acgtacgaagcaaactgatcgtgagtccacaggaggaaaggcacggaggaagctgctcgcaacgaagggtgcacttaagtctgcaccgtctactggtggtgtgaataagccgcatcgttgtcggcctggttccggtgctctacgttagattgagatataccagagaagtaccgggcggtggatcaggaagctccccttgcagaggctggtgtgggaaattgctcaggactgcaagactgatctgaatgtacatagccatgctgtgcttaggttgcatgaagcgtgtgatgcataccttggaggactcttagaggatactaatgtgtgggccatgcgagcgtagcgtgtgtctgttatgccgatagatatgcacgtggcgagatggattctgggtgagcgtgct

SEQ ID NO: 5143 - DNA, 540 bp, Glycine max
  Clone ID: PAT_MRT3847_104652C.1
ggctcgagagattatcgaaggctaatatataacactcaagagatggtcgtgcgtggatagctgttgatggttcgcgggactcatatgttcaatttggtggtttttgctctttctgtacaatgcaatgccggcgtcgttccctcagtacgtggcggaggccataacggggccgttgccggatcctcccggcgtgaagctgcggaaggagggcttgacggtgaagcacccggtggttttcgtgcccggaatcgtcaccggcgggttagaactctgggagggtcgccagtgtgcggatgggctgctcaggaagaggttgtggggtggcacctttggggaattgtacaaaagaccattatgctgggttgagcacatgtcactagataatgaaacaggactagaccgtccaggcattagagttaggcctgtgtctggacttgtagcagctgattatcttgcacctggttattttgtctgggcagttctaattgctaatttagctcgcattgggtatgaggagaaaacctgctatggctgttatga

SEQ ID NO: 5144 - DNA, 328 bp, Glycine max
  Clone ID: PAT_MRT3847_104653C.1
ggggctcggccaaactcaactccaaaagttgaggaatcacatcacaaggatgattcccacaagacataaattaattttttattttcttaataaagaagacataaagttaaaaaacaagaactcatttttccattaacaatcatgtaaatgttgcaaatacatacatattttattactgaaatatattaataaacaccaacagcagaaacagagcagtaaaattttaagacaacagaaaatgagagcctgagctcttacaagtgcgcccaccagagcctaagctcctaagagaaaaaattattctgtcaaatgactaaccaaaaatgac

SEQ ID NO: 5145 - DNA, 499 bp, Glycine max
  unsure (1)..(499): unsure at all n locations
  Clone ID: PAT_MRT3847_104654C.1
ctgcttccctctaattcttctatgcctttttttttattcaaaagtgagtttgccatgacatgtcttactgttgacaaattttgattaatgtcacaaataaatcatatttgatgtcttttgttccataaaatatctgtgcttgaaacaacattatacaattttttgttatcaattctcaatttaaattctactcatttaattttattgctatttttctgacgactatgtaactgtttcgatatggcaaaatctgcatatggaagtgcgctcatgcacacatggactctgtaaccatataagcaaaggtatggcctctttttttttttttgattgatccctgactgctgtgctatgataagcctatatatatcatatcgnagagttgaatatacatttctcttttcaatattgaaagagaaacttgttacttatttgaccacttggaccgttgcctttattcataattgtcttcagcgctgactatttcagtatgtctaac

SEQ ID NO: 5146 - DNA, 627 bp, Glycine max
  unsure (1)..(627): unsure at all n locations
  Clone ID: PAT_MRT3847_104655C.1
ggctcgagctctatccgactcggccttcatatgaatgcaaacatggcatcttcaccaaccttaataccctttctcctcatcttcttcctcttccacttccacttccaccgttcctcctccctccccctctccgtggagaaccccgaagatgacgtcatagtctcgtcgccgaagggaaccttcaccgcagggttcagccccgtgggggagaacgcgtactgcttcgcgatatggttctccacgcaagcgacgacaaagaccgttgtgtggatggcgaaccgcgatcaaccggttaacgggaaacggtccacgctttcgctcctcaagacggggaacctcgttttaaccgacgcgggacagttcgatgtctggtccaccaacacgctctcctcgaagacgcttgagctgcatttgttcgacaccggcaacctcgtactccgcgagcagagtaatcaaagcgcggttctgtggcagagcttcagttttcccacggataccctccttcctggccagattttcactaggttcacgaagctngcttcctcaagaagtgagggcaaccattcctctggtttttacaacctctacttcgacaacgacaacgtttgtgcgtattctctacgatgg

SEQ ID NO: 5147 - DNA, 488 bp, Glycine max
  Clone ID: PAT_MRT3847_104656C.1
cggccttgagcaatatcgtgggcttatgggctcattcctgtgaatttcatgatcttgtttttagtgctgcatggcctactacggttccacaccaacgcatcgctctccatgggtggctgcgtccaccccgatgtgctgctcttctttcccgctgacgctgccgcatgttgtctgtggcgcttgtctgcgcaccaatcttgctgtgcctgcctgcaagctggctgaccttgtctcatttgctcccatgcgggctttatggtgtggtcctgtttgcaggatgcgccgtgatctggtcaaaagagtatgcgttgcgtttgcgagcttgaaagggaagtgctggcctcgcttctgacgcagcttccttgtctgcgcaactgaccctctcgctttgaggtccgtctggggtgcctgctgggaccaccttgctggggttgggtctgcccaccctgggtctgcgggcccccttgcgggttgcgtttgttgatgcc

SEQ ID NO: 5148 - DNA, 483 bp, Glycine max
  Clone ID: PAT_MRT3847_104657C.1
aaaaaaaggaaattccttttaattaaaaaaaaaccccccccaaaaaaaaggattccagggggggcaaggggaccccccctgcccctaccaaccataaacccccgggacccaaaatttttttttttaaggaaccccagggtttggggccccccccattcttttggggccaacagaaaacccttatgggattttaaaccccctaacaaaaaaggttcccccccccctgaaaaaccctaattaaagaaaaacccccagggaggaaccccccaaaaacttggtggggggggccaaaatcgggtgtttgggaagaagaacccccccgggcttggggagaggatctggaattttggaaatctcaacggataacccttcgaccttttcagggatcttaaggggggggttaaaaaagcgcaattgaccggccccgtcccttgggggggctccaaaaagggtgaggcgccctttagagtagacccccccttt

SEQ ID NO: 5149 - DNA, 773 bp, Glycine max
  Clone ID: PAT_MRT3847_104658C.1
gggggctctaagctatactattatattataactatatttcaattaatttctccactctaaacatattttcttctatcatttctcagacagccaggaaaattaacaacaccaaacatgactaccctccattgatgggatttctcagaacaaccttaaaaaaaaaaaaaaagagaaaacaaaattgaaaatttctagccaaagagaaacaattttttttttttttatgtacaggtatatctcaagcggaaccctcaaaaggaatctgatctaaaatcgaaagaaaaagaagaagcaggggactcaaaaggagagaactttagtctaccctttttttgcgtcaccctcaccgaccctttttcttcttcttcttcttcttcttcttctcttcacgaatcactgtagtcacgccagcatatgagcattgtcacacaccgcctcatgatgtagaaacgcgccctttgctcctttacaagcctcgcacacttgctagcaaaagcacaccttctctgtgaggaagaattcttgatgaaaggggtgcttgaggacctgcttctggtggatccttctttctttgacagcttccacttctcatcaaagtacaaaggtggtgtggtggatacagaagaagccatggagagagatcaaatcaaaaggggtttgttttgatttgctgttttggtagaaacaaaggaaaagggaagaactaagaaggaaaagtgagaaactgtgggtggtgaattaatatactgagagactgaatcactcagctgtcg

SEQ ID NO: 5150 - DNA, 660 bp, Glycine max
  unsure (1)..(660): unsure at all n locations
  Clone ID: PAT_MRT3847_104659C.1
gatgttgttgtgtgcagtgccgtctctgcctaatatgttttggaagaaagaagaaagagtcagtgcgttgcgcgtgtaatggaagctgagcggaagcgcttgaagccacgccttgagcgtcggaacgctatgaagaacatcgactaccaattgaaggacgaggacgcagacgcagacgcagacgcagcttatttgaatcaacggagtttccgagtcaaaggaatcgacggcgaattcgaccgcatccttcgcagcctgggcctctctgggcccgaggactttgccatccctgctgcagcctgggaagaagcccgggcccataaagcccgcagcagcgtccaaccgagagaggggggaataaagggtgttcggcctcccgttttggaaccgccgttggtcacctctgcttggacctcccaacaacaaacggagagggttccaccttctgattctgtgtcacgtgatgacgatgttgctgtcgaagctcaaactgaagaggtttctggttttgctgatgaccacgggtcgtttgatattcataatctgtccccaatggaagtgggtatttccgggtcgtggcaaaagggcgatatcctaggaaaaggctcctttggaaccgtctaatgaaggtttcaccgatgatgggaaattttttntgct

SEQ ID NO: 5151 - DNA, 192 bp, Glycine max
  Clone ID: PAT_MRT3847_10465C.1
gaaaagaatgaacaattcccatcaatttatttggataatagttttgtttaattaacacccaaattggtcacaattttttgctttaaaccaccctagatgatgattttggctcaaaaggtctttcgccctggtccgctctgaaaagcattttattccaatttggggccctttgaacaattctggggggaaccc

SEQ ID NO: 5152 - DNA, 659 bp, Glycine max
  Clone ID: PAT_MRT3847_104660C.1
cactgaaagatcaactttcctggtagtgatgttacaattgcagaggctttgatggccccaactgttatctatgttaaacaggtacttgacttaattagcaagggaggggtgaaaggaattgcccacatcaccggtggtggtttcacagataacataccccgagtttttccggaagacctcggagctgtgatatatgatgggtcatgggaagtgcctgcagtgtttaagtggcttcaggaggtacatctttctttaacgttccctgaataaatatactttagcaggaaataaattatttttcatttcttatcaacaattatatattttaatctggtcttcaaaattttattttggaaacgaaagtatataacgctatattgataacctctcacgttaggctgggaagattgaagactctgagatgagacggacttttaatatgggcatagggatgatcctggtagttggtccagaggcagctaatagaatactcgagaacagaggtgaaacagagaaattctaccgcattggtgaaattataagcggcaagggagtgacctttagctaaatttaactgagtttaatcatgttgtacccctttaatactttcatggaaaatttttctatgggaatatgcgatttgaatggtcagtttaaaa

SEQ ID NO: 5153 - DNA, 1771 bp, Glycine max
  Clone ID: PAT_MRT3847_104661C.1
attgaaccaaaacggcgttgtttcaattattctattcgcacaccccctgaaagagaatctctcctttctataaacccataatttagggcgcgctttttcccggcctcccttcgccaccgtatctccatccatctccgccaccgtcgccacctctctctctctctcacagttcgtatttatacatcttctctggtcttagcaatgagcttctcaacatgcgccgagatatcgcgttgtttcgccgcagcaacggcagcagcttcagcgaaacctaattccgggaagtcaaacggcaccgccacaacaagcctcagttttctcactccaatcggtcgttacggcgccgtttcatcagtgtcgaggtcgaataagaccaacagaatagtcgtggaagctactcaaggtcttacttacagggacgccggcgtggacatcgacgccggctccgaactcgtgcgcaggatagcgaagatggcgccagggattggaggcttcggcggtttatttcctctcggtgactcgtacctcgttgctggtaccgatggcgtgggaacaaaggtgatgcttgccttcgaaactggaatccacgatactattgggattgacctggttgcgatgagtgtgaatgacattgttacttcgggggcgaagcctttgtttttccttgattactttgccactgggcaccttgacgtggacgttgctgaaaaggttataaaaggcattgttgatggttgtaagcaatctgattgtgttcttttacccacagagacggcgagaagaccacagaagggtaaagaaggtgagtatgatcttagtggctgtgcagttggcattgtgaagaaagattctgtaatcaatgggtcaaacattgttgctggtgatgttattattggtcttccatctagtggagttcactctaatggtttctctcttgtaagaagagtgcttgctcaaagtggtctgtcactgaaagatcaacttcctggcagtgatgttacaattgcagaggcattgatggccccaactgttatctatgttaaacaggtacttgacttagttagtaagggaggggtgaaaggaattgcccacatcaccggtggtggtttcacagataacataccccgagtttttccagaaggccttggagctgtaatatatgacggttcatgggaagtgcctgcagtgtttaagtggcttcaggaggctgggaagattgaagactctgagatgagacggacttttaatatgggcatagggatgatcctggtagttagtccggaggcagctaatagaatactcgagaacagaggcgaaacagagaaattctatcgcattggtgaaattataagcggcaagggagtgacctttagctaattttaattgagtttaatcatgtcgtacccttttaatactttcatggaaaatttctgggaatatgagatttgaatggtcagtttatttggagcctaataattttccatacataaatgatgaaatttgcaacaattttgaggatgcgcatgagtcaagttgctagtgaaaattgtttactttattttgatcttgctttttagtgaaaatcattgaggtttagtcatccttttatgtatttgcaaagccatttataggggcatgaaatttgatgtaaaccaaaaaagtggggtttgttttaccttttgcattcatgttcaattgatatgtttttataaatcaaaaggttagctagtaagcaaatagcaattggtattaaaaaaaaaaaaaaaggaag

SEQ ID NO: 5154 - DNA, 558 bp, Glycine max
  Clone ID: PAT_MRT3847_104662C.1
cacctctgctccatcatcatcagttccagcacaatgtcgatgctttgaggtcacagtgccgatgttgtagagcatccatcgtggtctatgcctggtgatgccagagtatgcacgacttggatcagcatcggccaattattagcatggaggatttcatggcacaggtggcctggctaggagtccagccttctcctttggggggaggtgaggcttccgcagcctaggagcctcagccagaacctcacgggaggccactccagaggctaccccacggacttcaccaattacttcacctgttttggaggtctctaatgaggaggatggcgctgctgatgcggattatgcagttgatatgatcgcagcacagagcacctgggacccatggcctgttacagctcaggatatttctcagccagtccaagatgccccctcctcacctctggatgagcccatagctgcacaggaagagccatgacaggattttcatttattttcctacttttgatacagtttatgtttagtttacgtttttagttttagttttatgtttcactttat

SEQ ID NO: 5155 - DNA, 310 bp, Glycine max
  Clone ID: PAT_MRT3847_104663C.1
ggctcgaggttaaagggtgggatgatcgagagcctttaggaagatgtttgggtgggagcatcgcaggggtgaaaaaggcaaccaattgggacatactctcagggtcatttggactactaagaacctcccctaacccctttgttggagcctgacaagctaaagatacggcccttctaccgacctggaatagctgagttcgtggacactttattgctcctatactatgccagatcaactgttatgggtgttaacaggttaccctccaagtgcacctcagttgatatacaacgcattgcttgcgcctttgact

SEQ ID NO: 5156 - DNA, 642 bp, Glycine max
  unsure (1)..(642): unsure at all n locations
  Clone ID: PAT_MRT3847_104664C.1
tggacactccctgaggaaggaagagaatctctctcctttttataaacccataaatttagggcgcgctttttcccggcctcccctcgccaccgcatctccatccatctccgccacgtcgcctcctctctctctcgcttttcgtagttatacttcttctctcgttcctagaaatgagcttctcaacatgcgcagagctgtcgcgttgtttcgccgcagcatcggcgaaacctaattccggtcagtcaaacggcacttccacaacaagcctcagttttctcactccaatcggtcgttacggcgccgtttcatcagtatcgaggtcgaataagaccaacagaatagtcgcggaagctactcaaggtcttacttacagggacgccggcgtggacatcgacgccggctccgaactcgtgcgcaggatagcgaagatggcgccagggattggaggcttccgtggtttattccctctcggtgactcgtaccctcgtgctggtaccgatggcgtgggaacgaaggtgatgcttgccttcgaaactggaatccacgatactattgngattgacctggttgcgatgagtgtgaatgacattgttacttcgggggcgaagcccctttgttttccttgattactttgccactggg

SEQ ID NO: 5157 - DNA, 654 bp, Glycine max
  Clone ID: PAT_MRT3847_104665C.1
ccaactcttccttaaagatcaaattcccacatggtttgcaatttctggttatgttgctattgctcccccaagtgacagaaagtctatacactcccagtttcatttctgatcccaacctgatcccacaatcattacagcactcccttataacagaatgctcacacccccattactaccaacaaactcagcaattcccttactacccccaacatgagagactaacattagttattagttttgggcctatggtgataaaccttaaaacacttattccatctagaatcacggttcctaacatttttgtttcaggcatatattataaaaaaaaggtttgcctatttacctatcttgtttgttttatcacttgtttctgatttgatctagattttcaactttggctattgatgcttttttgcttgcatttttgtacttattggtcgggtgctcacatttcacttgttagaaacaaaatgaaaaaaaaaatgtacttgaagacatgtagctggtatacatgattcactgattgatcttgaggcgccaatgagcaccctttgagtctgacgttagacgttctgatttagttatagacgttatctggagtctgcactctgatgcacaggttcattaattagccaattcttctgattacatgca

SEQ ID NO: 5158 - DNA, 556 bp, Glycine max
  Clone ID: PAT_MRT3847_104666C.1
gctatacttttcttcctgtcaaagatcagacaataaccagcatctttttcatgctcaaagcagtgacaaagcgaggaattttcttatacctaaccccttaacactcgataagataccctttgttgtaggcgctaggaagcttctttattacaaattaaacgaattaattacatagtagttactataaccccaacattgttccaccaactagggaaagaaattaatcaatcattcaatgaaggtaaatacggggtttgtgtcgatgagctgcaccgggacatgcttttccaaagggaaaggggtcaagaattcttcatcagatgcatgcacgtgccgaaagcttgatggtggtgttgcaattgcaagctggctctgtcaaagtgttgcatctgccttttttgcttccttagaatggtgctcttgtttccatgttgacacaataaacgatattgatggtcctcccgatgatggcgattcttcttccacctttgcacctttcattctcaacgccgaaaaggaggactctcttctgctagttcccaaatcttgaagcaca

SEQ ID NO: 5159 - DNA, 209 bp, Glycine max
  Clone ID: PAT_MRT3847_104667C.1
tgctgacgaagatgatgaagatgtacaaattccctctcaccctcctcgtcgaccaagccattgtcagcgcgatcgatacgacgacgaggatgaagatgcacataaacctcgtcgtagttgaccaagccttggtaagcgtgaacgagtccaggaccaggacgaggacgctgatgaagatgaagatcaacctcgcaagatccgcgaatgga

SEQ ID NO: 5160 - DNA, 266 bp, Glycine max
  unsure (1)..(266): unsure at all n locations
  Clone ID: PAT_MRT3847_104668C.1
gaaagcnagcagagaaactccagccngagcttcattgctcttgaagccctngttcctggcctaaagaantgacccaggcttcnntgttaggggacnctatcgnatatgtgacagagcttanaganggttgacagtncttgaagagcagancaggaaacagggcagaatcngtntggnttgacaagccagacctctcgntgatatgatnctcttnagtgcggagacatgctgctgntagtgccntgcctcctgttgaggnacaagat

SEQ ID NO: 5161 - DNA, 173 bp, Glycine max
  Clone ID: PAT_MRT3847_104669C.1
gtttaacacacgcaaacaaaagaagcgatctagaatcgctaaaaaagtggcaacagacaagggcacgatcacacacgggacagaaagattggaaaactgaaacaggccaaaaaatcctgcgaattaaggagtcatctaggtcatactccagaagatgaaaactacaaaaacag

SEQ ID NO: 5162 - DNA, 529 bp, Glycine max
  Clone ID: PAT_MRT3847_10466C.1
cgtgcgataacataactccatttttaacactcatacaatctgcaactgcaactacacaaatacacactttcttctttggttcttacttcccatccttaaaacgccgtcgttgaagtcaccattcacttgaaaaaatagaaagaatacttcaatgacactttcttcgtttttgtatattgttttcatatttcatttcttcttcacatcccccgcctcgttttgtcgtccgatgggctcgcgcttctcgcgctaaagtccgccgtggacgagccctccgccgcagctttctccgactggaacaacggcgaccccacgccttgtgcctggtcggggatcgcctgcgccaatgtctccggcgagggggagccgcgagttgtcggaatttccctcgccggaaaatcgctctctggctacctcccctcggagctcggcacgctgcggttcctccggcgactcaacctccacgacaacgccttctccggcgtcctcccggcgcagctctccaactgcaccgcgctccacaggctct

SEQ ID NO: 5163 - DNA, 250 bp, Glycine max
  unsure (1)..(250): unsure at all n locations
  Clone ID: PAT_MRT3847_104670C.1
attcaaggaaacatacgaggacattcaagaactcattgactccctctaatacttcagagcataagagggaactaattatgttgccacatctaatgccatatttcatgatatctctcatgancctttttctttcctttttaccttcctttttacccctcatcatttcccttctgagccacactttcaatccaatgtcccattcattcaatctttcatatactttactaaaactctaactttaaatttgcgg

SEQ ID NO: 5164 - DNA, 357 bp, Glycine max
  unsure (1)..(357): unsure at all n locations
  Clone ID: PAT_MRT3847_104671C.1
agnctgtacagacgactacaaaaaggggcacaagtgtgattacgaaacttaaatcaatgatatgaaaaataaagtgcatggtttgtatgatgctagacttttggtaccacatgactgccattgtgcaaactagcaaaagttacgtctccaaaagataactgcgtttggtgggcactagagcaatgacgtgtgatgtgccagttagatgcttagcttggaagcatacaatgtaatcaaatggcatactgtgcctgtagattactgataatacatacctgacaacgttctaggagaccaatctagatcagattccaaaatagttaaccaacaaacttaattctatgccaaatctctaaa

SEQ ID NO: 5165 - DNA, 424 bp, Glycine max
  Clone ID: PAT_MRT3847_104672C.1
cttagtcatgcaatcaatctgtatctacgctgtatgttctaatctgattatacaatgatactataatctactacatttatcctaatccattttatgtctattactatttataaattttcaccatggtggagataagctccgaaataaaaactagggaagaggaagagttcaagttacaccccttcaactttatgtctgcagtttactccttaaacataaacaagcaagatggtcaattggcttccaaatgtgtgcataatgctcctctttgatggatgcatccatccaaaatttaacaaagatgtcatatgcctgtcatgcaaccgtaaaatcctgaccaaagatgtttcacatgtgtcaggaaatctgaggaatcttataagccttctcctggagatttacagtactttcctggagtttcaca

SEQ ID NO: 5166 - DNA, 327 bp, Glycine max
  Clone ID: PAT_MRT3847_104673C.1
gggccgaggtatttttagttttgacttacatgcacctgtggggggaggaatgaaaaaggggggggaaaaccttctttgcctttggttttggcgccaaaaacaatttttggtactttgtaaactatttggggtttgatctaaaaagtttgagtggtcccgtgtctgcaactttttacttaggatactcacttttaaggggtttagcaaacatgctttttacaggaacaatgggggcccttttttcattttgggtcgggcattactggtattttttttgaaaggtggattgaagttaaacgttttcacaaattaccattacttgaaaaa

SEQ ID NO: 5167 - DNA, 127 bp, Glycine max
  Clone ID: PAT_MRT3847_104674C.1
cgattgcccgaacgaacagaagacgaaattaggctcaaccgagctcagtcttccatagaatcaaacacatccgttggcgtttggaaaacataacatgtagaaatttgggtaggaccgcaagttgttt

SEQ ID NO: 5168 - DNA, 393 bp, Glycine max
  Clone ID: PAT_MRT3847_104675C.1
tatattgactttaagaacttatatgcatacgctgtcactcgtctcgccttaaatgttgctaattgttctctgtgtagagtctataggtaaagaaccatgctttaagcgttattaggcgctattatagcgtatcccttattcttttcaattaagtttaactcatttaccctaatccatctccctcagcgatatataggttaaagctattcgaggtgtcttgctactagcatgtatgttgtgtatcaatctaggaggaagagagaagataaagagggcccgccaggggtaaagggtattaggataaaggattttttacggtataggttcgcctcaaccgttaaaattctggtatagaaattaacatagcctattgctactatgctattatccttt

SEQ ID NO: 5169 - DNA, 739 bp, Glycine max
  Clone ID: PAT_MRT3847_104676C.1
cactttggccggcatgatggagttcttcttcacagaggcaccatggagcatgaggggtttggccacagcactctcatgggcctcactggccatggggtacttcctcagcactgttcttgtgtccaccatcaataaggtcactggtgcttttggatcacacacgccatggctcttgggtgccaacttgaaccattatcacctcgagaggttttactggttgatgtgtgcgctcagtggactcaacttcgttcattttctcttctgggctaattcctacaaatacagatgttcaactaagcctggataaactagctagaacgtacaaacctacgtgcatttatgaatctatttggatataaaagtagaagtgcttttttgagagtttttcaaagtttcttcactcaaaaaagctctatatttatcgtaagaaactctctaaaacatttataatttgtatccaaacagactctatatactaccattaggtagtttgtggttggcccaaaataatgaaataatgagtgagatagagagtgacccctactccatcctcatttacctatatcatgtccatgagctacatgcatagaccaatattggtgcagctattccactctactagtactatatattacttggtgcaatgtaccgagttttaattataaattaatccattacccattatgaatatcaggataaaatcaaatttcatgatcctaaaaaaaaaaggacaggccgc

SEQ ID NO: 5170 - DNA, 396 bp, Glycine max
  Clone ID: PAT_MRT3847_104677C.1
ttactgtttactattgtgctgtgctggctttctggtagcttaatgacttttggatattgattttatctaagtaaccaatatatactttatggaaattatggaaggttactctgtttatgctttccttgacctagcgttaagtaatcaatattttatcttggatttaagttgtttcaagctaattgtggtgaagttctgtcaaatattactccatattcttcatttcttttctctgtcatataaacctgtgttgttgataacagatcatataaatttggacttaaactttgaattgatgatgtgccagtgtgataatttctgatttttgggattgagttctttggtattagtttggaaattattctttctcttcagatttagttcacattgttgtct

SEQ ID NO: 5171 - DNA, 629 bp, Glycine max
  Clone ID: PAT_MRT3847_104678C.1
cgagatactcgcaccgatcaaaacggtgcgtttgacgaggtaccgcgtacagggcgctaagaccatgaaaagtttgctgaaacatggtgacctggttgtgtgccccgaagggaccacgtgcagagagccctatttattaaggttcagccctttgttttcggaactgtgcgttgaaataatccctgtggcaattgattgtcacgtgacaatgttccatggcacaaccgcaggaggtcttaagtgcttggacccatttttcttcttgatgaatcccacaccttcttactctggtcagttgctagagaaagtgtcacctttcattaccgctagtaatgttatcaatgacgattatgcgggatttgcagtggctaatcacgtgcaaacgcaaattgggaaggccttggaatttgaatgcactcaacttaatagaaaagacaagtacttgattctggccggtaatgaaggtatagtttcgaccacaaagagtggtaaatagttaatagggttttgattttgctcatgctttgtttaaatcactaataattagcaatgcccttgtgatggaaaacatagacaaggaaaatacggcaaaaatgacttcccttgcttgttgtcattattttttggcc

SEQ ID NO: 5172 - DNA, 184 bp, Glycine max
  Clone ID: PAT_MRT3847_104679C.1
tccgacgcgtaccggtctggagtctaatcctacatcagttactatatctatacttgctttttcagtctcatcctctgtctcgtaaacaagggagtgccgtctcatattaccttgatcacactttcactcttcatacgtgacctggcatctcgtatcagtatctcgaacacacaatacatacaca

SEQ ID NO: 5173 - DNA, 178 bp, Glycine max
  Clone ID: PAT_MRT3847_10467C.1
acgccgaccgcaacgtccgaatagaacaaagaagtttccaagcctgaacacacaatatattctccacaaaatggggtcaaacgagatatcacatcaaaacaacacacaatactaattccttactgataatcaaggtccacaaactactatcacattcacacgatgcgattaaatagca

SEQ ID NO: 5174 - DNA, 266 bp, Glycine max
  Clone ID: PAT_MRT3847_104680C.1
cgcgaactaagctctaatttcacttcttagctatctttttttttttatatggcactctactcgtcgcagctgttcctatctgattgcaggtcatccaaccatctaccgatctcaattctcaaccttaacctctcataatgtcttactcttatcttttcaaatacatcatcattgttgacaccgtatttgagtagactagactatcttcttcaatatacagacaagcgcattcattcctatccatttcttgaccatagttatttaat

SEQ ID NO: 5175 - DNA, 651 bp, Glycine max
  Clone ID: PAT_MRT3847_104681C.1
aacattaacatcaatacttttaattaaataagaaaacttaaatacggaataactcataaaatttctccaattagatagctcatgaattacatgatatataaaaaatcttctaagatactattagatagctcatgaattacatgtattcggaagtattttgcagatattcttttaaacagtaaagataaacgcaatgccattatttatttctagtagctggaagtgaaacttctatccttttaaagtgttcaccatgaccttaccacctaattctttaattcacagtaaattgcatccaatattgcagcatcagattccgagtcttatctttctttggattgcagcattagcctatagcattttgaatacatcgaaacacagacaatgctattttaggacctcgtacgttatgtacctcatttgtaagaccaaaaaattggagggaggaaaaaatatctaacattcctgcaatcaggaggaaggttttcaattgtggttgaggtcgcacatgtgagtccttgatattgtgggaaatgtggacaaatgcagccacaattacagtcatgatgtataattgcagagactccagaaactttgacgatgggaccacaattgcaggtgtaaaccattttttaaaaccttgattatgag

SEQ ID NO: 5176 - DNA, 458 bp, Glycine max
  Clone ID: PAT_MRT3847_104682C.1
aactcttgcagggttattctaaacctaataatcaggaaggaaaataaagaaaaattatggttctctagcaaagagtaaaaatggagaagagagatatggagggttagaaagattgacatatgatcaaatatctcaatacatgttaactttttttcttttatacatatatctacaagcatgactttgtcatgggggaaaacttttttttctttgcctagtggttgaagatgttgagaagggaaactctggttctaattagttgccttgagaggcattcaactcctacttctagattctcaatgcacatccccaaattttccatatggctttgaaaattatcaatagatgaagacttgtgattgatgagagacatcaaagcagcatccaccttttcaaattcatttgtatctgcctcttggagagtcacatcccactctatatttggttgcatcaacttg

SEQ ID NO: 5177 - DNA, 406 bp, Glycine max
  Clone ID: PAT_MRT3847_104683C.1
gagaaatcttcttccctttcacagactccttcagcagcaagaccacttgtaccccctggttttgcaagtacaaagttggaacgcaatttggcaaccaaaacatcccttaacactcattcaacagaggttggacgacctgcgcctggtgatactggagtcttggaagcatcagatgacaatggatttattcaacttaatgctgaagtaaaaggaaaggaggccatgggagctttcaatccagacaattcaaattctatcctatacaagctttttggtaacgcttcaacgctagacaatgacaaatcaactagtattgttgagcagcctgatcaaaaagcagatgagacatggagtccacatgccttccaatcttccaagtttgctcattggtttgttgaagaagaaa

SEQ ID NO: 5178 - DNA, 1319 bp, Glycine max
  Clone ID: PAT_MRT3847_104684C.1
gtacacccgcggtcctggtccggaattcccgcgtcgacccacgcgtccgggccaaattacttgctctcacttatcgttggtggagaaaaaggaggattgcagaattctaatgtagaaacacccgagcctatagcagctaattttactttcctaaatcctgaatcaactggtgagcatatgacatcaaatgtagcacatactactattgataactctgagcaattgtacaagagtgataagcctgaagttttaccagcagttcttacatgtgaagatttagaacagtcaattttgtcacaagttggtgaaaatggttcatcacgtccacgacccattcaggacaaagattttgatgcaaaaactgagcagttgactccagttgataatcatgcatcccagcacctcctttctttgttacagaagggaacctcactcaatgatatggaactatcatctattctagattcttcagacaaggtgcttaaactgaaaggagtcactaccggcaatgttcttgataatcccagagaagcaaatgttgatgtttccaattcatcaaagacattgacactggaaacactttttgggtcagcttttatgaaggagcttcaatcagttggagcacccctttctgttcaaaggggttcagttgcatctgcagggcctgatgtttcacaggctcttttgtttcctttccctacctcagacaatgttcaccctcctacaggtgaacttacgctgaacaagcacggaagtggtgtcctgccatcagaacaaacaaatcaacccaaatctaatagatttgaagagcagtggttggggtatggtgattctcaaggagatggtaattcatcattacttcagagtgaaatttccaaagctagtggtttcaaggggcctcgtgatattcaccttccagaagaagatagcttgattacagctagtgatcctctgcaaaactttttatctgctggaaatttagttaaaacagatttgtcccaagacactacagttgacattactagaaaactggcagctctgaatcctgcatttagagatgaccgactcgttacgagaaatcaagaaggtttagcattccctcgtggtccatatgatatgagggaacctggtattccatatcagaatcttaatgtccaaagatctccacagatccaccctcagttgaatcacggtggtccaatgtttaaccaactggattctcatccccctcatataagttcttatatgaagcttccaactcctgaaggcatggttcatcatgactcaccaccaaatcatcaatttccaggaaatatgct

SEQ ID NO: 5179 - DNA, 135 bp, Glycine max
  unsure (1)..(135): unsure at all n locations
  Clone ID: PAT_MRT3847_104685C.1
ggaggaaatctcangnacgcnnacgnaagctcggaatncggcncgaggtctncgtnnncnaaaataanagaacngaaantnctgaaccnngcaccgcatcgncaccgatnccctatgctnncacanancaaaagg

SEQ ID NO: 5180 - DNA, 200 bp, Glycine max
  Clone ID: PAT_MRT3847_104686C.1
cacatagagggatgcacggaactgacgatcgaagtcttccatagggccccgcagttgaaaggcaccatcttgtttgctctctttctcttttgtgccttcagcagctcatagctaccgtcagccatcgctgatttcgtgctcgatactgcaagtagacctcttgaatatggtaggacatagtatatcttgtcatacatggg

SEQ ID NO: 5181 - DNA, 2996 bp, Glycine max
  Clone ID: PAT_MRT3847_104687C.1
aggattgtaagagaagttaaaaatttcatacacaagggattttttgttatcgctaagtggattggacatatgcagagagttgcctagtgggtttgatcgatcacttttaagtgaatttgaagatgcttctcaagatcggcagagaagtacaggtggtttgtcagtgcatagttttagtcgacgtattgaatatagttcatcccctcccaccagaggtgatagcttttcacggggaatacatggaaaatgggaaactcgatcttcaggacgatctgataaagatagtgattctcaatctgaattggattcagattctggaaaacgttttggcaatcaattgcgtagatcttggcaaggtcctgagcatgatgggcttcttggtagtggttcttttcctcggccctctgggtatacccctgggttggctgccctgaaatttcgagctaatgacaactaccagctaaatcggtctaatgagccttatcatcctcctcgcccttataaggcacctcactcacgtcgggagactaatgactctcttaatgatgaaacatttggttctttggagtgtacaagtgaagacagggctgaagaggaaagaaaaagaagagcttcttttgaattgatgagaaaggaacaacataaagctttccaagaaaagcataagttgaacccggacaagaataacgacgattttgacataacttcacttgctgacaacgatgagaaaagggtagttaataggagcaacgagtatgtggagcctaatgtgactctatcagtgttaagcaatgatgagaaatcttcttccctttcacagactccttcagcagcaagaccacttgtaccccctggttttgcaagtgcaaagttggaacgcaatttggcaaccaagacatcccttaacactcattcaacagaggttggacaacctgcgcctggtgatactggaggtaaccatgtattcagtataaattctgacaataaagaaggaaaattattaaccaagcaagtgaataatgatcaacagaatcttcaaaatacaaatctaaatatttcaattaactatgagaaagaaaacattttaaatttaccgtcaattttggatattgccgacattaaaattggaatgggtgatcaattgaggaagagatctgctctttcagtagtcttggaagcatcagatgacaatgaatttattaatcttaatgctgaagtaaaaggacgttacttcagagtgaaatttccaaagctagtggtttcaaggggcctcgtgatattcaccttccagaagaagatagcttgattacagctagtgatcctctgcaaaactttttatctgctggaaatttagttaaaacagatttgtcccaagacactacagttgacattactagaaaactggcagctctgaatcctgcattctccggtggccgacccggcaccccagctccagaaggtttagcattccctcgtggtccctctcaatgatatggaactatcatctattctagattcttcagacaaggtgcttaatactgaaggagtcactaccggcaatgttcttgataatcccagagaagcaaatgttgatgtttccaattcatcaaagacattgacactggaaacactttttgggtcagcttttatgaaggagctcaacagttggagcacccctttctgttcaaagggcctccgttgcgtctgccgggccgtggtctcgcaggccctggggttgcccctcctgcccctcactctgtgctccctcctccagggcacttgcaaggaaaccttcccccacctcatttattacgtggattcccaaggggtgcacctatgccatctcatgctagcaatccaatgactggcttcatgcaggaaccaaacccaatgcaaggccaaggcttcccatttagtggtcaccagcatcctacttttggtggccctggaatgcaattacaagctcctgatgttggtggtggaagaaatcatccagaagcacttcagaggctttttgagatggagctgaggtcaaaaaacccaaagccaatccatgcttcaggtcacagccacgggatgtatggccgcatttagagatgaccgactcattatgagaaatcaagaaggtctagctttccctcgtggtccatatgatatgagggaacctggtattccatatcagaatcttaatgtccaacgatctcctcagatccactctcagttgaatcacagtggtccaatgtttaaccaactggattctcatcctcctcatataagttcttatatgaagcttccaactcctgagggcatggttcatcatgactcaccaccaaatcatcaatttccaggaaatatgcttcgtcctcctttccatcaaccaaacagtggacttgcagggtttgatcctccagttcatcattctatgttacaacaacaaatgcatatgcaaggaaaccttcccccacctcatttattacgtggattcccaaggggtgcacctatgccatctcatgctagcaatccaatgactggcttcatgcaggaaccaaacccaatgcaaggccaaggcttcccatttagtggtcaccagcatcctacttttggtggccctggaatgcaattacaagctcctgatgttggtggtggaagaaatcatccagaagcacttcagaggctttttgagatggagctgaggtcaaaaaacccaaagccaatccatgcttcaggtcacagccaggggatgtatggtcaagagctagacttgggttttgggtatagatagtgtattgtcattgttgatgtgtatacttagtttgtattcacctgatgttgtgcttctctatacctcctgcatggaagatgggtttcatatgatgcttttctttggaaaaattagctattctgtaattaatgatttttcatcaatttgcattttgctgggatttcaatttttccgccttctttttatcgacataattaaagtgcttattagcagg

SEQ ID NO: 5182 - DNA, 734 bp, Glycine max
  Clone ID: PAT_MRT3847_104688C.1
acacacgcgtccgtataaaactaattaaaatagttctagtccttgcaagaggcagatttgtttgcagaattcgaaaatgttaatgacattcaggaagatatgcttaatgatatatatgataaagctactgaagaaccttctcagtccatgcacaatgtgattggcactagcatggcttcagaaagtaacgcaactgaaaagacatcagaggaaaatggatccagccagtctggcaaagctgagataacagaagaacagagagcccgtatggaagcaaataggttgaaggcactagaaaggcgagctgagataacagaagagcaaagagctcgtatggaagcaaataggttgaaggcactagaaaggcgtgctgccttatcacaggcctcccaactttgatctgaattgtaaatgaaagcattacttgtcgttgtctcactactggtttagttgatcctttatggtttggtgactgttaaatgaggtgtttgtgatcatgatttgtcgtaacagttattagctccatgtttaagtttcaagcggcgggcttatttattttgtttgggggcactttatccctatttatagagcatgacaatgatagtgtcaatcatatcgaaaataagctcagaagttacttacatatagactgtaaacaatggttgcaacttgcaaggactagaactattttaattagttttataatatttttatttccattaaaaaacaaaaaa

SEQ ID NO: 5183 - DNA, 268 bp, Glycine max
  Clone ID: PAT_MRT3847_104689C.1
tgatgatcacctactgagtgaaatttattgcaaccagctaactaacgcatatattatgaggcaatacagaagcttaaggattcagagcaccaactttcctaatttcaaacctgaggaaataactgccataaatactgactataatgagcctggatcacttgctccaactggattgtatattatggtgaccaaatacatgagcatacagagtgagcctgctgctgtcattctaagaaagaaagatcctggcgtagttactgtcaataag

SEQ ID NO: 5184 - DNA, 254 bp, Glycine max
  Clone ID: PAT_MRT3847_10468C.1
gagcaataccctgacaaaaccaactgccaaaaactctgctaggaacttcatctaagggggctatactcctgggggacctgggaacatacctccttttttctaaaaatcatcttcctcatctctaccaactaatgctccaaccatctctaaacataaaatatatattcccacaatctataagttcataaaatacctgtgccaaatgcatatacattacctatacccatataacaacctttcgaatcattcatact

SEQ ID NO: 5185 - DNA, 1821 bp, Glycine max
  Clone ID: PAT_MRT3847_104690C.1
ccacgcgtccgcaggcctccaggtttacctcaaaacacagttaaaaaaagaagaagaaaaagttgcgtaaatcgtagtaacaataatgagaaaatgcgaattaaaaatgggataaaggcggcgagcatgaacgtgatcgcgagtgagttgaattgaagacaacttgagaatcagcatcagatctggtgtggtggctgttactgtttagcagcgatggccaaagcgtcgattttcatttacatactcgtcgcagcggcgcttctcatattcctctcccattccccggataagcactccggccaccgccaccgccgcctcaagctgcgctccaacttcaccctcgccccctcgcgccaccacgccgtcgccttcgacccgctcgtcgccgaactcgagcggcaccgcgaagacaaggagtgggagaagaagataatccaccaggccctgcccgaactggagtcggacccggccccggcccacgagtcccagcccgagtgggaggacttcatggacgccgaggattacctcaatgacgaggacaagtttaatgttaccaaccggctcatactcttgttcccgaagatcgacgtggaccccaccgattggttcgttacggagcacgagttgattcagtggaacctccagcaggcccagcgcgaggtcctgcatcgcacgcagagggagatggagcttcacgataagaaccacgatggcttcgtttccttctccgagtacgatcctcccagttgggttcaaaatgcagataatgaatctttcggttatgatatgggttggtggaaagaagagcattttaatgcatcggatgctgatggagatggtgttctaaacttaactgaattcaatgactttctgcaccctgctgacagcaaaaatcccaagcttcatcaatggttgtgcaaggaggaagtcagggaaagagatacagacagagatgggaaggtcaactttaaagaatttttccatgggctatttgatttggtaaggaactatgatgaagaaagtcacaatgatacacataattctgataattcaatggatgctccagctagagtgttgtttgctcagcttgacaaggatggggacggatacctgtcagatgtcgaactacagcccataattggcaaactccatccatctgagcattattatgcaaaacaacaagcagattatatcatttcacaggcagacgaagacaaggatggtcgtcttactttgactgagatgatcgagaacccatatgtattttatagtgctattttcaacgatgatgaagatgatgatagcgattatcatgacgagttccggtaaattcatgttaggatacccagaaaagtttggcacaattctagtgacaaggaatcagtatttgaagattatgacacgacagaattttgatgtttcggcccttagtaggttcttagtctcaatcatggtgggctttttgtgcgatgacaacatttattgcttctttccattcatattatctgcgagttcttattagctgatgggatcctccgtagcttgtcgaagagtcacacctggatcagttgtaggatgacaggatctcaacttaaatgtaaaatttgtagaataatatacaaattttcgaatcactggttcaaccatcattaattaagtagaacatctctattctcaatggataatacatgtaccatatgactgtgactataatgaccgtcatgatcctggtagcattgtcagaatattttgggacccaacaccaatcatattgtttagcgaaacgttaataaaaagttcaacagtttttggtttttccat

SEQ ID NO: 5186 - DNA, 201 bp, Glycine max
  Clone ID: PAT_MRT3847_104691C.1
gtacaccgtattaaagaattgaagatagactatgatgagagcgcggttcccagtactgtggctgaaagttgtgttcgtggcatcagtttctggctcatgtggcattgcgtatcgggtatagcagagccccagtcacaacaattgcctccgaaagttgcaatagtgggaaggactcctacaggaaccaagcatgccacgctc

SEQ ID NO: 5187 - DNA, 492 bp, Glycine max
  Clone ID: PAT_MRT3847_104692C.1
agcccacgcgtccgcccacgcgtccgcacttttctaatttttccctcgacagcgacgacgacgaccgcgtctgttcgatcggagtgggttttgagtggttgccgaatagttctgaattggagaaagaaggatatagaggaagaagaaggataggttgggaaagaaagaagaacaagaaagaagaaagaagaaaaaagaaaaaagaaaaaagaaaagaaaaagtaatcttagccatagatttaaaatcaaagagatctaagggtgcaagataattttcccacacggtgggagaccctataaaagtttccaccctagtctgttaaatattctctattcgattcgaaactggcactcgcttcgcttcgcttccacagcccacgcacgacgattcttgcttgaatcacccgaagctataacaccagattcgattaactgacctagcgattgatttcagtggaatcagatgatgctgcaacggcgaagattataatt

SEQ ID NO: 5188 - DNA, 952 bp, Glycine max
  Clone ID: PAT_MRT3847_104693C.1
cccacgcgtccggttcaaaacaaggtttccatcaactggctactcgaccaaggtcccagcttaggtattgtccgagtgcatggggttgggcttttacacaccgagctagtgtctggaatccctgtaattttcttccagtttgtagccaacctcccagccttccatcaggtcctagttttcctatgcatcaaacatgtgccggttccacatgttaaagctaaggaacggtttctagttggtcgtattggtccaaaagagttcagaatctaccggtgcatagtgcgatacggataccatgacgttcacagagatgattttgagtttgagaatgatcttatatgcagcatagctgagttcatacgcacagaaagaaccgaatcgaactctccaaatgatgagcccctaaaggatgacagaatggcagttgtagggacatgttctacacattcccttttgatgagtgaggataaagtagataatgttgagaatgtagacttgccagggccatcagaactaaaggagataaagtcacttaaggtgacccaacaacagaagaaaagagtaaggtttttggtaccagagagtccaaagattgacacaagagtaatggaagagttggaggagttgatggaagccagggaggctggggtagcttacattataggacagacacacatgagagcaaaaccagggtctagcatgttgaagaaaataggcattaatttagtgtatgaattcctaagaagaaatagcagggcaccctcctttgtcactggtgtgcctcatgcatcatctctagaagttgggatgatgtaccaagtttaatttttggtttctcataggatagagctataatgtacatattgcatcttatagatagttaaacgttacaacccatcaggtgaaggaaaaatagtataaaagttttgatcatttttgcccctgccgtatg

SEQ ID NO: 5189 - DNA, 350 bp, Glycine max
  Clone ID: PAT_MRT3847_104694C.1
ggctcgagctaaagccgacaatttcgaggctgagaagaaagtggggtcagtggatgagcctccgcttctgatgtaccggatgctcaagctatgaagacacttacatgaataacatccaaattagatctgaagaggctagcgacacaagttcgcagtctcgaccgataacatagtgcgagatggaaccaatgcgatgaaaaaaccagcgccgactataagttgaaagcgtactctcatcctcgtaattcaagacttagatgagctcaaataggatgcaacatgaagattaatatgaacgttagcatcaagagaattatgggatttgcaacctgaataagcgtatgtatatg

SEQ ID NO: 5190 - DNA, 691 bp, Glycine max
  unsure (1)..(691): unsure at all n locations
  Clone ID: PAT_MRT3847_104695C.1
ccacgcgtccgctctttggaagaagaagaaaatggaggaggaacaaaacggcggtcgtttcgacctcataatcctgggcgcctcaggcttcacaggcaaatacgtcctccgcgaagccctcaaattcctcaacaccccatcctcccccctcaaatccatagccatagcgggccgaagcccacaaaaactaacccaggcccttcagtgggcctccaggcccaaccctcccccctccctccccatcctcaccgcggacaccgccgacccctcctccctccgttccctctgcgcccgcacgggcctcctcctcaactgcgtgggccccttccgcctccacggcgagcccgtcgtggccgcctgcgccgcagcgggctgcgactacctcgacatctccggcgagcccgagttcatggagcgcgtggaggccgcgcaccacgagcgggccgtggagacaggagcgcttgtagtatcggcttgtggattcgactccgtgcccgcggagctcggcgtgatgttcaactccaggcagtggatggggcccgccgcgccgaatcgcgtggaggcttacgtggcgcttgagtctgagaagaggattgaggggaactttgctacttacgaatctgggggtctcgggggtgccaatgcgcaccagttgcagcaactcagaaagtcacgcccaagnaaaacctag

SEQ ID NO: 5191 - DNA, 367 bp, Glycine max
  Clone ID: PAT_MRT3847_104696C.1
aaaaatagggaattaattcttaaataaccaaagttcgaattaatgaaattgaacacctacccggccaccatcatttttttacatttcactctgttctttgctctaaaaaaagccatttgaataaagcaaagtacaataacaaggacatgcaattaattggtagtgctcaataattaatctcatactacccccaatccagccgtgaacgttacacccgttgaaggcaaccaaagattcccctcaataaactgtgacaccgtgaaattactagcctgactagaatcattcatcacatggtacccttgccatttaaccctattagccactccagcaccaggcccataattcatgtactcagcatagtaca

SEQ ID NO: 5192 - DNA, 432 bp, Glycine max
  unsure (1)..(432): unsure at all n locations
  Clone ID: PAT_MRT3847_104697C.1
ccgggncgacccacgcgnccggggttttcgnngnncccccgncgggggaggagggcgcgacganggggnccacccccgagccaggcgagnngagcgagnngacncagccgagccccgacgagggccagcgccaaacnncccncangaccagcngcacccnccncnggaaggagcncnccgaccacngcnccncccncgagcggggccgcaaccacaaanccgaagcccncaaacgcaagaaacgcacccncgacaacacnacnnccgacncccnccgccnccncgagcgccgcgaaaccccccncgacgccacgccccagagcgcccnccgcacgcccgacacgcgccgcaccggngcccncnccgcccngcccaccgacgccggcgacancangaacagcagccccgacggggaggggcgcgacaccaccg

SEQ ID NO: 5193 - DNA, 1716 bp, Glycine max
  unsure (1)..(1716): unsure at all n locations
  Clone ID: PAT_MRT3847_104698C.1
ggtgttcatcgctgcgtttttgcaaccataacagtttaaggcttctgttcgtgatgtatggaatgtaatgtcttcatatgagactctttcctgagtaagtagtgtgtgcttcttctttacacanaaatatattgaaaaacattaatataaaagattcctccagatgttatatcatttttcgtaacctgaaaaacaataatttcttgcaggatagttccaaatttagcaatcagtaagattttatcacgagataacaattaaagttcgcattctccaggtatggagttatgtcaataatgagaataccctgtttattgtttgctggtcactctattatgtaccaaccattattttaccttcaccttccgctgtcagcaaaatacagaagtatctccttagcagtgactaatgcaagcatgaacttgtgaatgagatacaattttatccataaattatgtgattgatgtaacttcccagtttaaatcattctgcaggaagggtgtaagggtcttctttatatggtgcttcatgctcgtgttgtgctggacttgtgtgaatatttagaacaggagatcagttttgaacaagttgaaggggactttgattcgttccggggaaaaatggatttttgagcaactaggaaagcatcacacactgctaaagtactctgtggagtcaaaaatgcgcaaagatactttcctttctgaggccataatggaggaggtcatttatgaagatctcccatcaaacttgtctgcaataagagactatattgagaacatgaatgcatcaaaattttctgaagtttgtgagcagaatatgaattcagggcaacaaattgtttcatcaggctctcaaaaagatgacaactctggttcagctgaggaagttcctcattgcgatgttcgatgttcatctcagcaaagatctaaagtgccaggcttacagaggaatattaaagtactagaatctgaactcctgaaattcattgcagaacatggacaggaaggatttatgccaatgaggaagcaactccgtttgcatggaagagtggatattgagaaggctataactcgcatgggtggattcagaaagattgcaaccatattgaacctttctttggcttacaaacatcgcaaacctaagggttactgggacaatcttgaaaatttgcaggaagagataagtcggtttcagaggggctggggaatagacccttcatttatgcccagtagaaagtcatttgaacgagcagggcgatatgatattgcgcgtgcgctggaaaagtggggtggactgcacgaggtttctcggcttctgtcgctcaaggtaagacaacggagcagacaggacaaccttgctaaggataagaggagtggtgatcatacagatagtgaaatgaagacaccatgtatttctcaagacacacaaaagtggcttacaaaactaaaacatttggacataaattggtttgagtaaaagaggattgattttagtgtataccgtgttagtgtgcttacagtaaggctctatgattcttcaccacgccattcacctcttccgtgtcttggtctctttcacatgcattttgtttatcctgatgaggagaaagaaaggaggcttggtgtggtgtatgataccacctacattaactgattaacatcacacttacacctcactcttaaaacttaaacttaggccaatcacaattcaact

SEQ ID NO: 5194 - DNA, 282 bp, Glycine max
  Clone ID: PAT_MRT3847_104699C.1
gcctgcaatcgctcatccttcactcaccgcacgctttatctccggtgtcgcgccatttctatcgctgtcttctcattaccactcaaccctcactgtgagcgatcccacactatcgcaaccactcataaccctagtccagccaccactcattaccgtggttaccacacacaatcatcaccatctaccctcaactaatgcctaacgtgaaactaaataatctcaccagcatctctacaaacggaatgagcatgctaaatataaccccaatatcgttaggtgtga

SEQ ID NO: 5195 - DNA, 449 bp, Glycine max
  unsure (1)..(449): unsure at all n locations
  Clone ID: PAT_MRT3847_10469C.1
agtcaactgnaccacatgaagctgaacagcaagagtttgagattgtcttgcaaatcccacaatcccgggatcaaaatctcaacttgcacactacccaatttcctaattcgaattctccttctgtgtctctgttgtttcttggtccctgcatcttgttcccggaagcccccacctcttccaattttgcccctcccaacgactttcttgctccaatggcaacttgacggcatggccctcttcttccacttcggcaccaacaccttcacagactcagaatggggcaccggccacgccaaccccaccgtcttcaatcccactaagctcaacgcatcgcagtggataagggtcggcaaagattcgggcttttcgcgagtgatcctcactgtgaaacaccacgacgggattctgcttgtggccctgtggttacacccattatgcggggccggtgc

SEQ ID NO: 5196 - DNA, 368 bp, Glycine max
  Clone ID: PAT_MRT3847_1046C.1
attttaaaaaaggcccagtttctttttttttgaatttaattcaaggttccaaagggaagatgcctttttccccattagatcgtccaaaactggtttaccagttccaaaatccctccggtttttttcaaaggcttgttttcccaaaaaatggctatttggaaccttgggaaagttcttccagcggcccaaaacttcctaattttggggggagaacatcctcccatggggaacggaaaaggggttccttcattccctttgggtcaaaggggggtccactcaacccaatgaaccgggccccacaaaaaggcccttcagatggccaatcttcccaatttaattaatcttttggttggggaaaattcccctcc

SEQ ID NO: 5197 - DNA, 750 bp, Glycine max
  unsure (1)..(750): unsure at all n locations
  Clone ID: PAT_MRT3847_104700C.1
cacacccgtgtctcccggcacgcgatgcggcattggaatcagagatccatccatgggcactatccgcagccacccgcgcaagaccacgccaagacccaaggccgccccctttggtgtcccccgccgcaaacagtccactttcaccttcccacccaacggaaaagggctcccgagcacatcaacatttgtcacctcacctgtcaagctcctttcaccagcagcgtccatcgcctttgtagccaccggcgcgcacactagccccaatgttctctaccccaccccatagagtcccctttcacttttccatccatttgggtatgtcctcccaggaaatccttctttctcgactaaacatgttactaccctttacccaagaagggtgcatcgctttggtcaaccaattgcgataaagagagccatcttagtgctctccttgtccatcaacaaattccactccattgcgtttctaatcctttaattcccccgggagaaccttaatttttccatttttgatctggatcagtctcccaaaatcccaaaactggtgtttttctcgtacaagttcttgcacgctatgcgctcttttggtggttgggggcacgccggtggggtctgttgaccccacccttttcatgcttcttccagtgtcgtgtctgtgcgcccgcaaantttttngggaaacacttttaaccnnaaanattggattaanccnaaaattttaatttccccaacatctttttttgggnaaaa

SEQ ID NO: 5198 - DNA, 235 bp, Glycine max
  Clone ID: PAT_MRT3847_104701C.1
tttgtataatgggcatgggccatgatttatttagtttttttaaaaagatcatccttttgagtatgaatatcaaaagcacttgcactgtcattgtcatcacaacagccccgccatcttttcacaaattacccccctcccaagcccttctacccaacaaaaaggaaggcgccttgggtgcaaccccccccttcaactttaaaaaaatttaaaactctggggacggacagccgcaccc

SEQ ID NO: 5199 - DNA, 698 bp, Glycine max
  unsure (1)..(698): unsure at all n locations
  Clone ID: PAT_MRT3847_104702C.1
tcgcatggcaccgcccgtacccgtaagcccttggnatncctnctagaaggcgggcccgcccttnnnttttttttattatttatttattttattttatttttatttttatttttttttatttttttttttttatttttttttttttttttttttttttttttttttttaaaaaaaaacaaccccagaaacccaaaaggaaacggggcaaaaaaaaaacccctaaaaccaacgaaaaaaccccggggggggcaaaccccccaaaaaaaaacggggcatcttaagggacccgggccgggaaaaccctgggggaaaaaaagggcccccccgggggggggggcaaaaaaccccagggggaccggacaacaaaggggggggaaaaaaggaaaaaaggcccggaaaaaagggccaaaaacgggccggccttaaaatctaaaaaaagccgatcgggattaagggccccgggaagcccttggaagccctcagggaaaagggaaaaggcccttaggccccccggggggggcttcccaagagggaaaaaaaggaaacaaacccccgggggagggaaaaacaaggggccgaaaccccctttgggggcaacgggggccgggaaaacccccaaattttggaaacgcccgccctccccccccggggggaaaaccccccccaaaggggtttcgggggcctcaaagttaccgggg

SEQ ID NO: 5200 - DNA, 457 bp, Glycine max
  Clone ID: PAT_MRT3847_104703C.1
cttattctacttgagacacattacttatgtttaagatccaccactccttatccttgggtaacaatctaaaactgaaggggtgccagatttacctaaacactataaacaacttttggatacctcgatcaatcatggcttacaccaaagtgtcaagtcgactacttaatatatatgtttcagatgcttacacctttagttgatttattttctcatacttgacttcacttcttttatattagctctattttttaacctcttctataaaattttttttttatttattattattttttttttttatatttttttttcttttttgttttttttctttatctattttttttttatttttttttatatttttttaatagtttttttttatatttatattttttttattcttttttttttttttttattttttttttttatttattattttttatgttcttttatt

SEQ ID NO: 5201 - DNA, 1009 bp, Glycine max
  Clone ID: PAT_MRT3847_104704C.1
ggctcgagcgtgtatgtatgtagtccatactctggactctctcttcttctctttgcttctcttctttcggctccagctcaacaatggctcatctcttcagagacctctcattgggccactccaagagagactccacgccgccgctgccgccaccgccgataatgcctcccaagccctccgccgtcaccgccgccgacgaccttccctctccgctcggccaactctccgccagtctctccgattccgacctcgcgctaacggcgtacgagatcttcgtcgccgcgtgccgcacctcctccggcaagcctctcagttccgctgccaaccactcctccaccaattcgcccagtcagaactctccgaactcgcccgcgctccagcgatccataacctccacagccgccagcaaggtcaagaaggccttcggtctgaaatctcccggttcggcctccagaaagagccctggctccggttcgggccagggaaagcccaagcgccctctcaccgtcggcgaactcatgcgcaaccagatgagggtttccgaagccatggattcgcgcgttcgacgcgcgctgctcaggatttccgctggccaggttggaagaaggattgagtctgtggtagttccgcttgagttgttgcagcagctcaaggcttcggattttactgatcatcaagagtacgatgactggcagaagaggaccttgagctttcttgaagctggtttgattttgcatcctcatatgccgttggataagtccaattccgctgtgcagcgtctgcggcagattgttcatgctgcattggataagcctatagaatcgttacactcttcgcttaaaccactcctcacgtttttcgcacgtgctgcaatgcatgttgcgagtgacgcttgatctcgccctgccagcttttttctttaggttttacttgctcatcgcttttcgctgaggttttaaattcgaggttttgtcagaatccttgatattgcaggaaattgcggataaac

SEQ ID NO: 5202 - DNA, 741 bp, Glycine max
  Clone ID: PAT_MRT3847_104705C.1
tacggctgcgagaagacgacagaagggaatggatcgacattcatttcaaaataattgcaatacacataacatatacaaatcatgctaataataaaaaagaatatattatttcacatataaatcatgctaataaacataacatcattttgcagtgaaaaaaataacatcattttaatctcatattcgattaattaagaaatacattaaaaaatcactatattagcaattttcaaacaatcggttgtaaattaaagggtcacacattagtgtcttgctttatagttcataatgaacatgcattaagaaaactgttttctctgccatggctagtgtgaaagtctatgaattaaggttatgttgttcttctaaaaaaaacgttatgttgtttaattttcaaaaagtgattttatgatacattttttaggtaaattatgatacattttatacagcttataactcttatattacaattttaatttaaaatacaaaaaagtttattgacactctcatttaattgtaaacaattacacatgataaaattttcaatttttataataattattttaaaaatgatatttactatgattatttattttttagacaatgtatattttttttattgacagtatatattttattaataaataattggttggcaatatatgaaaattttaaactttaaaataattttttaatatacataatcatcatatatctaaaaatatacgaccttttaagtcc

SEQ ID NO: 5203 - DNA, 272 bp, Glycine max
  unsure (1)..(272): unsure at all n locations
  Clone ID: PAT_MRT3847_104706C.1
tttggacagccaagactatttatgcagatcagcttgaagaacaacatggtagtgctaaacgtgagtttgatgcttctggtccttgtggacaacacagctgctcgcataaacctgagcttactcaaaagtgatcagttatcaagttatgatgattatgactgttgacaaccatgctaagagctctgcatgtagcacacgttcaaagcctncgtaatgcctgtatgaagatgttaacctgcattgatgcgactcatattgcacgagctgtatgt

SEQ ID NO: 5204 - DNA, 826 bp, Glycine max
  unsure (1)..(826): unsure at all n locations
  Clone ID: PAT_MRT3847_104707C.1
ttgaaaggattattatggcaatctaaccggtcctaaaccgaaagagctttcggatgtttaacagcaatgtaaaaaaaagcgtcttatactgtgcatctgtgtcattgacttttccctcctattatttaggcatttttggaatgtccaagtcataaaccacgtaagtggaagtgtggaactacaaaatttctgaaactaatctatgtacttagcttatttgatttcttctagcactgttggattttgagtcaattcgaactgtctttgctgacatgcagtggcgcacatggatttgttgacatgaagtttggacggaagaactgccttgtacatgaacaaccagaatcacttccttatctcgggtgtcttcactccaccaattctgtggtatgccatttgcagattcttctgaggtatgaagatcttcgagacgaactgaaacctctacactttgctcaggtttaattatgcccgcagctggagtaacctcaagccatctaggaaagccaaagccacctcttgggctataatcagatgcctgtccatcattttttactatagactggccttcactccttatttcatatatagctaaatccttacattgactgtttgaggttaggaaggactaaactgtttgggctgagaaggactacactgtttgggctgacttcttctagaatagatctgcatttatcacttgatgtcataacaaccccaaatttgttgccccttatacatcaatcaacgtgannannnnttacattgannnnacaccnnacannnnnnngatcactatcnntcacnnnnatgcangcatcatact

SEQ ID NO: 5205 - DNA, 407 bp, Glycine max
  Clone ID: PAT_MRT3847_104708C.1
cggacgcgtggggaaataattattttctgcataacttttggagctatggcttgagaagattgccatcaatctgtttactgccactgtgcaggtattcgatgtagccatacggaggatcaacattctcatcaatcttctcatattcaacggtccatttgataataacacccccatgatcggtgtcaatagcttgaaaataattaataagtaagaaataattggcttggccttagaatatatagtgcttgtctagttatcagtataatcggtgtgatgtttgacgatcgagaaagatgcttacctagatcgttcgttttgcatggaataaatttggaagtgtgttaaattacttgaaggggagacaaatagggtttgtccttcttcaaaacaaaacatttgggggcggc

SEQ ID NO: 5206 - DNA, 1203 bp, Glycine max
  Clone ID: PAT_MRT3847_104709C.1
ccacgcgtccgctgttactctcctatataagggagttagttagaaggttgaaatacgacgagagtgctaaatctatacactctaatttcattgttctgatctttaataagaacgatacttctttacttgtgtgttacgattatctattttctttttccctaatctgaattcgtctttcttagtcttaaactcaacaaattagtatctaaagctttagttcaaataatttcacatcgattttgtggtgggtcttaatcatcagagatcaaccattatattttttttccatgcttagtcttcaagatttgatcaagaagatggttaacataatcaagattgagaaattcacaaggaagaacaacttcaacctttagcgcatgaagatgtgtgccttgttgaaagaacaagggatctgggcacctctctctggccaatagacaaagattgataagtccattcttgagcaacaagaagaaaaaatgcattcgctaattcttttgtcattgtttgatgaagttctttacaaagtttctaaggagaaaattgcttttgtgttatggctcaagttgtagaaactcttcatgacaaaatcaatctgcaacaagttgctactgaaacaacatttgtttggcctctattagaaggaaggcaaacctctggaagaccatctcgatgagttgaactctgttttgttttagctctgtgacattgatgtcaagttagaagatgaagatcttgcaatgattctattagcctttcccccaattcatatgagaattttgtgaattctcatagtgttggaaaagattgcatcacacttgaggaagtcaagtttagtctctattcaagagagcttcatcacatagcttttggaaaatggtgatgaagcctctacctttggattatcagtaaccaatactacaaaagggtagaaaaagaagaaaggcaaaggattcaagaaagggaaagttaatccaaatgatatctataataattgcaaaaaacctggtcattggaagaaagattgtcccaagaaaatcaagaaagattatattacagttgttgttcgaagtgattcctcatcagaagatgatttggtactctcaagtgttaatcaacaataacatcactctaaacaatgggtgttggactcgggttgttcttatcatatgagtccacaccgaatctggtccatgacctatg

SEQ ID NO: 5207 - DNA, 462 bp, Glycine max
  unsure (1)..(462): unsure at all n locations
  Clone ID: PAT_MRT3847_10470C.1
tgggccgtatgnactatagtaaactcgattgatatttactgctcccttacctaggcatggaattcgggtgtagcaaaaaaagaaaaacaagagaagatttgttttaaggggctctcgacgtcttctgtggcgggggatgaatctgtaagctccagacgcgctacttaacagtgtaccagcactgcgtatatacaaaataataagagcgtagtaattactgtgatcaatatctagtctctgtgaggaagaaccatccaatgacatttccacgactgattcaaatggaaagagctagcaggaaaaaactgtggatgaaactactgacaaaaatgacttgaaaactgatggacgaaaagtcctgtataacaatggaaacaaagagaatgcctgctaaataaattgaacaacacaacgctcttggagaggcaaatggagaataggacaccaaaattgttgttgtta

SEQ ID NO: 5208 - DNA, 1911 bp, Glycine max
  Clone ID: PAT_MRT3847_104710C.1
aacggactaggggatcaaaattagtttggattttttcgcttcttatcagtacagcctaccctagtagaacctttttgtaaggataaattttttagtatgttcatagtaaataacttttagttcttttcactgtattggtccataaaaataagaccaagaattggaaaacagcgatgcatataaagagatgaacaagacaggcaaacgacgattgattttaaaggttcaccataccggtgggacatgagattatttttgacaattactcttctattaatatcggtctcggtttctcctctgcaacaagtaagttacaagaacatttatcccaccaccggtgagactacccagactagttttcttagtaaagtcgtgaactttttgtgtagctcagctggctctggataccaacatacttggccggatatagaatttggatggcgtatgataaatgtggtggtatagttggtcacctgttgtctgctattggctgcctttattattgttgtggattctgagtgctcttcattttgataaaaaggtatgattacgggtggagcagcagcgacagttttctacaatttgaggcaaaaacatcctacgcttgacatgccagtgatcgactacgacttggcacttcttttccaaccagtgctggtgcttggaatcagcattggagttgccttcaatgtgatttttgctgattggatgatcacagtcttgttactaataattttcgtaggaattgcaaccaaggcattcttaaaaggagttgagacatggaaaaaagaaaccattatcaagaaggaaactgctagacaatcacaatttaatggcactgaaaggaccgcggaggtcgcatatgagcctctaccgggagggccaaacacaagcaatcataaagagcctaaaaaatccaaggaaacgacggtgagactgagacatcacaaaggatcagttcttgagaatgttcgttggaaagcacttggagttcttttcactgtctgggtccttatacttgcctccgagattgcaaaaagtcacacaacaacttgttcagtggaatattgggtacttaatctattacaggtccctgtggcattaggagcgacttcatatcaagctgtgcttctgtacacagggaagagagtgatagcatccaaaggagatcaacgaactcaatggagagcgcaccagctaattatgtattgttcctgtggcatatgcgctggtatagttggtggcttgcttggtcttggtggaggttttattttgggacctcttttcctcgagctaggaatccctcctcaggtgtcaagtgctacagctacttttgccatgacattttcagcatctatgtcagtggtggaatattaccttctaaaacggtttcctattccttatactctttacttcgtggctgtatccacttttgcggcctttgttgggcaagttttagtgagaaagctggttgccatactagggagagcatcgctgatcatttttatcctctccagcaccatttttgtcagtgcaatatcactaggtggtgtgggcatatcaaacatgatccaaagaattgcaaataaagagtacatggggtttgaaaacctttgtacctactcagcctagatattagaattcggattacaaattcaatttcaaggactatataattgacatttttcaattcgaattgttttttatctagtcagaatttttagtagtgttatgtcaagaattttaagcgatgaaaaataattcagcgcttaattttttattttttatttgtcaaacatggctgtatcttggacagagtttcttaaatatataatcaacgatatctctcttagcttcccgtatcttggacagtttcttaaatatataatcaatgatatctctctttgcttc

SEQ ID NO: 5209 - DNA, 2376 bp, Glycine max
  Clone ID: PAT_MRT3847_104711C.1
cggctgcgagaagacgacagaagggggtagggtttttttatcaattctttaacctacccaacatatgtgcgtgattaatccttgcaagtgtgcaggtatcataccaactagcgtttgggtttattcaagtttttagcacacacaagattgggccttggttgagtatttgcaccgcagagacagagaggaaaaagaaacgcaaacaacgatggctgtgaaaggatcaccacaacggtgggacatgagattagttttgacaattactcttcttttaatctcggtctctgtttctgctcttcaacacgtaagtcacaaaaacattaatcccaccaccgttgagacaacccaaactagttttcttggtaaagtcgtgaactttttgtggagctcatctggctctggataccaacatacttggccggatatagaatttggatggagaataataacgggtacgataattggattcctggagtgtactatgtgatgaaaattagtttatattttttcgctgaatatcagtacagcctaaaatagtagaatctttttgtcaccaaagtgctattggtctggtgaaaatcaataaattttcggtgctcagtacctattaaagtattaaggtatgattacgggtggagcagcagcgacagttttctacaatttgaggcaaaaacatcctacgcttgacatgccagtgatcgactacgacttggcacttcttttccaaccagtgctggtgcttggaatcagcattggagttgccttcaatgtgatttttgctgattggatgatcacagtcttgttactaataattttcgtaggaattgcaaccaaggcattcttaaaaggagttgagacatggaaaaaagaaaccattatcaagaaggaaactgctagacaatcacaatttaatggcactgaaaggaccgcggaggtcgcatatgagcctctaccgggagggccaaacacaagcaatcataaagagcctaaaaaatccaaggaaacgggatcaattcttgagaatgttcgttggaaagcacttggagttcttttcactgtctgggtccttatacttgcctccgagattgcaaaaagtcacacaacaacttgttcagtggaatattgggtccctgtggcattaggagcgacttcatatcaagctgtgcttctgtacacagggaagagagtgatagcatccaaaggagatcaacgaactcaatggagagcgcaccagctaattatgtattgttcctgtggcatatgcgctggtatagttggtggcttgcttggtcttggtggaggttttattttgggacctcttttcctcgagctaggaatccctcctcaggtgtcaagtgctacagctacttttgccatgacattttcagcatctatgtcagtggtggaatattaccttctaaaacggtttcctattccttatactctttacttcgtggctgtatccacttttgcggcctttgttgggcaagttttagtgagaaagctggttgccatactagggagagcatcgctgatcatttttatcctctccagcaccatttttgtcagtgcaatatcactaggtggtgtgggcatatcaaacatgatccaaagaattgcaaataaagagtacatggggtttgaaaacctttgtacctactcagcctagatattagaattcggattacaaattcaatttcaaggactatataattgacatttttcaattcgaattgttttttatctagtcagaatttttagtagtgttatgtcaagaattttaagcgatgaaaaataattcagcgctttatttttagctagttatccgtcaaacagtgtcaagtgctgcagacacttttgccatgacattttcagcatttatgtcagtggtggaatattaccttctaaaacggtttcctattccttatactctttactttgtggctgtatccacttttgcggcctttgttggacaagttttagtgagaaagctggttgccatactagggagagcatctctgatcattttcatcctctccggcaccatttttgttagtgcaatatcactaggtggtgtgggcatatcaaacatgatccaaaaaattgcaaataaagagtacatggggtttgaaaacctttgtacctactcagcctagatattagaattcggattacagattcaatttcaaggactatataattggcatttttttcagttcgaattgtttttttatcaagtcagaattttaagcagtgttatgtcaataattttaagtgatgaaaattaattcagcgcttagtttttttttgtcaagcatgtctgtatcttggacagtttcttaaatatataatcaatgatatctctctttgcttccc

SEQ ID NO: 5210 - DNA, 532 bp, Glycine max
  Clone ID: PAT_MRT3847_104712C.1
attccttctcgccttgaagaagtcaataaactaataattgctcgggatggattattggctactctaagagaaaatttgttgaagtcttaagatatcatgtgagcaaataccaacaaacgtcgtcgggacatagaatatgtagtcggtgattaggtgttcttgaagatgcaaccttacaggagaagatccttggctaaaaggattaatgaaaaactctcccctcgattttatgctcctttccaggtgtttaataaggtgggtactattgcttataagttggatcttccatctcacattaaaattcatccggtctttcatgtctctctcctcaagaaagccagtcccaacctttaccacctatgttatctgaggattggaaattacaaacttattcagattctgttttagatagtcgtgaattacaaccgggcaacgtgaaagttttaattcagtggaaaaatctccctcccagtgaaaatagttgggaatctgtggctaaattacaagagattttttcgatttatcaccttga

SEQ ID NO: 5211 - DNA, 427 bp, Glycine max
  Clone ID: PAT_MRT3847_104713C.1
gttccaggaaggtttcccgtcatcactgtatgacgtcctccttctttgggggggggggggacgatcgggcaaggtcaggattagagaggaacatgacaacgttatcgagcgtgatagggtcgggttagataacataagaataccgaaggaaaaatataataacgaaaatcgaaaatgaagacacgtgcagacatacaaaataaaaaacaagtataggcggtgcacagtaaatcaggagagtaacgtgccacgcgacaaatacgtagaattcggcgatggcgataaaggaggtaggcgtgataacacgcagcaagagcagtatgccgcagcgtagacatcgtagacagaaggttaccaagcgaattaaaaccacgacgtattaaatacagttacaatgtgattgcgtagttagatggcaccaacatat

SEQ ID NO: 5212 - DNA, 147 bp, Glycine max
  unsure (1)..(147): unsure at all n locations
  Clone ID: PAT_MRT3847_104714C.1
gnggtgccttatgcgntgtggttancancttctncttcctcttncttagatctcttntttctctacgncgcacgctccaaacnatggccggaaaaggagaagntccngctatcggaatcganttcggaagcacatagncttgggtgg

SEQ ID NO: 5213 - DNA, 286 bp, Glycine max
  unsure (1)..(286): unsure at all n locations
  Clone ID: PAT_MRT3847_104715C.1
ccgcttgtctgcaaccgtaaaccaaatacgtgcataggggctcgatgctggtatgtcaggttgtcgacgttagggcaccactcctcaggccatttcacagagcacggctnaggatcaaatggcaacagtgagaagacacagaaattatgatcgctagccagcgcgagttctgactgcatcatattggccgcctcggtggaggttgatacttatcataccaatcctgaaaaggcagctcgtagtctaatttgttgcgcctttcagaggcggaagggtgctgcttgga

SEQ ID NO: 5214 - DNA, 443 bp, Glycine max
  Clone ID: PAT_MRT3847_104716C.1
tattttaactttttaaaatcaattttaaatataaaattaatttcttaacgtaaaattaaatatgtaaagttacattagttagtgttttaaagtaattttagataaatcaacgtgaatgacgtactaaatgcagccaaggggcgatctggttgaacggctaattatggaatacagatgaggatcacaacttgtgtatttgatttcatttattgtctttataatccattgtacggacatgattaatgacttgatgttgatttcacgtgtaaatcaagactccttctgaacgtacggtggaaaaggaaatttaacttttttcagaaattgcaaattaaaaacgttattggcacgattggatgagaggaagcacgtttggattaaaaaaaaacgaaaataagaacaataaaatatttttcttttatttgataagagataaaataaaa

SEQ ID NO: 5215 - DNA, 423 bp, Glycine max
  Clone ID: PAT_MRT3847_104717C.1
ctcatcctcttctttctctctctaccattgccatggatccctacaagcaccggccatccagcgccttcaattctcccttctggactacaaattctggtgctcctatttggaacaacaactcctctttaaccgttggagctagaggtccaattctgctggaggattatcatcttgtggagaagcttgcaaattttgatagatttgctcgccgatgggttgatgctttatctgacccacgggtcacccatgagatccgcagtgtctggatatcatactggtctcaggctgaccgttctctaggccaaaagatagcttctcatctcagcacgaggccaaatatttaatgttgttgccaactccagaatgattgttagagttgcagacgtgcaaagagtacgataaggatgtgattttggattacct

SEQ ID NO: 5216 - DNA, 288 bp, Glycine max
  unsure (1)..(288): unsure at all n locations
  Clone ID: PAT_MRT3847_104718C.1
aagagctttctagctggtcataatatcaccattactnatggtattgncaaaactagtgcaantttgcanttnagaangtagcagnttgtnattntctcaagaggactttaagcngagtctagtgttttgcngggtggctnctgnggccaacngggngtttgttngtcacancttcgttntggttcgtgtaagcatctngaaatccnggangcttntctngtcaatctntaantgtcttacgcggatngtatttgcacagtcnggacgaagcncgccnttgagagggga

SEQ ID NO: 5217 - DNA, 319 bp, Glycine max
  Clone ID: PAT_MRT3847_104719C.1
aatcctcaccacgctcccgcaacaccgactcctgggacgagcccttctcgccggcggcggcgaagctccgactcatgtgcagctactgaggccatatcgtcccccgcccccacgacaagtgcctatgttacatctgctgcgactcacgcatcatcgcctacgaaccccccacctcactgccggacctgtccacgcgcctatcataaacattactgaacggaagacccttcacgctccagtaccatgtccccaaccaggacctctattccctcatatgcgtcaccaccgacgaagacctccagaacatgatcgactcgta

SEQ ID NO: 5218 - DNA, 761 bp, Glycine max
  Clone ID: PAT_MRT3847_10471C.1
aatatgctatgatatgcctgcgagaagacgacagaaggggatgtgtgaacaatcgtgaagttttttctttgagaagtaaaagatcttagtgcaagtaattaacatggaatctcagcaagcaaaccgtgaagaacttgatgagaaggcaaggcaaggtgaaactgttgttcctggaggaactggtgggaagagtcttgaggctcaagaacatcttgctgaaggaaggagccgtggagggcagacgaggaagcagcagctagggtcagaggggtatcatgaaatggggaccaaaggagggcagacaaggaaggaacagatggggagagaagggtaccaagagatgggacgcaaaggaggactcagcaccatggacaagtctggtggagaacgtgctgaagaggaaggcatagaaatagatgagtctaagtttaaaattacctaaaaaactaaaaaaattgtgaggaagaagtgttttgttgtagttgttttagtgtgtgtgtgtgtgttttttgatgtagtagtgaatatagctaggaaactagctagttctataaaatatatgttttaaagctttagtgctactgtttgttaggaatggtaggtattttaggttaaggaaccttaggtagtctttatcttaggggtatgtttatcatggtgttgtaggaagtgttaaactatcagtggagactcttgtaccccttataatgcatgtccacttatctttaaaacatatattttatagaactagctagtttcct

SEQ ID NO: 5219 - DNA, 567 bp, Glycine max
  unsure (1)..(567): unsure at all n locations
  Clone ID: PAT_MRT3847_104720C.1
cttaattaattggattacaaggaacacatagtccacaacaatagcagcgaaacatgccgaaaaggtatataaatataaatactaacacatacaaacggcatttattgagatagctcaacgagttgcatgcatggagttatgggtacacaactaaaattgcaagaaatggataagttctttcaaattgatcgaaaatcacatccttatcgtactctttgcacgtctgcaactctaacaatcattctggggttggcaacaacattaaatatttggcctcatgctcagacgagatgctatcttttggcctagagaacggtcagcctgagaccagtaagatatccagacactgcggatttcatgggtgacccgtgggtcagataaagcatcaggtgcccaagatcggtatctctctccgggctgcttaaagttgttctccttctcaattccacacttttcacgccttccactgcagatagcaggaggtatggngaacgtttctgcatgacgaacaggatcatacctttgaaggaagtaatttaacctctcatccctgtgaatgaaattcat

SEQ ID NO: 5220 - DNA, 354 bp, Glycine max
  Clone ID: PAT_MRT3847_104721C.1
ggaacaaaaaacattgcatttaattagattagagggtacattacaaagggtttctttataacaccctattttctcgcacctcaaatccacgcacgagggccccaagagggtgggtctaactaagacaatctttaccccaactgactaaaacccaggttttttacaaacaggcttcttccacccatggaactatgacccataggcacaatgggtacatgccccatcggaacctaactcaccgggtacgaaacaacattgcaagcatctacttcgcattcatggggcatgcattaatgtggcgaacctctgtgaatttaaccaaattaaatgccattaaagcactttgcggggggc

SEQ ID NO: 5221 - DNA, 720 bp, Glycine max
  Clone ID: PAT_MRT3847_104722C.1
aaatggacccgcagcactgcttaaacgtttctttattattgataaagttaggtctcaatcaatgcaagattaggctgtgcttattttaagcattactcttggatagaagagattaattattaatgctttataaaaatgctgcctatattaattagtgcaagaaggtatgaacaactctacttcttaatgcagtgtggaattgagaaggagaacaactttaagcagcccggagagagataccgatcttgggcacctgacaggttcctgttattaaatacttatatgatcaatgtgaaatgtgttttggtgatgtctaatgttgggttctttttgctgttttttttttttactaatttacaggcaagatagatttaatcgccgatgggttgatgctttatctgacccacgggtcacccatgagatccgcagtgtctggatatcatactggtctcaggctgaccgttctctaggccaaaagatagcttctcatctcagcacgaggccaaatatttaatgttgttgccaactccagaatgattgttagagttgcagacgtgcaaagagtacgataaggatgtgattttggattacctgaaagaactaatccttttcttgcaatattatgttgtgtgtacccataactccatgaatgcaactcgttgacctatctcaataaatgccgtttgtatttgttagtatttaaaaaaaaaaataatgatt

SEQ ID NO: 5222 - DNA, 362 bp, Glycine max
  Clone ID: PAT_MRT3847_104723C.1
gggggccgggggaaacttttttttaaaaaaaaaaaacatggggttatcctcccccccaaaacaaggggggaatcctggcggtggattgaaccggacatatcctttattgcccctagggggaagaaaaataataagctaaaaagcggggccccgcccaaaatttttttttttgcaacaggggacaaacatatttccaaacgggtcccatattatgggggggccaaaaaaaatttttttttcccccaaaaaggccctaagcggggaaacttggaaacaagcaaaagctcagcttaggcggggggagcccccaagttttgcccactaaatttgtttttgcggccccaaaagggaggggacccaag

SEQ ID NO: 5223 - DNA, 1156 bp, Glycine max
  Clone ID: PAT_MRT3847_104724C.1
aaatactaacaaataaaaacatagataatttctttgctgagaatgaacaacttgcattttgccctgccattgtggttcctggtgtatactactcagatgataagatgcttcagaccaggatattctcttatgctgattcacaaaggcacagacttggaccaaactatctgcaacttcctgctaatgctcccaagtgtgctcaccacaataatcatcatgaaggtttcatgaatttcattcacagggatgaggaggtaagttaatgtttaatttcttatattttcttatttgttttctgtttgaaaatctggttgccttgttaactacttagtgctgttagattattcatgcacatgctgattgggtaatattgctgcctattcttttgtcattattcagtattcacatttttttcttgtgactgagctctgcaaatttataggtcaattacttcccttcaaggtatgatcctgttcgtcatgcagaaaggttccccatacctcctgctatctgcagtggaaggcgtgaaaagtgtggaattgagaaggagaacaacttcaagcagcccggagagagataccggtcttgggcacctgacaggcaagatagatttgctcgccgatgggttgatgctttatctgacccacgggtcacccatgagatccgcagtgtctggatatcatactggtctcaggctgaccgttctctaggccaaaagatagcttctcatctcagcacgaggccaaatatttaatgttgttgccaactccagaatgattgttagagttgcagacgtgcaaagagtacgataaggatgtgattttggattacctgaaagaactaatccttttcttgcaatattatgttgtgtgtacccataactccatgaatgcaactcgttgacctatctcaataaatgccgtttgtatttgttagtatttatataccttttcggcatgtttcctgctgttatggtatatgttgcatcaatcttcacatgaaatcttcgctgatgcattctaataagagtaactatattacctagggtaaatatcttattgagacctatcatttctctttttgtttattttcttattacttaatattatttatcacattccttcaaaaaaaaaataatcatttatcacattaaaaa

SEQ ID NO: 5224 - DNA, 1939 bp, Glycine max
  Clone ID: PAT_MRT3847_104725C.1
ctcgagccgttctcatcctcctctgtctctctctctccaccattgccatggatccttacaagctccggccatccagcgccttcaattctcccttctggactacaaattctggtgctcctgtttggaacaacaactcctctttaaccgttggagctagaggtccaattctgcttgaggattatcatcttgtggagaagcttgcaaactttgacagggaacgtatcccagaacgtgttgtccatgccaggggagctagtgcaaagggtttctttgaggtcacacatgacatttctcacctgacatgtgcagatttccttcgagcccctggagttcagacgcctgtaattgttcgtttctcaactgtcattcatgagcgtggtagccctgaaaccttgagggaccctcgaggttttgccgtgaagttttacaccagagagggtaactttgaccttgttggaaacaaccttcccgtcttctttgtacgtgacggcatgaaatttccagatatggttcatgctcttaaacccaatcccaagaaccacatccaagagaattggaggatccttgacttcttctctcactttccagaaagccttcacatgttcacctttttatttgatgatttgggtgttccacaagattacaggcatatggatggttttggagttaacacatatacgctgatcaacaaggctgggaaagcagtgtatgtgaaatttcactggaagaccactagtggtataaagtgtctattggaggaagaggccattaaggtgggaggagccaaccacagccatgccactcaagacctccatgattcaattgctgctggtaactatcctgagtggaaactgtttgttcagacaatagatcctgagcacgaagacaaatttgactttgaccctcttgatgttactaagacttggcctgaggacattatacccttgcagcctgttggtcgcttggtcctgaataagaacatagataatttctttgctgagaatgaacaacttgcattttgccctgccattgtggttcctggtgtatactactcagatgataagatgcttcaaaccaggatattctcttatgctgattcacaaaggcacagacttggaccaaactatctgcaacttcctgctaatgctcccaagtgtgctcaccacaacaatcatcatgaaggtttcatgaatttcattcacagggatgaggaggttaattacttcccttcaaggtatgatcctgttcgtcatgcagaaacgttccccatacctcctgctatctgcagtggaaggcgtgaaaaggggtggaattgagaaggagaacaactttaagcagcccggagagagataccgatcttgggcacctgacaggttcctgttattaaatacttatatgatcaatgtgaacgtgttttggtgatgtctaatgttgggttctttttgctgtttttttttttactaatttacaggcaagatagatttaatcgccgatgggttgatgctttatctgacccacgggtcacccatgaaatccgcagtgtctggatatcttactggtctcaggtgagataataagatagagattttagacatgctaatttatcactatagaaactaccgggtcaattgtaaacgagtttgcatggtttgctcatatgctctttgatggcattgtcttgcaggctgaccgttctctaggccaaaagatagcatctcgtctgagcatgaggccaaatatttaatgttgttgccaaccccagaatgattgttagagttgcagacgtgcaaagagtacgataaggatgtgattttcgatcaatttgaaagaacttatccatttcttgcaattttagttgtgtacccataactccatgcatgcaactcgttgagctatctcaataaatgccgtttgtatgtgttaaaaaaaaaaaaaccaa

SEQ ID NO: 5225 - DNA, 1073 bp, Glycine max
  Clone ID: PAT_MRT3847_104726C.1
aggggcctttttttttttttaggtactaatagaaattttattattaatttatttgcgaccaaaggcgtcgacacggcagcatcaattccgaggcatgcacgacggacccacagccgctcctggacataaggaatcataataataatataactaataataatgcagactgacaggtccatccattaatagttcagacttcagactttatacactactaaaaatatttctaagaacagtagcaacactcttaacacaattcttctatttctaatatctttgcacatgctgcaaaacagccttcatcaagaacatgagacagttatgtcaagtgaccattttcaaggaagtcgcacaacttcttgttttaatcttttcatttgctaaaatctagaggacaaaattcacttttcaaataaaattaatttcctcggtagattcttgctgtgaatacaagatagagaatgctctaatggccatcaagtgttgccaaggactcgttaaggagccttcgggcttcttctctcctcttctttatgtcttccactgcttgtttacgacgctgtatctgaagttccaaaatatgaatcaatgttgctctcgcctgatgaggacgcaatgaatttaaaaggtgatgtaagtttttgaatacagttgaaatttcttctactcttcttgcatactgtgaaggcctctcaataagaatatcagcaagctccaaaacatgtagttgcaactctccgttgagtgacctcagctctttcttgaaatcaacattagggcccttagaatagagctggcgcaccccttgttcttccaaggtaggtagaacatcactagtagtgtaattggctccaaaacaaagataagtgccttcaataggtggtggagggtcgggagcagaattagggtcttgcaagtaatctttgtaaagcctgtaataaggtggcggtggagggtatgttgccgtcgccatttccagatctgcaaaaaattagggcttcttcacttgcaattgcaaaattgagaaagagcaactcatagcaacgtgcctcctgtgtcaaatcaaataatgg

SEQ ID NO: 5226 - DNA, 1820 bp, Glycine max
  Clone ID: PAT_MRT3847_104727C.1
aaaaaaaatagtgagaaaagagggaaagtctttataaggcggtaagactcgccattaccacacgaagtgatatagcgttgccattctcatcctcttctttctctctctaccattgccatggatccctacaagcaccggccatccagcgccttcaattctcccttctggactacaaattctggtgctcctatttggaacaacaactcctctttaaccgttggagctagaggtccaattctgctggaggattatcatcttgtggagaagcttgcaaattttgatagggaacgtatcccagaacgtgttgtccatgccaggggcgctagtgcaaagggtttctttgaggtcacccatgacatttctcacctgacatgtgcagatttccttcgagcccctggagttcagacgcctgtaattgttcgtttctcaactgtcattcatgagcgtggtagccctgaaaccttgagggaccctcgaggttttgccgtgaagttttacaccagagagggtaactttgaccttgttggaaacaaccttcccgtcttctttgtacgtgatggcatgaagtttccagatatggttcatgctcttaaacccaatcccaagaaccacatccaggagaattggaggatccttgacttcttctctcactttccagaaagccttcacatgttcacctttttatttgatgatttggggtgttccacaagattacaggcatatggatggttttggagttaacacatacacactgatcaacaaggctgggaaagcagtgtatgtgaaatttcactggaagaccactagtggtataaagtgtctattggaggaagaggccattaaggtgggaggagccaaccacagccatgccactcaagaccttcatgattcaattgctgctggtaactatcctgagtggaaactgttcgttcagacaatagatcctgagcatgaagacaaatttgactttgaccctcttgatgttactaagacttggcctgaggacattatacccttgcagcctgttggtcgcttggtcctgaataaaaacatagataatttctttgctgagaatgaacaacttgcattttgccctgccattgtggttcctggtgtatactactcagatgataagatgcttcagaccaggatattctcttatgctgattcacaaaggcacagacttggaccaaactatctgcaacttcctgctaatgctcccaagtgtgctcaccacaataatcatcatgaaggtttcatgaatttcattcaacagggatgaggaggtcaattacttcccttcaaggtatgatcctgttcgtcatgcagaaaggttccccatacctcctgctatttgcagtggaaggcgtgaaaagtgtggaattgagaaggagaacaccttcaagcagcccggagagagataccggttttgggcacctgacaggcaagatagatttgctcgccgatgggttgatgctttatttgacccccgggtcacccatgagatccgcagtgtttggatatcatactggtttcaggctgaccgttttttaggccaaaagatagcttttcatttcagcacgaggccaaatatttaatgttgttgccaactccagaatgattgttagagttgcagacgtgcaaagagtacgataaggatgtgattttggattacctgaaagaactaatccttttcttgcaatattatgttgtgtgtacccataactccatgaatgcaactcgttgacctatttcaataaatgccgtttgtatttgttagtatttatataccttttcggcatgtttcctgctgttatggt

SEQ ID NO: 5227 - DNA, 255 bp, Glycine max
  unsure (1)..(255): unsure at all n locations
  Clone ID: PAT_MRT3847_104728C.1
cnncaacaatctncttggnaagtttgancttactgggatccctccagcaccangaggngtncctcagatcaatgtctgcttcgaacatcgatgctaacgggattcacaatgtctccgcagaggacaagactgccgtgtgaagaacaagatcacgatcancaacgataagggnaggctnancaaggaggagattgncaagatgttgaaggatncnganaggtncaagggcggaggntgnagaggtgaagangaagg

SEQ ID NO: 5228 - DNA, 608 bp, Glycine max
  Clone ID: PAT_MRT3847_104729C.1
tagggaatttggccctcgaggccaagaattcccaacagcttcagctaacgttatcctttattcatttgcaatcacttttgattgttcttcatgtgattgctgtctatataattacaaaatcaaataatgatgcatatatatatatatatatatatatatatatatatatatatattataaaagataaagataaagatttggcccctccaaagtataggatgcaccacctttgataagaaggtatttgatttttccaaattcatactaagccaccatattgctttgttgattaataataatggaaactctttactttagaggatcctaatcttaatacaagggacaatgtataacacccaaagcagatcacatctagtcatctgaattgaactttaatggaactgatcttatagaaatatggcgtcagaattaataccatcttgatgatgagggttctcaagctaaaaaaagaaaagttggaatttatgttttaagtttttaactctactggagtttgttatagagagactttgaatttaagatgtcattgtactctgagaagtttcagcaccactgcttccaccatatgctcatttcttcttcattac

SEQ ID NO: 5229 - DNA, 453 bp, Glycine max
  Clone ID: PAT_MRT3847_10472C.1
tttttgttgtaaagaaataattattaatttttttagaaaattttataaaataagtgatgggttttccaaatttaagtgttatcaaatatgcactttaagtgtcacatggattgttattttaattgatatgcatttatcagtataaaatatttttacatttttacacacatttaatgataagatgatgtgatcctgtaaaaaaaatggataagatgatgtaaagataaaatggattcttattagatgtatgtgtaaaaaccgttatactgacaatacgaataaatcaaactctaagttttttttttctccggtaatgttttactagaattcatatcattttaatcaatttgatttttttactgaatattatgttaaaattttaattaaaaagataagtagaatattctgaattgggctctagaagggtgtaaaaaacaaaacctattcaaaccg

SEQ ID NO: 5230 - DNA, 305 bp, Glycine max
  Clone ID: PAT_MRT3847_104730C.1
ggcgggggcagacacgagagcgcgggtggacccacgcggtgggacaccagcgaggagacgacacaaggggggactatgagacagaaagccccgcggaaaccccaggcaaaccgcagagagaaaagggaccgaacaacaggcagaaaaaaggcgaagaaaaggccacgagacaaacggaagaggaggccaggacaaaagaagaacagacagccagcgccacacgagggggaacaaccgaaccgaaaagacagcccgacagggacgaaagaagaacaggcacaacgggaggcaaagcagcaagagga

SEQ ID NO: 5231 - DNA, 260 bp, Glycine max
  Clone ID: PAT_MRT3847_104731C.1
gagcccactgattggcgggtcttttgattttgattttcgacatttgaatcgagcaagaacatagccatagatttgaatttgagaacggaaactatggcgaaggcgagctcagagccgaagattgattacgcagaaatctacacagcatccgatacctttgacggctccgcgtctttcacactatctacgacgtcgtagggttcgtcctctacatgcaccagcaaatcccctccacggtgcaggatatgagcgtcgaattt

SEQ ID NO: 5232 - DNA, 416 bp, Glycine max
  Clone ID: PAT_MRT3847_104732C.1
gggaaaaagggggaatttttaaggaaacccctttttaaaaaggaatgggtatttgggaagggggccaattacattattggcaaaaggttttttttttctggaaaaatgttccaaaataggggcccctgaaaaaaaaatgaaaaaggggggccaaagcacccctccagggggaaaaattttggaaatttgaaaaaaacatttgcccaacccccaagggggtttaaagggggcaaaaaaacttttggaactaaaaggggtcccaggaggttttgggtgggaaccagttttaataaggcaaacccttaataagacccggggaaaaaaaaaaaacatccttggaaaaaaaaaaaggggccccaacccgtttaattggccggggattaacaggtttaattttaacaaacccgacccgtggg

SEQ ID NO: 5233 - DNA, 634 bp, Glycine max
  Clone ID: PAT_MRT3847_104733C.1
gtcgacccagcgttttttttggcagaaattagatcgcacaggaagcatttgctagcgcgtgaagctgaagcagcaaggtggagtcaaaggaagcaattgttgggtgcagcaggtgcaggtagaggaggaggaagcaagagagaagtaaacccttggcttgcaccaaccatgggcttccctcccatgtcaccaatgcaccactttatttttttatatgtatgggggcatcacaacatggaccagtctttcatgcacatgtggcctaaacatccaccatactcgccatcgccgcctgcatggccaccacgaaccgctccgtctccgccgtctccggaccctctatattggcaccaacatcaactggttaactcttttgactttgaaaattctcccttattctctttcttctagtattcaacacattcaattattgactaaaaaatacgatagttacaaaactctttagatttctttggatacaatgttagaattgaattttaaatcatttagtcataaaatttctcataccatgaaataattatcttaaaaggcttaagttgtcacatcttttaactgaactagccaaccgtattcagtattcttgattcattgtgtttgaatatgtatgacagaa

SEQ ID NO: 5234 - DNA, 358 bp, Glycine max
  Clone ID: PAT_MRT3847_104734C.1
ggtcctggagggagagaaagaaacaagggcaatttcactggcgtcatgggtttctctgtacgcgaaggcgaagagttcaaagggatcgacagctgcggaagatcgatccacgagcgagtgcctgtacgagtggacaacatgggcgatgccaaaagcgaacgtcatcactcactacggtatcctcccttgtgtcatcgtcatcgacatcaactctgaccccaagcccccactttcccagcttcttatccccggctgatccaactgttcaattcttgcaccatgcacgcgacggcattcttttcttcctcttactttgccccctttctacatttagcagcttccttatggatcaattttc

SEQ ID NO: 5235 - DNA, 236 bp, Glycine max
  Clone ID: PAT_MRT3847_104735C.1
cccaaacaaaattccttcacttttatattaaaatcttaaaaggcccttttttttttttacttacaacataaatgggtccgatttgtttggaagctaaaaacaaaaaacaggggagggttcctaatcctaagggagttattagttattacccccgggggggggccccctcccaaaggaaaatccagataaagcatggttgatttcatgtggggtccaaataggatttaccccactgg

SEQ ID NO: 5236 - DNA, 394 bp, Glycine max
  Clone ID: PAT_MRT3847_104736C.1
cgggaggctttaatggttccttagcttttttggcccttacctacctttaacccggcaccggcccctaaattagtgcttgtcttcctcaccccccctgggcggccgggccggggcccctcctccgcccacctttcggttcctaggtggaaatttcaaacccagacccgcggggtgcccctacaggctttgacaaggctgccaacggctgggggtccccttttttctggctttgggcttaggaatgggggtcccccatattcctggttctgggccggttttttaagggccgggcgggtccccatatcccccccggggtggacttaaatgtgggccaaagttgtggcaccctgggtccccccgagggtccacccctgtggaaactggattcttcggc

SEQ ID NO: 5237 - DNA, 147 bp, Glycine max
  unsure (1)..(147): unsure at all n locations
  Clone ID: PAT_MRT3847_104737C.1
tctttggtttggttttgggancaaaccaatattaaacgtaattagaggatgcagtccccaatacatcatcacgtaggtaaaccacctgctaagccataatccaataggatccatcgcaaagcgtgaaagggcaataaactcaataaa

SEQ ID NO: 5238 - DNA, 337 bp, Glycine max
  Clone ID: PAT_MRT3847_104738C.1
agagctctcacgtttgtgcttgcacttgcacctctccaacgataacaacgacgagcacaagatccagacaaggcaggcacatagtatggctggaccttttgagttgggttcatcaaagaagaaaccaggggatggagtgaatgatttactcacttttaatgctgaaaatatgcaaagcaacatgaaaattatttattacaggtttgttttggcagcagatttgtttaatgctttattgaatgaattcatttagttaggggccttatacttggtttgaaacggggaggggggttgttcctttctttctctcccagtttatggggttccacacaccagc

SEQ ID NO: 5239 - DNA, 667 bp, Glycine max
  Clone ID: PAT_MRT3847_104739C.1
cgagatcaaatcaatccatccaacctagacatctctcatcttctccaaattaacaaaaatggtagctgggaaatacccttcccccacatacttcatcctcctgctcataaccataacacgtttgatctccacagtgggcaagacctcccaatggatgaaggccctaacgccgcctccggaactcgcctcggtctccctcgatgacaccatcttcagcaagctccgcaacgacccagaggccctccaggggagggcctccagggactacgggaacctcgtccgcgaggttccctcggcggtcttccacccgacctcgtcgagcgacatcgcgaggctgatcaagctgtcgtacaacggttctgtccccttcaagatagcggcgagggggcaagggcactcgacgaggggccaggcgatggtacgtgatggggtggtggtggacatggccgggttcagagagagagggaatggagagggaataagggttgtgatgagtgttgttgtggacccttataataagaatggttatggtactattatgctgatgttggaggggaacagttgtggatcgatgtgctaaacgccacgcttgagcatggacttgcgcctatgtcctggactgattacttgtacttgacggtgggaggaactctcttcaatgctggca

SEQ ID NO: 5240 - DNA, 180 bp, Glycine max
  Clone ID: PAT_MRT3847_10473C.1
gtcatactttcgaaaacgctggtctaagtgctcctggagggcttttaatgggaaccgcgggactccctaacactacccaacttggcggattctaacgcataagacccaacctgtatagaattctatcgattcggaatgctactttgcctgaatcctctggggaacagttgccatgcaatg

SEQ ID NO: 5241 - DNA, 310 bp, Glycine max
  Clone ID: PAT_MRT3847_104740C.1
gggcactctattgaagatctataactgtcattgctctcacactataatctcgatttggtctagaggaatgattataatggtggacacagttggtatctctgagaatacatgtatagcattgtcctgagctatgaatagtattattagggggcgcgccatggctgatatatacaccatgtgctctgcaagactgtgaattatggaatcctgtttgcacagaagcaatgactgtgtcatttaatacaaacccgcgttctgatgcatggagtgtggaatttctgaatcttactatattatattgtgatattat

SEQ ID NO: 5242 - DNA, 1380 bp, Glycine max
  Clone ID: PAT_MRT3847_104741C.1
gttctatgtaagataagagtgtagataatgtctccacgtactcaatcaatgaaaccctagcttgaagttttcagtctgagccagagacatggaaattccagaatctcttagattcaatggacacgtggtggccatgcctttcccaagtcgaggacacgtgaactgcatgatgaacctctgcaaactactcgcggcagcatcttcatcttctcccttcatcatcaccattcttgtcaccgaagagtggctcggcttcatcggctccgagccgaagccgagcaacgttcgcttcgccaccatccccaacgttatccctttccaatcttagatagcctccgatatccccgctttcttcaaagccgtcgtcaccaacatggaacctcccttcgaccacctcctccgccgccttcaccctcccgtcaccgccctcgtcgccgacgtcgagcttcacttccctgtcgccgtcgcccgccgcagtaatattccggtcgcgctgctttggaccatgtcggcttccttttacctcacgttgcatcaactaggaagcttggttcgtaaccactctttgaagatgattatgaagagcatataccaggaatttctgcagcacaattagctgatcttcgaacggtgcttcgtgaaaatgacttgaggtttttgcagcttgagttggaatgcatttcagtagtgccaaaagcagattgtcttatagttaatactgttcaagagttggaagctgaagtaattgattctttgagagccatgttccactttccaatttgtcgcattgcctttccttacttcaaacacgaaacatgtcattttgtgaccaacgacagtgattacaacgttgactacttaaattggctagatcatcagccatccatgtctgtattgtacatttctctcggtagtttcctttctgtgtcatgtgcccaaatgaatgaaattgtttcagctttgaacacgagtggtgtttgttacttgtgggtggttcgtggagaagtttcatggttaaaagagaaatgtggggataggggtttagtggtgccttggtgcgaccaattgaaggttttgtcacatccttctgtaggtgggttttggagccactgtgggtggaattcaactctagaagctgtttttggtggtattccaatgctgacattccctcttttcttagaccaagttccaaatagtaggcaaattttggaagagtggaagaatgggtgggagcttaaaagatcagatttgggaagtgcagaattgataacaaaagatgaaatagtgcaagtgattagagagtttatggatcttggaaagcgaaaagaaattcgagacagggcactagaatttaagggcatttgtgaccgagcagttgca

SEQ ID NO: 5243 - DNA, 356 bp, Glycine max
  Clone ID: PAT_MRT3847_104742C.1
cccacgcgtccgaaagttagggttggtaccttggtttttggctggcaaatctgaatcgagtaataatcaatcatcataatgtcgccggcaaaaaaaccactgaaagttcggcggcagcttcgaggggacagcgtgcctgatctaacataacacatatcgagacgactgcccacgggatccttgcaacggacagcaatctggcaaggacgatctgaagagcactgaggcgcaatccaaacaaacctcgagacactaaagctggacgccatttgtaggtcgaccagccacctttgactatctggtgcactatgaaataaagctgtggactactgcaactgaccgcatgacaaggagac

SEQ ID NO: 5244 - DNA, 265 bp, Glycine max
  unsure (1)..(265): unsure at all n locations
  Clone ID: PAT_MRT3847_104743C.1
gtagccatggggactttcaatcactatctgattgtnaagttcaaagatggngtggcagttgangatctcattcaanggttggagaanatggcccttgggattgancatgtcaagtcctttgaatgnncgaaaggacattgaaagtcatgntatnctaagacaaggttccaccnatgttnnctngatgaannttcaatgggaaaggangggttccaanctattnngnganncncccannncttngagtnccgnggggttttncccc

SEQ ID NO: 5245 - DNA, 155 bp, Glycine max
  unsure (1)..(155): unsure at all n locations
  Clone ID: PAT_MRT3847_104744C.1
gaagagagagaggcaangnacgaacgacgtattntctctccttcnactcncctcaaatccaaatncanatcncaattgtccagtctttgctatggcatcaatttcgtccttatcnctcanttctgtttcgctccccaaatntcaatctctggacc

SEQ ID NO: 5246 - DNA, 1092 bp, Glycine max
  Clone ID: PAT_MRT3847_104745C.1
cggctcgagcggctcgagctctctcttcgcttattgttgcaccttcctcgtaaaagataactcccggtcggcgtgcatagccgccgattgaggcaaaaaaaaaacacaaaacacactgtagctcatcacagccaaacgcggcgtcaacgatgacgagcttctgaaattccaacttcgcccttcttctctgtgtatattcttttttatttatttattattatttctattattttttcggtgaggttagctccatgcctagtcccaagagcagccgcagcggccagatcgagagtcaccggaggggaaggtcgtcgtccttccacggccagtgcgcgatgtctgtcggtcagctccaccgtccgaagacggtttccgacctcccgtcgctcagaagcctcgccggaacggcgccggcgcctatgccggagggattgcctagacagccgccgaagatgctgctgaaggtgacggtgctgagaagcctcgcgcccgtgcaggtgctgatgacgccgggatccaccgtccgcgacctgatagcggcggcggtgcggcagtacgtgaaggaaggtcgccggccaatcttgccgtccagcgaagtctccgaattcgacctccattattcgcagtttagcctagaaagtttggataggaaggagaagctgctagagcttggatctaggaacttttttctatgtccgagaaagccagctacaacagtggaagatggcgtaacgacgtcgtttgcgtcttgtgcgaaagaggcagagaaagagagggagggatatggtggtggtggtggtgggtttgcttggttcaaactcatgcagttcatgatgtgattggttggttgattagtcattattgttattttatttcaattgaaatgtcttttttatttgtcccagaatgaatggccggttacttgtaaaaaataataggttggcttggcaattaggtacagggtttgagatttgtgtgtaagcaaagcaaaattgtaaaatagcatgtatgatttttaaacacatacatggtaatgttaaagctttcaattgcaaaattgtaaaaattatatgtataatcttatagttcctt

SEQ ID NO: 5247 - DNA, 291 bp, Glycine max
  unsure (1)..(291): unsure at all n locations
  Clone ID: PAT_MRT3847_104746C.1
cagnaatcacttaagctcaatttcaatggccttggggggggggtaaagttaaaactcccatggaaaaactttcctccttttaattaaggatgaaattgattaaaacataacttaatttcaactcacagcctacaaaattccaaattaacccatgaaattcaaaacagaaaatcctttgacataaggaaaaggcaaatccacaaaatttggggctgaacaatgaaagcaaagcaggctgctctttttgtagttggggcactttccatgactcaaagcatgcaatcagttttt

SEQ ID NO: 5248 - DNA, 1428 bp, Glycine max
  Clone ID: PAT_MRT3847_104747C.1
gaaacttcaaagccctcctttgcctctctctcttcgcttattgttgcaccttcctcgtaaaagataactcccggtcggcgtgcatagccgccgattgaggcaaaaaaaaaaaaaaacacaaaacacactgtagctcatcacagccaaacgcggcgtcaacgatgacgagcttctgaaattccaacttcgcccttcttctctgtgtatattcttttttatttatttattattatttctattattttttcggtgaggttagctccatgcctagtcccaagagcagccgcagcggccagatcgagagtcaccggaggggaaggtcgtcgtccttccacggccagtgcgcgatgtctgtcggtcagctccaccgtccgaagacggtttccgacctcccgtcgctcagaagcctcgccggaacggcgccggcgcctatgccggagggattgcctagacagccgccgaagatgctgctgaaggtgacggtgctgagaagcctcgcgcccgtgcaggtgctgatgacgccgggatccaccgtccgcgacctgatagcggcggcggtgcggcagtacgtgaaggaaggtcgccggccaatcttgccgtccagcgaagtctccgaattcgacctccattattcgcagtttagcctagaaagtaaatctctaataaattacgaacaaaatgtagatataatttcataaatagtttctaatcatagaattagagtttcatctcaacgttgataattgttggaatcgcgaattatcgaagtgaaattgtaattttgctcaggaaatagttctaaactacctctaactttattcataaattaactagtcctttggtttctttttattctcttgaaaaatcaattgatttggatttgtgttgttgtgatgttaattttttgtttttcttttcaggtttggataggaaggagaagctgctagagcttggatctaggaacttttttctatgtccgagaaagccagctacaacagtggaagatggcgtaacgacgtcgtttgcgtcttgtgcgaaagaggcagagaaagagagggagggatatggtggtggtggtggtgggtttgcttggttcaaactcatgcagttcatgatgtgattggttggttgattagtcattattgttattttatttcaattgaaatgtcttttttatttgtcccagaatgaatggccggttacttgtaaaaaataataggttggcttggcaattaggtacagggtttgagatttgtgtgtaagcaaagcaaaattgtaaaatagcatgtatgatttttaaacacatacatggtaatgttaaagctttcaattgcaaaattgtaaaaattatatgtataatcttatagttccttaatttggttcaaaaaaaaaaaaaaaaaaaaaaaaaaaaaaaaaaaaaaaaaaaaa

SEQ ID NO: 5249 - DNA, 384 bp, Glycine max
  Clone ID: PAT_MRT3847_104748C.1
taagattcaaaaagatagtgaagtgagactaaagataattgggactcgagtggatgctacagcaaaaaatcccatcttgttcaccatagtaacaactgcttgcaagatctctcccttaaacggtctgaagacaacacattggtacttaactggaaatgtcacaaaccctgttccatcacgaattagccctttccctatgttctctatccctgtaactgccaccatcttctccaaagttatcatattcgaagagaaaaaaggagtgactgtccaggttgcgcaattatggacggatatggtgaaacacgaaaatgtttttccacatattactggatcgaaatatgcagcttcatccacgctactttgggcgcatccctcgtcgat

SEQ ID NO: 5250 - DNA, 638 bp, Glycine max
  Clone ID: PAT_MRT3847_104749C.1
ggtccggaattaccgcgtcgacccacgcgtccggaagagatagtatatcagaataataccattgaagcaaaaagcattgttgcagaaacagtagttgcaccatttccaccgcaagctacctaaaaatacatatgttagtatgaaaactgtagtgaaacactaaaaaaccataaatgtgcacactagttgtgggtatgagaaaggtaataattttttttatcaatatgccattactatagagagttcacttctaaaagttttataacattaaaaaaaacctaaaaggatgaatataatggcagtaacaaatttgaaaaccagtcaagcaaaatttagcccattagaagtacaaaatattatggtgataaaactaaaagtctcagactattagtcaacccaagattcaagaaaccaatccaaaatggttgcaagaatctaagatattagttgaacaatatatcagccaaaaaaaaaaagtatcagcaaattgggaagaaccagcaagatgataacaaagtcttccatcactattagcagtaaaaattgcaccattgaagtcatgtttgagtgagtataagtaaataaaccttatcataaagctgaatgatcttttcattggattactttttctttcaact

SEQ ID NO: 5251 - DNA, 381 bp, Glycine max
  Clone ID: PAT_MRT3847_10474C.1
tacggctgcgagaagacgacagaagggggccttcaaaacttccacagtttccactcttcatttgtgttgtagtaacttgtgatgagcctgaaaagcagtgaaaggaaaattatgagaaggggtttcatgtgtcgctctcaggcttcaacagctgtgtgcatgagtactcgtgaccctcgatctgtagttgtgcctaagaagcttgaaagaagagtgtttcttgatgatacaaggttgatcaactatgccaagtactccaaacttgttgaacctccaaggtctaatccagttccaaagatcaagcttagagggcaagatcaggttcaagccaatgaaccaagggaacttctgaaaacacagacagataataatgtctttcaa

SEQ ID NO: 5252 - DNA, 254 bp, Glycine max
  Clone ID: PAT_MRT3847_104750C.1
atcggctcgaggccgaggcgagttgtgaatgtgagtgtgttttctcttcaaaacgctctcgcggcaacacacagtttatatgttcttattctgtattgtgttttgttaatagtgagatgagtcgtgtgaacatcgacaacgtcacgtcctgtttaacaatggttcctttgtgactctctttaagttcgagatttcgtacgagtgtatcaccgctctcaaagatgatttggaatggaatctcatttatgttggat

SEQ ID NO: 5253 - DNA, 1801 bp, Glycine max
  Clone ID: PAT_MRT3847_104751C.1
gctccctgctaacataatctgtagagaaaacctgacaccagaaaaggttcgttccgagacaaaacccaacgatccaaacggtcattgagcgtttaattcggctcgagtgaaagttgagacttgaaaccgtttttacacaatctgtcacggatattatggagggcaacagtggcgcgtcctaagacctctttattttcggaagattttttttcctaaacgccgttcttctttccattttctccattttttcttcctccatctgcattctctttcgctcgacaaaccctagcgatttgatgctgtgcgatgcgactcgctgagttgaaccggataaagatctgagtcgcggtgatcggttcgacgccctcatgggtgctgcgggctccaagctcgagaaggctctcggcgaccaattccccgaaggagagcgttactttggcctcgagaattttggcaatacttgttactgcaacagcgttttgcaggcactatacttctgtgttccatttcgagaacaattgctagaatattatgcaaataacaaaagcataacagatgcagaggaaaatcttttgacttgcctagccgacttattttcacagataagttcccagaagaagaaaacaggtgtcattgctcccaaacgatttgtacaaaggttgaaaaaacagaacgaactcttccgtagctatatgcaccaggatgcccatgaattcttgaactttttgttaaatgaacttgttgacattctggagaaagaggcccaggctgcaaaaaatgatcaagagacttcaccaccttctgaaaaggctgcaaatggacctaagaatagtctagccaatggtgctaaaaaggagcctttagttacttgggtgcacaaaaattttcagggaatactcaccaacgagaccaggtgcttgcgatgtgaaactgtaacagctagggatgaaacattttttgacttaagccttgatattgaacaaaatagttcaattacaagttgcttgaaaaacttcagttcaacggagacattgaatgctgaagacaaatttttttgtgacaagtgctgcagtttgcaagaagctcagaagcgaatgaagataaagaaaccacctcatgtgttggtcatccaccttaagcggtttaaatacattgaacaactgggtcgctacaagaagctgtcttaccgggttgtcttccctcttgagctgaaattgagtgatactgctgaagatgcagatattgagtattctctatttgcagtagttgtccatgttgggagtgggcccaaccacgggcattatgtaagccttgtgaaaagccataaccactggttattttttgacgacgaaaatgttgagatgattgatgagtctgctgttcagacattctttgggtcttcgcaagaatattccagcaatacagaccatggttacattttattctatgagagcattggctctggtaacaggaactagacggaggagcctttgagttttagatacttgaatcagttggacttgtctttttcatctgtttaattattaattattttttccggttttattcaacctgcttgagtagttgttatacatcaatgagaggatacgggttgtgaaaatgtatacttagtggtcggcatgtacagtggatagcggaagcactgtcctttttccccttatttttttgttacaataagagcagtgtatatggtttaagaatttccccgccagtatattcccgatgttaaaaaataagtattaaatcaatagaaacccgatgcaatggcaggttccctcgt

SEQ ID NO: 5254 - DNA, 1603 bp, Glycine max
  Clone ID: PAT_MRT3847_104752C.1
ccattttctccattttttttttccttcatccaatctgcattctcttgcgctcgctcgacaacaacagaaagcggcacgacaaaccctagcgattcgatggtgtgcgatgcgactcactgagttgaactagataaagatctgagtcgcggtgattggttcgacgcgctcatgggtgctgcgggctccaagctcgagaaggctctcggcgaccaattccctgaaggagagcgttactttggccttgagaatttcggcaatacttgttactgcaacagcgttttgcaggcactatacttctgtgttccatttcgagaacaattgctagagtattatgcaaataacaaaagcatagcggatgcagaggaaaatcttttgacttgcttagccgacttattttcacagataagttctcagaagaagaaaacaggtgtcattgctcccaaacgatttctacaaaggttgaaaaaacagaatgaactcttccgtagctatatgcaccaggatgcccatgaattcttgaactttttgttaaatgaacttgttgacattctggagaaagaggcccagtctgcaaaaaatgatcaagagacttcaccaccatctgaaaaggctgcaaatggacctaagaatggtctagccaatggtgctaaaaaggagcctttagttacttgggtgcataaaaattttcagggaatactcaccaacgagactaggtgcctgcgatgtgaaactgtgacagctagggatgaaacattttttgatttgagccttgatattgaacaaaatagttcaattacaagttgtttgaaaaacttcagttcgacggagacattgaatgccgaagacaaatttttttgtgacaagtgctgcagtttgcaagaagctcagaagagaatgaagataaagaaaccacctcacatcttggtcatccaccttaagcggtttaaatacattgaacaactgggtcgctacaagaagctgtcttaccgggttgtcttccctcttgagctgaaattgagcgatactgctgaaaattcagatattgagtattctctatttgcagtagttgtccatgttgggagtgggcccaaccatgggcattatgtaagccttgtgaaaagccataaccactggttattttttgacgacgaaaatgttgagatgattgatgagtctgccgttcagacattctttgggtcatcgcaagaatattccagcaatacagaccatggttacattttgttctatgagagcattggctctggtaacaggaactagacggaggagccttatgagttttagatacttaaatcatttggacttgtctttttcatctgtttaattattaattatttttttcccgttttattcaacctgcttgagtagttgttatacatcaatgagaggatacgggttgtgaaaatgtatacttagtggtcggcatgtacagtggatagtggaagcactgtcctttttccccttatttttttttacaattaagagcagtgtatatggtttgagaatttcaccgacagtatattcacgatgttaactgttaagtattaaatcaatagaaacacgatgcaatggcaggatcactcgt

SEQ ID NO: 5255 - DNA, 807 bp, Glycine max
  unsure (1)..(807): unsure at all n locations
  Clone ID: PAT_MRT3847_104753C.1
ttaaattttcgccagcattttcgtcgtggtcctcctcctcctctctctcgcgtaacccttgtttcgctccctgctaacataatctgtagagaaaacctgacaccagaaaaggttcgttccgagacaaaacccaacgatccaaacggtcattgagcgtttcatggtgcgagtcactgagttgaatcggataggaatctgagtttgtgatcggttgacgcggtcatgggtgctgccggctccaagctcgagaaggctctcggcgaccaattccctgaaggagaacgttactttggcctcgagaatttcggcaacacttgttactgcaacagcgtcttgcaggcactatacttttgtgttccctttcgcgaacaattactagagtattatggaaataacaaaagcatattggacggggaagaaaatcttttaacttgcttagcggacttattttcacagataagttcccagaagaaaaaaactggtgtcattgctcccaaacgatttgtacagaggttgaaaaaacagaatgaactcttccgtagctatatgcaccaggatgcccatgagttcttgaactttttgctgaatgaacttgttgacattctggagaaagaggctcatgctgcaaaaactgatcaggagacatctccaccttctgaaaaggctgttaatgggcccaagaatggtcaagctgaatggtgttcacaaagagcctttagttacttgggtacacanaaatttcaggggatactcaccaatgagacaagggtgcttgcatgtgagacagtgacagctagagatgaaaca

SEQ ID NO: 5256 - DNA, 533 bp, Glycine max
  unsure (1)..(533): unsure at all n locations
  Clone ID: PAT_MRT3847_104754C.1
atgctagagccagtcatgacatgatgatttgtagcatgaaagaatacaagcatatatacatatgtcatatgtataccactactgtatgtacatatacatatgcatatgggctttcatatgatttttaccaaacaaaacagctaactaacaaaattgggtcatgagcctctcgagaaaggccacatgacatcaagtgggtggctcggccagaagaagagtatgccaccagccacatgcaacgtttttagctacacaaccttcgatggtaacttcagaaggaatgttacggtctatcacgtccccaaggccaagctgttattagagcagtgtgacgagccccacaagatatcctttttacgttcacattttccaagctcggacaatccaagagccttggtatagtctcagcttgatcaccaccagttcccagctgcccaaactggtttccaccnnntgcatatacatcaccatcagcagatgtacacacagtatgccacagtcctgcagcaactccctctattcgaatacccaat

SEQ ID NO: 5257 - DNA, 168 bp, Glycine max
  Clone ID: PAT_MRT3847_104755C.1
caaacatgatccggcatcctcagcatccagcactaacaaagtcacacattaagccactgacactgcacataaatccaaggactacgcaaatgatattgctcagaagtcataggactacacaggtgacactgctcactcatcataggactacaatggcgatgctgcgca

SEQ ID NO: 5258 - DNA, 2000 bp, Glycine max
  Clone ID: PAT_MRT3847_104756C.1
cggctcgagctttccgcatttttttaattcggaaacaactgaaaataaggggaagaagagattttactattggtgggaatcggcatgaatggcgaggggagtgaagcaatgcaagtggagaaggagagcttggtgtacatgtggggttacctgcccggagctctgccgcagaggacgcctctgttgacgccgcttcttgttagggttccgccctctggttacttttggaaggatgtctgcggcggtggttgtggattcgccatggctatctctgagcctggaaagctcataacatggggttcaacagatgatttaggccaaagctatgttacatctggcaaacatggggaaactccagagcctttccctcttccaactgaagtgactattgttaaagctgcagctggatgggcacattgtgtttctgtgacggattgtggagaagtttacacatggggatggagggaatgtgtaccctctgggaaggtgtttggtgaatcattaactggggtaagccctgaaaaggatgtacccagaaggcaaagttcattcttgacggagcaagtgagccctcgttctcaaggttcaaaatctactggaggaactgcctctggtaccagtggagaagaaagttcaaagagaagaagagtatcttcagcaaagcaaacagctgaaacctcatcatctagtgatgatactcagactgcattgccatgtcttgtcacactaaatcctggtgtaaggatagcaagtgtagctgctggtggtcgccataccttagcattgtcagatataggacaggtgtggggttggggctatggtggtgaagggcagcttggtttgggttctagaatacgaatggtgtcctctcctcatctagttccttgtattaattcctcttcttatggtaaagatatggctcgagtaagcataagttcagatgggcaaaatttcagagttcctggaagttatattaagggaattgcctgcggaggtcgacacagtgcagtaatcacagatgctggagctgttcttacatttggttggggactttatggacagtgtgggcaaggaagtacagatgatgaactgagcccgagttgcgtatcttccttattgggtattcaaatagagggagttgctgcaggactgtggcatactgtgtgtacatctgtggatggtgatgtatatgcatttggtggaaaccagtttggacagctgggaactggtggtgatcaagctgagcagactataccgaggctcttggattgtccgagcttggaaaatgtgaatgtaaagaggatatcttgtggggctcgtcacactgctctaatagcagataatggaaaagtcttctgctggggatggaacaagtatggacagcttggccttggggacgtgatagaccgtaacatcccttctgaagttaccatcgaaggttgtgtagctaaaaacgttgcatgcggctggtggcatactcttcttctggcggaatcacccacttgatgtcatgtggcttttctcgagactcatgacccaattttgttagttagctgttcttttgtttggtaaaaatcatatgaaagtccatatgcatatgtatatgtacatacattagtggtatacatatgacatatgtatatatgcttgtattctttcatggtgtgaatcatcatgactggctctagcatttaaacaacatccaatagagatttctggtttgcatgggaaggaaagtattgggtccttttcattcatgtaacattattcatcatagtgtatattttcttttaattgtattaactaaccagtgtaattagataccctacaagttaggtactgtcccctggcatgtagttgtattttagggggtattatggggtggttctttagctttagtatatatatccatgcaagttcgtctttgaggtccattttaaatatgtatgggcattgataaaaaaatttcaaatgcaaactccaggtgtttttctcaaaaa

SEQ ID NO: 5259 - DNA, 246 bp, Glycine max
  Clone ID: PAT_MRT3847_104757C.1
gctggtcgatatatgacctcctatcttgttgatatgcatacaaagtgggggtatgcattatataggactgctgattctgagactgtcagggatatcaagagaattatgctatattagttatgactacagacgagatatcaattgcgggcttgataccactatacttgttaagaattatactcttctagatgtcagggtcattaaagtaggcactgaaagtatcgaggctcccgatgctcttttcat

SEQ ID NO: 5260 - DNA, 1301 bp, Glycine max
  Clone ID: PAT_MRT3847_104758C.1
atctagttccttgtattaattcctcttcttatggtaaagatatggctcgagtaagcataagttcagatgggcaaaatttcagagttcctggaagttatattaagggaattgcctgcggaggtcgacacagtgcagtaatcacagatgctggagctgttcttacatttggttggggactttatggacaggtaaagtagaatatggtgggcaaaagcaatgtagatgttgaagatgaggttcactctaacaagggataatatctattctgttactttacaatatttatatttctattcgctctctttgttgttgcatgctaatgcttgttaattattctaaattaatgtcatcttgtgttggaaaagtgtgggcaaggaagtacagatgatgaactgagcccgagttgcgtatcttccttattgggtattcaaatagagggagttgctgcaggactgtggcatactgtgtgtacatctgtggatggtgatgtatatgcatttggtggaaaccagtttggacagctgggaactggtggtgatcaagctgagactataccgaggctcttggattgtccgagcttggaaaatgtgaatgtaaagaggatatcttgtggggctcgtcacactgctctaatagcagataatggaaaagtcttctgctggggatggaacaagtatggacagcttggccttggggacgtgatagaccgtaacattccttctgaagttaccatcgaaggttgtgtagctaaaaacgttgcatgtggctggtggcatactcttcttctggccgagccacccacttgatgtcatgtggcctttctcgagaggctcatgacccaattttgttagttagctgttttgtttggtaaaaatcatatgaaagcccatatgcatatgtatatgtacatacagtagtggtatacatatgacatatgtatatatgcttgtattctttcatgctgcaaatcatcatgtcatgactggctctagcatttaaacaacacatccaatagagatttctggtttgcatgggaaggaaaatattgggtccttttcatctatgtaacattattcttcatagtgtatattttcttttaattgtataaactaaccagtgtaatagataccctagaagttattaggtactgtccctgacatgttgttgtagggggtattatggggtggttctttagctttagtttatagtagatatccatgcaagttggcctttgaggtccattttaaatatgtatggtagtgataattttattttcaaatgcaagctccagtttttctcaa

SEQ ID NO: 5261 - DNA, 248 bp, Glycine max
  Clone ID: PAT_MRT3847_104759C.1
cagatgtgaagttactgaatctggttcacctggccagttgaattttgatagtcaagctgctccagcttttcatccccattcccttccagaatttcatgatggtttagctaacagtgttcatcatattctcccgaggtggcagcaaacatcaatctcaaaacacaggaaagaatagataacatgcagttctgtcaagtaaactccaatgggcgcttcatggaattcaatgaatgtgtttttaaatcctc

SEQ ID NO: 5262 - DNA, 550 bp, Glycine max
  Clone ID: PAT_MRT3847_10475C.1
gtatgggggaaacacattccttcatgctccagggaagataggaaacagaccacgaaacatactttggcaaacaaaacctcgaaagaacaacaagcccctttgttttgcgctctgcaacagttaaagggccggagtaaaaggacagtactcaatgcccattggcgtgttaccacaaataagcacaagaaggtgaaggcatacgcacacaacccccgttggagaaagactaacaaacacaatcaaacgggggatggttgtatcgcgaattacaacccaaggccttacccaaagggcaaaattcccctctgaaaatccgtacgataacacgcacaaccactaccggtgcgatttctgtctgacagcccgccacaaacggcgctgtggaaaaacctggcaggaagaggttcgaacccacgaaagacctgtgccgcgaagaaacggagacgctccgatggggtgcttgatataccccccgtgcaggcacaaaaaggggaacgaccgggagagaaacagggggcaaggggccacctgggcctatccccccaaagcc

SEQ ID NO: 5263 - DNA, 489 bp, Glycine max
  Clone ID: PAT_MRT3847_104760C.1
ctcagtggcgtgttgtgctactgcaatgtttaagatgggttatgcatgcagcaggggccaaatgttcagttgcacagatgcttccaaatacgtgttttggaactctttccatccaactgagatgacaaatagtatcgttgcaaagtacgtggtactgcgtgttttatatcaattcttacaataaataaattaataactacaagtgaaattttatttatgtactagtatctcttcatgtttgcacattcattataaagtgccatttgggctttctatgaatgactgcatgtcgatgtgtacatatataaaaatgtcaatacagcacatccaccatatgatatgatgtgctgataattagaaataagtcgttttgttttgaacaatatatatagtatttatacttttcaggcactttactagatccagtgtcctccatgtatgttttcctatatatatatatatatatatatgtcctattatgatgggtct

SEQ ID NO: 5264 - DNA, 328 bp, Glycine max
  Clone ID: PAT_MRT3847_104761C.1
acaacaaaagcacccccctgatatttgtaaactttaaattactctcccccattcacatttcaaatcctcctttctttcatcacatcatacaacctcacaaactcctcaatcattcatacactataactactaacaaataaatatcaaccttccttctcccattcaaaaaccaaatctgctacaaactactttcaataaacactagcctatttacttaaccaacccaatcatattaaaatcaatgtcaaacaaccttatcttaataatcatcccaacatccaacaaaaacatttcgtatcatactctccttcccacactattcaaaaac

SEQ ID NO: 5265 - DNA, 579 bp, Glycine max
  Clone ID: PAT_MRT3847_104762C.1
ggctcgagtgaaaataagggaagaactaagaagagattttattattattattattattattattacattgggttttggtgggaatcgctcgccatgaatggcgaggggagtgaagcaatgcaagtggagatggagattgagaaggagaggttggtgtacatgtggggttaccttcccggagctctgccgcagaggacgccactgttgacgccggttctcgttagggttccgccctctggttactcttggaaggatgtttgcggtggtggttgtggattcgccatggctatctctgagcctggaaagctcataacatggggttcaacagatgatttaggccaaagctatgttacatctggcaaacatggggaaattccagagcctttccctcttccaactgaagtgactattgtaaaagctgcagctggatgggcacattgtgtttctgtgacagattgtggagaagtttacacatggggatggagggaatgtgtaccctctgggaaggtgtttggtgaatcattaactggggtaagccccgaaaaggatgtaccaggaaagcaaagttcattcttgact

SEQ ID NO: 5266 - DNA, 1247 bp, Glycine max
  Clone ID: PAT_MRT3847_104763C.1
tgctcgagccgaatcggctcgagggctgatgctgtgggctcagtttttgcaatcttagataagtacacaaaaattgagccagatgatgacatagatgggtacaagcctgaaaagctaacagggaaaatagagcttcatgatgtccattttgcatacccagctaggcccaatgtgatgatcttccaaggcttctcaatcaaaattgatgcaggcagatcaacagcattggtcgggcaaagtggctctggaaaatcaacaatcataggcttaattgaagagattctatgaccctctaaaagggattgtgaccattgatggtagagacataaaatcataccaccttaggtcactaaggaagcatattgctcttgtaagccaagagccaacattgtttggtgggaccataagggaaaatattgcatatggggcatctaataataataacaaggttgatgaaactgagatcatagaagcagctagggcagctaatgctcatgatttcattgcaagcctaaaggatggttatgacacatcgtgtagagatagaggagtgcaactctctgggggtcaaaagcaaagaattgcaatagctagagccatattgaagaatccagaagtgttgttgttggatgaagccacaagtgccctagatagccaatcagaaaaattggtgcaagatgctctagaaagggtgatggtggggagaactagtgtggtggtggctcacaggttaagcacaatacaaaattgtgacctaattgctgtgttagataagggaaaagtggtggagaaagggacccactcatctttgttggctcatggaccaggtggagcttattactctttgataagtttacaaagaagaccagcaaattaaacatgaatgttagttttacgcatgaaatctcagctagctaatcaaaacaaacaaaatgtcacatttattggtgattagtattaaacctcttttgtggtaacttgtgaaagtaaattaagaaaaatgaaagaaaagtaaattaagcaaagatagaagggaagaactatataacagttgtagtctctcccaacttcctaaattctccatattaattataagcttaaattgtaagataatttattttatttgacttaaatgtatgtagtctttagtctcagtctcctaaaatataaattttgagtttacccttgaaactaagggaattcgatgttttagtttttaaaaaaaaaaaaaaaaaaaaaaaaaaaaa

SEQ ID NO: 5267 - DNA, 246 bp, Glycine max
  Clone ID: PAT_MRT3847_104764C.1
cggctcgagctttctctctgtgtctctctcgccgaggtcttgtggcggtggcgagcgctgccactccgcgcgaagagtgcgagtgcgtggcgaagtggcggacaggccgagcgctgcgaggagatggtggagttcgtggagaaggtctccgcctccgccgagagcgaggagctgaccgtggaggagcgtgacctcctctccgtcgcctgcgagggttgtgtttcggcgctcgccgcgcctcctggc

SEQ ID NO: 5268 - DNA, 299 bp, Glycine max
  Clone ID: PAT_MRT3847_104765C.1
tccctaaagactcattatgaactatattaaccatccttaggagcaatatatccgtcctcttcaatttattatcacaaagtgtgttacatattataccatagtctttttatcattgttgattcccaacaactcactttatcctattaaagcatcatcaatcacattgttatcataatatcattcatcaattgaaaatcaattacatcatgcatatgctatcaagcaattatatagctttcttccaacaaatttcatgctacaaacactctacccatattaccattaaccttcaccttcac

SEQ ID NO: 5269 - DNA, 394 bp, Glycine max
  Clone ID: PAT_MRT3847_104766C.1
gaatgggggtcgagcaattactagcacatacacacagttgttaatgatcatatgatagtgatgaagaggaaggtcattggggtggttgctgggagagggtcatctgtgctgacaatatcccactatgtcgctgcaggaaacttggaggatataccactggaagaggtcaccgacgccagaaaattgctcacatatgatggtccattgatataattcgctgaatccaaaataacaagggaggggcgtgcatctggctttaagttgtgtggataattatgaagcacgaatggctggtaaccaggcttgttaggaattgagccaaacatggatggaatcaggtgcttctgaggatgctggttcaggccatatttaattgtttattcctggagaaact

SEQ ID NO: 5270 - DNA, 376 bp, Glycine max
  Clone ID: PAT_MRT3847_104767C.1
agaccaagctcaaaaccctaacaaaccaaatactgaggctgccatattcaccaatgggggtggttaaggcaatgtttggtcgccgccgaaatgtcggtgctcgtcgccgacatctgcgccgacgaagctccagcttcgagccctacgtctaccgacgccgccggttcgccgtccaaaaaaaacagagtggtcgccgccggagccggtcttgcgttcggatctgctatgttgatctgcacgtacctcatggatttcctcgtttacatgcgtggatttttagtaaaagcggcgatttgagcagcattagtatataactcttctataattttctcccttcctatttctctatatataacgacctgggtatgtaaagatt

SEQ ID NO: 5271 - DNA, 370 bp, Glycine max
  Clone ID: PAT_MRT3847_104768C.1
gaattgactgtgggaacatgcgaattgcgagcctgatacgagagcttcagattccagtttgttcctcagaccctccatcatgtgtcataggcttcaaattagtggtaacatcatcttaggggagagatttgactgatcgcaccttccagatatgcaatgactcttatgagagcacagaagatctttggagcatgcggagacgttgccattacagaaacatgattcccgtattgtggtagtggcagcagtgtgtgcgctggggatattagatgtggatctgaacgacgaatacgccttggatctgggccaaaattgaccatctgtggaagagatttgggacaacgtgaggaaatgtggattcgagcctctc

SEQ ID NO: 5272 - DNA, 378 bp, Glycine max
  Clone ID: PAT_MRT3847_104769C.1
gttgattttaaaaaatagattgaatccacccaaactgcactttttagttataactaaaaaaatgtgcataatccccccaattacttatgaaaattacttgctgaattaatgaaattttttcattattttaagaaaaaatatttaagaactagagcctttcgcgatttattgggaatccactttgattctctattaaccactaatgttggactattaccatggttaaagtgaatagtttgaacgctagacgcagtgtagggctctttgtacccctatggtaatccgagaatgaattggttgcgtaaaattattagatttttttttcgatataaaacactcatgtcagataaaagggcctcgaatcctatttacttacgg

SEQ ID NO: 5273 - DNA, 487 bp, Glycine max
  Clone ID: PAT_MRT3847_10476C.1
cttgctaaagaaaaagacaactctcgtcgcatgctgacagacaaagagagagagatggcggaaataagggatcaaatgcagcaacagctgaatgactatgaacagcttcttgatgtaaagttagccctggacatggaaatcagtgcttacaggaaactcttagaaggcgaagaagagaggttgaagctgtctccaagcccttcttcccgtgtgacagtatcccgagcatcctcaagtcgtagtgtacgtacaactagaggaaagcggaagagggttgatgtggaagaatcagaggcgagtagtagtgttagcatctctcattccgcctcagccactggaaatgtttgcatcgaagaaattgatgttgatgggaaatttatccgcttgaagaacacttctgaacaggatcaaccaatgggaggctgggagatgatcagaaaaattggagacacatcagtcagttatcaatataccttaagatatgtgc

SEQ ID NO: 5274 - DNA, 310 bp, Glycine max
  Clone ID: PAT_MRT3847_104770C.1
atttgacaacatgcaaatatcctctgctagaagatctgtacgatgatggatgcattgattctagatctttgaatcatacaccttatgcagtacgatgcagaactatccacgaatacataatatgaagctgatgcagtgatacaatctccttatagcacagtaagctatacatgggtatacatatgtgatgctgaatgcggctataagtcacattgctgcacaagttatcttgcatatggttgttctacactcgaagccatatatggagcactgcatgctcatcatggtggcactttcctagctcgacttg

SEQ ID NO: 5275 - DNA, 2197 bp, Glycine max
  Clone ID: PAT_MRT3847_104771C.1
ggctcgagctcaggaagtatcccaccccaacaaagttttcaatcacccaataagaatgcattgttgatgacatccttaccacaagactcacagtttcagcaacaaatagaccagcaagctagtctcttacagaggcagcagcagcagcagacacagttgcaatcatctccgttgcagttattgcaacaaagcttgtcacagagggcatcacagcaaccacaaatgactcaaatgtgtcagcaaaacagctcagagcaacaaccacagttgcagatgctacaaaaattgcagcaacagcagcagcagcagcaacaacaacaacagcaacaactcctttccacttctagcccacttttgcagtctcagcttctacagcagcaaaatactcatcaacaaaaccagcaatttccacagctgcctctatcacagggtcatcagcctcaacagcttggaaacaatgctttctcaatggagaagcttctcaatggaaacaactactctacttcatctctgatgcaaacacagcagctttctgtgaaccaaccccataatacacagaaatcactgactaatactagagctccctctactcttacagatggagatgccccatcatgctcaacttcaccatctactaataattgccagatatctccaaatctgatgaaaagaaatcaacatgtaccggcaacattaggaggaccttcagtacttgaacccaccaatcatctgatgcagggacttcatagcaagtctgagatgcagatcaaacatgaattacctagtgtaagaggaactgatcagctgaagttcaaagggacagttgctgatcagatggaagcttcttctggaacatcttactgtattgatcctaataatatccaccagaacttcccacttcccaacttctgcatggatggggatgtccaatcaaacccaagaaacaatcttccatttgcctctaatcttgatggattaacacctgatacttttctctcaagagggtatgattctcaaaaggatcttcaaaacttgctgtctaattatggtggtgctccaagagacattgaaactgagctgtccactgctgctcttagtccacagccgtttggggtgccaggcattccttttaagcctggatgctcaagtgatattgccatcaatgatcctggggttttgaataatggcttgtgggctaatcagactcaacgaatgcgaacatatactaaggttcaaaaatgtggctctgttggaagatgtattgatgtcacccgttacaaggggtatgatgaactccggcatgatttggctcggatgtttgggattgaagggcagctagaagatcctcaaaggactgagtggaaactagtatatgtcgatcatgaaaatgacattcttcttgttggtgatgacccttgggaagaatttgtaagctgtgtccagagcataaagatattgtcatctgctgaggtacagaaaatgagcttggatggggatttaggtcatgttccagtccccaatcaagcttgtagtggaacagataacggcaatgcatggaggggacagtatgaggataactcggcagcctcatttaatcgataaagatgtcattttggagcagtcaacttgtatattttgagacatggaggactaacttaacccttaaaatttcttgttggtgcttctatatatcactagtggaaaggagacatattcattgcaacttgtaagagatgcagttgatggggtagtgtagaagagggttgatacatggctgcatccggttcaatgtcaacacgtttttaatggtagagaagttagatccctagatgtaccaaaaccagattcctttactaaaatgatgcagattctatcttgggatctgcttttcttgtggctgctattgcatgctcaggaatcttttttctttcattttggcaaggtacagccatataggtcagctggtgtataatatatatgattgttattataaagaaaacgctttacttacaattctgtaaatcttgtggttgttaaaatagttaggtaaccaagtagtgacagtaagaatcaacagtacatgccaattctagcttttgtacaagtgcccacgatgttctcatggtggaaactatggagaagtttattatggatgaaagaaaattcagttctttttcaccattttgcagttttgggt

SEQ ID NO: 5276 - DNA, 930 bp, Glycine max
  Clone ID: PAT_MRT3847_104772C.1
gggatatgatgaactccggcatgatttggctcggatgtttggaattgaaggacagctagaagatcctcaaaggaccgagtggaaactagtatatgtggatcatgaaaatgacattcttcttgttggtgatgacccttgggaagaatttgtaagctgtgtccagagcataaagatattgtcatcttctgaggtacagcaaatgagcttggatggggatttaggtcatgttcctgtcccaaatcaagcttgtagtggaacagataatggcaatgcgtggaggggacagtatgatgataattctgcagcctcatttaatcgataaggatgccaagtattgacattttggagcagtcaacttgtatattttgagacatggagaactaacttaacccttaaaatttcttgttggtgcttttatatatatctctagtggaaagaagacatattcattgcagaacttgcaagagatgcagttgatggggtagtgtagaagagggttgatacatagctgcatcctgtttagtggcaagagagtttagatccctagatgtaccaagatccggctcctttactaaaatgatgcagattgcagattctatcttgggatctgctttttctattggctggtagtgtatgcttaggaattttttcctttctttttggcaaggtacagccatataggtcagctggtgtacaatatatgattgttcttatataaagaaaacgttttactttctcttgtaaatcttgttatggttaaagttgtatacggaagtttggtgtccaagtaatggctcagagcctcagacaatgaagaatgcatgccaattctagctcttgtatagtgcctacgatgttacgacgtttacacggtggccattttggaaaagtttagttcattatggatggaagaaaacaaagtttcttttt

SEQ ID NO: 5277 - DNA, 460 bp, Glycine max
  Clone ID: PAT_MRT3847_104773C.1
tcgcggtcgcgtgggttttaattgttgactgaaattctgtcagtttcagtgttttttccccttttttgtgttctttgtttaatttttccttttatttgcctttttttttaagtttagttttctgtttttgttttcccctgtactgaatgtgccggtgtgtaataatctcagtgcctctttgttataatttgacaaatgaaagggaaggcttaactagatggtatagattgtgctgtaaatgatgtggaatggaaagttaataatatattttttggtaaattctttttgatttttttttgtttttatatttaaacttgtggttattggaaatgagattttgtttgtgtatcactatggtatgtatgtgcactaaatgagatttggttggtgcatctatcattgtagagtttataaaccttgtctcgtcagagtccaatgaagtctcgtacaaagaagaaag

SEQ ID NO: 5278 - DNA, 382 bp, Glycine max
  Clone ID: PAT_MRT3847_104774C.1
gtgttttcttctagatttaacttcttgaacactgacaagtattcgaatactggatacaattgctgatgctgctgttacttgtgacattatacagtgcactttgactgaacacgctctgccaacatggaaacgtcatataccgttactctatccaagttctcttgctactttctcgggcgtgatacaacctatcgcttgtatcatggctcctacaaacgcttctctggacagacttctacctcgtgatgacgtgccatgccgctaattgatacccctctaacatcaacaagtggtacgcagcgccatctttcagatatgtggaaagctgatgatgccctttccttatggcccttttcaatatttgctcagaactgtctggcta

SEQ ID NO: 5279 - DNA, 785 bp, Glycine max
  Clone ID: PAT_MRT3847_104775C.1
ctcaggaattctgtttcttccatccgctatcaaatgacatgaccatatctataaactctaatgatcttgacaaatttttcaagtcaatatccggggatccctcatatgttgattttgaggccaatcctccagtggggaaagatcaaccacctgatctagctgctctagttccatctggcacaattaatttgcctgaccaaccagaaaagcaaccttcatcacaacctacagaaggaaaccatgtttctgtggatgagcccaagattatttcagcaaaagttgtcaagtcatgcgttagtgggaaaaatacaaaggagaaagcagtcaacaaagctcattcgtcaggcaactttgcagatgttgagctatttgtcgaagaaatattgcataaaacatcaagattattgctttcagagatcaaggaagacactataacgcaacatggagagaatttgggaactgtcgtgtctgacaatctacggaaaggcctgagctcagatttggaaaaccttactatgatatttaagaacacagcatacacagaaggatttcatgctggttctcgccatcaacctagacgcttctgaagatcacaatgactcgagattcactgacccgagagtaaaaaagggtccaaaacatcaactctacgctctacttgttcaatgtttcttttatgattctgccatatattgattgaacattcatacaagaaaatgtatggtacttgagatattttgttacaaattatattggtgaaatatctttactctttcaagcgtgcg

SEQ ID NO: 5280 - DNA, 483 bp, Glycine max
  Clone ID: PAT_MRT3847_104776C.1
ttttttttttttttttttttttttttttttttttttttttttttttttttttggggggttttttttttttttttttttttttttgaacagccaaaacctgttccaaaaccctttttaaaaaaattggaacaccctaagggctctaaaaaaaaaatcccccaaaaacgagggctttgtgtgcccaaaagggtccccttttaaaaaaaccctttttatccccttatccacccggttacctcccaaaaaaaaaaaaccccccataacctttaaaccggttttttgggggggtccccctacccaacaatgcggaccaaatttttggggcttttttaacaaaaaaggggaaaaaaagggggttaaaaaaactcccgccatggaagggggggcgtcaaacccccaaaggttaaaagggtttcccggcggcccaaaaattgggttcccccccaacaaaaaccccaatggggactcgcccccgggtttatt

SEQ ID NO: 5281 - DNA, 603 bp, Glycine max
  Clone ID: PAT_MRT3847_104777C.1
gggaagttgagaaacatttgtcccgcttgaactatatcccatcaacactttttctaacggaagtcacatatgtagactttctagacagggtgcatacctcagaggtcaagttgcgttcaaaaggcttgtgggatgttccacacccatggctcaatctttttatacccaaaaccaaaatacaccatttcgcagaggttgtcttcgggaacatcgttaaagaaacaagcaacggccctgtccttatctacccagtaaataaatcaaagtaatgcttgttttcttctttctttctttttttccaccaccaatctttaacataaattaaaattgagtttattaggcatgaaatcattgatgagtctaattatattctaatcagaaattattattattatttttaagatagttacaatgaagggtcaaatatatagtcctctaattaatttataaaaaactaataatttttgttcctcttcacagtaaaaattatctatgattaatagacaaaaatcattatttttttaaattcagaaactaaatttattaaagttaaaatataaatcaatttttaccgaacccttctgtcgtcttctcgcagccgta

SEQ ID NO: 5282 - DNA, 257 bp, Glycine max
  Clone ID: PAT_MRT3847_104778C.1
tcataccctgtgctgctctctctctgtatatatgccgcttcacttctgtcccagcacctcacatgactccatttccattctcaactgctcggtgagtgagtgagagacggaaagtgcaaagccaccgtcttctcttgtcagagcttgcatttgctgatcgatcctctctcctctcatctttctcattcacggattgtcaacgatgggcgatgctgaggatattcaaccccttgtttgtgacaatggaactggaatgg

SEQ ID NO: 5283 - DNA, 180 bp, Glycine max
  Clone ID: PAT_MRT3847_104779C.1
gaattcccggcgacccactcgatttttcctatgcttattggagcctcaaataacaaaacgtgtgtggcagacacatgatgattgatgactacgataacaataatgataaaaccaagatgttgaaggaaagctgtggaggaccggtaaagagtggtgcaaagtatattattaaaggacaaa

SEQ ID NO: 5284 - DNA, 948 bp, Glycine max
  Clone ID: PAT_MRT3847_10477C.1
cggcagactctggggccggaccctctgctcctacaacatcaccggtagtttcacgtgcgtcactggtgattgcatctcctccactgtagaatgtggcggcgccaccgcaccagtcactctggcagagttcactctaaatggcactggcgggctggattacttcgacgtgagcctcgtggacggtttcaacctccccctggtggtggaaccgcggagcgcaataggagccgaaaactgtagggcgactggttgccggaggaacttgaacaaaaagtgtccggtggagctgcaggtgataaaagagggcgagggcgttgtgggttgcaaaagctcgtgcgaggttcatgagccatgcagcaataattccaacttgttttcacactttttaaaaactagatgccctgatgcttatcacaatgcctctttcacttgtgtctctgccgattttaccattactttctgccccgctttctccaagagaaaatttccagctggggtggtggaacgctcatcccactacgtcctcttgctcctgatgaagatcctcatacctattgtgttctcagtttctattttaagttgttgcgcatgcaacatatggtatcgctcaccaaatagagaatgcagaatcaacatgttcttcggaagagctaaagctaaaacccacgatccccaacaaaatactgccaatagtattgttgagatggttgatgggcattagagtatggccaaggttttcttattgcccttacttttcctgaattagtttttggttttacttgttgcctgaattagtttcttgttgcccatctatatttctctcccacatatttcttgttgcccatatattcatggtccatttacgtgtattttttattttttatttgttatattttatattgcttctactttcaattgagaaactcagaatgtaccttgaagcaaaca

SEQ ID NO: 5285 - DNA, 780 bp, Glycine max
  unsure (1)..(780): unsure at all n locations
  Clone ID: PAT_MRT3847_104780C.1
cggaattcccggctcgacccacgcgtccgattgagcaatagatctctcttctctttctttcccgtttctctcttcaaaacactttcgcagtgttttcgatccatcgatctttgtcccattcttttcaacctccactcgtttcccttccctccctcgtgtagcggttcttttcaatttcagttaccgccatatttttcattttttcttatattaatggcctcgttccgacggactctgtcgccggcgtatcccgatcgccagtaccttaacggttcgttttcagtctcctctccgtcgcacaagctcccgtcctcaaacgcaaaatactcctcgccgctgccggagattgcggcggcgtttcgtcgtctcgccggcggagtgttcacgcgccggcacggtcggaaaggccagtggaggcgcgtggcattcaggtgcgtgctttgcttcttcgtagggttcttgctgggcatgttcccgttcggccacgtgtcggaggacgttcgctcgcacgaaatctcgtttgagatgaagccgccgccgctgccgcgcgccgccgcgaacaacgcgcagcagctgctccgggaagaacgcgtgctgcggaatcgcgtggagagagagggtttcgtggtcgatccggtgagtttaagcgccgattgtgagtggcagagcgagaggttcgatttcgcgccgaagaagccgctgattgtggtgacgccgacgtacgagcgcacgtttcaggcgtatttcctgaatcggnctgggcaggtgctgcggctggtg

SEQ ID NO: 5286 - DNA, 1029 bp, Glycine max
  Clone ID: PAT_MRT3847_104781C.1
ctcgtggtcgttgtcgtggtcgcggccgtcactctccatccactgcaccggttgttgttagatatgaggaatctgagcgcggtagtggcagtaaggagaagaattcatcagctgattctgattctgttgaaatgagagtgggaaagttaagtattggcgatgataagccggcagcatcagggttcgatatatgtccccctaaacaagctggaagcgttgttctgaaacctcctttgtttttaaagaacagagaaaagagacagtctagtaatagccgtagcaatgtggtcgtatcattaaggcctgggatggtgtttctgaagggttacctgtcactaagcgatcaggagatgatagtgaaaagatgcagggagttgggggtgggaagtggaggattctaccagcctggttacggggaagacaccaaaatgcatttgaaaatgatgtgcctcggaaagaactgggatcctcagtccggtcaatacggagaccgacgcccatttgacggagcaaagccaccgcaaattcctcccgagttccacagccatgtccacagtgcactcaaggattccaatgccctccttccctccatctcccctgacatctgcattgtcaacttttactcccaaaccggccgtctgggtcttcatcaggacaaggatgaaagtccagatagtcttcgcctaggcttgcccgtcatatccttctccattggagactctgctgacttcctctacgctgaccacagggatctcgaccagcctcaaaaattgctactccagtccggtgatgttttgatctttggtggcccctctagaaatacattccatggcgtcgcctctattcatccaaacactgcccccaacctcttgctccaacatactaatctacgccctggtcgcttgaatcttacctttagacggtactaaattatatatgcctttctatgcattgctacctattttgtaaagtctcttatgtgatacagactaaatcaacaatgctcctaatgctctactaattttgatg

SEQ ID NO: 5287 - DNA, 234 bp, Glycine max
  unsure (1)..(234): unsure at all n locations
  Clone ID: PAT_MRT3847_104782C.1
aggtnatgggctgagtatcgtgtgnaattatgctctggannttntggtcagnatatatatcttgantatggnactatnttgatgcntttgaatcatgtatanggatgtgttccancttctctttgtatgcaccntcgattaatatctcggcctcnatcgcatcagtgtgnctnctgcntttatnntatnataataacgcttctttataaaaaaaananaaaagggnggccnccg

SEQ ID NO: 5288 - DNA, 1615 bp, Glycine max
  unsure (1)..(1615): unsure at all n locations
  Clone ID: PAT_MRT3847_104783C.1
ggtccggnaattcccggngtcgaggcccgtccaaatagaaaattgccagtgagtctgacaaggaaacagcagcgcagcggagtgagcaatgccggagcttccagaggtagaggcggcgaggagggccgttgagtataactgcgtcggaaagaggataacaaagtgcgttgtcgccgatgattctaaggtgatccatggtgtctctccctccgacttccaagcttccgtcctcggcaagctcatcgtcgctgctcaccgtaagggaaagaacatgtggcttcaacttgattctcctccttttccttccttccaattcggtatggctggtgctatatacattaaaggagctgcagtaacaaactataaaaggtctgctgtaaaagacgaggatgagtggccctcaaaatattcaaaaattttcattgagttagatgatggtttggagttgtctttcactgacaaaaggcgatttgctaaagttcgtctgctcaaagatccgacatcagtgcctcccatatccgagcttggtcctgatgcacttttcgaacctatgacacttgagaagtttacggagtctttgcacaagaagaaaactgaaatcaaggctttattacttgatcaaagctttatttcaggtattggaaattgggtggcagatgaagtgttataccaagcaagaattcatccgcggcaggtggcttctagcctgtctaatgaaagctgctcaaatttgagcaagtgcattaaagaggtcattcatttggctgttgaagttggtgccgactgtagccggtttccccccgattggttatttcattctcgtggggggaagccccccgttttcattggtggtgggaaaaaaattgacttcatcacagctggtggcaggacaactgcttacgtgccagagttgcaaaagctaagtggatctctagatgtaaaagaaactggtaagcctaataaaaggcaagcctcaaagaaagtaagggtagatgatgacactgaaaaaccaacaaatggggaagtggacgatttgggaagtgtcaaatcaaagaaggggacaaaggctggagctaaaggtaggaagccttcaaaaaagaaaaagtcagggggaagtgatgaagacaaagatagtagtgatgttggtactgattatgatagtgatcaagttgaaaagaagaatccaggcaacgtggctagtaggaaacaagctgggggagagaagcaatcaaacaggagagttcaaagcaatcaaactagttggagtgctaaaaggaaagctaagtaacaactatggggtttgcatagttttgtcatccactgtgttcacactagaacagaaggatggttatgtgcctgcaactttgtttgctgtttaatatgttgtctttttgatctgttggtcggcttgtgcatgataatttaatttccacatgttaagcagacaaatggaaggcaagagtaggatgccttcaatttttgtgactattgttaatgctcacttttttcttgtgtacacaagccacaaggtattttttatgttatgactcgagatgcaatttcttggacgtccattattaaacagtttatcaatgaaggtcacaacgattttgct

SEQ ID NO: 5289 - DNA, 1165 bp, Glycine max
  Clone ID: PAT_MRT3847_104784C.1
gacagcaataataacaacaaattaacaatcagaattcgaaacagaaccatcgaataataaaaaaggaaaactaaaattccaaaaacgccactttcattcagctaagcttcgtctccaccatcatcatcatcttctttttcttctctacctttggatcctttcactttggcgtgaccgaaccattccactccctcgcaaaacggtgtcgtgtcgatcgcgttcggttcggtcaaactcgcgcgtcccgaatcctccggaacacgctctgtcccaattccctataattcacttctctctctctctcgcttaacctctcctccacggtggctcttccgcattctgccaccgcctccgccgtcgccgataatcactaatcaatagatggatgattcggcgttcaaacgagacggtcactttaaccgaacttactcctgctcttctcagagagatgtccgttacagctgtggcacttgtggttatgagctgaacctgtcctcctcgaaccggaacactgcatccattggatctaaatatgggaagtccataaagcgaggtattatatcattcttcagcattgatcttagcagatttacccaggttgatgaaattcagtgtgtgccccattttgataagcactcatggggtttgtttcgccgaagaaccaagcttctttgtcgcaaatgtggcaaccatattggaaatgcatacaatggttacacttcgtcctttcctcttgtgacagacggagctgaatcatctcctagctccaaagtggtcagtcatacaaaatatgacattcgcatttgtgccctacaaccttcatcttctgaagaatctggaatccctgtgtttgcttgaactacctggtaaaaatagtaattcctacacagccaaatccggtgacagggtggttagaagttcattaatatatgcagatggtttggcttgttttttgtgcttttcctaatgaaaatgtgactaatagtcgtgtgaaagagttgtaagaattaaattaaaaattattacaggtgtgggattttatgaagttgactaaactgtcaaaacttccgaggtaaaatattatattacttggaagaaaaacaaaaactaagggaaaagaaaaaataaaattatttttaaatgaattgttggattagtgtggtaa

SEQ ID NO: 5290 - DNA, 1408 bp, Glycine max
  Clone ID: PAT_MRT3847_104785C.1
tttgtgtagaataggtggtaggctttgaagccgtggcgccagccatggtggagccgaaatgtgaaataccaccctaatggttatggaaaaaaaaagaagaaaaagcgagtattcttttctattaagtagggtttcataatttttcatttcactgtgagcaaacaagatcttcagatccatccatgacaacaacgacaatgcttcttcgtagctcatccacgccgattctcaattctcgcatccctcactcgaatctcaaccccaaggattcgcctcacgaacctgaaatccttcaccggagcccgcggacgcgctcgctcacgctctccgcgtcgttgagttcgctgtcgcctagcagaatgacgcgagcgttgtcggagactgatctttccgcgcgctccaaaacggcgtcgttcggctccgctttgttttccttctacgagtcggacgatggagacgttgcggttgttgaaggaggcggagttggcggcggcggcggtggatgggacaatggtgacggcggaggttcggggttttgggattcgaataacgggaacgatagcacagacttgtattaccggacgatgattgaagccaatccagggaaccctctgtttcttggcaactacgcgaggtacttgaaagaggttcgaggggactatgtgaaagcggaggagtactgttctagagcgatattggcgaatccgaatgatgggaaggtgctatcgatgtatgcagatttgatatgggagagccaaaaggatgcttcgcgtgctgagacttattttgatcaagcggttaaagcagctcctgatgactgttatgttctggcatcttacgctcattttctttgggacgctgaggaagaggaagatgatgaagtgcaagaagattactctgaaatatctcccagtttcttacatggagctgctccaccaccacctcctcctttagctgctgcttcttaagctggttccactggtgtctggcttccatatataactttctaacttttgtttatactgccttaaccttgtaatatttttggccgatgagaacagttgtaatggtttttgtccattgcgtcatcaattgtagattcgtgtagcgatacaggagaataaaagatggcggggacattctccttaatttcgtttttgcattttgtttgatttgtcaaatctttctctactggcatgcttgtattatgtccaagaaaaacgcttgaacagtttttggagctatattattcactcgtgcaagaagattgcagatttggaattttgatattttaggcagctggagttagtggtcgtcgatccaatcaaattgaaagagaaatttggattggttgggtaaaaaaaaaaaaaaaaaaaaaaaaaaaaaagcggccgctctagaggatcca

SEQ ID NO: 5291 - DNA, 154 bp, Glycine max
  Clone ID: PAT_MRT3847_104786C.1
tttttaagctggcaacaatatatttcaagcagcaaggctgcttgacataagggatcaaagtctttttgcagtgctgcatgggctaatagaaatatgaattataaactgctggctatatcttgcaagagcggacagttatatgataaaaagcgcc

SEQ ID NO: 5292 - DNA, 260 bp, Glycine max
  Clone ID: PAT_MRT3847_104787C.1
caaaaaactaaccaactaataattaacattattcaataaaaaaaaaatcagacttagagactgcttactgtttcaaatttcagtaaattgtgtgataatgagttgggatctatttgatagggaaaaggaaaaggtattggaatcttgtcatatctttctctcatggagggaagttattccatttagatgagcatgtaacattttttgccatttttctcacgagtaatttagcaagtatatttgctgttgtattaatggat

SEQ ID NO: 5293 - DNA, 306 bp, Glycine max
  Clone ID: PAT_MRT3847_104788C.1
atgggggttggagattactggtctgatttaatgggaagtgggaatggcaaccaccaacacaacaacaagaacaagaacaagaagcaattacagaccgtggagctgaaggtgatgatggattgtgacggctgtgtgctcaaggttaggaaaactctctcttcattagatggagtagaatcggtggagataaacaggaagcagcagaaagtaacagtaactggttatgtggaaccaaacaaggtcttaaagaaggccaagtcaacagggaaaaaggctgagatttggccttacgtgcctttcaacatg

SEQ ID NO: 5294 - DNA, 266 bp, Glycine max
  Clone ID: PAT_MRT3847_104789C.1
ccgctcgagccgctcgagcggatcgagctcccttcaacaaaacacaggggaagggaaagtagtcagtagtagcagtagtaacgtacgaaacaccatacatgagtttcttgttaccattaccaaccctcttgttgtgtctccttgttgtgttaatttattccctgcaatcaaaggccgatgaatttgatttcgatgagtccttgttcaatgcaaaaaccgcttccagtggcagataacttgccggaagatgcaacttgttccgtggg

SEQ ID NO: 5295 - DNA, 253 bp, Glycine max
  Clone ID: PAT_MRT3847_104790C.1
tcgtacggctgcgagagacgacagaaggggtcatccatttagctccataacttcagcattagggactttcatctgcttcaatggggaaaggaacaaggagtttttgttagagaaagaacaagactcacactttctgtgtgaggggtggccgcacttattttcatatccaaaaaagtcgctgcgccctttgtgctcttcccgccggacgcacttagaaatattactggagcgtcaacgcaactcccagaaagaa

SEQ ID NO: 5296 - DNA, 249 bp, Glycine max
  Clone ID: PAT_MRT3847_104791C.1
aattcgtctcgagaggagaagaggaatattgataagaaggacactgatgaagaaacatactcattattgggaacgggataaaaattgtgcttattcagataatactgaaggtgatgagagtgataagaaaaaggaaaagaacgacacatatgaacaaacatacacattaaaggaaaagggaaaaaatgactaatgccaggatgattaataaaataagaaaaataacaaaaaggataagaaggataaaga

SEQ ID NO: 5297 - DNA, 535 bp, Glycine max
  Clone ID: PAT_MRT3847_104792C.1
ggctcgagtgaaactttaaaataataaatgattgtgatatttgatcatgtgggtatttttactgtttttctttttcttcatcaaaattagagtttcatcttcgtgatcagagctgatttaaaatatttttttttttatttgtgagccatcacgatgaagttttttttattttaattgagacgcacggagattacttaataacatggatgtaagttttgtaatgaaaggaaaaaggcatattatatttgaggaagtaaaatgtaaggttgattcctaaggcgtgttggtttaagtcagagtcagagtgaatgaatgggttttggatcatgtggtcttaatttgattccgacacttatgtgtgtttaaaaatatctagatttagattctgaacatatctctagagattagttgaagtgagaagaaaagaaaccttggaaaaaccaaaacagagaaaaaataaggcaaggttgagtgattctcttttgctttaaattttaatactgctttaatttttttatttgttgattctgatttt

SEQ ID NO: 5298 - DNA, 461 bp, Glycine max
  unsure (1)..(461): unsure at all n locations
  Clone ID: PAT_MRT3847_104793C.1
cttcaagtcaggaggaggtgacccttttgggagctactggaagcccatttgtgtgcagggttcatattgccctcaagttgaaggggagttcaatacaaatatgtcgaagaaaatttgaggacaaagagtgaactgcttctcaaatccaccccattacagaaagttcccnagtgtttattcacaatgagaaccttaccaagttttttggaaattgttaatcatttgtgaactgtggaaacaccccatttctttnntgatcttacagactgggctctgnnctgccaatattgtannanngggttttnngtggctgttgaaaaatccgttacgctgtgaaaaaactggaaaaatttttgggacattacgtctcccgttctgatatagacccgatttgagaagaatgnnggnnnggggggggatntttatcttgcttgtcttctcttntggcccctttgtcaatg

SEQ ID NO: 5299 - DNA, 452 bp, Glycine max
  Clone ID: PAT_MRT3847_104794C.1
gtacggaggagagatctctgacgagggagagatggaaggagacattgacatgtccgccgccgacgatgacgccgccgtcaaggagctcgacgagatgaagcgccgattgaaggaaatggaagaggaagccgcagcgcttcgcgagatgcaagccaaggtcctatgatatatttgatggtgctttttgttttgttttggaatgaatactgttaaacttcagagataaggtttgacttttgtctgattatgatcgcagggtcattcttattactcaggttctataattagcgctgggaatctgggatgcttacattgtattttgtgtgtgggacaatgtaattggtgtttcttagggttgtactagagagaaaaaaagaaagtatattgtgcttatgaaatttattaagatatcacatgaaggaaaacaaagacaaaaagattgaggagaaaaa

SEQ ID NO: 5300 - DNA, 386 bp, Glycine max
  Clone ID: PAT_MRT3847_104795C.1
gttttgtttgttgtctttatctttttgttttgttctttttttcgaatctacttggagctagtttgtcagcaatgaactcgtcaatttggcaggtaaaacgaatccctgaggctattacttagagctcaccccaacccttcctgaaaccttcagacaagaacagagcatgtttagcatgcatggatgagcttatctcctctgaagcaatttatgggtccaaacaggcatggcaaagatgaattaatgtgaacgaggaccctcttggcttatggggatttacagttgtagtccgttgaagggaaagctccagcttttgggtcttatgcattctggcggggtgcccctggctgactaaactcggactaccattcgcaccaaaattaaag

SEQ ID NO: 5301 - DNA, 1091 bp, Glycine max
  Clone ID: PAT_MRT3847_104796C.1
gtggacctctaggaaatatttttatctatcacacgacaatggagtactagtgacaagctgacccttcagctgccaattaatgtaagaacattggccatgaaaggtagcttcacaagataatccatatattgagtacacgagtattcttctgctaaagcatatatttctagcaaaagaaatttggttatatgttttttactaaatccagatgacaggcctgaatatgcatctattcaagcaattctttatggtccttatcttcttgttggccataccattggtggtgattgagacctcaaagctcgggctaaacatgcagattggattaccagttacgatagtcaacaagtttttgttttccaacagtttgaaaaatcaacttttgttttggcaaatttaaaccaaatcactagcaatgctaaaatttcctaaatctggcaccgatttggctcttcaggcaacctttaggcttgtgagcttgtcctaaaagaatcttcctcaaaattttcaacattggcagaagctaatgctagatcagtgatgttagaaccatttgatctggaatggatgtgattcaccagaagcagacagacctcttctcattgtagattcttcccatggtgggccgtctgtttttcttgtggaaccatatctttagaatctcaaagcaaaaacagctgttatgtgtatggtggcatgagctttaatgcaggagtccagctcagttgcaaatctgattctagtttactagcttatacatttaacttaaataaacccttccgaaaaattttggacgaaccctcatcttaaatttctagagccttcattcaaattctaagaaattttaataccagatcttcctactttctagtgaaggactcagagcaattagccagaagattttcattttatgcaactgcagtatcaacatccgtttccatttcataatgcaagacaagttcagagtcactttcctcctcacaaatctcatcatcatcagcttctggcacatagccagcccacttcatctgttctgtgagaaatttcagaacaaaatggatgtccttcttacgagggtgccttttatcttt

SEQ ID NO: 5302 - DNA, 348 bp, Glycine max
  unsure (1)..(348): unsure at all n locations
  Clone ID: PAT_MRT3847_104797C.1
gtgcgtgtctccttttttttttttttttttaggaggtaacacacaagtagataatactaacannttatggggcttggaccctacaacatgcaaggccctggctttatcaacttactccacactgaagagggcatccacaacgagctgtcaacattaacaaggccctgcgtatttgttttaatgacacataagttgtgcaatggccacatacacaggcctttaatgacactgtacatttttactgtgccacctctataactgggactatgtttatctacgctgacttgctagggggaacttgggttatggtggcttgggggcgaacccagttcattgtatttgtagtac

SEQ ID NO: 5303 - DNA, 240 bp, Glycine max
  Clone ID: PAT_MRT3847_104798C.1
tgcgattccgtggtggcgacatccgagccggcaatggcagccgtggccgctgccgacctttctcttagacggtatcctccaactggtgcctggacatcagccgctccgccgctctggcaggatcgcattcaccacctcctcggcgatctcttaggaatcgtcgccgccgtcgctctcggtcgattagtgcgaatctacatgagagtgccggctgtatcgatggaccacgcagaacgtctt

SEQ ID NO: 5304 - DNA, 419 bp, Glycine max
  Clone ID: PAT_MRT3847_104799C.1
attttatgtgtgctggatcagtcctcttggaaatgactattaggaaacctctctctctgtaaaaagacccaccaagccaagttggtcaaggggagaagaatggatgctttaaagaaacacgtatgtaaaaagcgggagcacgtatacacccaactagagagcctatacttagacagttgggccaaaccaaaaatagaaccgctcatgactgatgaatggtgcaatggaatgctgtcagctacttgcaaagctatacactctttcacagacagacatgcattttcaggcgtaatatagggcgcgctatagaaggattcatttctggtacctccaatcagatggagataagggaaataaggtcttggcctgatgcaccagtgctggtttggttgacgcttagagattgatagatgattttt

SEQ ID NO: 5305 - DNA, 1252 bp, Glycine max
  Clone ID: PAT_MRT3847_10479C.1
caccgccgccttctgcgacggtgacacggccgcaggatcggggcccttacgacgccaaaggcgtaaccggtcgagaacatgtctcgactcatttgtaggattcccagtggcagcatcaacaacatggaccaatagccgggtcctcctgaggtgcctcaaaaaattacgaccaagaccctttcctaagtgagcaccttctataagaccaggcaaatctgccaatgtggcttcagatgaatacattcctgcccccaagctgggatcaccaccaaggcgtccaagatttggcattaatgttgtaaaaggataatcagcaatatcgggttttgcaagtgtaatggctgccagaagtgttgatttcccagcatttggaagtccaatcagaccaacgtcagcaacaactcgtaggatcaactccagcttaacttcctccccaggttgaccgtgaattaaaaccttgtccgagtcatctctcatcacattagttgtcagagccatcatctttttccttttatgctgtggcatttctaacaagctaatccctccttgtcctcccctcgcaacaagaacttcatcccaaggttgtgctagatcagccaacatcttccctcgtttgcttttcacaactgtacaggaacaggaatgcgcagagtcggtgcagcaagtccatcgcgaagcatcgaagtcaaaacgcccatggcgtcaacgttgccaccgcgcttagcgtggtagcggcttttgttgtgaaactcgagcaacgtgtctttggactcgtcagcgtagagcaacacgtcaccaccgtggccacccatggggagaatgagggacccgtcgaaatccctcttcaaggagcctttccctttcttcaacttcgtttttccttgctgctcctgctcctgctgctgctgattcagcaccgcgccgtggcctccgtcgccggaacgaacggtgatgatgacgtggtcgaagtatttgtgaggttccttcgccaacgacgttgacagcggagtagacgcgtcggcgctggtgacgccgcaccgtgccgttttccgtttgtagttaacgaagttgcgtcgtgtgtggtggaattggacgctcctatgccttggtgggaggaagaaaggggagaagaagcgagtctcgtgcagcaatagtatgttgaagcttggagagaagaagggatgaatgttgaaagatgaagaaggtggagatgttgaaattagagacaccattatccgaatttcggtacaag

SEQ ID NO: 5306 - DNA, 164 bp, Glycine max
  Clone ID: PAT_MRT3847_1047C.1
acccacacgtcaggaaatcgatatccaacccgtcctagcagaagcctctgtcagaatagtattctctcgatgccagatgaactacatcaatatcatatcaatcacttgccttacagactgacacgtgcattaacaatcagctggtcctggttacatacagcatg

SEQ ID NO: 5307 - DNA, 617 bp, Glycine max
  Clone ID: PAT_MRT3847_104800C.1
acggctgcgagaagacgacagaaggggatgctaagcttgtaaggtttgttgcctgcagcattgaaggattcaatgaattcaacattgttttcgaatatcaggaaacgtttttgcatatttttccatccactgctcatgtctttcgtacatggatgcatcatggagtttgcgggactttacttgggaagtgcaaattgagagaaggagaagtagagctaaaactttcaggtttttgccaatggaaatcatctctttgttagcaattgatgacactacgtactgattaattgttgctagagaaactctattgagtttagtgtttggagctagatgtgtaaattggtatgctcctaaggcaatgtttcgattagtgtatataggattattgtccctttaaggggaattattttaatcttagtcagaatgaaactgtattctgacggatgtcccctgttatggtaaattgctttgttatataagttggatctcttaaaagtcaaaagacgggcaaggtaaagttccaaaatccaattagtcgaataagcctaaataacaaaaaggaaatatatataaaactacaaaagaatctccgcaatactctaataagccttatgtat

SEQ ID NO: 5308 - DNA, 279 bp, Glycine max
  Clone ID: PAT_MRT3847_104801C.1
ggaggaacacactgctggtgacgtggttgctacagaggcgccactccagatgcttcgtcctcgccttctgccgcttcctcgcgtggatcgcggtcgcgctgcagcgcgcgtcctactcgtacgcgccgcctctctcctcgcacatagagatcagggcgaatctcgtcaggttcgacgcgttcgaggtcgctacggacacgcgcggttggatcctcgcagctatcgcgtctcgcacgcgcgatctgggatctcacgtggagcagtgacctctgcgtcgct

SEQ ID NO: 5309 - DNA, 378 bp, Glycine max
  Clone ID: PAT_MRT3847_104802C.1
aactcccacacaggtgtactatctcgctctatcgttaccgaagtagcagcagacacaaatctcctgtcacaactgtgcagtatcggagtttctctcttctggctcgaggacctgtgttgttgacatgtactcaggatggaaacctgtctttcttcaggttccaaaattaatttgccatcgcttgtctttttgaactcttatttttctttcgaggaacaaaggtggggttattttagtgtggctttggagataaaaggttatttaactcttcgatgctcactccaattagctccacgtatacacaaaattcaagcttctttctgtcctcttctttcccttgaaaaaggagaattcataggtatgttgatatcattcttg

SEQ ID NO: 5310 - DNA, 337 bp, Glycine max
  Clone ID: PAT_MRT3847_104803C.1
gggaaacttgtttttttttacaaaactttcaccgatatgatattaagagaagattaatcaaacaaaacaagtttccccagtacattcataaaagattggagtacaaaacaacatagaacataaaccctccccagttcccacaatttataccccaattatgtcaactattatgagaacgttaaagaggaaaagaaaaactcttacaaaaaataataaagaatcaaactgactgcctcaacacttgactgatattgcattgtacttgatcaatgatctcttaatatcatatcggtgaaagttttgtaaaataaaaacttcaaaactcactctctaaact

SEQ ID NO: 5311 - DNA, 573 bp, Glycine max
  Clone ID: PAT_MRT3847_104804C.1
gatagagctatcaaagagatagtgtctagtattgtgcagcgtagtgtttccatagcaacacaaacaaccaaggagcttgttttaaaggactatgccatggaatctgatgagacacgcatattaaatgcggcacacttgatggtcgctagtctggctggaagtttggctcatgttacgtgcaaagaaccattacgggcatcaatatctggccaactgaggacttcacttcagaacttaaatattgctaatgaaattttggagcaagctgtgcaacttgtcaccaatgataatcttgatctaggctgtgcagtcattgaacaggctgctaccgataaggcaataaacaccattgatacagagattggtcaacaactctctttgagaaggaagcatcgagaaggtatgggttctacattttttgatgcaaatttgtatcctcaaggttctatgggtggtggtccagagcctcttcgccccaagcctggtcagttgtccctctcacaacaacgtgtctatgaggactttgttcggcttcgctggcaaaagcagtctagcccgagctcacattctatg

SEQ ID NO: 5312 - DNA, 288 bp, Glycine max
  Clone ID: PAT_MRT3847_104805C.1
tagctctagccgaattcttctctagtacggctgctagaagactacagatgggacactcaaaacacatttaaattgaaaaatgttatatgatacatacaattaatcttaattcacaaaaacttacattacatgcaatttcataaatacttttggtattgcgtatcaatcagaattataggtaccacctagctaattttgtaatctaaattcttgatcgaagaattagaaaacaactcttaaaaattgcgtttaagttttatcataataaaaaagtttgaggaccaggga

SEQ ID NO: 5313 - DNA, 319 bp, Glycine max
  unsure (1)..(319): unsure at all n locations
  Clone ID: PAT_MRT3847_104806C.1
gnnnnannnccnnncncacaactncnnaanncggatcgcnaagacaaggaggtttagggtttntccttcnattcttcagtgtttanagagagagagagagagtaagagagagcaatgagagagatacagttaccgttaagccaaacccagaaggttcgtcttnagaaggctctagaacagttagagtctctgtcaacgaaggtnaatttcgacgcttcggtgatcatngccgattccatcnacgtcaancannanaacngcgtcctcaagggtcacggaaccgccaactcaacggcgaagtcgtcgncaccctctgcgg

SEQ ID NO: 5314 - DNA, 324 bp, Glycine max
  unsure (1)..(324): unsure at all n locations
  Clone ID: PAT_MRT3847_104807C.1
aatcactctctttctaagactctgattgattagaatttatcggaacctaccaaaattgatgatttccaataaattttaactaataactaattcatatagagagtctttgagggagagtgtcaaagagagtgccgctaacattccttgactagactattataactggatttcatactttgtgactgtgncaggaagctcacgtttacacctgcattttactttctgcaatctttagaagcttcctaaaagctagtgatttgcagtcaganttctagcatattggccagagtttttaagtanattantatataccttactaatatc

SEQ ID NO: 5315 - DNA, 204 bp, Glycine max
  Clone ID: PAT_MRT3847_104808C.1
aaagcaaacaaaaggtctatccgagcgtggtagccggggaagggtgcaacggtgaggaggctaaaggagtaagactagtacgtaagaggtcgcatcctgcaagctaatggaagactaccaccagaatcttggaataatgactacgagactcatcagttcactggcgaagagaaggcatagtagatagaaaagtgaaaggaaaat

SEQ ID NO: 5316 - DNA, 1313 bp, Glycine max
  Clone ID: PAT_MRT3847_104809C.1
gaaccatttgaaggaatgcaactcgagccgagggactatgcaagaaaagtggtggaaaataaagcaagagatgaagctggaaagattctgatacgcatgaaagataggttctctactgttttcaatcatgataatgattcactacctagagtttggactgggaaggaagatgtcagagctattacaagggatgctcgctctgcgtcgctgaagcttctatcagatatggctgctatacgcttggatgagaagccagatcgcattgaaagtgcactttattcatctctcatagataaaactagtgctgcaacatcttctcaatatctaactagggaagcttctgtagatccattggcttcaagcacatgggaggaggtttccccagaagatgtgcttatcactccagtgcagtgcaaggctttgtggagacaatttcagggagaaactgagtatacagttactcaagctatttcagctcaggaggcctacaagcggagtaacaattggttacctcctccatgggcaataatggcaatggtcatacttggttttaatgaatttatgttgctactaaaaaatcctctctacctgatgtttatatttgttgcctatctactcggaaaggccatctgggtacaaatggacatagctggagagtttcgacatggcactctgcctggactactatccatttcatcaaagtttcttcccacatttatgaaccttatcaaacgtcttgctgaagaagctcaggggaatcaaacccctcaagaatcacaagggtcagcttctcagacacagatcttcagaaatcaagtgcacaaaccagattcagtatcaacctcaatttccaatgtatcgagtgttggcttgtctgttgatgataacgaatactcaaccacaaacttgtctcagaggcgaagaacaaacgctcccgaagctgaattttcatgacaaaattcatgacaatttgatttgaagacggttggcatcagattagacatgcaccagttagggtgacttcccagatcagttttgtattattactccctatctatattttacatcaatattttacttttcttctttaccgtaacgtgtaaattatctgagtatatgaaggacccctatttgggttctataactacagaacatatctcagtccaatagtgacggaataacaatattataaactagtttcgctttatgatcacatgaaattgacgatcgtcgttgctgaaaattccttggtccaaagaaattgaactagtttgattttttttttaaagtttttttccatcccgttgtttttg

SEQ ID NO: 5317 - DNA, 158 bp, Glycine max
  Clone ID: PAT_MRT3847_10480C.1
ttcggctcgatggcatcactaccccaaatgtctaccacattaggagcttgcatgagctcaaacaagactatcaacccacgaccatgcattgcccaattaaacaacaacaacaacaacaagaggagtactcctttcagcaatttaattgtcaatcacca

SEQ ID NO: 5318 - DNA, 235 bp, Glycine max
  Clone ID: PAT_MRT3847_104810C.1
gttggtttaccaggaccttcttacaggtgatgagcttctttctgacttcttccgttacaaggaaattgagaatggaatgctgcgggaagttgatgggaagtgggttgttaaatgagcaatatatgtagacattggtgcgaacccttctgttgtaggtggaggataacacgatggatttgataatgcatgtgatggggctattgtacttgatgacacattaagatttaccgaacag

SEQ ID NO: 5319 - DNA, 582 bp, Glycine max
  Clone ID: PAT_MRT3847_104811C.1
tgggccactatccatttcatcaaagtttcttcccacagttatgacccttattaaacgtcttcctgaagaagctcaggggaatcaaacccctcaagaatcacaagggtcaacttctcagacacagatcttcagaaatcatgtgcccaaacctgattcagtatcaaactcaatttccaatgtatcaagtgttgggtcgtctgttgatgataacgaatactcaacagcaaacttgtttcatagacgaagaacaaatgctcccgaagctgaattttcatgacaaaattcacgacaatttgatttgaagacggttggcatcaagaatagacatgccccagttagggtgatatcccagatcagttttgtattattactacctatctattttttacttttattctttactgtaacgtgtaaattatctgagtatatgaaggacccctatttgggttctataactacagaacatatctcagtcccaatagtgacggaataacaatattattataaactagttttcctttaaatgttagcaactttaaaaaaatgctttgataatcttaatcatcgctttatgatcacatg

SEQ ID NO: 5320 - DNA, 228 bp, Glycine max
  Clone ID: PAT_MRT3847_104812C.1
ttctgctcgaggtagacatatatgtgtgtggctaaaatagtgtaaattgataatttgtagtatacatcatttattataatgtacgactatgaagaatttgtccattgcaggatatctattaattgttggatgtaatatattttataaacgaactgttatcttatcagattgacttcttgcgtctaagtgttttcctatttttctgactcattcattcacactagatag

SEQ ID NO: 5321 - DNA, 457 bp, Glycine max
  Clone ID: PAT_MRT3847_104813C.1
aaacaaaaaaggggaaaaataaaccaaaaacccccgggggaaaaaggggtaatccccccatttttcccctaaaaaacaaagggggaaaaaaacccccccccgcaaaattttttttcgcaaaaaaaaaaacaaaacccttaacaaaaaaacaacaaaatttcccagcaaaggcaaaaaacccccttccaaaagggcattataaacccccaggcccaatgggggggggtttttccattttttttaaaaaaaccacttcggccccccgggcaaataaaggtaaaaaaaaatatccctacccccatatcaaaaccccggaatacccccccgggccgaaggctaaccaaattggggggggccattgattccagtttctggggggaattggggggcccctaacggggccccaagggaaaaaaccccaggtttttcaggggttaaaaagggggccccccccctt

SEQ ID NO: 5322 - DNA, 623 bp, Glycine max
  Clone ID: PAT_MRT3847_104814C.1
gccggtaccgaaccgcaatttccagccagacccacttgcttctcgcacgttaacaaaactctcactggactggttcaatttatctgtcctcacgctcctcggtctctccgatcgtgtccaatttccagagctttcccccttttttctctaaactctgatttcaatacccgaaacttaaaactacgatattttcctcagctgtcgtttattccctttccgattctccaacgacatcccttcaacttcgtgtttaaactcctacttgctgcgctggtaatatattctttattcttttttttcctcccgtttctagcttgatccctcacacagagctcaaaagttgttccaattccccaagaattcgaacacgagattagttcctagctctctctgttcgagttctttggacctttgattcgttgcgtcgtttccataacactcacgaaatcgtagactctccgcaatgctgctatcgtgacttctgtgattctgtttgatggcgagatcgtggagttcataacatgggaacctgggagaaatagatttgtacagtaaattggctttgaacttggcgactcagcaatagtctgaatttctgtaaaatctgcttgtgtaattattta

SEQ ID NO: 5323 - DNA, 372 bp, Glycine max
  unsure (1)..(372): unsure at all n locations
  Clone ID: PAT_MRT3847_104815C.1
acgacgctgaggacccttctcagctcatctcctccgatcaactttaggcttctgctgcagcctctcctgccagggcggctgccaagaatgcgccggctcatcagaacaanccatctcanctccctaccaagccgcctactccggctcatgctgtgagggatgccagaaacgagccagttcgtggaggccgaggatgttgactatgtgggagacgtggatttggactgtgttcgtggctttagtcgtgactcctcaaatgatgagaactcattccctaccaccatagctccttataatcagggtcctgttgaataatgacatgctggaaagtcttctgaatgactcacctattgtgtaccacgagttccttac

SEQ ID NO: 5324 - DNA, 1859 bp, Glycine max
  Clone ID: PAT_MRT3847_104816C.1
ccacgcgtccggttacatataaaaagctcgagaaacctgttcctgaaaaaagtgagagttgttaattaagatgaaggaggagaatgggatagaggaactgtggagggaagtgagggatttgagtttgggaaacggcggaagagtagagagactagagtctccaccaaccccagttcagttcctgagagacttcatcacaccaaacaagccatgcataatctccaacgccattacgcactggcccgcactctcttcctggaccaacccttcccacctctcccaatccctctccggcgccaccgtctccgtccacctcacccccaccggcgccgccgacgccctcgcccctctccgctcctccctctgcttcgcctccgcgcacgtgcagcgcgtgcccttcccccacgcccttgacctcatctccttttccgagccttccaagctagtcgcttacgcgcagcaacaaaatgattgctttcgctctgaatattcgtctcttgctgatgactgtgaccctcactttggttgggccaccgaagctattggctccgaacccgaagctgtgaacctctggatcggtaatcagcattcccgaacctccttccataaggatcactacgagaatctctacgctgttgtcactggagaaaaacacttcctgttgttgccacctactgatgttcatcgcttgtatattcgtgactaccctgctgccacttactcatattcttcggatacaggagagttcgatctggaacttgagaagccaacaaggtatgtgccttggtgcagtgtggatccttatccttctctggagaccatggataatgagatgaccaagtttcccctgtacttcaatggccctcggccgtttgaatgtactgtgaaggctggcgaggttctctatttgcctagtatgtggttccatcatgttagacagggtgtggatgacggaggattaactattgcagtaaattattggtacgatatgcagttcgacattaagtacgcttatttcaacttcttacaatctattcgatatcgatctgcccctagtgcaatgataagtgataaattgtcattcagaatagattcagattctgatgattatgattctcatttcttctatcagccaaccatatttgatgaattcaagggaatgataataccaaaagtaaagggaacttgatcaaacagtttttggaatgtgagaaagcattattccccaaaacgtgcagctacttgttttgtatatgcatcatatgctatttcgtttccatgctatgctttctttcttctgctggatattctttatcatctgagacagtaaatttgaacctgtgattaggtcactgggcatatggtgttaattaaaattacataactatgttatattcctagttagttgttcattcgttatgctttttggttaatccgttttctctaatgcctactgaactttatgaatgcagtgattgtgatccattttactagtttacttgaataatctcttttaaagatccttgccatgcatactaatcacctttagtgaatgattcaataatagattttctggtttcttttagtgttacaggacttctagttgttgagagaggatcaggggaaccaaactgatgagctattgactctgacacagttcctgcattccatgatttgcacatcattttttataataaaatcagttgcctaatcaattgcttcaatttaatgaaatgagtgaattatagctgataggctaatggttcatggccacagtagcacaaacattaaaattctgcatttgatgcagcaaatgtatttccatgtcctgataaaattacttctggtcaatcatcagg

SEQ ID NO: 5325 - DNA, 341 bp, Glycine max
  Clone ID: PAT_MRT3847_104817C.1
aatcaaatgatcctacagttggattaggagaagcaactgcagtggttcaacacaccactgtgcatcagctacgcttcatcagtgatgatacgatagactgatgcacacgaatcagtatgtacgcagatcactcctagatcttcaatacacattactacggcaatacgtacatctctaactaagctctctgcaacagagatttgaattctgtgcgtgactaatcgaatgatgagtacccatgtcgttcgtcatgtttcagaatgcttcgtcaagccacattgtcccggccaagagtcagaccaaatatgcaacttaacaccttgggatattgctatgctgtc

SEQ ID NO: 5326 - DNA, 756 bp, Glycine max
  unsure (1)..(756): unsure at all n locations
  Clone ID: PAT_MRT3847_104818C.1
cttgctangcaagtttatgagggattgcggcgggaggcttctagtctgatgattcagaggtatttccgcatgcatgttgctaggaaggcatataaagaattgtatagctcggctgtttctattcagactggtatgcgagggatggctgctcgtactgagctacgcttcaggaagcaaactcgtgctgctattgtcattcagagccactgccggaaatacctggctcaacatcattttacaaacttaaagaaggcagcaattgcaacacaatgtgcatggagaggaaaagttgctcggcgagaattacgacagctcaagatggctgcaagagaaactggagctctccaagctgccaaaaataagcttgaaaaacaagttgaagaccttacattgaggttgcagctggaaaaacgcctgaggattgacattgaagaatcaaaaacacaagaaaatgaaaaactacaatctgctttgcaagcgatgcaacttcagtttaaagaaactaagttgttacttaaaaaggagcgtgaggctgcaaaaagagaagctgagagagcgcctttcatacaggaggttcctgttgttgaacttcagtttgtagaacaagttgttagttcaaaaggagcgtgaggctgcaaaaagagaagctgagagagcgcctgtcatacaggaggttcctgttgttgaccatgctttgttggagaagctcactagtgaaaatgagaaactcaagaccttgggtgagtcattggaaaa

SEQ ID NO: 5327 - DNA, 312 bp, Glycine max
  Clone ID: PAT_MRT3847_104819C.1
gaaaacgaggcaaacaatagtaatataacaattaaaaaaatggacagacacatgacatgatatggcatggcatacattgtatacatacataaacgcctaaagccaaaagtgtgttctatgacgagctaggtggcgcggaagtggaggcggcgccgccgccggagagaaggttaaagagagcgctcatggctcgaacctgcatctcaagcgcgggtatgtaatcaatggcttcttccaaaataaccggtaacggttcttttcggcaaccgggaaccaagcgtccgagaaacctcacttttctctgcacacccg

SEQ ID NO: 5328 - DNA, 1130 bp, Glycine max
  unsure (1)..(1130): unsure at all n locations
  Clone ID: PAT_MRT3847_10481C.1
aaaaaaagtatcggatatctcaagagatttgacaggttcatcatcataaccttcaatgaaaagaaatggctgaggcaagcattggcagcaaaagcagcagatggtctttacagggaatgacagctctcgtcaccggtggatccaaaggaatcggatatgctatcgtggaggagttggcacagcttggagccactgtgcacacttgcgctcggaacgaagctgaactcaatgaatccttaaatgaatggaacacaaaaggatacagagtaactggttccgtctgtgacgtggcgtctcgtgcagaaagacaagacctcatagctagagtctccaatgagtttaatggcaaactcaatatccttgtaaacaacgtgggaacaaacgtaccgaaacatacccttgatgttacggaggaagacttctcatttctgataaatacaaatcttgaatctgcttaccacctaagccagcttgcacatcctctcctgaaagcttcagaggctgcaaacatcatttttatatcctccattgctggtgtgctatcaataggtataggatccacttatggtgcaacaaaaggagcaatgaaccaactgactaaaaatttggcatgtgagtgggccaaagacaatatcaaaatagaacccctcttggtgacaagcactttaaagaggaaaaacttaataatagtctgattgcgcgaacccctcttggacggattggagaggcagaggaggtttcttcgttggtggcattcctctgcttacctgcagcatcttacataacaggacaaaccatttgtgttgatggcggcttcaccgtgaacggtctctacataagctaggcttattgtgacagtttcaatgttttgtttagtctgttacactctacttgtattagtttctctttaagttgtggagagtggagaccctatatctgtttttaaggacgtgataataacagtactcagtgataagtttgtttttcttgttttgatttagtcacatgtcccatgattctaggagcagtataatcgtgggcagtttatcctatttcccgttggttgtaaggctttcaataataataataataatagccatgtttgcttttcatttcaacgcaaannctcc

SEQ ID NO: 5329 - DNA, 287 bp, Glycine max
  Clone ID: PAT_MRT3847_104820C.1
tttgagaggtggtttttttttttttttttttgggggacataagaacatgaaagtgagatcaaatgcgtactaacgcaatagaaccagatgactgactaatactgagaaaactagctaacacacagtccgtccttatagctcggcggaaggattttatatcgagagggggcacacgaaggggaggaaatagtgcctaagaacccgttgctaaacaaagatgctgggggtatatcgtgaagataacgaccacttttttaaacggattctcactctggaccgtatcgacc

SEQ ID NO: 5330 - DNA, 449 bp, Glycine max
  unsure (1)..(449): unsure at all n locations
  Clone ID: PAT_MRT3847_104821C.1
tcgttacggctgcgagaagacgacagaaggggcatgcataagcgagctaaaagccacacttaagcgtggtttgtagatcttagtcatatttcaggaaataaggtagttaagcgtaagctccatcacgcttaagcgagagcaaagttgagctttagctgtttcttggatttgaagcttaagcgtaaaagaagctatgcctaagcgtggctgaagttggtttccaaggattgtagcttcagcgtaaaaggatgacacttaagccaggaccactttccaaaactggggcatactggtgttggcgcttaagcatgtctgcacctacgcttaagcgcccttacttcatcaaatcttttcttttctttcagcactacaagcccatatctttgcaaatattctttttaaatccaaatggagcaagccnaannnnnnnnnnnnnnnnnnnnnnnnnn

SEQ ID NO: 5331 - DNA, 480 bp, Glycine max
  Clone ID: PAT_MRT3847_104822C.1
gtggctatccatttactacaatcaatattggctactcaagggcaatcacaatttgagtggaatacgatcggaactattgaaatgccaacattgccggcaaaacaggaaagacagcgtaaactatataattaacgagacccagggagacttgacacatggaacctggaatcttaaaattcatgcgacgcagatgtacaaaatacacagccatgaatagacgacacgcattagccacaatgatgcatggatccccatgagccggttagtcacgaacgggatccatcgctttgcctgacctggcttgtgagattggagacgcataagaggtgaccaagtccgactgtgtgctggaaagcccttggaatatggcctgaatgctttcccaagcatgatgtacgtctacacgagacagaatacaactgttttccgaacatctgtacttgggttaccaaaagcttcgaaatgagcaggccgaaacga

SEQ ID NO: 5332 - DNA, 183 bp, Glycine max
  Clone ID: PAT_MRT3847_104823C.1
gggcagcagaagaacaagtagttgagaactaagaaagagaaacaaatggctttcttaatggatcttttcccaacttgtaccaattgcaaacgtgcccgttcccggattggtggttcattcaattgccttaaattcattgcttgctttcccaacaagaagaaccaccattaccttaccttcatt

SEQ ID NO: 5333 - DNA, 450 bp, Glycine max
  Clone ID: PAT_MRT3847_104824C.1
gtcttattggcaaggttgatttacagcacatcgactagggtgcggcgtcgcagatcaagctcccacacccaccacagtatggctccggcgaggtttcacaatctttacttgaatgagcgcaaccgctacatcataggggtccttaccaatgtcatacaccagcctgtgcgcagcgctactctagccggggtggtgtcacaccttactttgctgtactacatacagaactagcttttcatcaacgacaactgcctctacaccgatcatttcatgtactgctgcaagaatgacacactaacaaccttacacgtgttgaccctgcgatttatcccgcaacagtgccgttatttgaatcagccatcactatttacagatggtgggctattcaacaacgaccttggtgactctttcgttgttgtcacccacaaccctgatcaccacaccctttgg

SEQ ID NO: 5334 - DNA, 477 bp, Glycine max
  Clone ID: PAT_MRT3847_104825C.1
ggaattcggcacgaggtaaaatttgaatctttgaatctaagggacaaccaagggacgcttcccttagtgcgcttcgcggccacatgcgcgctaagcgcgcacgtcataaactctggggagttttcgaaacccccaacccctcagttgcctccaggggggtttttaatttgagaaactctcgtttctcttcttctatgcttcctctttctttacacccttctctctctgcattctcttcttacccacatatctctggtgcctttttcacgtagttttgcagatggatccgctgctcacgactccggaggcctatcgtcagcaggtcgcctggccaggagaccaaccctccactgacagggggggaagggccttctggagccgccgctgaggatcctgcagttgatgaagacctcatggctggcgctgattggggcccatgggcagatttgggaggcggcgcaggacactagttttatt

SEQ ID NO: 5335 - DNA, 110 bp, Glycine max
  unsure (1)..(110): unsure at all n locations
  Clone ID: PAT_MRT3847_104826C.1
actagaaaacagtggtgatgaaaaatgaagntgcctgtgttttcttncgttgctacaatatttggtagncattggcaatngccatgccgtaccctatatgttgtcctctc

SEQ ID NO: 5336 - DNA, 1623 bp, Glycine max
  Clone ID: PAT_MRT3847_104827C.1
cgacccagcgtccgatctctctctacctcaattcaattcatcgctctctccctttcgttttcaccataattgatgcaccactcaattccaaaagcaaaagcaccactctctgctccaaatcttctcatccagcttcgccgagaaaggagtttttggagcaaaatccgtttcccatcttgaatcggtttgagttttcctttttccttttttcttcctgtggctaaatcaggtttcttacagttatgataggagcagcatagagagagagagagagaaatcagatggaggatatatcgaaatacgcgcacagtcctgcacacgtggcagtggcgaggcgcgaccacgccgcgttgcgccgtctcgtatccaccatccctcggctggcgaaagccggcgaggtcaacacagaagccgaatctctcgccgcggagctcaaagccgacgagggttcggcggtgatcgaccggcgcgacgttccgggaagagaaacccctctccacctcgcggtgcgcctcagggaccccgtctccgccgagattctaatgtgcggcggcgccgactggagcctccagaacgagcatggctggagcgcgctccaggaagccgtgtgcacccgagaggaagccatcgccgtcatcatcgcgcgccactaccagcctctggcgtgggcgaaatggtgccgcaggctcccccgcattgtcgcctccgccgcacgaatccgcgacttctacatggagatttctttccatttcgagagctccgtcattcccttcattggtcgcattgcgccttccgacacttaccgcatttggaagcgcggctctaacctccgcgccgacatgacccttgccggattcgacggcttccgcatacagcgttcggaccaaacttttttgttcctcggagagggttatgcctccgagaatgggaatttgaacttcccaccgggttctttgcttgcgcttgctcataaggagaaggaggttacgaatgctttggagggagctggtactcagccgactgaagctgaggttaatcatgaggtttctttgatgtctcagactaatatgtataggcctgggattgatgttactcaggcggagcttgttccgcatttgaattggcggcggcaggagaagaccgagatggtggggaattggaaggctagggtttatgacatgcttcatgtgatggtgagtgtgaagtccaggagggtgcccggggcaatgaccgatgaggagctttttgctgtggatgatggggagagtatggtgaatggagacaacaatgatgatcagtatgatgatgtgttgactgctgaggagaggatgcaactggattccgcgcttcgaatggggaattctgatgctatttgtcaagatgaggagcctggaggagggtttgatgggcatgagaatggttccaatggtggtggggttaaagagaagaaggtatggtttggttggaacaagaaaaacatgaagggtggtgacgagcctgaggatttgaaaaccacgaagaagttttcgggtgatcagcagaagccgcagccgcaatctgagtttgtgaaggaggatcccgcggaaacaaagaaggggaaggataaaaacattagaaggaccc

SEQ ID NO: 5337 - DNA, 466 bp, Glycine max
  Clone ID: PAT_MRT3847_104828C.1
atggacgcttcaggaaactctgttctcaccttgcgccgctccagggtatgtataagtttatcacttttcctatgttaagaattaccgcatttagccaaacaagttgttagactgttagttggacattcaaatccactacctctccatcattcctggcttccaccactagaagtcaaccttatatttccacaagtaattcctcaattatacttataatgtgaagcaagcatttaaaagatgtaggtggtggtctgtgatgtgaaaaaagctgaacaacttaattaattattgaacaagtactaatcatataaacacttgtgtataagttgcttttataataaaaaagaaaatatgattaaactgtttttatataatttataagttgttttcacaagtcatctaaacccacagctaaggatcaaagaaatgatattttgtctgttgagatataaagtgctatctatgg

SEQ ID NO: 5338 - DNA, 511 bp, Glycine max
  Clone ID: PAT_MRT3847_104829C.1
ctcccaatacccttgtgacaggaccagagggatagtaacaactctaggcctagttacatgaacctcaccgagtcaaccaaggcaaagcagaaaaccagcaatcatcagtacaatagatctcagaggcagcagtccatggatgagttccagtttctcaaaagaacagcagttttctttaatgcttttgacccttcaaccaacttttttaggccactttacctaccaacctacatggataagagttcacggtgaaaaagcgacttgattctattgattgatcctctctgttgtatttattttcaagaagttcaaacacttcaacaacttgttgttcaatggtctgttaattgaattacaactgtagcagtagcttttgtgctttccctaagcaatactactttaggggtctctccatttgtataatcagttgttaattttttatgttatcaagagactgcaaggcctaaacaaagtataaaattgaagagtgagacccagcaattagtggggg

SEQ ID NO: 5339 - DNA, 465 bp, Glycine max
  Clone ID: PAT_MRT3847_10482C.1
aattcggctcgagtgcggctgcgagaagacgacagaaggggaaccaataaaacacccaagtctgaatggataaaaaatatattcaatgatagaaggtaaaatacatacttgtgtgacagttctgtagtcatttataggattctcagtggcagcatcaacaacatggaccaatagccgggtcctcctgaggtgcctcaaaaaattacgaccaagaccctgaatgcgaaagacaaaaagccttcatatttagcatctcaatggtttaaaatggggacatttgacaagaacaaaaatatttgatacctttcctaagtgagcaccttctataagaccaggcaaatctgccaatgtggcttcagatgaatacattcctgcccccaagctgggatcaccaccaaggcgtccaagatttggcattaatgttgtaaaaggataatcagcaatatcgggttttgcaagtgtaat

SEQ ID NO: 5340 - DNA, 263 bp, Glycine max
  Clone ID: PAT_MRT3847_104830C.1
gacagcatactggtggcaccgtacttgaaggtagtgacactgaaagctatctgagcaacggcgcgaaccttcagagagtgggttcaggtcgagtaggcttagcgagacggccaggaattagggtgccacgatgctgaagtcgaactttgtcaacgtacttcaaggttatacatcatccagtttgaacaacgcccgcttaaggggtctagtatgacacatggtgcacgcgatgactcaatgcctagggtctatcggtggacatg

SEQ ID NO: 5341 - DNA, 453 bp, Glycine max
  Clone ID: PAT_MRT3847_104831C.1
gcgattccgagtgaggtgactcgggcgagtcacagcggggcagccacggcggcgaagccttggagtttcggtgacccggagtcaaagcggagaaagaggattgcgaagtacaacgtttacgcggttgagggaaaggttaaggccacgctccgggatgggatccgatggatcaagcacacgtgttctcggatcgtccatggatactagtccgacccattgtcatttgggcctgtgcctctggcccaaattgttaacacggcgtcatatttttttttctcctttcaagttttttttaatttggggcttgttttctgtggttatatgcattgggcttgattgtggtatcaaggggcatccatgaaattatactactagcatttagtttttgtgccagaaatttcgaatttgattgaacaccttatttcattaccactatatttcaacatttaaagg

SEQ ID NO: 5342 - DNA, 428 bp, Glycine max
  unsure (1)..(428): unsure at all n locations
  Clone ID: PAT_MRT3847_104832C.1
gaagtaaaaagccttagccttgcctacaactccaaacacaaagacatcatcatccatggatggctacgggtacactgtcggagctgacaacagagctcttttgaacctgaatggtgctggagctggagctacagctcccagggcagccgtgattgggaccacgcttgaacaatgtgattgcctcaagggtccccaacagcaaggtttgcggtggaagctacaagattgctgctgcagaagagaagacagagattgatgagaccccacaggacgactaggacagatgggaggggcttgcctatgatatatcagacgacccacaagacatcacaagaggaaagggtttggaagactccctttttcagctgcacaggatgctggaactcactatgcagncatgagcttctacgagtacctgagtactggac

SEQ ID NO: 5343 - DNA, 365 bp, Glycine max
  unsure (1)..(365): unsure at all n locations
  Clone ID: PAT_MRT3847_104833C.1
tcgagcatatagacccactaaatctgtgtgaggtaggactggccctatgattacgacatgtatggaccttaacggcagacgaggtcacatgcggatgtgtggtacacgtctcagcggcntgtcctctcgagactctggtacgtcatctcaaccatcaagatcgtatttataacatcactactatatcgagccgttgctgcagcacttcgaggttgcctggacgctaaaacaccacgttcgatcaccaactactactgattccacatacaagtgtgatatagaagcgctgattgactgtctatggatacaacaagtgttccttgtggctcatgactggggagccatcataagttggtatgtctgcc

SEQ ID NO: 5344 - DNA, 233 bp, Glycine max
  Clone ID: PAT_MRT3847_104834C.1
aaggtgatattttatttactatatcatcatttagtggatattatcttaccgcagataataaaataaaatgcaaaaaatgaatggtagttcgtttttgaaaacgaccattaagataaacttacttaaataactaatctaaaaggtttagtgttactatgcagcagcatcacctccctagccacgtgtcaatttgcatagccaaagccttaatttaggtcaggtagattttcaag

SEQ ID NO: 5345 - DNA, 1730 bp, Glycine max
  Clone ID: PAT_MRT3847_104835C.1
gttttagtagagaacaggttgcagatgctcgcagggcgtcagtaagtgttgccagagggccacgcgaccgcccacgcgaacgcggacgcgtgggcgagagagcaactgcacgcactggaactctctcaccgattcttccgctttgatggaacagaccacgcgtccgcccacgcgtccgcacgcgcacgcggagcagacccgagagagcaagtgacaagagtgtgaactgcaaaagggcttctccagcctagtttgttctcagatcttcttcttccatggaccagtacgagaaggtggagaagataggcgagggaacatacggcgtcgtttacaaggctcgcgaccgcgccaccaatgagacaatcgctctgaagaagattcgcctcgagcaggaggacgaaggcgttcccagcaccgccattcgcgagatttctcttctcaaagagatgcagcataggaacattgttaggttgcaggatgtagtgcacagtgagaagcgattgtatctggtttttgagtatctggacttggatctaaaaaaacacatggattcatctccagagtttgtgaaagatccgcggcaagtaaagatgttcctttatcaaattctctgtggcattgcttactgtcattcacatagagttcttcatcgagacttgaaaccacagaatttgttgatagatcgccgtactaattcactgaagcttgcagattttggattggctagggcatttggcattcctgtcaggacatttacacatgaggtggtgacattatggtacagagctccagaaatattgcttggatctcgtcattattctacgccagttgatgtttggtcagtgggatgcatatttgcagagatggtaaaccgacgacctactattccctggggactctgagattgatgaattatttaaaatattcagaatcttgggtaccccaaatgaagacacatggcctggagtaacttcattgcctgattttaaatcaacatttcccaaatggccatccaaggacttggcaaatgtggttccaaatcttgatgcagctggtcttaatcttctttctagtatgctttgcttggatcccagcaaaagaattaccgccaggagcgctgtggagcatgaatacttcaaagacattaaatttgtgccctgattccatatcttgatggcaaacgtgtttatagtaatattgtgcagaatttatgggttttgactcttcgagaaatgcgtgttgtcttttgctattttttttgtgacttgggggttgggactgagtcatacttctattttttggtccttatagaatgtttcagattcaacttgagtgattgattatattgcatattactttttctactaaaaaaaaaacccaaatcagttccgcttgacgtcctgtccagcatgccttccttggctcccagcttgtgccctgactgcttggcgccctcgcgggcgtgtcttcttcgtaggcgttgcatttgtgccctgtgtccctatcgcctgggctccgggctcttttctgcatggcttgcggtccggggctttgtccctttcgcgggtcgtccttgcttttttcgtctgtgcgttcgggccgcctcttttcccgtttattggttctgtctcgttgctttgctacgtgcgatcttctgtccgcttgacccggtttgtgcattagtctcgatgcaatgcaactagcaaatttcagtttgcttgacttgtttg

SEQ ID NO: 5346 - DNA, 441 bp, Glycine max
  Clone ID: PAT_MRT3847_104836C.1
gcccaataacgccaaaaattaaaagagtttctttcagcgattctgtcaaactctctacttatgaagatatgccagagacaactactgaggatgcaattgatgacaaaggaacaaagtctgagcagatcatggagctgacttcaagtgttgtgaactctatcaacattgattgcattgaaaaaaatgaaggtgccaagaataaaattggtcatttgggtgaagtgtattcaagtgttgtgagctccaccaacattgattccattgaaaagaatgaaggttccaagaataaaattggtcattcgggtgaagtgtattccagtggtgtgagctccaccaacattgattccattgaaaagaatgaaggtgccaagaataaaattggtcattcagatgaagtgtattcaaggaatggaaccatttctagaaaggatgacaggatca

SEQ ID NO: 5347 - DNA, 550 bp, Glycine max
  Clone ID: PAT_MRT3847_104837C.1
accatataatagatatttacaacacactcacttttcactctcccttcatttagtttatatatagtttcatttcctcttctaaaacaacaatagttcatatagtccatttcacttcactaaggttatttcttagcttgcttccatgggagacaatgttgtagtgtccaatatggagctagagaggttgcttagcatgaaaggaggcaaaggtgagggaagctatgccaacaattcccaagcacaggccatacatgccaagtccatgcatcaccttctcaaagaagccctagatggagttcaacttcaggcccctaacataccttttgtggttgtggatttggggtgttcatgtggaagcaacaccatcaatgtggtggatttgatcatcaagcacatcatcaaacgctatgaagccttgggattagacccacctgagttttcagctttcttctctgaccttcctagcaatgacttcaacaccctctttcagctccttcctcccttggccaactatggagtaagcatggaagagtgccttgctgccaataac

SEQ ID NO: 5348 - DNA, 330 bp, Glycine max
  Clone ID: PAT_MRT3847_104838C.1
atatattacatactaggccacaaaagcaaaaggacactaatcaaccaaaaatatgagactcttacagttctcaggaagtcgcgtcagcatcagggtcaggggcggtagaactcagaaaaagaatccaaaccccaagcagacatagcacactcgaacatggacaacgtcaaaaactagacgaaaaacaataaacttacctaacccaagcgctgggcgaacccattgggagatatctgacgagcgatagggaacggcagaactaatccaagcagcggggggaaaaccaccacgggcactagcacatgtaacatatacaacgacgggttctga

SEQ ID NO: 5349 - DNA, 227 bp, Glycine max
  unsure (1)..(227): unsure at all n locations
  Clone ID: PAT_MRT3847_104839C.1
ttttggtttttttttttttttttttttnaggccagcaaagataatttttttctttttttgaaaaaaggtcccaagaggccttgagatacttatattggggtggcccttatgtggatccaaaacagactaaaatagaggcgggataggaactttatgggttcaccctgccctgaattaaaatgctaatacaaaaagccctagggtgatattcgtaagaccggtggggt

SEQ ID NO: 5350 - DNA, 152 bp, Glycine max
  Clone ID: PAT_MRT3847_10483C.1
tttgttcgctctctccctccaaattcgcgtggatctctacagagtttatttcccaaacgcattcatatttctatgatacagatcgccgcacgattaccataggctcaatcagagtcggtgattgatcctaatctcccaacaggtgaagaaag

SEQ ID NO: 5351 - DNA, 531 bp, Glycine max
  Clone ID: PAT_MRT3847_104840C.1
tctatgcgtccgctaaatatgaaatgtctaattgattgttaaactgattatggttaatattgtcttattactatttattcacaattagtcttgaagcttttgttttgactgctttcaccttgcagttgaaatctcctgtagtttcaagaaagccattgcaacctgataacaagaagcatcctgatgatgatgattcttgttcagttgcttcaatgtatcctcttaaatatgttgcagtgaagagtgtcaaattctcatgtcgagtttttcttattttggcaacggttctacttccttttaaaatatgaaattgcttgtactgcttgaccatgtaaagaactgcagcttctgtgcgatcaatcaagtccaggacaactgttgcttctgctcctgtgcctaggtccagtcaacgtgcagaaaaacggatggagttttatacaagattagaggacaagcatcacgcaatggaagctgcgaagaatcaaagtgaagctcggaccatggaagagatggaggaagctatcaagcagc

SEQ ID NO: 5352 - DNA, 1552 bp, Glycine max
  Clone ID: PAT_MRT3847_104841C.1
gggacttgtccttttcagacctgtctaattcatcccttttctttccatcaaatccaggagctcagctatgactaccagagaatcccttcttttttttttttgcacttcttttcattcctttcttttcttcaaatcaaggaactcagctatgactaccagagaaatccttcaaaagatgaaggtaaaagttggtttgggttcatcagaccctgactcagggaaaggaaagagcaagatgtcaaagaacataactcatggttatcatttggtgaaaggaaaatcatatcatgacatggaggattacgttgtggctcaatttaagcaaatagataacaatgaattgggtttgtttgcaatattcgacggccatgcgggtcagaacgtacctaattacttgcggtcccatttgtttgataatatcttacatgagcctgacttctggaaagaacctgcagatgctgtgaagagagcatacagtaaaactgattctaatattttagatatgtcgggtgaattaggtagagggggtttaactgcagttacagcaatattagtcaattgtcagaagttaatagtagccaacattggggattctagggccgtcttatgcaagaagggtgtggccaagcaactatcagtggatcatgagccaaccgcagaacatgaggatattaaaaatagaggtggttttgtatcaaactttccaggggatgttctttgtgttgatggacggctggcagtgtcaagggcatttggtgacaaaagcttgaagaaacacttgagttcagagccatttgtgactgtggagaatataggtgatgatgcagagtttgttatattagccagtgatggattatggaaggtaatgtcaaatcaagaagcagctaattgtataaaaaaatataaaggatgctcggtcttcagcaaagcgccttactgaagaagcagttaacaggaaaagcaccgatgatatctcctgcatcgttgtgaaatttcagtgatctcaaggctcgcatgatagactttgatccagcaacttgcaagtgtaacataaacttcggtgtaatgaataaaacgataatgcttcatagccatcaggtggtgttattatgttgagtcattcatgcaaattaaatgggacaactgtgttatttaaagtaataatgtgggaaagatgtagattctgattatgcatagaccaaactaatctgtaagttatgcgtgcaaggaagtttggtcaacttccgctgtcagtgatctgcagatcactgcctaggcccataagattttagattaagttattcgattgtattattggccaacactcctacctttgttggataattagagtctagagtgtgtgggaagctttctcacaatttcttgtaatttttcagaacgaacctgggaatgaccttcaacgatatcttttcataaataggaaggagggtgatggctttgcagtaacataaggttatcaatcgttgacaggggcagagaaggaacatgtttgtcacccttttgagctattatacaattttatttactggtt

SEQ ID NO: 5353 - DNA, 699 bp, Glycine max
  Clone ID: PAT_MRT3847_104842C.1
cggacgcgtgggcggacgcgtgggcggacgcgtgggttggcggctgactacgagtcattgctgaagaaagccgatgggtctcaggatgcttttgaagagaagtatggttccagtgtatccgcggaagctaatgatgaagatggatttagagatttagtgcgacatacaatgttcgaaaagggtcagagtaaacgcatatggggtgagctttacaaagtgatagattcttcagacgtggttgtccaggttttagatgcaagggatccacaaggaacaggatgctatcatttagagaagcatttgaaggaaaattgtaagcacaaacacatggtgcttttattgaacaagtgtgatctagttcctgcttgggcaacaaaaggatggcttagagttttgtcaaaagaatttccaactctagcattccatgcaaacattaacaagtccttcggaaaaggttcacttctatcagttctgagacaatttgctcgattgaaacgtgataagcaagcaatatctgttggatttgttggatacccaaatgttgggaagtcatccgtaatcaacacattgcgtacaaagaatgtctgcaaggttgctccaattcctggggaaacaaaagtatggcagtatataaccctaacaaagaggatctttctgattgattgtccaggtgttgtctaccacatcattgattctgaa

SEQ ID NO: 5354 - DNA, 193 bp, Glycine max
  Clone ID: PAT_MRT3847_104843C.1
gccggatatcctctaaggcgagctcgggcaatttaccttgcacactaaggatgatggcgctagtgaccagagtcacatgtttgggtatgccaccgatgaaacccacgagtacatgcccctcagccatgtacttgcaaccaaacttggtgctcgcctcacagaggttaggaagaatggcacctgtgcttggttg

SEQ ID NO: 5355 - DNA, 237 bp, Glycine max
  Clone ID: PAT_MRT3847_104844C.1
caaggggcaggagcaaaagcttctggatgaaattgatcggctttcagcagaactccacgactgtgatgcgaacatacacagacgtaacatcagacattactacattggaatctctcatctctcagtcacgtgaacgcactaatcgttacacagacgagacagactagttacatggggagagacagtccctatggggcaaagagattgaacttactgctgacattgataagctgagag

SEQ ID NO: 5356 - DNA, 489 bp, Glycine max
  unsure (1)..(489): unsure at all n locations
  Clone ID: PAT_MRT3847_104845C.1
ctagtatgcccatccaaatagttattcctctcttaatgaaaagcaattagatnnnaatatttgattttttaagaaattaaaataaaaagagattatttttctatatttcatgtcaatttgaaagaaaagtatttttttaggtcctatgaaagtaagttttcttcttattttttcctttcatataaatggtgaaaaattaatatttcaatcacgccttcctactttactaattcattttgcttcattttaccccaaacaaagaacctaccaaatgtgtatattttcaattttatttatagaagttactttttccttttattttcaattttattcacgccttcctacaaaatgttaatttttcatgtcaattttatttatagaaccatcaacatttaaatttttatttatagaagttaatttttccttttattttcttctcaattaaaaaaaatatttcataagtcgtattttttttatttcctctcctac

SEQ ID NO: 5357 - DNA, 134 bp, Glycine max
  Clone ID: PAT_MRT3847_104846C.1
acgagggccataaccactggtgcggctgcactcagttgtaggaagggttcccgctgttgattatgacccctccattaattccgaaccaaaattatcaaaagggagggaaggggaaacagaatgaccctattaaa

SEQ ID NO: 5358 - DNA, 1782 bp, Glycine max
  Clone ID: PAT_MRT3847_104847C.1
cccacgcgtccggactagttctagatcgcccgcagtttcactgattccatcttcttctgcttcttcactctctcgctctcagagtctcagactacttttctgaaagcatttcaaatggttgatagcaatccttcctctggatcacctgaagaaacacaaaatcccaacccagatgggaatgcacctgttgaaagtgatcttgcattggagaatctagcccaaaaagttcaagaatctctctctctggaaaaaagacacaaattctgggaaacccaacctgttgggcagttcaaggatataggggactccagtttgccagaaggcccgattgaacttccaatccccttatctgaggtcaaacaagaaccatacaaccttcctgaccactatgaatgggttacttgtgacatcaactctgaggagacgtgtgatgaggtatacaaccttcttgctcataattatgttgaggatgatgagaacatgtttcgatttaactactcaaaggaatttctgcgctgggctctgcaacctcctggttatttcaagagttggcatattggtgtccgtgttaaaagttccaaaaagatggttgcctttataacaggtgttcctgctagaatccgagttcatgatgaggttgttcatatggcagagatcaattttctgtgtgtccataaaaagcttcgaacaaagaggcttgctcctgtcatgatcaaagaggtcaccaggagggtgcatctggaaaatatgtggcaggcagcctacactgccggagtagttcttcctacacctatagcaacttgtcaatactggcacagatctttgaatcccaagaagctaattgatgttggtttttctcggcttggtgcacgaatgacaatgagtcgaaccatcaagctttacaagctaccagaatcaacaatcaccccagggtttaggaagatggaaattcatgatgttcctgcagttacaaggctaattaggaattatttgagtcattttgttgttgcacctgattttgatgaaaatgatgtcgagcattggcttcttccaagggatggtgttattgatagttatctggttgaaagtccggaaactcacgaggtcacggacttttgtagtttttacacacttccttcttctatccttggccacctaaattataaaattttgaaagcagcatattcattttataatgtttccacagtaactcctttgcttcagctgataaatgatgctctcattgtcgcaaaacacaaggattatgatgttttcaatgcattagatgtcatgcagaatgagaccttcttgagggaactgaagtttggaccaggtgatgggaaacttcattattatctttacaactaccgaataaggcatgcattgaagccatcagagcttgggcttgtgcttctgtagtctaaattttggaaatttgtcttgctatattgggatttattatggttttgctgtagacattgtatggttgcaaattatgtggtgatccccggttagaccttaaattttgttttacctttcgaacaaacaagttttacatagtcctcgctggcaattctggaatgtcagtaatgccccaaactggtataacttacagattggtaattcctgtttacaaattttggatgatgtccttttaagtttgaatgtttgtcttctaacattctttttctgcaaagtatatgattgtgttcccttttttttgtgtgctgacaatgatgatgccttttaagtatgaatgtatgtaatggtgtatattggttt

SEQ ID NO: 5359 - DNA, 1629 bp, Glycine max
  Clone ID: PAT_MRT3847_104848C.1
ctgaggcagatgattgcataagactggtgtatgttaagagtgaattgttgaggattaccagtcaacaaattgagcatcagtgcaccaggagaggaaaaatgtggaggctaaagataggggatggaggaaaaaacccatacatattcagtacaaacaattttctgggcagggaaacatgggagtttgatcccgagacaagtactattgaggagcgaacccaagttaaagcagcttgtgaaaatttctataaaaatcgcttcaaaactagagcttgtggtgatcgactctggcggtttcagtttctaagggaaaaaaatttcagacaaacaataactagtgtgaagattcaagatgatgaagagattacaaatgagaaaactaccaacacactgaagagggctattcattacttgtcagcactacaaactagtaatggctattggcctgctcaatttagtggtcctctctttccaactgctctatttgtcatgtgtatgtacattacaggacatcttgactctatatttccagaagagtatcgcaaagagattcttcgttacatttattttcaccagaatgaagatggaggttggggactaaatatagatggtcacagcaccatgttttctactacactcaattacatatgcatgcgtattttgggagaaggaccgaatggaggtcataacaatgcttgtgctaaagcaagaaaatggattcatgatcatggtagtgtaacacatataccttcatggggaaaattttggctttcggtacttggtgtagttgattggtgtggaagtaaccctttgcccccagagttttggatccttcctactttttccccaatgcatccagctaaaatgtggtgctattgtcgattgatatatatgcccatgtcttacttatatggaaaaaaatttgtgggttcaataacgccattagtcttaaacttgagagaagaactctttactcaaccttacgatgaagatagttggcagaaagcacgtcacaaatgtgcagaggaagatctttactattctcatccttggatacaagatctaatatggggatagtttgtatttgttcgttgagccactccttacacgttggcctttgaacaagttgatcagagaaaaggcacttcaagtaacaatgaagcatattcattatgaaaatgaaaatagtcgatatttagatatggcgtgcgtggaaaagagtttatgtatgcttgcttgttgggtggaagatccaaatggggatgctttcaagaagcatcttgcacggattccagattatttttgggtttcagaagatggaatgatcgtgcagcccgtaattggtagtcaatcatgggatataggcttcattgttcaagctctacttgctacagatctaattgaggaatttggtcccacacttgcaaaagcacatgacttcatcaagaaatctcagctcacagacaatcctctatgagattgtaagagtatgtatcggcatatttctaaaggagcatggaccttgtctcacagagacgatggatggcaagtttctgattgcactgcagaatggttaaagtggtgtctgcttttatcactgatgccacaagagattgtgggggaaaaaatg

SEQ ID NO: 5360 - DNA, 279 bp, Glycine max
  Clone ID: PAT_MRT3847_104849C.1
cgatcttgggaaaggattcttcggcaatcatcatggaagttctaccaagcttaaatgatttgtgtggaataacaaaaaatataagcgacacaatcttagataaactcaatatcacggtggagtccctttttgaagaaaagcaaaatcggctggaaaagcttcaccatttaggcaaagcactgtctaatctatggaatcttatggacacaccatacagtgagcgacaatctttttcccatgtaatcaatttgttgtacgtctcatctgcagaagtaacag

SEQ ID NO: 5361 - DNA, 503 bp, Glycine max
  Clone ID: PAT_MRT3847_10484C.1
aatgctatggatatttttttttttttttggtttttttttttaaatcttcctcttagaaaagggggcgctaatccttaaaaaaaacctacaagggacctcttatgggggacccttttttttatgtttggtgccccattattcttaagaagggggaaaaccccccccccgtattctttcccctgcaaaatccatgggggagagggggaccctatacattggctttggggggggggcccattggatttttccaacgggaattgggggatttgggggcctctttttcccctatggggccccctggaaaaggaaatgttcctccccgggaccccccacccaagtgaaaaccccttttaggagaacctccccctgagcgggtaactttagaaaagcctttgggcgggactggaaacatccacccccctaaaaaaacctcacccggggggggaaaacccgcctcatgaactctccgcgtataaaggccgtttttttgaaaatggctcttc

SEQ ID NO: 5362 - DNA, 501 bp, Glycine max
  Clone ID: PAT_MRT3847_104850C.1
ggctcgagctttgaagttcacacacacttgttcacccctgaaatggaacacaacctcacaatgaagtgtcgtagaaatgaaaaccttctaaccagtggcactcatttgccagaaagccctcgagtaccaatggagtttctgtcaagatcatggagtgcctcttctcttgaggtctctaaagcccttacacttccaccacctccacctctttcttcttacataccttccaagcctcctaatgcaccctcttctgtgactaactccatttccgaagaaacttcagaggaattctcaaccatgtgtggcaaccagttctcttttgcttcctctgccacctcacaacttgtccttgaccgcataatgtcacagtccgcaagagaggaagtgtctccattaacgtcaggtagattgtctcatagtagtgaacctttgaacggtggtgcttctttaaccggaacggatagtccaccaatttctccttctgacgagtttgacgatgtt

SEQ ID NO: 5363 - DNA, 496 bp, Glycine max
  Clone ID: PAT_MRT3847_104851C.1
ttccaggaaggtttcccgtcatcactgtatgacgtcctccttctttggggggggggggggggggggacaaaaactgaagcatgggggagcaggaaggtataggccgacacgagacgtagaagtcttcgtacacaacctcgacgctaaggcccggtggggaataaccgatagatagaaggggtgtattttgaagcgggtgttagtgggctaaaagtgttagtatgaggaacaaggaaggtatagcggttgtacagagtacaccattggaagtgccgcagtactagatacacgtaaggtagtgattggtacagtagattgccgcgcgggccgaggtaaccattagattgattgtggtaatagttagataggcgcaacttaacgggtagacaaaataacgtaagcatgtgagagcagagccccgccaatattaatttgtacaagccagtattacctttagtgtgggcggtaccggtgttggtgtgattatgattaatta

SEQ ID NO: 5364 - DNA, 1093 bp, Glycine max
  Clone ID: PAT_MRT3847_104852C.1
tctcgagccgattcggctcgagaacaaggttagttgctcctagctcttcctggttctcttcttccttatcccttattatatcctctctgtcgcttgcaatatccaatattccaacaaaacacatggatctagctacactgctgctaactgttctcttcatcgcaagcctcataaatgttttcttttacatacccaccaccaagattagtgcgtggcttcaaactttcttacccaacaataattcttgcaacaaaaccaaaaccaacttggctccttctcctttctccctcttcaccaacgaccaagatggcggagagtggttcccaaaagaagaaggaagagcttagaaaactgttctccacattcgacaaaaacggcgacgggttcataacgaagcaggagctgagggagtccctgaggaacatcggaatcttcatggcagacaaagaggtggatgatattgttgtcaagtacgattccaacagtgacggcttgatcgattttgaagagttttgcttgttgacaagtgagtgtgtaggaggggatcatcatgagaaagagggtggtgttatgggaaatgaagaggttgatttgaaggaggcttttgatgtgtttgataaagacaatgatgggcttatttcggtggaggagttagctttggtgcttacttcgttggggttaagggaagggagaaagattgaagagtgcaaagagatgattaagaaggttgatatggatggagatggcatggtcaattttaacgagttcaagagaatgatgatgaatggaggaaagtttttctttaacgcataatccactacaggttctctttaatttcttcttcaattcagatccgccatcactattaacaccgaaaattcatcactcacttgaaattgtgtgtgtgtatatgaatatgatgcccacatcataatcatgtatacgttttacatggaatgaaatactgttatgaattctgatttagtaagtgtagattcttagttaattttccatgtttctctgtaacatatggctattgttgtgatccattaattctttgtctttttggcaaggaatttattttttttaatta

SEQ ID NO: 5365 - DNA, 453 bp, Glycine max
  Clone ID: PAT_MRT3847_104853C.1
ctagctatctcgatcgaactgtccaaggtcctgtcaccggggctacgcagcctatgcgttaattctcgttcagtccccaagtgtgtgtggtattaaagttatcggttgtatggttcactcagttatgtgttaatcaggttgtcgcattttggttagggttggtcttgttacaaaggatcttaatcgcttccctaaaacgaaaataaacggaaccggttgtccgtgggcgggccaccgagtacgaaatgacgttgtgctgggcgagagcgtagtgcgcaaagtgaagctaaccataaaccggcacgtgcattggtcgtaagggcgtcacgtgcgaaacaagatcgtttagaggggtatacgggagaacccatggcgtcaccatgaactagcggacacgaaaacgtagttaccagaggacccgcaactgaacggggtacatcggataaacaatgg

SEQ ID NO: 5366 - DNA, 162 bp, Glycine max
  Clone ID: PAT_MRT3847_104854C.1
gttgaggactgcttgttagggggcgtagtgaacactatcactgcctgatcataccaccattgaaattgattattatatacgagggaattgatgtctactccactgtgacttgagcaagatttgaggagcgtcatcatggatctcttcaagaaatgagtggag

SEQ ID NO: 5367 - DNA, 310 bp, Glycine max
  Clone ID: PAT_MRT3847_104855C.1
atattgaccaccatgccttcagagcagaattttcccatcagagaaactgcgacatttgagtgaagactaggctttgttttggacctctcattctatttgtttgtcttccaatagccagaagatgcaaacaatgacccgaaactaaccactttccaccagagcagaataaactttttatagtaaataagcttttaaaaagagattactgatttttataataattggtaatcgacaatatacaaatctttacacagtacaaactaattaatctctctttaaaaacttatttactataaaaagtttattctgc

SEQ ID NO: 5368 - DNA, 251 bp, Glycine max
  unsure (1)..(251): unsure at all n locations
  Clone ID: PAT_MRT3847_104856C.1
agacaacacccgacggagctaagctctcgtctcgacccgagcttccangctctcttttctcaccccccacaccccccccgggcagtcatcctcaacccctagcgcagccccccccaccctacactccacccaatcatgatccttgccaaccccaccacccgcaaaacccaaccgacctgccaccacacggactctaagtgaaccaacctgaaccacggatcacactgaaacaaaatcctccaattattgac

SEQ ID NO: 5369 - DNA, 223 bp, Glycine max
  Clone ID: PAT_MRT3847_104857C.1
taggaatgtcggctggaggttttttttttttttttttttttttgtggagctgatggtttaagaagatagctgatactatctggaaatctcttgattacggtcattaacaccaccaccagtttgggttgaagatttgctaatgtagcttaagacgccttcgattattagtatccagtggaatgatcgggcaatcgtgggtcctaatctaaacctgagtggggat

SEQ ID NO: 5370 - DNA, 425 bp, Glycine max
  unsure (1)..(425): unsure at all n locations
  Clone ID: PAT_MRT3847_104858C.1
gggatatgtttacgagtatgtaccacctcacctgggtcttccagtttttgacccttcttcttggaaatatgggtttcatcctcctcggaggcaaggcacttaaggcaataaactcagaatttagtgattctcccttgaggctccaatactacatagtcatcacaggagctgcttatttcttgtattccttcttcattccaacaatatctgcgatgagaaattggttgggagcttcagcggtgctcactttcacatatattatattacttctaattgntttagttaaagatggaaaatcaaggtcgaatagggattatgatttaagtggaaatgaagtgagcaaggttttcaatgcttttggtgccatctccgcgatcatcgttgccaacactagtggcttactccccgagattcagtccactcta

SEQ ID NO: 5371 - DNA, 431 bp, Glycine max
  Clone ID: PAT_MRT3847_104859C.1
ggaactaagtaaatatgttttctatcatttcctttggggaaccaacccaatgtatatgttgtacatgataagattgagcaatagtatgtataacatcaaatttcacctgtccacgactcgtggacacagaaatactctgttaaaaactgcattgtaaaaagaaagaataatttccacaggaaaaaagaaacaaacatgacaaattgattgagttctgatattcagaactagttgtgaaagagacaggcatgtcaaactaatccgaacattatggaattatacaaatgattctttgccatatcaagctcagctttagctctagaaacattcaactttttatgttgactgcaatcaagcattgccactcttgctagatgaagtaagtttgcacctgaatatggtcatcaggaagtaagtcctttcgggacatt

SEQ ID NO: 5372 - DNA, 403 bp, Glycine max
  unsure (1)..(403): unsure at all n locations
  Clone ID: PAT_MRT3847_10485C.1
cattatcattttactcatatttttgtttgaaaacatattatttggcttgaaagatttgtaaattcaaggaaccaataacgtatatatttatatatggatttcatatgcatatttgtgaaatgttttattaaattaatctatagaccaatatatgaaatgtggtacttttgatagtgaccaaaattcaaattactatgagcttcatgtgtgtgtgtgcgtgtgtgtgttgtcatctttatatttataagtacattcagtgagttatcagttctttttgtttatcatggacatacctaattatatattaaaaggactatgaaattgctttaaagttatctattgtccatgattgatttcatatagctaaatataatagctcntacatgtatcaaggtcacaatac

SEQ ID NO: 5373 - DNA, 359 bp, Glycine max
  Clone ID: PAT_MRT3847_104860C.1
gaagccccaaaacaagaatgggtctggtttcaaccgggaaaaatttttttttaccggtgggccccctttttaaacaattattttttgggggaaacaatacttttttttccccctacggacaggacatatgaggggttttttaggggaaaactttccgaacttggggaaacccaggggggggggccccctttttaaaagacttccccccccaaaaattttggggcctacctggaacctcccccaaaagggaaaaaattttttttaatttcctttaggggctagctaaaaaaaagccaaattttttttaaggggtgtttgggggtgggggccccttgccgcaaaaaccacaggggtttttt

SEQ ID NO: 5374 - DNA, 296 bp, Glycine max
  Clone ID: PAT_MRT3847_104861C.1
gaatcggtaaggcatcactagagtggagactagcgatgatgatgacgaatcatggtcgcgcccaccacgcacgcggaagaggattaggctccctgatgaacatatcactgattacgataatgacgaaggtaactaccaggacgtctcgtagccgcctctattctttagaggacgcttgactttgtggataacccgaaagggtttctggaaaaggcagaaggaagatcacgctctcttaatacttcgaggtatacggcctacattttactttgtaagatccctttctttttggaccc

SEQ ID NO: 5375 - DNA, 284 bp, Glycine max
  Clone ID: PAT_MRT3847_104862C.1
tgttcgatttggtatacctacccaaaacaaagcttaaatttctgtttcagaccgcggtgatcaatatgccatctgggtccatccccgacagaatatccgagaaaccaaaggcacagcgtttgagggactggttatctgggactgtagcgtctggtcggctgtgacaagaggcgaggccacatagctcattcttgtccctcgtgacgctgacaaaactacctggcgttacaggctcagagatgagagagtcgtccatgatcacctactccaactcctagatatga

SEQ ID NO: 5376 - DNA, 499 bp, Glycine max
  Clone ID: PAT_MRT3847_104863C.1
actatcgggcaccgtcacttttccagcgatccattgccaccggtgaccccaccatcagcatcattgtccaccgatctacatgatggtggttatggcatctcgattgggcttgcgcctgctcttttgcgcgccagacttggctaaacagcgcacttctcaggcgcgtggcacaccgtcttgggctgcgcttctactgcaggagtcggccctcttgtgcgagcataactcaagagttttgcctcaaatggagcatccttgcggacacaccattggagcttggttctatttacccttctttaattactgtttggtttgcgattttgggcactgtgctgtccatttttttttacgtgttttgcattgtttcaaaaaatttatagtcacctatcctatcgtcgtctcttttcattgtgttttctgctcaccacctttatctcaccactcattttccggcaaagaactttccagtcatctattatgtcattgtccttttccggcg

SEQ ID NO: 5377 - DNA, 451 bp, Glycine max
  Clone ID: PAT_MRT3847_104864C.1
gggaaaaaacttttcatttttcaaattaacgatgggaaaaggggggctacaaaaaaggggggaaaccccccaaccctttttttggggcctttgggaaaaaaaaaaactgcccccccaattaaaaattgttttcctttttgttcaccccaaaaaacttggggtttttttttacaatgggggcaaattaagggcaggggctttttttttttaaaaagggcccaatttttcccaaaatgcccccctgtttgtttttgtagatgggggcccccccctgagggggttttgactcttggccccaagaaaatgccccttgcctaattttgtttgggcatttgaaccttttttttttaaaaaagggctccaagaagacaaaaccaaataagggtttaattaggggggatttttacaaggggaaaagggggaatttttgcccccattcccattggttttt

SEQ ID NO: 5378 - DNA, 572 bp, Glycine max
  Clone ID: PAT_MRT3847_104865C.1
cccacgcgtccggccgcccgacgagccggtcgcgccgcgaggctcaccgccgatctgctcgtgctggccacgctgctggccagcatctggatctacatctcgtggcacttcaactactgggagaagcgcggcgtcaagtacaacaaccccttcagcttcttcggcgaccgcggcgccggcctgcccttcggcaagcccttctggagcctgctcgacccggtgtacaacaagtaccgcggcaaggagcgtttcgtcggcacgttccaggcgcgccagcccgtcctcgtggtcctggaccccgacctggtgaagaccatcctgaccaaggagttcaacgcgttccagggccctggccagcccttcgacgaggagggtgacccgctcagcgccaacctgtttaacctggtcggcccacgatggaagaacctgcgctccaagctcagccccaccttcacctccggcaaactcatgctcatggtcccgctcatgacggacattatcaaaagagcttgacttgccccgggttgaggcaggctttggtcccaaaggaagcccggggccgaagaatttga

SEQ ID NO: 5379 - DNA, 410 bp, Glycine max
  unsure (1)..(410): unsure at all n locations
  Clone ID: PAT_MRT3847_104866C.1
ctcctctcttactctggatactcttgcatcatcgctctggagggcaactccatgggtgaggaggccantttcatgcccgtgtccggaggtttcattctaatggccggacactgggtcgatgagtccctaggcttcatggccggctggaacttcttcttctacgaagctctgctgattcctttcgaaatcacagctctcaacattgtgctgcgatactggagagatgacataccactcgctgctgtctgtgcggccgtcatcgttctatatgctgcttgcaacatcttggctgtaaaagcatacggagaaagagaaattttgctcttttgatgcaaagtcctgctgatacttgattctctactggtttcaccttcgtcaccattgttggaaggtaaaccttaaaaagattc

SEQ ID NO: 5380 - DNA, 442 bp, Glycine max
  Clone ID: PAT_MRT3847_104867C.1
cctatcgtaaatcaactgcaggagttgctgaagagctgtatacatggaggacaagaccagcggatgatatgaggaggtaggtagcagatagtatactattaacctgcacaaacgcctccatggctgcacgtgtaataagaaggctctcaatgccattaatgagatcacgaagtttgctgagaacgccatgagcacaaatgatgcgagagttgatgtgaaactgaacaagcatatatggagcatgggaatcatgagtgtgcccagaagaatcaaagtacgcattgctggcctgagagacgctgatgaagatgccaaggaagagttgtactctgtcgtgacagttgcagaaatcccagcttaaggactgaacggacttgggactaaagtcattgtggaagaggatagatttgtcatctgttctcgagaagaggtggtacgatga

SEQ ID NO: 5381 - DNA, 235 bp, Glycine max
  Clone ID: PAT_MRT3847_104868C.1
cagacatgaactccaatcacagtcacagcaacagcagcaatagcaatacttcatcccggcctacctctgcttccaaacatgatgatgatgttaatgaccgttccagcatgcttggcatgacaatggatgatgatgatgtacagtctttggaatcctatgccatggaactctctggtcctagataaacagttactggggtaacgaatacagctagatagattaaggcgaaagtaag

SEQ ID NO: 5382 - DNA, 330 bp, Glycine max
  Clone ID: PAT_MRT3847_104869C.1
ctgatacgtgacgttctaaacctgtgcaggaccagcgaagcttcagcagtggctcttcgtgttcgagtcgatcatgcggcgatgcacctggttctacattagcgtggtatcaaggctcatgctatgtgcattgtcaccgacaatcctaccgtgagtgcaacatttacggcactgtagacttcatatgtgctgatgctgacgcggttatccataactgcatcattgatgctcttcagactatggcttaacataatatcaccatcacgggcgagaatatgacagacccatactattatacgggtgtctccttgcacaatggtaggatcctac

SEQ ID NO: 5383 - DNA, 596 bp, Glycine max
  Clone ID: PAT_MRT3847_10486C.1
tcggggaaaatgtcgttcattcaacgctgaatttgggtattggatcggaaccctgacaattctagatgattcaacttttaggtgttgtttctgctttgagtgtaaattaaaagttttcacatattattcataggaatgaatgcttgtgttgagggaaataaaagccagttaccaccatggatgatgcagaaggttggtgcctctgccactgccacccatgtgagtgactctgttgaaactaattcctctaccaaaaaaggagacatcattaaagctaatgcaaccaagaaagatactcacaagagtgaaccttcaaacttaagagccaagtgtgaagttaaggaaagaaaaaaattagaccaacaagaaggaaaggttactcaaaagaagagaaaaggtgataagtctaaggatagagatcagagatcttctataaagaaaagaaaaaaattagaggatcctagccacggttgttatgatgttaatccagttagggatgatgccatggacctgacagttgaagatttgatggccatagcagaacagtatgttaaagattatgagaacaaggatcgaaaagaaagatcaagtagaca

SEQ ID NO: 5384 - DNA, 381 bp, Glycine max
  Clone ID: PAT_MRT3847_104870C.1
gtaaacccgttggaaaaccaagacctccggacatgtgatgagcttttttctgactacttccgttacaaggaaatagagaatgaaaagctggggaaaaggcgggggcaaaaggcgccgaacaacgagcagtagatggaaacaatggtgcgaaccttaatgctgatggcgggggaccagataaagagcataagcaaacagcgggaaaggcgggggacatggacgacccttgaaaccgcccgaccccccgcgagttgcaaaacccaagctgtgaaccacaaagaacaggtcctttagaaagtagaaacccaagctctatgcagagccgcaggaggggctcaaaaagcacagcggggggtcaacaaaaaaccggggcggtaaaat

SEQ ID NO: 5385 - DNA, 395 bp, Glycine max
  unsure (1)..(395): unsure at all n locations
  Clone ID: PAT_MRT3847_104871C.1
gggggggggtttttttttttttttttttttcgaaagggttttttggttagtttctaaatccaatagggaacatccctggtccaccgccgcgggggctttccttgtcccaacccctttcaacatatgatgttttggtccaactgctctggctttattgtggggggggtttcggcctcctgtttaagacccttacgttaccacctgcatacattttgttttcttctncgtctgctgtcccctttttctttgtccgccccctacgtggcgcgacgctggccgcccgtatgtccatttggcggctattggttcctcgcccgccnttttttatatgtgcctgcgtgcttggggccccttgggttttcttgcgcctggggccccccaggagcttcctctta

SEQ ID NO: 5386 - DNA, 970 bp, Glycine max
  Clone ID: PAT_MRT3847_104872C.1
gcatcgaagcccgagacaagaaaggattgaagcaacccaggattgaagcgccatcaaccagcatggcagctcatgtggttgatgaggacgttgatattgaacgttatgatggaaatgatatctatgaaactgcaaatacggaaaattataatggagcggcatataaggtgaagggtgcgccacttatgcttcccccagctttgatacctcgtagcaattattcgcagtatgagggtaacgacgagaatgttgatgtggatggttgatgaagaggcagcaggtgcacgtatggtttcatctaattaatattggcaatttctaactttcttttggtggcttgaaggtagttgttgaaaacgtcaatatcttgaacaggagtatttgaaagtagagggtaggattcaagatagtagaacaagaaacagaagacttgcatggatctaatgatacattttattttgatgataaattttatggccttgatatgcatacatgccatatttgtggtggtgcttaagctgattgtctattttctgttggacttgatgtgattgtaaatgtaatcctctgttctctaccatatgcatacatgccatatttgtggtggtgcttaagctgattgtctattttctgttggacttctgtgattataaatgtaatcctctgttgtctaccattataaaaaaaaaaaaaaaaaaaaaaaaaaaaaaaaaaaaaaaaaaaaaaaaaaaaaaaaaaaacaaaaaaaataacaaaaaataaaaaaaaaaataaaaaaaaaaaaaaaaaaataaaaaataagggggggcctttttaaagaattaaagataaaaaaacccgcctacaaacgaaaaatcttttttaaaaaccccccaaattcaatttcacgggccaccgattaaaaaccgctaaaatgaaaaaacctggccctttccaaattaaatttttttaaaaaaaatccccttttccc

SEQ ID NO: 5387 - DNA, 266 bp, Glycine max
  Clone ID: PAT_MRT3847_104873C.1
acgacaaaaacaagtagttgataactaagtttacttgaaatggctaactcaatgatctcctgcccaggtgttaccacctttatccgtgccgactccctcatggttgatccattctaccggacttaaatacatggctggcttcaccacgaggaagaccagcaatgacattccttccatagctagcaacagtcgtagcgtacaatgtatgcatgtgtggacacgactatactagacatagttcaatactctttgctacttgccatacc

SEQ ID NO: 5388 - DNA, 505 bp, Glycine max
  Clone ID: PAT_MRT3847_104874C.1
gctgcgtcaaaccctctcctcgccgtcatcgccgcagcattggccaccatcagtttctccggctacgtgttgcagaatggagtcaaatcaggcagcttcttctatggaagttgagactgtcccatctgaagccaaacttttgccaccaaagccaaagtttgagcctttgaagcctcatgagatgtctgatggtcaggctcgtagagtggagctgaagacaaggcctgatacacctgatattagtaacctgcaaaaatgtgctgattttgtccatgctttcatgctgggttttgatgtcatagatgccattgctcttttgcgtttggatgagctctacatcgagtcttttgagatcaaggatgttaaaactcttcgaggcgatcacttgtctcgtgctattggaaggttatctggtaaaggtggtaaaacaaagttcgcaattgagaatgcatcaaagacaaggattgtgattgctgacaccaaaattcacatatttggatctttt

SEQ ID NO: 5389 - DNA, 460 bp, Glycine max
  Clone ID: PAT_MRT3847_104875C.1
cttaaaaattcaatctttcggtttcgacttcttgcaagtgaaaaaaaaaaaaaggcagtgagtgggttgtggttcggcttggttttatcttagctggttcttttacgagcgtttctgtttaacatttttggagccatgcgctgcaattgttttcttaatgatagagaagtttctttctttctctctctctccccttttattttttattctctgagctggttccacggtagagacgaagaagaagaagaaacaaccaataacggtggttgcactaaaatacacactcttactctatctctctccctttaacgttaccccagttaagttttcttatgtaaaggcacacccttcactagtaccaacaccaacaacaaccttgtcttttttcattttctccttctcgtgttacctttgttgagagtgagtgagtgaaagcatggctatggctgtggctcaacac

SEQ ID NO: 5390 - DNA, 691 bp, Glycine max
  unsure (1)..(691): unsure at all n locations
  Clone ID: PAT_MRT3847_104876C.1
ccacgcgtccgcgcatttccaattccattcattccagatctcaattctcaagcaaacaaagtcggtgatgttcctcagagcggaaaatgttgtcgtttactccgaaggtgtctcctgccacattcttcgatcagtcctagattaaaaattctgtctttcttcttctgtgaccgaaacagcaatgaggcagcacaagcaggtttcctcgcttaaccggcgacccaccgttctttatctgctgtgcgccgctgcattcttctccctcctcctcttctacatccaatcctctttcttctcaggcaccgtctcttcggattcgccaacaaaagataccgtctcttcagaccgcgactccgagacaatccgcgttttgtctaacgttcagtccagtgtgaagcaatgtgtggataacagggggcttggactcactgcacatattattgatcattgcaagttaattcttaaataccctgaaggtaccaacagcacttggtacaatgcacagtttaagaaatttgagcctttggagtacaattatgatttgtgtgagacaatcctattgtgggaacagtatcggaacatgacacgtgtgacagaccacttgatatcttgatgctcgccctggtgggttggatggattatgctccacnaggatagcgcaactggggcaaaggaatgcactaacagactc

SEQ ID NO: 5391 - DNA, 1301 bp, Glycine max
  Clone ID: PAT_MRT3847_104877C.1
atttcagtggttttttaagttttgtcttttctatggtgcagtcttatattgtatacttaggatggcattctcatggcccaaacccttcagcaagtgatcttgagtttgcaacaaatccgcattacaaattattaggctcacacttgggaagccatgagaaggccaaagaagcaatattttattcatacaataaacacagcaatggttttgctgttgtacttgaagaggaacatgcacaagacatagcaaaaaatccaaatgtagtgtctgtgtttctgaacaaagggcatgaattgcaaactactagatcatgggaatttcttgggctagaaagtgatggagtggttcccaaagactccatatgggagaaggcaagatatggtgagggtgtaatcattgctaacatcgatacagttgcagaatggagtcaaatcaggcagcttcttccatggacgttgacactgtcccatctgaagtcaagcttttgccaccaaagccaaaatttgagcctttgaagcctcatgagatgtctgatggtcaggttcagttccgcaaggtgaatgttccacctcatcgatatacccctctcaagaaagcttggatggatatctatactcccatatatgaacagatgaaaattgatgttcgtatgaatttgaagggtcgtagaattgagctgaaaacaaggcctgatacccctgatattagtaacctgcaaaaatgtgctgattttgcccatgctttcatgctgggttttgatgtcatagatgccattgctcttttgcgtttggatgagctctacattgagtcctttgagatcaaggatgttaaaacacttcgaggcgatcacttgtctcgtgctattggaaggttatctggtaaaggtggtaaaacaaagttcgccattgagaatgcatcaaagacaaggattgtgattgctgacaccaaaattcacatattgggatctttttccaacataaagattgccagagactctctctgtagcctgatcctgggatctccggcaggaaaggtgtattcaaaactaagagcagttactgccagattggcagaaaggttttgatcttctcctaatcataaacatgatcattttttgttcccatagagttttctataatttctcttagatcaagcatgatgaggataagttattgtgaagaagttgcttcggcaattcagctatttgttaagttcaaacctaagttgtgggtgtaagagcatctctgtaaaagtgaagttttgcctgtgaccttggacattacgtcattatagattagagt

SEQ ID NO: 5392 - DNA, 643 bp, Glycine max
  Clone ID: PAT_MRT3847_104878C.1
caatatttggcagtaggtgaaaacgcgattctcctggttcagaacgcgcatttccagagctcaattctcaagcaaacaaagtcggtgatgttgatcagagcggaaaacgtcgtcgtttgagagaaactgaacttcgaaggtgacaccctgccacattttcgaccaatcctagattaaaaattgtctctctctcttttttttttttttttctctctttctgtctgtgacggaaacagcaatgaggcagcacaagcaagtgtcctccattaaccggcgacccaccgttctttatctggtgtgcgtcgcagcattgttttccctcctcctcttctacacccaatcctctttcttctcaggcgccgtgtcttcagattcttcaaggatagatgccgtctcttcagatcgcgattccgaaacaatccacgttttgtctaactttcagtccagtgtgaagcaatgtgtggataacagggggcttggactcactgcacatgttattgaccattgcaaattaatccttaaataccctgaaggtaccaacagcacttggtacaatgcacagtttaagaaatttgagcctttggagtacaattatgatttgtgtgagacaatcctattgtgggaacagtatcgcaacatgact

SEQ ID NO: 5393 - DNA, 1066 bp, Glycine max
  Clone ID: PAT_MRT3847_104879C.1
acggctcggaagacgacagaagggggagagtgaaactgcgtcaaaccctctcctcgccgtcatcgccgcagcattggccaccatcagtttctccggctacgtgttgcagaatggagtcaaatcaggcagcttcttctatggaagttgagactgtcccatctgaagccaaacttttgccaccaaagccaaagtttgagcctttgaagcctcatgagatgtctgatggtcaggtacagttccgcaaggtgaatgttccacctcatcgttatacccctctcaagaaagcttggatggacatctatactcccatatatgaacagatgaaaattgatgttcgtatgaatttgaaggctcgtagagtggagctgaagacaaggcctgatacacctgatattagtaacctgcaaaaatgtgctgattttgtccatgctttcatgctgggttttgatgtcatagatgccattgctcttttgcgtttggatgagctctacatcgagtcctttgagatcaaggatgttaaaactcttcgaggcgatcacttgtctcgtgctattggaaggttatctggtaaaggtggtaaaacaaagttcgcaattgagaatgcatcaaagacaaggattgtgattgctgacaccaaaattcacatattgggatcttttgccaacataaagattgccagggactctctctgtagcctgatcctgggatcacccgcaggaaaggtgtattcaaaacttagagcagttactgccagattggcagaaaggttttgatcttcttctaatcaattacaaaacaggatcatttttctgttcccatagagttctctataatttctcttagatcaagtatgatgtggatgaggtattgtgaggaagttgcttcggttcattcaattcagctatttgttaagttcaaaccaaagttgtgggtgtaagagcatctctgtaaaagtgaagttttgcctgtgaacttgaatacattacattagtatagattagagtaatttatgactgttatgctctaatctatatatacaagcaattaacatgaactgtactcactt

SEQ ID NO: 5394 - DNA, 577 bp, Glycine max
  Clone ID: PAT_MRT3847_10487C.1
ctgtgcggcgctcaggcggcgggtggactgagcagccacccacccacccttcagcgaagagatggaggcacaatcttgtgatgctaggccacatttgaaggccacatttcgtcttggctcagaatcatattctgttcaggcaaacaaaggttccttatcagaacaattggtttcactgaaagaggagagcatgaccatattgaaggatttcataacaaagcataatgttcctcatgatgtcccagacgagccattagaagcttcttcagatgatgatgatattcccgagaagcctcaagggaagtctaagaaaaccaagttgacttagctttgacatgtggtttgatcggtctgaatcatttgatgtatgtattgtatgattgaacttttagttagtttattgaaaaatttacgaaagtagcagtttggtgacaaactacaacacataccaagttttagctttatggaagtaagattgtgtttcgccgttcatgtattttcagctgttcttttccgtctgtatggttctttttgcagccaaagtattgtttgtttgggaccttcaacggttctaact

SEQ ID NO: 5395 - DNA, 202 bp, Glycine max
  Clone ID: PAT_MRT3847_104880C.1
acgagattatatccctttcttgttcgaaataggaaagagtgtgttccataatttaaagttctagggaggaacaaagttcaaatagctagctaggttctctccctatttcttttttaattgtaatctattccatcacacgtgcgcatgcgcatgcgaatagagaaagaactgatgttttatgccgcaattgcgagtggcgcgt

SEQ ID NO: 5396 - DNA, 1027 bp, Glycine max
  Clone ID: PAT_MRT3847_104881C.1
ctctcactctcgactcgtcttctcgcgccgccgccgccgccgccaccgcacaccgcttccatcggcgccatcgtaaccgtctctttcttcacttgcagaatggagtcaaatcaggcagcttcttccatggaagttgagactgtcccatctgaagccaaacttttgccaccaaagccaaagtttgagcctttgaagcctcatgagatgtctgatggtcaggtacagttccgcaaggtgaatgttccacctcatcgttatacccctctcaagaaagcttggatggatatctatagtcccatatatgaacagatgaaaattgatgtccgtatgaatttgaaggctcgtagagtggagctgaagacaaggcctgatacacctgatattagtaacctgcaaaaatgtgctgattttgtccatgctttcatgttgggttttgatgtcatagatgccattgctcttctgcgtttggatgagctctacattgagtcctttgagatcaaggatgttaaaacacttcgaggagatcacttgtctcgtgctattggaaggttgtctggtaagggtggtaaaacaaagtttgcaattgagaatgcgtcgaagacaagaatcgtgattgctgacaccaaaattcacatattgggatcttttgccaacataaagattgccagagattctctttgtagcctgattctaggatcaccagcaggaaaggtgtattcaaaactaagggcagttactgctagattggcagaaaggttttgatcttcgcataatcatgccattacaagatcattttttttgttcgcataggttttttaatgatttctgcgagatcaagtatgatgaggatgagttcttgtgggaagttgcttcaagttcaaatcaatgttgtgagtgtaagcatagatgtgtaagtgaagttttgctcgtgaacatgaatacattagtgtagattagagttatttatgaatatttcctgtttgattgttaaaaaaaaaaaaaaaaaaaaaaaaattcctgcggctgc

SEQ ID NO: 5397 - DNA, 846 bp, Glycine max
  unsure (1)..(846): unsure at all n locations
  Clone ID: PAT_MRT3847_104882C.1
ccacgcgtccggcttccctttcctctttcaaaattgtcaatcttttgcttccaccaacacacccttctactatttctaccctcctttcattcctttcacttcttacttaccacccatgtttcacaagctctccttttctaagaggatataacaagcaaaggctagaagagtgtgaaattggttttggctgtgaagcttgtcacatttgacaagtgtgttgtactgttgtcgtttgtacactttctggtgtgagaggagtaagccagcacttatcaacaacaaagccaacatgccagtgaggcagatgaaagaaagttcggagcaacaccttgtgatcaaaccacatttgcagaatcctatgaatcaagccaagaagacaaccaaagctgcacaaaatggcaaaggtccaccgccacaagaaaaccataaccaaacttcgccacactcaaagaacaagggaaggagaagagggagaggtggcagaaaacctgatcaaggagatgttatgatgaggcctagttgcaggccatgcactgcaacactaacaagtactgcaaatgagaatgctgaaaatggttgcatctctgatatgggttttcccacttcaagcaagtctttgacctttgctcctaggcctggatatggacaagttgggacaaaatgcattgtgaaggctaaccacttctttgcagagttaccagacaaggacttgaaccaatatgatgttactattaccccagaagtgtcttctagaacagtanacaggtctatcatagcagaactagtgaggctgtataaagagtctgactttgggatgagactttcagcatatgatggcagaaaaag

SEQ ID NO: 5398 - DNA, 514 bp, Glycine max
  Clone ID: PAT_MRT3847_104883C.1
aattcaagaaaagctttccaaaggaatctaacttgagagctaaaaagttgttggaactcatacatacagatggtggtccgatcaagacaagctcacttgataagagtaatcattttttctcttcattgatgatttttcaagaaaaacatgggtgtatttttttaagcataaattagaggtgtttgagaatttcaaaaagttcaaagccattgttgagaaagaaagtggttttaaaattaaagccatgagatccgatcgtggaggagaattctaatcaaatgagtttcaaaagtattgtgatgatcatggaattcgacgacccttaatggtgttgagatccccccaacaaaatggagtggcagaaaggaagaatagaacaatcctaaacatggcaaggagcatgcttaagagcaagagacacacccaaaggagttttgggcaaaagcagaaacttgtgtagtttatccttccacccggtctccaacaagaaatgtatggggaaaaacaccccaca

SEQ ID NO: 5399 - DNA, 531 bp, Glycine max
  Clone ID: PAT_MRT3847_104884C.1
ggctcgaggttaggcatgtatttttactctagtgcttgtagatccagtgacagtgaagcaattattacttaagtttcaaaacccctctttcgattttatattcttttgcttaggggagaaaaaaaggaattgtgtcaaaattcaaaatgctagtacttatgtatcaaatcctgttctgacttagggttgggacttcaaaattgatttcagttatacgagcatatcttaggcttgtatttttacactggtgcttgtaaatccagtgacaatgaagcaatactccttcttgttgctttctgatgattgttttgctatgataggttgttgctttgtttactacttgcatttttaatattcatattccttcgttactaaacaagattttgtttcagctcttgaaacactacaggatgatgttgatgcacgcataactctagcttcgcttctgcttgacgaggcaaaagaagatgaagcaatttccttgctgtctcctcaaaggattctgattttggtgaacaccttttgaaagtc

SEQ ID NO: 5400 - DNA, 315 bp, Glycine max
  Clone ID: PAT_MRT3847_104885C.1
tgatatataataataccaaaacagcaggagaaagaagggctcccgggacaatctctaatggcactaaggatgtggcctctttcaactgccatgccattaaacttttttctggcttcaaaacttatctcttggcctcctttttctttctccaaatgctaatcttccgtttggattggactaaagtcccctattcacatgaatgggtcaagcaacaaaggttcagtcgccaccattggaataactgacattgccaagaacatttttgacaagttgggtatgttgagctgcccagaaccagttggcccagtttcacaa

SEQ ID NO: 5401 - DNA, 429 bp, Glycine max
  Clone ID: PAT_MRT3847_104886C.1
ctgcttggggggggggggggggggggggggggggggggggggggggggggggggcataggttaatgaaaagtcccccgccgaaggaggggggaaaagtacccggaaaagaattggcgagaggttaccgataaaaaatcatctggatcaacaagcccaaaagggcataaggtgccaagtgtgctggaatggctccacccaagcttcggtggtgcaattttagtagcccaatgggcatgagattgaggagcaagtgtgggcgaatgcgaaattggctttagtgatgggcaaggggggcggaaaattggataggctggagttataaggcaaaagcgtaagcgtggactctatagagttttggcggaaatatttagggggcgcctgttggccaattgtgaagcataaggccggggttgctagatttggaaaaa

SEQ ID NO: 5402 - DNA, 220 bp, Glycine max
  unsure (1)..(220): unsure at all n locations
  Clone ID: PAT_MRT3847_104887C.1
acgtnagctcgganttcggctcgagngcgaacnttnggngtcaaanttgttntttacgntgcttttncttttcttttcnctctctaaccggcntgtnctataggcacttcaggntcctaagangtncttngtaanttggttaanaggttttttcntaatntcttgtntcnttngctactgatttgattgatttgaantnnggncctatcanattnttttt

SEQ ID NO: 5403 - DNA, 638 bp, Glycine max
  unsure (1)..(638): unsure at all n locations
  Clone ID: PAT_MRT3847_104888C.1
ccacgcgtccggaccctatacgtggctcaaaccaaaccatagcctctgcttgctgacatatcctctaacataaaaggcggaacgagtacttatgatgacactactgaagccgtagcacacatcaggatagcccgtgggagtgcccagcgaccacaacattgaaagcgcgccaactcaggagaaaacgatgtgaatgaagagcgaaagttccgaatcttacgataaggaagtttccttctcttaacccacacccttttcgtcaatgagtgtgtcggcaaggctttccaggttggttcaaaccgtaacccttgtttgttccaggggtatacgttttatccagggagcatagcgactgataagtcgattaaagttctccttaatcgaaccaaccagccccaccacctcgtcaatattatcgggtggggatattatactagaaaacgttgatttatcaaccttctttgccaaagtaatgatctttgacagagagaatcttttttaataaaacttcaccagcatgtccgctttctcatccttcttcaaaatcatacgcctataccaagcgaaaataacatcacattntcatgaaattgggtattttttaactttttttacttggatgagcaattatacttcta

SEQ ID NO: 5404 - DNA, 529 bp, Glycine max
  Clone ID: PAT_MRT3847_104889C.1
tcttcctaaaaaaaataaaaattttaacggggggggggggaaaaaaaaaaaaaaaaaaatataactacataaaaatattcctccaataaaataaaacccatacttaccatcccttcctatcaaaaaaatacacttttttatttccccacttaaatccacttaattcacctttcttctcctactatcacatcttaaaaacccattctctatcccttttttattcccttgcattatttacccttttttccttacttcccttttacacaattccctctccctactttcctctctatcatttaatcatctcacatgaatactttaacactccctacctcctcccctttcacacagttgttaccccttttacatcctatttaacctctcctttatccttttccctaacaccaaatcatttcctttctttctctaccttccccgcttcctttcccgtttttcccactccatctctattttatagtctccctttatttctccaacttaaccctttttttcccccttaccccctaaa

SEQ ID NO: 5405 - DNA, 350 bp, Glycine max
  Clone ID: PAT_MRT3847_10488C.1
ctcgagccgctcgagccgctcgagcggctcgagttgacttacagggtaaagacaattaccttcagaagctgtcgtcgtaaatgttacatgtggtagtggacgtggtggtttacccaccactgcttggattagttctgcagctaacaatcgttcctcagatatcaacaaaaagattcgcacagcacttgtgaaaggtaagaaaattgatatgcttactagagatgatccttttacagtagctctactggctgttctttttggcgttctgaatgaaattctgagttctaatgccactaacgctatgctgacgcgactatttgagaactgtaagagtctcaaatatctggttg

SEQ ID NO: 5406 - DNA, 354 bp, Glycine max
  unsure (1)..(354): unsure at all n locations
  Clone ID: PAT_MRT3847_104890C.1
antantaactcngancangntcgaaacaagccaagcgacgnnaagnatntngnnantgntcngacacncttattngngnagtaatgtnaaatgntaaagatngtgngataagggtngtagtatgnttgaatgtggagntagatgacgnanattgttgntntgaagaancggangtanagntgaagnagacnaatgnaagnccagnntgggacnnngannnttngagttanagtagaacattnagaagatggatacggntatatnnatatgtntgganannttattacnaanggcatnggtnngaatggnnttgacnnagntngntactactnnatcaggtaagtntnataaann

SEQ ID NO: 5407 - DNA, 341 bp, Glycine max
  Clone ID: PAT_MRT3847_104891C.1
gacggcgacagcgaaagaaattaggagaggtgaggtgaccaccgacgattccatttctacgaactcagacccttcaattccaactcgtaccttatttctatctatttctttttcatgtttcattatttttctcaattttcttttgttccgcctttgatctgattcctagttattagggcttatatcgtgtatttggggttttcattttgtgtatgcactctgcaaatcgttcgtgtatttcttctgtttgattcgtctttatggaatatcattttttcaaatgcatataactagggcagattaattaccggtgtaattgatatattatgttttcagacttt

SEQ ID NO: 5408 - DNA, 273 bp, Glycine max
  Clone ID: PAT_MRT3847_104892C.1
ggctcgagcggcttggggcttgtttgttacatatgaacactccttacatggctgctttaggcacaagggtggctctacttgtttgtctcatcattggcaactaatttaagtacatctaaaggggtaaaaagctggatgctcttcttcgggcactctttaacgctgtatagctccaggttattgttagccttgctcatcttctctctttgacactcttattatccagctccaggctcgacttagactggcctcgcatgatatatctctaccttc

SEQ ID NO: 5409 - DNA, 1184 bp, Glycine max
  Clone ID: PAT_MRT3847_104893C.1
gcgagagtcgcgacaaaagttacaatagactcggttgcagttcttcctaaggtgcacccagctgcacacgatcctccctccttcgctctctacttcgttcgtccttctccaccctctcctcttctctgtttctgctctgttccactcgcgactcagagatcaaccacagctcgcttaaccgactctccgaactcttcgttgtaaccgaaatccggtgcacctatagagatccgaatgagggatccgaatctggagttgcaggaatcgggttgggaggagctgcgcaaggaagcgcgcaagatcgagggcgatctcgacgtcaagctctcctcctacgccaaactcggcgctcgcttcacccaaggaggttcaggttatgtagatagtggttcaccacctattgggtccagtaggtcttggaagtccatggaaatggaaatccagtctttactcgagaaactgttggacataaatgattcaatgagtagatggcgttcgcttgacccaaggaggtttaggttaactcaaaagttggctaggcacagagacattcttcatgagtttacccaggaatttagacgtatcaaggggaacataaactcaatgagggaacatgcagagcttttgagttctgtcagggatgatattactgactttaagacatcaggcagtatgtcaccaaggatgcagttactacgtgagagagctgccatccatggaagtatatctcatatagatgatgtgattagtcaagctcaagcaacaagagctgtgttgggttctcagagaacattgtttactgatgttcaaggaaaagtgaaggttcttggtgacaagttccccatgattcgtagcctgcttggttcaataagaaggcggcgctcaagggatactcttattctgtcagcagtaattgctgcttgtacgttgtttctcatcatttattggctctcaaagtaactattttgtaacacaaattatgaattatggtacttctgttcattgaatttttctgcttctgttatttttttccttttgttttttagagagggggaagagtaggatttttttttttcaatccactgtagaagcttcatatttgtatgtcagttgggcattaaatatttttatttgactaagattttgatataaatcattatcaaatagcaaaattccacattaaa

SEQ ID NO: 5410 - DNA, 225 bp, Glycine max
  Clone ID: PAT_MRT3847_104894C.1
acgacagatattcaacatggctctctctacatttgaaagaatggcctcagtctcgaaaaggattaccctgaccgaggcgactagggtaaacgtgactcacataacaaaaatgctatcgctactattgatggccacggatgggatcctactcaacttgaggaatcctcgaaacaaggcattgcaaatcatccagtggccgtacctatttctatagacgactatgaa

SEQ ID NO: 5411 - DNA, 201 bp, Glycine max
  Clone ID: PAT_MRT3847_104895C.1
cactatttgattaaatggtccatttgataatgtccttgattaaaattaaagatttgttattataatagagattatgataatgagaaacaagtttggtctaattttaatctaaaccattcttgatcataggattatagtaaataggatatcaatgatccgaatagattaatatatatgtgatagtatttattggataaatat

SEQ ID NO: 5412 - DNA, 565 bp, Glycine max
  Clone ID: PAT_MRT3847_104896C.1
ctcacacctacccggacttgtataataatctttgtgctgtacttcttttttctttttttttttaatttccgttgctctttttgtgtcgtacgtgtcttttaatttttgctttatcctaaaccaggtagtgaaaatccgtatgcttaatgaagaacaaaaactgtgttcttattcaaacattttaataaaaaaatattatgctattattaaattattattaggatcatgacagaggttgattttttattgacattcggccacttgatgtctatctaatcaacaccacatttgctgggctctggtggatttggtcatcacgaacaaaaacaaaaaaagatgaattaagtgaaagacacaaagaaacagcacacgatgtgcgtgaaaacacgtgtcaaggggtttggaattggatgcatatgttagaaagtaggagcgaacatactggattgcatcctcagtgatgcctgttgtagtggatggccctgatgatggaatagtctttactctttacagagacttatcaacaaaagactacaaattattactaaccgacaaattgagtctc

SEQ ID NO: 5413 - DNA, 307 bp, Glycine max
  unsure (1)..(307): unsure at all n locations
  Clone ID: PAT_MRT3847_104897C.1
aaaagaaaaannagaaagttcttaattatttaaataaattattatctatatnatatatgatagacannggatagatattctatttatcttttaatcttaattaaatatttgacccccctccttatannatgtgttatttagttttcttttaaatttttaggaaccttaatccannttccttttttagatgtgcccccacaataccgaaaagaattctgntggggaggggtcaatttctttttttgatctccagaataaatagagccttcaagaaatgagagaattaagcttcgagcccgaattccga

SEQ ID NO: 5414 - DNA, 428 bp, Glycine max
  Clone ID: PAT_MRT3847_104898C.1
gtatgccaaatgacatgccaaaaaagtgttatatttaaggacaaaaagagttttataaaaggtccgtacattcttgcatgtgtctaataaccaaatcggtatatattttacacacaatacaaacaagttaagagaattgttcaatgattaggatgagtaggcataatctccaaggttgatgctttgctatccgaagtttcccccaaatttgaagttggagaaatcacagaccaaaattggcactcatcaattccagcatcatgttgttcttgtgaagcagactgttttttttgattttgggatactttccaattttgaggggacttttttaatagtgggccgctttttccttttaaactttaagcattttttggcaggatgggcaccaccaacaaggggttttttttccgttcccttaaaaatttttt

SEQ ID NO: 5415 - DNA, 128 bp, Glycine max
  unsure (1)..(128): unsure at all n locations
  Clone ID: PAT_MRT3847_104899C.1
gcgcggcgcaagngnancgtagagacacgcgaactcgagggcgcnantatgganngcnnagnagngacgaacancgncccanacgcggtngncaacggcaggatgcngangnaggngacccggcaann

SEQ ID NO: 5416 - DNA, 632 bp, Glycine max
  Clone ID: PAT_MRT3847_10489C.1
ggaacacgactcccaaagttttttatttcttggaaaacaattttttatttatttcaccatcctattataactacgacaatatcatttaaatttttgaattctaataccatccaaaatgatagcgagtttcacgcttacgcatcctacataactgggtaatttttttaaaaatgcgacttcaagttgggctttaaaatacaatgtcataattttttaaaaataaaatataaaatattttgagtcatatttgaaacataatttcagtattttttaaatgtaaaatacttgaaattgggtttcaaattacaatttcaatattaaaaaaaaaattacagttttagatcatattttaaaagacgacttttttttatatgaaggggggattaaaaataagtttattcatattttataatattttcaaaatttatttactttttataatttttttttaaaaattaccctagttatgtaaatttgctcggtgggaagctttagcttgagtcataccgtaaccttgtccgctacaatgggttgctgaaaataaaatctagttctcttatcgttttcaacctcatttacaaaaaaacaaaaaagtatatatataagcgggaaattggggtgttagccatgga

SEQ ID NO: 5417 - DNA, 673 bp, Glycine max
  unsure (1)..(673): unsure at all n locations
  Clone ID: PAT_MRT3847_1048C.1
ctcttcccttgtccttcttcctactatactatattttctctctctaatcaatcatagttctgatcttcatacacttaccccggaaacctccatttctcagatcaagcttgcacgaagacattaaaaaatagaaatacatacatagctatggacaataatacttgtgcctcctcccaacttgagtcagaagaagcatcttttgagcacaaatcagaaactcaaacatcaaagaaaaggaaaatggttgagaaaacagttgtggcagtgaggacaggagagaatgttggcaagctgaagaatgaagggctaccttcggatttttggtcttggaggaaatatggacaaaaaccgatcaaagggtctccatatccaaggggctattacaagtgcagcacatccaaaggttgttccgccaaaaagcaagtagagagatgccgaactgatgcttcaatgctcataatcacatatacctctacacataaccatccatgccccactgccatcaccacaaattcaccccaacaaccaanagaattatccgaatccgaaaccaccccagacctctcagctaccacaaaggaggaagacccaagactatagaactagaagaagagcanaggggataatatagcccagtgatgaagttacaatgaagaaaatntcattacttgca

SEQ ID NO: 5418 - DNA, 355 bp, Glycine max
  Clone ID: PAT_MRT3847_104900C.1
tgcaattctcacatgttcaagacatagccgaggcagccatgtgcagtatatgaattgcaattatcagtgttcttattaggcctatcctgaagccaaaggaaatgagatcggaattcctcgccgaattccaatgccacattatcacgaaataacgaggcaaacatgtccatacatgaattggagtcatacgattacttattaggcctatcctgaagccagaggaactgcgatcgatactcctcgaagagtcccagttcgaccttttcatgaaacaaggaggcaacattgttcatatctgagttgtaattatgagcttccttattgggcctctcctgaagccaacggaaatgagatc

SEQ ID NO: 5419 - DNA, 477 bp, Glycine max
  unsure (1)..(477): unsure at all n locations
  Clone ID: PAT_MRT3847_104901C.1
acggctgcgagaagacgacagaagggatccttcttgttcttgtttcattgtaagaggataattgagttgtgttggtaatagtagctttggaagtggagaagaatagagagaacgatgatattataaaaaagaagctcaaatgatgatgagctttcatggtgaattttgtggacttctctgcttattatctccttatgatcatccacccaataatacatcgctggtttttgtttctgcaaattccttagccggaaagacaaacaaaaaagaaaataaagagagaggaaacttctttgggttgtaacgttaactacgtaagtaagagtaaatcctaatcactgtaatcaatgaagaattaatgtgacgtggcaatgaaacaaacatggtgtctacattatggcataacaacgaacgacgacgnacctttatcgctgtttcaatgttgtgggtcccgtggaaacgagggaaagcataaac

SEQ ID NO: 5420 - DNA, 251 bp, Glycine max
  Clone ID: PAT_MRT3847_104902C.1
tgtcgttttttttttttttttttttttttgggacattaaaaatatggggtcttttcgtgtccttgattttcaactctgtaatgaacaaaagatactggcagcttttgatttattctgcaatgcattcgacaaattaaaaacatgaactcttagcatatactaccaggtaaagcttacactacatattatggctggcgaacaaaatggtgcaccatttgagttttgtctttacaaactggtgtcacctagcg

SEQ ID NO: 5421 - DNA, 512 bp, Glycine max
  Clone ID: PAT_MRT3847_104903C.1
caccatccagcaaaccccatacggcgccgtttccctctcctctatcgtttccttcgcttcttccctccgatgcgcttctccatctcattccgcgttgtcgtttaagtcgcgctttgcgattcttcgagtcaacgctcccgtttcgcttctcttagttctcgttttgtcgattcatacgcataaaaaagcaccctcttcacgcgctttctttcgtcactctgccaggttcaagttacactttgccgttgttgatggcacgacctgggagcctaaacggcagtcagcatgttatagaaatagctgggagcgcctatgcttccacatcgtctgcatcacatcatgatagacattttaatggcacagatgtgacgcagcatgaagaaagaattagtggtgcaaggatgcctcctctttctcagccttcggtttcagcaactagtgtatctaatgggtcaaatagtaggaattcatcgtttataagacgtggggatactcggcggaataggagtcct

SEQ ID NO: 5422 - DNA, 265 bp, Glycine max
  Clone ID: PAT_MRT3847_104904C.1
tgcggccacacgaccgcccacggggacggctgcttttagaagacgacagaacggaacaaggacgcaggaggcatataacagacgaaggaagtgggagtgaccgaagagaagaaggaaatcgaagtaacagaagagaagaaggaagctgaagtcatagaagagaagaaggaagtggcagcaacagatgaaaaaaaggggaaagggggcacagaagagaagaaaggagcagaagtgaaagaaaagaaaaaggaaggcgaagcgacag

SEQ ID NO: 5423 - DNA, 1881 bp, Glycine max
  Clone ID: PAT_MRT3847_104905C.1
ggctcgaggtgttatcaatggcggaactcctgtttgccaaaattctcccatataaacaggccggtgcagcctatggcactggcatagcgggcctcccttcacaaattgcctatggtgggtgacaaaaaaaccgccatgccagcctggcatggcggccttagcgcccccatttatcaacattgttggcaaatgagaaaaatgttatctcctgcgatatttattctgaaaatcagtaaacgcacaaaggtttagggcactgaactcaagtgaagtggcgacaaacaccgcacttcaacggctggcaccgagccaggaccacaccggtggttctataaggctacatctatatggaatcccaattagttgatggtaatgatgatatgggagtttctggggatgtgggtttgagtacgtatgaagttcagatgcatcaagaaacatatgaagtggatccaaatgaggagtgtagagtactagagagttcttctgggggagaggtgggtatctgcgatgatcatgctattcaggaaccatatgaaggcatggaatttgaatctgaagatgctgctaagatattctatgatgaatatgcccggcgtttaggatttgttatgcgtgtgatgtcttgtcgacgctcagaaagggatggtaggattcttgcccgcagacttggatgtaataaagagggttattgtgtcagcatccgagggaaattttcatcagttcgtaaacctagggcaagcacaagggaaggttgtaaggcaatgattcatatcaaatataataagtctggaaaatgggtgataacaaagtttgtgaaggatcataatcatccattagtagtctctccacgtgaagcacgccaaacaatggatgagaaggataagaaaattcaggaattaacagcagagcttcggcttaaaaaacggttgtgtgcaacatatcaagaacagttgacttcttttatgaaaattgttgaagagcacaatgaaaagctatctgccaaaattcatcatgtagttaataatcttaaagaatttgaatccatagaagagcttttgcaccagacatagcagtgcatcatgtcgcggtgtgaccactaaaacgtgtcatgttcaaagaatgatcctttaatccttcatgaattgcatatgctgattcagtgaatactttggtaaggctagcctattttttcggagaactgataaggctagctttgccacaaagagaaggccaccacacacacacacacatataaactgtgaagttatataggttgtcatagtgcttaaaagctaaaagaggtttttatgacattttggcaactgacacaaactagttacgcccctttaagcctaagggtacgatgtaatcttgtatcattattgtactcccctaattttacagaacaaaatgtaaacaacaataatattgtaacttgcttagtttgaaactgctgtcagctaaatattattgtttataggagaaatgtgttggaatgttttatcccgcgaaaaattactatttgttattaccagattcagaagtgttctcctgaccaatcttcactaacaatttgatctcctacttggtatgctgaactcctctaggcggtggggtggtaccgagagcttcttcaacaaaatcctgcgaacaaaatgagtgcagattaactctcggtactgcccggaggatgagatcagattgctggtggagtggtctagagaacacttcagaatccggtgaaaacactattgtttataggacaaatgtgttggaatgttttatcaagcgagaaactactctataatgtaatccatcctaactttttctttgtatatatttgtcaatactttagtaaaaatttaaaaaaaaaaaaaa

SEQ ID NO: 5424 - DNA, 1354 bp, Glycine max
  Clone ID: PAT_MRT3847_104906C.1
cccccgccagcataccccaaaccccatacggcgccgtttccctctcttctgtcgtttctctcgcctcttccctccgatgcgcttctccatctcattcctcgttgtcgttttcgtcgcgctttgcgattcttcgagtcaacgctcccgtttcgcttctctcgtttggccgtttctcgcgccttccgcagcaccctcctcccgcgcctcccgccgtcctcgccgccctctgcgtctcacgctctcccgctctttccgaatttcctttatctcaattcaaagaaaccacaactgccacgtggccacgcgtacggccgtgaaacgattgttattattattttcttgttctgcaggttttaatcggtgttttttttatgcctaaaagtcacttgcggaaattaggttaggttcgagcggcactttgccattgttgatggagcggtccgggagcctaaacagcagtcagcatgttatagaaatagctgggagcgccgatgcttccacatcgtctgcatcacatcatgatagacattttaatggcacaaatgtgacgcagcatgaagaaagaattagcggtgcaaggatgcctctttctcagccttcagtttcagcaactagtgtatctaatgggtcaaatagtcgaaactcatcgttcataagacgaggggatactcggcggaataggagtcctgtgcattcagggttatggatatctattgagctggtcctactcctgagccagattgttgcatctataattgttttgtctttgtcaaggcatgaacatccgcgtaccccgttgtttcaatggatcattggttatgcttctggatgtgctgctaccctccctctactttattggcggtattatcatcataaccatatgcaagagcaagagtcatctcaatctaggcagacttctcctcggattaatgatccttcagggacacttcttttcagttctagaactaatggtggagaagatggtcagtctgccgttgcatcttccagaagcaatcaaccttcattattgatgaatagaagaatgaagacactagtggagtacttcaaaatatctttagattgcttttttgctgtatggtttgttgttggaaatgtatggatctttgggggacattcatctgccaatgaagctcctaatttgtacaggttatgtatagtgtttcttgcatttagctgcattggttatgccatgcccttcattctctgttcaacaatctgctgttgtctcccttgtataatttctatccttggggttagagaggatatgtcacaaaatagaggggcagcttccgaatctattaatgctttgccaatttacaagttcaagacgaag

SEQ ID NO: 5425 - DNA, 529 bp, Glycine max
  Clone ID: PAT_MRT3847_104907C.1
ggctcgaggtgttatcaatggcggaacactggaaggccaaaattctcccatataaacaggccgttgcagcctatggcactgccatagtgggcctcccttcacaaattgcctatggtggttgacaaaaaaaccgccatgccagtctgccatggcggccttagcgccgccatttatcaacattgttagcaaatgagaaaaatgttatctcctgcaatatttattctcatcatcagaaaacattctgatgggttcaaaagatttaatttcgtggcagtggatccaaatgaggggtgtagagtactagagagttcttcttggggagagttgggtatctgtgaagatcatgctattcaggaaccatatgaaggcatggaatttgaatctgaagatgctgctaagctattctatgatgaatatgcccggcgattaggatttgtcatgcgtgtgatgtcttgtcgacgctcagaaagggatggtaggattcttgcccgcagacttggatgtaataaagaggggtattgtgtcagca

SEQ ID NO: 5426 - DNA, 777 bp, Glycine max
  unsure (1)..(777): unsure at all n locations
  Clone ID: PAT_MRT3847_104908C.1
caccatccagcaaaccccacgtctacggcgccgtttccctctcttctgtcgtttctttcgcttcttccctccgatgcgcttctccatctcattcctcgttgtcgttttcgtcgcgctttgcgattcttcgagtcaacgctcccgtttcgcttctcttaattgtcgttttgtcgattcatccgcataaaaaagcaccttcttcacacgctttcttcgtcattctctgagtctcaggcactccctttcattccgaatttcctttatctcaattcaaagaaaccacaactgccacgtggtgacgcgaaatcgtacactgctacttatttcgttgaagaaaaaaaaaacacgttttaatcggtgttttttttatgcctaaaagtcacttgcggaaattaggttaggttcgagcggcactttgccattgttgatggagcggtccgggagcttaaacagcagtcagcatgttatagaaatagctgggagcgccgatgcttccacatcgtctgcatcacatcatgatagacattttaatggcacaaatgtgacgcagcatgaagaaagaattagcggtgcaaggatgcctctttctcagccttcagtttcagcaactagtgtatctaatgggtcaaatagtcgaaactcatcgttcataagacgaggggatactcggcggnataggagtcctgtgcattcagggttatggatatctattgagctggtcctactnctgagccagattggtgcatctataaatggtttgcctttggcaggcatgaa

SEQ ID NO: 5427 - DNA, 2339 bp, Glycine max
  Clone ID: PAT_MRT3847_104909C.1
gcacgaggcaagcttggagaaagaaataagaactttaactttgattaaaattaaaaccctttttttcaacatatgaagtatcaaataatacacttgccactatgattgattggtttacaaattacaattgccacctatatatatccttatttttacatttgcggggagagacaacactttttgttctttctttattcttcatatgtttttgccatttgcaaaacttccggttcagtatctgtcaaattttcttgacagttaaattaatcctgtagtgcttgatttaatgcgtagtttgaacataaattgaatgtttgacatcaccaatgtggagttcatgttcaccggttgggattcttcgaaccccgaactggtccacaacggataagtgtttgcacgcatgaacattaaccttgactcgttgctttgagccagcaggaacatgggtcttgtggaagcccaccaattgtttaatttgcgaccattttccatggggtggttgtgagaatatgagaagggtgtgggtcccatccattgagccttcgtttttcacatcaacgtggaattccatctccaatgagtcatcacaattggcatggctcaccttaactgctttgcttgagagggttgagtttgtcaaggcttggaggctcattatgggcactgagacctgtttgggggcaagtgctaagctgtggctgaatcttgagtaacttaggccatgtccgaatgggaacactacaggacctttgtagaatctataggttcttcctgggtaccctgttgttgggtttggacgcatgtccatgtttgtcatgggcactttggccaagtaaccttgtgggtaccatgtcatgggtaaccttcctcctgggttagttgtaccaaagattacatcagcaatggcagttcccccagcttgcccgggataaccaacccacaaaatggcactaatcttggggtcatttttggcaaacgagatatcaactgggccaccagacatgatgagcaagataactgggcccttagcggccctagccacccttgtcacaagtttcttgttgaaggcccggtaagagaagcccaactctatctcttgtttccgcttctacagtctggtcaaggcccattaccaaaacaatcgcatcagcttgcctagctatggtctctgcagccccaaatatttcaattccacacaagacacaccctccaacccacttgatgagacgtcggcgcatacatcgaacctgcccacaccagtccaattaaccacatgacacgcatgagttcatttcccctgcaagccacacccctacaccccacttgatgagccgtcttcacatacctcgcaattccttgcaaaggagtggtataaccacatgccacaccagcatagttcccaatcattgtaacggtagcatcagcattgggtccaacgacacctatagtacgaagtcttgaaggggataatggtagggagtttcctttgttttgtagtaagactatactctctctagctgcttcaagggccaattgttgatgggccgaggtgcacacatctcttgggcccaagtttccgtatggttgggttgacggttcaccgtcgaacatacccaatctcatttggaccgaaataaggttggccaatgcaaggttaagatcattttcggaaataagccctttcctaatggcagaatcagtgtggatagccaaaaatgggccacaatccaagtctagacccgctttaatggcctcagcagctgcctcttcaggtgtttttgtgtagtgttggttgtcaaagaaaactccaactgaatcacagtctgagacaatatacccattgaggcgccattggccacgaatagtgttgcgaaggagatctgggtcagcacacgtgggcttgccattcacctgattgtaggagcacatcacactcgccacttgcccttccaacacgcacgctttaaatggtacatcataagtatcctccaaatcctgtttactcaccttggcgttgaaatgaaacctgtccacaccattccaattatcaagatcataggcagtgtagtgtttacaacaagcagcaaccttgaggcgatttccggcaccatcgccttggagtcctttgacatagctggcggcgtatttcgcggccaatgtcgggtcctcgccgggagtctcttggccacggccccaccgtgggtcacggaaaatgttcacattaggactccaatacgtcaaaccagcctgtccaccgttgtacattgctcttgcttcatcagacaccacccgtcaaatttcctgccacagcgactgattaaacgaagcgaacgcgtggg

SEQ ID NO: 5428 - DNA, 631 bp, Glycine max
  Clone ID: PAT_MRT3847_10490C.1
tgaaaggctcattccgaaagaaaaattcactaacttggttggcctcttcttttttgttaatgttactatggctgtgagcgatggctatgcgattgcggtgaaggaagcagcttcggccggcattcacagcgtagagaaactcgtgaacatgattttgaatcaacacagagagggtggttctgaattggaagcagttgctgacgtggcggtgaaccgcttcagcgaggttatttcgctgctcgagaaaccaacaacaaccagaaccaccggtcacgctcgtttccgaagggcccctacaacggcgccacctgtccctgttgttcagttgcagcaaatggtgcatgattcaaaacacaaactacagcaacaacagaacgagacagaacaaaaacaacaaacctctgcttttaaggtttattgtccccctcctcctcctcctctgcctcagaatcaaaatcaccaagaacaaccttttattcttcctctgcataataatgaagcaaatggttctactaccaactcctatggttcaacgttatccatggacactgagagtttgcaacggtcatgtctctcttcttccgggtttcaaatttctcacatgtaacatcaggggggttcttttgtgcgt

SEQ ID NO: 5429 - DNA, 837 bp, Glycine max
  Clone ID: PAT_MRT3847_104910C.1
ctctatatgttggtgtcctacatctagtacccactttagaggtgtttccattgctagcagacctgaaaatgtatgagcctaatactattgatctctcagatcacagtgaattagagtattggttcaagattttgtcagagcacttgccagatcttgtggacaaggctgtagcaagtgaaggtgggactgatgatgccaagatattgggtgatgcttttgctcgtgcattttctgcccacctggctaggttaatggaggagcctgctgcatacgggaagttaggtctggccagactactggaaatgagggaagaatgcttgagggaatttcatttttttgatgcgtatataagtataaagcagagggaaaatgaggcatcacttgctgtcctacctgatttgttgatggagcttgatagcatggatgaggaaacaagactacttactctcattgaaggtgttcttgctgcaaacatttttgattggggatctcgtgcatgtgtggatctctatcataaaggaactattattgaaatttacaaaatgagtcgcaacaaaatgcagagaccttggcaagtaggtgtagttcaacatattcatgatgagggtattgatctcgtgcatggttgatagttgaatactgacctaattttttgccattcaggtggatgattttgatgcctttaaacaaagaatgttaggaacaggggacaagaaaccacccccacatagaagagctttactttttgtggacaatgcaagtgctgacacaatttggattttgtttaaaaagaaacaatatttaaggatagaaattattataaccaattaacttaac

SEQ ID NO: 5430 - DNA, 523 bp, Glycine max
  Clone ID: PAT_MRT3847_104911C.1
tccaacaactgaattgtttctacatatcatctctgctcgtattgacgcaagtagaactagctccatgacattgtcattaatggctgcctattgattggaactttaaactgtgccaatgttacaaataacggatcacgttgtcagctgtccactttttccttctggtgccaaggctcatgaaaatgctgggctgacgaaagaacaagcagagggaaagtttgtgcctgatccactatttgaagaccctaaagaatttgtcagaagttgtgttctccgatcttacaactatgacgaagtcatggggttcttataacgaactgaaggttctgttctagcacattattggctcgcgctcattgactgtccctgcttcatatattgccatgataaggttgattatatctactcgaatctagctaattggacgagattgtccatattcaacacaccatgctcatacaagtttagcagtgaccgcactattcatgaatatgcccgagagatatggaacattagacgcgtc

SEQ ID NO: 5431 - DNA, 169 bp, Glycine max
  Clone ID: PAT_MRT3847_104912C.1
ccacgcgtccgctttagagaaacattgatggggtgatagtgagcctcatcattgcatgtgatttgttgtaataacacattcgggcttctgatggattcagaaactacttcactaaagctcacatgatatcagatctgattaacatattactgatgatgggtaattccat

SEQ ID NO: 5432 - DNA, 2205 bp, Glycine max
  Clone ID: PAT_MRT3847_104913C.1
ggctcgagcacctattgccacgtacgtaggtttgtttcttccctttttcttcccttgtctgtcgggtttctgcttcagactcggtgagagttacgccatggacgattcctctcaactcctccaagcagcttctgattttgttcactacccagggcctcacagcgatgattcctccagggactttctcaatcgtttccctctcccagtcatcatcaatgcattacagactcagttagatgtgcctggcctagaaaatactcttgttgcatgccttgaaaggttattcaatacgaagttgggtgcttctctgatcccacagtatatgccttttgttcaagttggtctgcaggcagattctcaagcagtcagatccttagcttgcaaaacagttacatcccttctggagaatctagacaatgatcacaaagttgctgctagtgcttgtctaattaaagacttcaacatatatcctcttttgcttgattgtcttataaatggcaatgaacaagtggcagctgtggcaacagatgcaataaaaaagttagctggttttcctgaaggcatggaaattatctttccatctgacaaaggagatgatacagacctggagattatagcatcacaatgttcatcactgggccgagttcgggtactggcattagtggtgaagcttttctcagtatctaggtcagcagcgtctaccatttatagtttaaatctacttcaattgttggaagcagaaatcagaaatgcagatgatacccttgtaactttaagtgttttggagcttatatatgagttagcagagattgaacatggtacagaatttttgtcaaagactagcatctttcaattgctttcgtcaatgatcagccacaattctatggaatcaattttaagatcaagagcaatgatgataagtggaaggctactgtccaaggatattatatactccttcacggatgaaccttgtgttaaagctgttatttcgtctattgatggtagacttcagtcattggaagcttcagatagagatgaatgtgaaactgcacttgaatcattgggtcatatgggatcatctatccagggagctacattactactctcaggttcatcacctgctgctcgacatgttataaatgctgcttttgaacgacaaggaccaacagggcatggtaaacagctggcagcattgcatgctctaggaaacatctcgggagaaaccagatctgagaacaacatcatactcaatgccgaagaagaagaaaacctgcgacgcttaatttatgaaacagcatccagaagctcaaagctgactccatcgggtctttttctgtcagtattgcagcaggattcagaaatacgtctagcgggctatagaatgctaagtggattggttgcccgaccatggtgcttgatggagatatgttcaaaacaagagattataaataaagttacggacccaagtactgaaacgacaaaaataggtatggaaggcagatataactgctgcaaggcaatacacaaatcattgacagtgtctagtagagtttctgctaatcctgcttttgcaggaatagctgcaaagtttcaggaagctgttggaatgggtccatatcttgttaaaaggcatgttgaagctcaacctgctgtgataacggctgatagattttagttttcacacctgagtggtcaagcaatacctgtaatggagcagttttttttctcttctcaaatacaatgtggagtgttatagaacaaaaaccttttccccctcaaatgttgaaacttgatggaatgagtatattaatcatagttttttagtgtattatatttcaatggcttttgtcaactctagcaaatagatattctttttggctttggatgtgtgttgcatgtgtgaagtagtagtctttgtcaacaattacattgtctactaactggcatatatactgaacttgcattcagctataatttagcttattcaagttcgactgcagcatgttgtttcccagacctttctgccatatcatagttttgaaaaccagaccggtgaataatccggtcaaggcattgacgaattgacccacatgatcccgtccctgttaagaaaattgaaaattttagtatatatatatatatatacaaaattataaataaaatttagtgtaaacaagggttttaatcgtcgaaattttcaacatt

SEQ ID NO: 5433 - DNA, 447 bp, Glycine max
  Clone ID: PAT_MRT3847_104914C.1
ttttggtttataacttaattgaatattatacataaaatagtgttggtttattcacattgttagtacattagtgttaaccctgtaaatatgagaaaaggagagataataaaaattcaacagcttatgtcatgaagatgatggtttgaaacttgcaagagcaaatatttggtttcgttgatattttgctcaattcaagcctatccaccttttaaaagccagggctgcttcccttttgtttagttgggattctgtctgaaatttcggagcctttcctttgtaaagtgatttatggtatttcaagaatagcattcgatacttgtacttgtcaacaaacatttttcctttttccatcatcgtcacaacttcattggctcgagtgaagaatccgccccttacaaacgtatacagcacgggaatcgagaagtttctgatcaaactttattgata

SEQ ID NO: 5434 - DNA, 338 bp, Glycine max
  Clone ID: PAT_MRT3847_104915C.1
tttttgggtttttttttttgacaagtaaggtttatagcaatttctagccaatctttgatacaatactgcatcattcatagtatactacctttggggtttccatctcctaggatataactctgtttctaggggcagctgtggctccaggctgtgacaagttgggtaggaagtaaccagcaaagaagttgcttgacacataagtgaaggaattccttcagcctcaatagctcggcgaactttggcctttgttgcaaatgcagacttggctggttcaaatggtcatccccaactttgccattgttgtagataacaacaacaccaaagctccttactgggtt

SEQ ID NO: 5435 - DNA, 226 bp, Glycine max
  Clone ID: PAT_MRT3847_104916C.1
gcaaatcattttcaagacccttacgggtaagactattaccctcgaggtggagagctccgacaccattgacaatgtgaaagcaaagatccaggaccaggtaggaatcccaccggaccaacaaatgcttatctttgctggcgaacatccttaggattggaagaccctccttgactacaacattcagaatgaatctactatgcacttgttgttgcgtctccacgggggg

SEQ ID NO: 5436 - DNA, 1431 bp, Glycine max
  Clone ID: PAT_MRT3847_104917C.1
ctctctctctctctcttcttcgccaaatcccaaaccccatttcaatgatccccctccctccaacaatgttcccacacccttaaaaaaccacaaaaaccaaaaaaaaaaaaaaacaccaaaccatgttttccttccctcacaccatcatcttcatccttgtctttccaatcattatttcttgctcctgggcctcgtcgttgggcctgagtagcaatgcgacgaccatctacgaggtcctgagcgagcacgggctgcccatgggcctgttcccgcagggcgtgcgggagttcgcggtgggcgaggatggtagcttctgggtgcgcctcgacgaggcctgcaacgccaagttcgagaacgagctgcattacgagcgcaacgtctccggccacctcagctacggcatgatcgacgccctctccggcctcgaggcccaggatctcttcctctggttccaggtcatgagtatcagcgtcgacgtccccagcaccggcctaatctacttcgacgccgccgccgcatccacgcgcttacccttgtccctctccgcaaccccgcccggctgtttcgccgttcgctcccaacaacaggacgcccattcccaccaccagggtcaggttcaatctgcaaggcttcggtataagctcaaacagggaacctctggaagagatgttctatagagtatggaccgtgcacaagaaggtgaatggagcttttctgtagcacgatcatcgtggattctccaatcagattgtatgcctacggagagtataaattaataggtccattgtttggacctgttgtgttgtgtgttatcttcccatatagtgcgtagttagtgttgtagaagcaacctgtgtcttggtaatttattgattcatagatacttataaaaagggaagcaactgagatgaatttcctgaatccgtttctcattgagaagatggtggtaatgtagcattttgttgagatgggttcaggtgaaaagtctgcaaagattttgttgtgtgtcaaatgttatttgtattataaaaatatattgggggtgtttagttgaatcaaatttattatattaattcaaaatagatagaatgatatacccttttaaaaaacaaaaaaaacaaaaaaaacaaaacccccaaaattcttcccccggccccccccttttccccttccccccccctacccgcgttcggggcgcgtttacccctgggacccctaaaaaaatggcccttaaggccctttaatttccccttttggaattaaaattccgggggccccctttggaaaaaaaacctctccctgaaggggggaatcaaaggcccaattttgggtgggggatacccttcgggggaaaaacttggaaacttttcacgggaaccgatcccccaaatggttttccccccctcggggaattggcccaaaggtttcttt

SEQ ID NO: 5437 - DNA, 712 bp, Glycine max
  unsure (1)..(712): unsure at all n locations
  Clone ID: PAT_MRT3847_104918C.1
cttatttcttattttttttgttgaaagagtctatcactgatattctaagagctcagttagacaatgatgtacaattaagtaatcctttctaagctctactttcataattttttagccttccctatctcgcccttggtttaattatagttttggtcccgtagacataagtttcaatttaacccccatagctttcaaatagatgagattatatccaaatcagattgatattgtcatgtcaacaaggcattcatattgttgacatggcattgtgccttgccatttccatgccagccaagtaaaaaaaaggagcaactcatcatcaattttatgccatgaaaaaaaaagggacttgccacatcaccattaaaccaacaaggggacttaatctcaccaatttaaaattgagcggtgaacattgttaaaattgaaacaagggaccaaaatataaatttagtacgacaataaaaccaataattgtaatttagcctccccattcttcaacgactaaacagcaaaatgtgcacttaaaagagaaaaatgtggggtggctgttgatgaaaagatcaatgatcttaaatattttcattcaaaaacagcaaccacctggatttaaaattatggngaattcaatcccttattttacactagcagttaccctattgcatttttctcgaattttaaagagatgaatccaatcttttcattacccaat

SEQ ID NO: 5438 - DNA, 274 bp, Glycine max
  Clone ID: PAT_MRT3847_104919C.1
ccacgcgtgcgcgcattgcttcacatagactctttatctcaaacatgcctgtcatgaagaccagggagattggctccgtctctcacagcatactatgacgcctaatacggtcacctctccatcattctcgatgccatcgacccaaataggactcttatggacgctccctacatagagagactccactagaacctcaaaatgctctcactcacttccatcacaaatgatgttaagaatactcccacaaagaatgatctcattcacaccattgaac

SEQ ID NO: 5439 - DNA, 379 bp, Glycine max
  Clone ID: PAT_MRT3847_10491C.1
cttcgaaaaagcaagcgtatactttgagtagatatgaaagtgtccttgaggccctgtttcctattggcgcttattttgccaattttttcaattttgatggtgtcacaaacggttgcgaatcatacttgcagtttaatagtgtactattcagataaatgtgatatagtgagttgtacaaacgcctgcgtggactatactggattctatacagctgctggactatgcttcccagatggatgccattgcgaatatgattgtcctcctacaactttgtcttagttaataattatcatgtctaccatcaaaaataaaatatgagttcaaaattatgggcatgataccagtttaataaaatgctactatctctttttactcgact

SEQ ID NO: 5440 - DNA, 544 bp, Glycine max
  unsure (1)..(544): unsure at all n locations
  Clone ID: PAT_MRT3847_104920C.1
tacaatttaattgaatcccatnncaaanacnaaaannnnatnnnancnangngccgaggggaaaaaaaaaaaaaaagaaaaaaaaanaaaaattataaaaagaaaaaaaaaaaanaaattggggggagggggaaaaaaaaaaaaaataaaaaaaaaaaaaaaaaaaaaaagnaannaaagaagggggttgngcactcattcccctaaaattttaaaccctctttaaattttaaattatccccttaccaaatcaaaacccctttccaaaaacccaaacattataccaaaatgaattgaaaccccaaaaatcccccctcctacaccccctccaaaatattttttttaaccaaatttttttttaaaaaactttttcactttacttttaaacccacccgcccttttatcaacccccacatttaaacccccccaccccttttactttcaacccccaagacattcccaataataccctttccccccccccggatttttaaccccaccaccctaaaatttccccccccccttaaatttcccccaacccttt

SEQ ID NO: 5441 - DNA, 340 bp, Glycine max
  Clone ID: PAT_MRT3847_104921C.1
aataacacttaaaacgcaaagatggtttagatgcactaaaacatatacaaatggaagttttaataacggacagacgctaaataaatgtacaataataaacgcactcgaaactggtcttataaacaccacatacccattacacacccactctatataatataatgaagtggatgaaacgacatttgtaaactgagaatgtgacaattgggcatctgatgattgtatgctgaccttactaaggtcatgttacttgtgtaaacatgcaacgacatgtataggtcatattgaacacagatcatggaacacacacaaatttcttacaaactatgggaacctatca

SEQ ID NO: 5442 - DNA, 358 bp, Glycine max
  Clone ID: PAT_MRT3847_104922C.1
ggatgaaaagcactatagtactcttagaaatctcctctgcctcttctctctctatatgacaccctcgccttttccctttttctctaattcccatgcttgcttcctctgctctcaaaagctctaaacccattaaaataactaaaaatagaattggagcttcaagttgagaagcaagcatgcctttggaggacttctacaagatatttggtgccaccagtaagttctaaccattattgttacaagtttcatgcaccttttcctcacatcattacatgaaacacagaaaaccaaatgtatgaaaacgacagaaagagagtaattcattttacctagtattcaagttcaaacatagagaaat

SEQ ID NO: 5443 - DNA, 330 bp, Glycine max
  unsure (1)..(330): unsure at all n locations
  Clone ID: PAT_MRT3847_104923C.1
gnngnnnnncccagaaatagtattaaaaattataggcggaggtgcatatttaaaataacccaaacttaatccaaacccgcccatttcccaacctttaaaaaaaaaaaaaaggagccacccttgacttaaaaaccccaataaaagtccaaaaccatttaaactttttaaagggaaaaacttgcccattttatttaaaggaggtttgttaaacaaaaaccaccataggcctcaaaacctttcaaaaccttattccttaatttttaaccaccacataaatagttaaaaatatttccaaaaaaaggcctatttttttttaaacctttttttcca

SEQ ID NO: 5444 - DNA, 267 bp, Glycine max
  Clone ID: PAT_MRT3847_104924C.1
gcagggtcactctgtcagcagccttatgaggtgtggcaaaatatgaaggattgtttgcaaagtcaatccattctgctggagtctagtagttctgatttgctttttcgtcttcaacaaagtttagatatattggaggtaagttcaaaatcaacgaaaaggtgtgcttcgaggatctggggctatttcctgaagatcaaaggatccctgttgctgcccttattgatatgtggtcagaactgcataaccttgacgaaaatggtaggaatg

SEQ ID NO: 5445 - DNA, 400 bp, Glycine max
  Clone ID: PAT_MRT3847_104925C.1
gggaaaacagccaaatgagcgaaagtgccgaaatgcattaagttgtcggaattattggaaagagaatgagaaaccaaaggaaataaacctgaccaaattgccatccatctatttcctatcctgatctcctttcaaatctggcatgtcatgtttggatggcttggtattgatgtcgttatctcaacaacaattggctgaataatgttttgtttagatagacaggcatcatgtgactttacagattttgttgagtaaggtgaaatcttagaattgggttttagcaaaaactagatcttttatttccttctcatcagatcggtgtattattggttcttcactgtggttgagtcagatttaatagaataagagagtcttttttacttgtattctattgaatgaa

SEQ ID NO: 5446 - DNA, 207 bp, Glycine max
  Clone ID: PAT_MRT3847_104926C.1
ctcacgcgttcgattcaaaagatcaatgctgcacttcatgcaaagacattttcaaaatatgggcacgcggataggttctacaggagcgacctgaggccaaatgagcagctgaccacatgatgcaactctgatggctatacatcacgctgacctgttgtccagacgccctggtaggactggtcaacgtcaactaattgccgatgcact

SEQ ID NO: 5447 - DNA, 428 bp, Glycine max
  Clone ID: PAT_MRT3847_104927C.1
acgaccacgcgtccgagaggttgttgcgagctatgctctagatgatcgcgaggagaatatgaagatgcttgttttctttgatgctgcattactaccgatagcatggccatgccatggcgcctgctaccaaagggtccctctccgaatgaaaactggctatcgtgagccgcacttcaaggttaaacgcacaacctgcaggcttagctgggaagcacacagcatacgagcctttacaaccattgctgaagagtgcgttgcaccaacaaaggactacattaacggcgaacaacttagatcagactctaaaacagtttaccaacaagcattcacttatgactttgaacgcgaagtgcatcacaacgacatatttatattctgcatagattacaacgtactgtctaatatgccatactatcaaaaacacggat

SEQ ID NO: 5448 - DNA, 326 bp, Glycine max
  Clone ID: PAT_MRT3847_104928C.1
gtgtgtttaaaaaatgcaaaacccaaactttccaataccgattcatattgaagacaggatagaacagtctgcaatcataattttgtcgcatgcacaaatcctaaataatcgtttgccatgtgctttggattaaaatctactaccactagcgtggaaggtggggggggtttaatgatgatgctgccctactgctcattggagtcgtctggatcatcgcattccggaggtctaacaatagactttatcccagttcgatgttgtattttccttcatttcctttatttcttcttctagagtggggacctcggatatcgccttttttcatc

SEQ ID NO: 5449 - DNA, 420 bp, Glycine max
  Clone ID: PAT_MRT3847_104929C.1
cccacacaagatttatcccgaggttcggtcacaccatatataggtgccgcggctttctcgttgaggctcccacaaagagccgggtctctttcaaccctaatacttcctttgccgaccacaaaggtcaagtccacacaataagtctttggtcaaacgagccggggcatacaaaccgttcttgtgggcctgcacaagatttggagactcacaagggacacctagtcgcctaggagctagaagctccaacagtaatgaatgcacaaagaactcaatgtcttacccaagctcgaatgacgaacaagagcaagagagatttagagattaaggacaaaactgcggctctgaactcacttaaagattttctcttcttagattttaaatgggacacgcacgaaatgtctgaaagagaaagggaggtgt

SEQ ID NO: 5450 - DNA, 387 bp, Glycine max
  Clone ID: PAT_MRT3847_10492C.1
ctcactagcctactgccgcccggtcgccctttttttttttttttgaactcaaattacgctggccatggaccatgtggaacagttgctgagtttttaacattaatgcatccaacgttttcaaccgaaaagataaaaaagtacatcctctagcccttttcccctttttaaataacacaccttaataacaggggggcagtttggccacagacattgaccgcagttattttacagatcggcgccattaaaatggaaggaaggaataacctgatacatttttatttccaaaaaatggaaaattttgttgttcggctttgccaagagtgtctaaattatcaaatttttctatttccaaaaaaaaagggttttaatttagaacagggctgggtg

SEQ ID NO: 5451 - DNA, 319 bp, Glycine max
  Clone ID: PAT_MRT3847_104930C.1
tgagaaatgcaacgaatggcaatattattatcaactatttcctttttctctaatcagtgccctgcctaaacctgtaaattctctttctcttctctcctagcatccacaatctatcctgcttgtctgctttcaaaaacaccggcaatccgattacctaaaagaactgtacgagtctcactgtatagttttcaaagaatttattcttttttactattccattcccatattatactataatggtgttcatcagcatgcttcagtacatcatcttcaagtttccaatcccttttaaacacggcaatctgtgcggacgcgtggg

SEQ ID NO: 5452 - DNA, 373 bp, Glycine max
  Clone ID: PAT_MRT3847_104931C.1
tccctatccgtctgatcttaatcatcccataaacctttactttacttacttatttcatctatcatctaacttttctgttttaggtctcttattaaattttctaactccaccatatcacactcatatttttccaccatcttatctccatacaattccttcactatctcaacctataactctatatcacatttcactaattcctcaacttcctccctcatattctcctttcatctattaccatataactcttaaaccatccaaccatttttcatcatactaatatacccctactatccttcaatcactctctctttactttctccaattcctcttaatatctccttattcacctcttttactctattaaaaatct

SEQ ID NO: 5453 - DNA, 4008 bp, Glycine max
  Clone ID: PAT_MRT3847_104932C.1
ggctcaaggtggacgttccggctacacatatattcaacggctcttacaggtttaacttatgtgttacatcgttgcataaaaagtaaaggtcgcatctgccttctctattgcatataaaattatttttataatattaccatccttttttacgaggtacggataagtcatgttttttgtttggtccaggacgatctcatatcaatcttagtgtgattttttacgaataccacacattccttcctctcttggactatttctattaatttccaacctaaaatcatgttggttccaaacttcccagaaagggagctattacttgttctgctattaaacctctgtttagaaaaaggggaagtgttttgtcatacatatcatcatcaatttatatgacctgtgtccgagagtccatttgatatttcattactgataacgaaggtagcaacaaaatattacagttcatagcaaagcatagtgtacgtgttgttatttgttgttgaagggtgatgggagagttatttaaatgagaattttgaagtgaagtccaaaaattcccccgaagaggttcttcaacgatggaggagactatgcgggatcgtcaagaaccccagaagacgctttcgtttcactgcaaatctctccaagaggggcgaagctgctgctatgcgtcgtaccattcaggagaagttgaggattgcaattttggtttccaaagcagcacttcaatttatccaaagcgtgcaactaagcgattacaaactgccagaggaagttaaagatgcaggttttcaaatctgcggcgatgaattagggtctattgttgaagtccatgatgtaaagaagttcagacatcatggtggggttgatggcattgcagagaagctttctacatcaaccactgagggtcttaacagtgatactgagttactgaataggagacagcagatatatggaatcaacaaatttactgaaagtgcagctacaagtttctgggtttttgtttgggaagcctttcaagacatgactctgatgatacttggagtgtgtgctatcgtgtctctgctagttggcattgcaacagaaggatggccaaagggtgctcatgatggtcttggaattgttgcaagtatcttgcttgtagtctttgtgacagcaacaagcgattatcgccaatcgttacagttcagggatttagacaaggagaagaagaaaatttccattcaggtcacaagaaatggatacagacaaaaaatgtcaatatatgaattacttcctggtgacattgtgcaccttgccattggtgaccaagtccctgctgatggactatttgtctcaggattttctgtgttgattgatgagtcaagcttaacaggagagagtgagccagtgatggtgaattctgaaaatccatttcttctttctgggacaaaggtccaagacggatcatgcaagatgttggttactagtgttggcatgaggactcaatggggcaagttgatggctactctcagtgaaggtggagatgatgaaaccccactacaggtgaagttgaatggtgttgcaacaattattggtaagataggcctattctttgcagtggttacttttgcagttctagtgcaaggactcgtaagcctaaaactccaacaagggagcttacggagctggaccggggatgatgcattggagctgttggagttctttgcagttgcagttaccatagttgttgttgctgttccagaggggctgccattggctgtgacactgagtcttgcatttgcaatgaagaaaatgatgaatgacaaagcccttgtgagacatttggcagcctgtgagaccatgggatcagccacaactatatgtagtgacaagactgggacactaacaaccaaccacatgactgttgtgaaaacatgcttttgcatgaacagcaaggaagtgagcaacaacaatgcttctagtttgtgttctgaactcccagaacctgctgtgaaactgctgctagagtcaatattcaataatacagggggagaggttgtggttaaccaaaatggaaaacgtgagattctagggactccaaccgaggctgcaatattggagtttggtttgtcattaggtggagattttcaaggagagaaacaagcatgtaaacttgttaaagttgagccattcaattccaccaagaagaaaatgagtgtggtggttgagctccctggtggaggcttaagagcccactgcaaaggtgcttctgaaataattctggctgcttgtgacaaagttctcaactcaaatggtgaggttgtaccccttgatgaagaatcaactagccatcttaaggctacaataaatcagtttgcaagtgaggcacttagaacactatgccttgcctatgtggaattggaaaatgggttctctcctgaagaccctattcctgtttctggatatacatgcataggagttattggtatcaaagatcctgttcgtcctggtgttaaggaatctgtggcaatgtgtcgttcagctggaataacagttagaatggttactggtgacaacattaacactgcaaagaactatagccagggagtgtgggataataactgatgatggcatagctattgaaggtccagaatttagagagaagagtcaggaagagttgcttgaactgattcccaaaattcaggttatggctcgatcctcacctttagacaaacacacactggtgaaacacttgcgtaccacttttggggcaagttgtagctgtaacaggtgatggaactaatgatgccccaacatttttacttgatggccccaattcagatctaggcttagctggaactgaggttgcaaaagaaagtgcagatgtcataattctggatgataacttttcacgtataataactaagaccaaagggtttaaaggcatattggataactatgttttcttgggtgtcatcaatgctccggttttcttccaaatcataatagttgagtacttgggaacctttgcaaacacaacacctctcaccccggcagagtggttcttttggttgatgatggtaatggacacactgggagcacttgctcgtgttaaggaacctccaaatgatgatttaatgaaacgttcacctgttggaaggaagggaaatttcatcagcaatgtcatgtggaggaacatcttaggacaatcattgtatcagtttatggtgatatggtttcttcagtcaagaggaaaatcaatctttttacttgagggccccaattcagatctagtcttaaacacgcttattttcaactcatttgtcttctgtcaggttttcaatgagataaattcacgtgaaatggagaaaataaacgtttttaaaggcatattggataactatgttttcgtgggtgtcatcagtgctactgttttcttccaaatcataatagttgagtacttgggaacctttgcaaacacaacacctctcaccctgtcacagtggttcttttgcttattggttggatttatgggcatgcctattgctgctcgcttaaagaagattcctgtttgaagcacctgaatggataaaaagttgtagttggttatcgttagttgttagttgttgcattgcttcaaggtccactattcctgtacattcactaactcacctggtattgctcgaggctttcttgggttggaatcagaaatggagcagcgaaataaatcactggagtctcggagcagtttgacaagctaccattaaccattttattttaatacgttgtttattttctaggcagcagaatgattaatgacttgctgtaaataagttactagccttcctcagtttgtttcaatttttatatttataaatcccatttgtttctttatgttctaaaaatggtgatcctgaactgtccgttccgttattttaaaagctctgcgtagtcataatcttgttgtgccagcacaattgactgagacatgacaaactgcaatatataaaacaagaacctttccttattacc

SEQ ID NO: 5454 - DNA, 266 bp, Glycine max
  unsure (1)..(266): unsure at all n locations
  Clone ID: PAT_MRT3847_104933C.1
ctcttcttctcntgcggctagggtnttagcgcagntcttccanatttaangnanatgggtaaggnaaaggttcacatgcagtatnncggttattggccaagtttactctgggacntcnactaccactggccanctgatatataagcttggaggcattnacaancgtgttatcgagngattttagaaggaagcctgctggagatnacncnngcaggnctttgcaagnancccnggggtncttganaagccaaaagnccagancgnaa

SEQ ID NO: 5455 - DNA, 828 bp, Glycine max
  Clone ID: PAT_MRT3847_104934C.1
tgttaacattaacactgcaaaggctatagccagggagtgtgggattttaactgatgatggcatagctattgaaggtccagagtttagagagaagagtcagaaagagttgcttgaactgattcccaaaattcaggttatggctcgatcctcacctttagacaaacacacattggtgaaacacttgcgtactacttttggggaagtggtagctgtaacaggtgatggaactaatgatgccccagcccttcatgaagctgacattggacttgcaatgggaattgctggaactgaggttgcaaaagaaagtgcagatgtcataattctggatgataacttctccacgatagtaacagtggccaaatggggacgttcggtttacataaatattcagaaattcgtacagtttcagttaaccgttaatgtggttgcattaatagtgaatttcacatcagcctgcttaacaggaactgcacccctcacagctgttcaactcttgtgggtgaacatgataatggacacactgggagcacttgctcttgctactgaacctccaaatgatgatttaatgaaacgttcacctgttggaaggaagggaaatttcatcagcaatgtcatgtggaggaacatcttaggtcaatccttgtatcagtttatggtgatatggtttcttcagtcaagaggaaaatcaatctttttacttgagggccccaattcagatctagtcttaaacacgcttatttttaacacgtttgtcttctgccaggttttcaatgagatgaattcacgtgaaatggaatacataaacgtttgtaaagcatattggattac

SEQ ID NO: 5456 - DNA, 565 bp, Glycine max
  Clone ID: PAT_MRT3847_104935C.1
ggccaaatggggacgttcggtttacataaatattcagaaattcgtacagtttcagcttaccgttaatgtggttgcattaatagtgaatttcacatcagcctgcttgacaggttagaaagttaatttaattttgttaccacaaaatagggttatgtacttacataaacagcaaggaactgcactttttttgttttcacaccagcctgcatgacagattataaataaaaacactttttttgttttcttcttattagttatcttatgatcttacatgtattttctctatccaggaactgcacccctcacagctgttcaactcttgtgggtgaacatgataatggacacactgggagcacttgctcttgctactgaacctccaaatgatgatttaatgaaacgttcacctgttggaaggaagggaaatttcatcagcaatgtcatgtggaggaacatcttaagacaatcattgtatcagtttatggtgatatggtttcttcagtcaagaggaaaatcaaatctttttacttgagggccccaattcagatctagtcttaaacacgcttat

SEQ ID NO: 5457 - DNA, 734 bp, Glycine max
  Clone ID: PAT_MRT3847_104936C.1
caaaacatgaaaaagttgtaagtcacaaacaacgaaaggtcacgttcaatcttcgttttgctgctgaggcaaactacgtaaaagagctttcataagcaaagacaacccaagaagggtatctgatctgatacaacacttagtgccaaaaatccaccttcacccacaaaacaaaacacaaatctaaagcttcaaactttggcatcaatccagcgacccagttgccggaagtcccattttccggcgaagaatggcggtggagagtgacaaagtgggttctgatgggaaagtttggagcttttgcagcatgccattttggcaaacaactcatgcttcttcatcttcttcttcaacaacaacaacaataccaacaacttcttctatgcatcatagtgttcaccatcagagccagattcttcagtctcttgatagatccactcatcaaccttccaccactgtctcttctgtggctaaatctcttctccccacaaggagaaggctccgtcttgatcctcccaacaagctctactttccttatgaacctggtaagcaagttaggagcgccatcgcaattaaaaacacttgcaagtctcatgtagctttcaagtttcaaacaactgcacccaagagttgttatatgcgccctccgggtggtattcttgctcctggtgaaagtataattgcaactgtgtttaagtttggggagccaccagagaaacatgagaaaccaattgatc

SEQ ID NO: 5458 - DNA, 1354 bp, Glycine max
  Clone ID: PAT_MRT3847_104937C.1
ctcgagccgaatcggctcgaggtcacaaacaacgaaaggtcacgttcaatcttcgttttgctgctgaggcaaactacgataaagagctttcataagcaaagacaacccaagtagggtatctgatctgatacaacactagtgccaaaatccatcttcacccacaaaacaaaacaaaagcttcaaactttggcaccaatctagcaacccagttgccggaagtcccattttccggcgaagaatggcggtggagagtgacaaaacgggttctgttgggaaaggttggagcttttgcagcatgccattttggcaaacaactcatgcttcttcaacttcttcaacaacaactttttctatgcatcatagcgttcaccatcagagccagattcttcagtctcttgatagatccacccatcaaccttccaccactgtttcttctgtggccaagtctcttctgcccacaaggagaaggctccgtcttgatcctcccaacaagctctactttccttatgaacctggtaaacaagttaggagcgccatcgcaattaaaaacacttgcaagtctcatgtcgctttcaagtttcaaacaactgcacccaagagttgttatatgcgccctccgggtggtattcttgcacctggtgaaagtataattgcaactgtgtttaagtttgtggagccaccagagaacaatgagaaaccaattgatcagaaaagcagggttaagtttaaaatcatgagcttaaaagtgaaaggcgaaatggactatgtaccagaactgtttgatgagcaaagggatcatgtagctgtcgagcaaattttgcgtgtcatttttctggaccctgaacgcccttgccctgctttggataagcttaaacggcagctagctgaggctgaggctgcattggaagcaagaaagaagcccccggaggagacaggtcctcgagttgctggtgaaggacttgttatagatgaatggaaagaaagaagagaaagatacctggccaggcagcaggttgaagtggtagattcagtgtaaaatatttctttttatttttttggttgtgtccttaatgttctcccatttgtatgtccagaaattgaattccttggccactgcatatgtcaaatgtggttgagtgacctagtaaaagttccctaaatagatattgtgaaggcatttctttgttctatttaggtagcatgtttgtcgtgtttagattcgattgagtcaatgattggtggtactaaattatgcttttgcatcagctcttataatttttagatggatatctacaaatgtaattgatctttccataaaaaaggacgaccacgggcggtcagcgcctagtgagcg

SEQ ID NO: 5459 - DNA, 361 bp, Glycine max
  unsure (1)..(361): unsure at all n locations
  Clone ID: PAT_MRT3847_104938C.1
gaaagagctggggaatcatggttcaaatttgactcaagaacaacttgagactcatactatagccgcctggaaagagggaaaatttcaacaattcagaacacttgatantaatgggggatcatatccttaacaatttattcataccgaaccccataaatatctaaaaaatatagctttgaaagttttgcaaaacagaagtataactgtccctatcatacattcttcttcagaagataatgcatatgctcaactactacatcttacttccctatccggaatactaagaaatatatacagacattgtaagcactccgtgagtgctgtacccatgcttgagcttccagtgactgcaatacctgtg

SEQ ID NO: 5460 - DNA, 226 bp, Glycine max
  Clone ID: PAT_MRT3847_104939C.1
gggggaaaaaactgcctcggggcacacaccttttatatcccttcaaaaaagtttttagtttatttttcacactccaattgaacaaaattttttttcagttcgcatttaaaaaggggtccttaaaacccattccaccaaagtagcaaccccaaatcctgtgtgacaaggctgttttttatttcacaccggaccaaccatgtgaatatgcatccattgaaccttcctt

SEQ ID NO: 5461 - DNA, 444 bp, Glycine max
  Clone ID: PAT_MRT3847_10493C.1
tcgtgtaaccagccttgaaaaggctctcactatgctgattgtttaactagagaaaagagacactaccatgcacgaaattgcaagaccaatggatcataatctttcttatcagaaactcaagatatatctaagatgcactgctccaatactctctttatgtaatttaaccaaacggaccaaaaaagaatcaataatttaattccgcagatggaaaaaacaggaactttgttttgcctgaatgcacccaccctcttatatctctatatatttgaacagacacaagcactcctttttataaaggcgcgaccttatgtggaattggaattggagatgtagaggtggctaagcagcaaaatgagatctcagccgcatggcggggaggatgaacaggaagaatcatggtgagtaagcaacaggatgcgacagagctgatgggccaacatg

SEQ ID NO: 5462 - DNA, 420 bp, Glycine max
  Clone ID: PAT_MRT3847_104940C.1
gctgcgagaagacgacagaagggggcactgcatagatggaaaaagcatggaaagaggcgcattgttagcaacgtgtggtctgctgttgcagcataaaacggagtagagcttcatcctctgctcttgcacactaagacccttctcttccttagcaaccccacttcttagttacacatccacatttgcttgtcttgtttaggtggttggtgagaatgtcagagacattcatattcacactttctctggttatgctatgtgctgcttcagcttttgcagcagttccacacaggttgccagaagtttacctcaagaatggtaactttgaggagaatccaaaccccaaatacctcaagaaaacgacactgattgggaaatatgctcttccaaaatgggagatcagtggtcatgttgagtatgtct

SEQ ID NO: 5463 - DNA, 500 bp, Glycine max
  Clone ID: PAT_MRT3847_104941C.1
cccacgcgtccgatcgaatcatccattgtgcgaagatgagacccaccgcgcgtcggcaagcgaaggactccttcattcccccggcgccgcccactccgctggacttccaccaccgccagtactcctcccgcgactccgacgtcagcagccgcccctcctccgtcggcatcggcagacgccccaccctagacctctacaatgagccttcctacaagcaaacggtggtttccaccatcaactccttcctctcctcccacaacttcccaatcaccttcaaaacgacgctcccctctgccaaagacatccacgaaaccctaaaatttctcctctctctcctcgacttccctttctccaaactcgaagaggatctccctcccctcctcaaacgcctcaattatccttttaaactcaacaaatccattctccgttccccagccgcgcctcaccaatggcctaccttcctcgctctcatccactggctcggccagatcgggcgggag

SEQ ID NO: 5464 - DNA, 172 bp, Glycine max
  unsure (1)..(172): unsure at all n locations
  Clone ID: PAT_MRT3847_104942C.1
ttcaaacggttgcgtaaaagaccactcgaagggaaactacttgacaggcgagattaagggtttctgcaacgcggggcnacttcctttggtgtaggaggatccaaagcttatcgtacgccgtgcatgtcgacgtacatagtcttttttattagtgtcactctaaattcaatgt

SEQ ID NO: 5465 - DNA, 237 bp, Glycine max
  unsure (1)..(237): unsure at all n locations
  Clone ID: PAT_MRT3847_104943C.1
cagaaggtacatttattagatttagttgnttcctgtgagacacgtaccattgccctttttgtttcataaccattcttccncatgtttgatccatttccttggttttcaagaattgctctaagggaanggnttgaagaaccaggnaatggcaaagttggcggaatatgaattttattattgttaaatgaacggcntgaagaaactccattatatggtgttgncttttttttttttttt

SEQ ID NO: 5466 - DNA, 330 bp, Glycine max
  unsure (1)..(330): unsure at all n locations
  Clone ID: PAT_MRT3847_104944C.1
nnnacncgcacgcgtacgtnagctcggnattcggctcgagngcanatnnngattnncncaagananactttnagcagatgnctaatgttgtntggnnggctcctgnggacnaggcgagtttgtggtnacgactncattangttncgngtnatgntctggaantgcaagangctnatcttggtcaangctcgtaaatgtgttacgagaatnntatttgcacagtcnaggggangctcgccaattgagnnggnaagntctttctngtantgaanggctgcaaaaagctggtgtgcctaccatagccccanatngnagntctnccttcggtgn

SEQ ID NO: 5467 - DNA, 139 bp, Glycine max
  unsure (1)..(139): unsure at all n locations
  Clone ID: PAT_MRT3847_104945C.1
aaaaaaaacaacaataacacacgattcctttcttctctacgaagatgatcaanatgaattctcgcgttcgcattcttgtgtncattncacngtggaaccattgcnncnttngncncaaacaaccacnancannnggntc

SEQ ID NO: 5468 - DNA, 482 bp, Glycine max
  Clone ID: PAT_MRT3847_104946C.1
tccacgcgtgcgggcataaccaagattgaaggctctttacggaaagtctattagccgcttcagaattatcatgggttgttaaaagtccgacctaatgctttgtacgtatgctgccaaattcaaactcaaaaacggaaaatcgcatattttttgtaatttagtttgatttttggatttatatatatatatatatatatatatatatatatatgtgtgtcagttgagttttaaaattatgatattctctgtcattggtctcattatgactttttaatgatgtaagttgacaaatgtcgaaatttgatgccgcgttataaactgctaaatttaagataaatcaatgagaaagcatattagaaaatagcattatttcacttatgaaagtatctaattttattgagaataataaatatctatgatataaatatctatgtttagttgttattacactatgtatcttatctcacttatcgtcctatata

SEQ ID NO: 5469 - DNA, 385 bp, Glycine max
  Clone ID: PAT_MRT3847_104947C.1
acgatgacgaggcaaaattgccggtgtcacaatcggttagcatggttcactccagcaccgcaccgtaccgccggcgggttttccagtttttgattctcatttctcactcgctccattttctctctctcgttctcttctttccctctcactctctctgcgcattttccgttatgaatcggagctgaatctgaatctcatcgaactcgaattgcgttgccggatccttctgcggcctgagaagagagatagggcggcgctccgctccctcgcggcggaggctctgaccggcgatggcgttgtccggaatgagaggtctctccgtcttcgtcagcgacatccgcaattgtcagaacaaggaacaggtgatgctccgcgtcgacaggaa

SEQ ID NO: 5470 - DNA, 1490 bp, Glycine max
  Clone ID: PAT_MRT3847_104948C.1
tagctcgagccgattttcttgtagtgaatggttctttccttactcgtccctgttcactctctcaatcatctctttttctcttctctctcactctactcaattcaggacacccttttccttctaatccttctgtacaaggaatccttctcccatttggacatgaaaattaagaaaaggatgagggatattggttcacttgagtgcataatatcagcctgaagctctatgtaattctcaacatctaaagccacacaagaaaatcagcatgcgttggttgggtctttctgttgatgtgttccgccaagttatacagttgaacttatactgtaaagttattctgtagatcatcatttccaaaaatcctatatttttttgcttctggtctctttgcttagccactgccatggatgccaaccattgtctgatcgtttcttctgataagtatagaattggctaaaagataggaagtgaaggcagattctgttgttttgtattttcagtatgttcttatctcatattgttctctagttctagctgattctgatttgtttagcttggggtaacttcattgtgatattcaattgagcgtttattctctgagtgcaataacaattgattgagtagtgtggtgagaaacgaagcaatttatggttgggcaatcaagttgctaataatgctgaaggggattgaatcatgagtatggacttcgtttggagaaaaatgcaggatatggggtttcaatttgttgaccaacatgattatactgtagctttttatggagattaaaggtcacagattgaacactttgaagtgatggagatggtatgggggggctttgctgtaaatgaggacacttttttttctctctctcgtgtcttcgcaaagcagcaagtttccaaagatctcataccacaacaccggtccctcttcccgccctccgttttgtcggtcggtcaaggctgcccgctcttcgccccgccctctccccgtggcttgccagtcactttcctcatgtttcgccggtaggctctagtgtttcagcatgcgtggccttccaacatatctgaattcaggcacttccatcttgcctgctgtcagtacatttcatgggcttgcagctccttctatcccaagtctgaagaccaagctaacaaatgaagtgcaaggattccttcagtatcgcatgctgacacaagtttgacagaaacacatcttggaggagctttacaaaatgcaaatccttctttgcagaagaggttactgatcttcgaccgctctgataatacacgagggttgttttatggtcctgtcctccctcttgtccagagtccttctggttcggccacatcgtttcctctttgcagcaacaattattgttagagtgatagcatgctttcaacccttgcatttttgtcaggctgagtacttccgtcatttgcttaagcctgtcacgtagattgcttcacatttccttctcactaagctggaat

SEQ ID NO: 5471 - DNA, 1458 bp, Glycine max
  Clone ID: PAT_MRT3847_104949C.1
cctcataatcaactcgacactaacatttccctttacttgctaaaacatggtccaagaaaagaaactagttgacgaggtgtccggttggctcaaaatttatgacgacggttcagtggaccggacatggtccggaccggaccaattcaagttcatggccgaaccggcccctccccatgaacaattcatagacggcgttgccattcgcgacgtcgccgttactcacggtggtggccagagtggccaccatgtccgactttatctgccagagataaagccggaagacagccaaaaactaccaattgtcctccatttccacggcggcgggttttgcataagtgaaccggactggttcatgtactaccaagtctacacccggttcgcccggtccactcggtccatcgtggtttccccgttcctccgccgtgccccagagcaccgcctccccgccgccatcgatgacggctttgacaccctcctctggctccaaaccgtggcccggtccggttcactcgagccgtggctcgagcaacacggtgacttcaaccgggttttcctcataggagacagttctggcggaaactcggtgcatgaggtggccgcgagggccggttcggcggacctaagcccggtccgggtcgcgggggcaattccggttcaccccggttttgtccggtccaaccggagccggtccgagatggaaatgccacagacaccgtttttaacgttggacatgctggacaagttcttagccttggcgcttcctgttggggccaccaaggaccacccctttacgtgcccgatgggtgaggcggcaccgccactcgaagggctgaaactgcctccggtgctgctatgcgtggcggagatggacttggtgagggacacggagatggagtactatgaggccatgaagaaggccaacaaggatgtggaactttatgttagcaaagggatgacacatagtttttatctgaataagattgctgtggatatggaccccaatgttagtgctcaaaccgatgctctcatttctaggatcaaggagttcattgagaagcactgaatggatcggttatccggagttgctatagtattcagagaagcttaattaagggttttgatatatatagtttatttgttgcactaataattaatcgagtttgtttcagcttaaataataattttgagttcgagttttggtaagtggtttatcattcctagtctcagagttggacgaagaactttgtttgttgcctacaatattagtagttctactgaactagtcgactcaggtaggatagtctcttttaatgaccaggtgtggcctatccaaaaaaaattgttaatttgcatgtattgggagagtgagaaagtttcttaataatatatagtgcccttaaattttcgggagtatcaaaaaaaaaaaaaaaaaagagaaaaaaaccagtaattatgcct

SEQ ID NO: 5472 - DNA, 1393 bp, Glycine max
  Clone ID: PAT_MRT3847_10494C.1
ctgtcttctgcttgttcccgggtcgggactcgcgtccgctgctccggtggaggcggtggcatactctgagcatggggcaaccaagtgtattggtatgacgattgaaacgaggccagattattgtcttgggcctcacttgcgccaaatgctttcttatggttgtacacgattggagattggagtccaaagcacctatgaggacgttgctcgagacacaaatagaggacacactgttgctgctgtagcggattgtttttgcctggctaaagatgctggtttcaaggttgttgctcatatgatgcctgatcttcctaatgttggtgttgaaagggacatggaaagtttccgggagttttttgagagccccatgtttagagcagatgggcttaaaatatatcctacacttgtaattcgtggaactgggctttatgagctctggaaaactggcaggtatagaaactatccacctgagcaacttgtggacattatagcaaggatccttgcaatggtacccccatggacacgtgtttatagagttcagcgggatattcccatgcctctggttacctctggggttgagaaaggaaatctgagggagctagcattagctcgaatggatgacctgggattgaaatgtcgtgatgttcggaccagagaagctggaatccaggatattcaccaccaaattaagccagaagaggtggagcttgttcggcgtgattatatggcaaatgagggttgggaaacatttctatcatatgaagatacacggcaggatatccttgttggtttgttgcgactgcgaaaatgtggccgcaacactacttgtccagagcttatggggaagtgttctattgttcgtgaactccacgtttatggaactgctgtaccagttcatggacgggatgctgacaagctacaacaccagggttatggcacacttttaatggaggaggcagaacgtattgcttgcagagaacacagatcaacaaaaatagctgtaatttcaggggttggcacacgccattattacaggaaactgggatatgagcttgaaggaccttacatggtgaaatatctagtgaaataacatactagatgtttcttatgtagttttgtcgcattagttaattatatgttttatatgtcaatcacaagacattcgattgtgctgaagatccctaacgctccctcccccaatgctctcggctagattggtattcataattatctagctttattatgaaatttaataaacatatttttggtaggttcctcttaaagttgcatcatcgattgcactcatgtttgacttgcattcactctcttacacaagttgcccgtatgggttaatgcgagtttgtcaatttagaaatgtttccccttgctttcc

SEQ ID NO: 5473 - DNA, 576 bp, Glycine max
  Clone ID: PAT_MRT3847_104950C.1
gaataataatggactctacaacgttccccatcgtgagcccctatagttcctttccttcctgcgtgccatgtagcttctttccttcctgcgtgccacggtgtctcaccacttccgcatatgattttagctttggcggtagagtgttatggtgtttcgtctgctcagttaatgcatactccatgagtttaactcctgctctaccttgagtccctggctcaatattgtctaccctgtggcctcctctccggaattttggtttattgacgaacaacttcatcccctttatatataaattgttatcaagtcttctctccagtcgatcttcgtcttctacccccttgaaccttacgaaaccgtacctgtggccttgtttattcctcttcgtaggtataaacacctcccacacttttccccactcctggaaaatcttccagaggtctttttcgcgaacataatcaggaaaatgggagaaatagaaagaggtgatgtctgatctgtccctccacgatgatggtgatccccttccacgagtggtgttctggtaatagtcgtgttgaccagctatatcctttccct

SEQ ID NO: 5474 - DNA, 367 bp, Glycine max
  Clone ID: PAT_MRT3847_104951C.1
gggttttctttttttttttttttttttttttttttttttttttttttttttttttttttttttttttttgaaggccagggaaaaaaaactttttttcccaggggaaaacggaaaaaggcaccatgttttgacaatttggggaattcctcaataaaaaacattttctgggaaaagcaaacccttttgataaacatgccatttgaaaaaaacctttttccatttaaaaacagctttttgggaccaaaattgaaagcctctttttaaaaggcccccccctcatccccttttataagcggggcaaccccaaaacatttgcatgaatcggatgttaccggcatgttaaaacaagtccctttaacaaggaagc

SEQ ID NO: 5475 - DNA, 300 bp, Glycine max
  Clone ID: PAT_MRT3847_104952C.1
caaacaaccttcaaattttctttttctttttaccaaaaacaaaccttcctggaatgtgctctcttttgcactggcatgatttaatctccgtcatcaatatcatggaacttgctactattatcttttcttaataatattataccctatatttatctggatagatagatagaaagatagattcatccatctttattatttgatacctgaattccagacatgatattaggcctattcaactcctaccgccttcctaatcctttgtcaaccatatcttaaacaacaacatttatgaccgtccca

SEQ ID NO: 5476 - DNA, 1038 bp, Glycine max
  Clone ID: PAT_MRT3847_104953C.1
ttaaaaaaatcacttattatactaacacccttactgaaaatgctccttattaaggagggtctgagagagcaagcaatagccttagaggaggctagagatcgttgggagaggcatggaatcaaagtggtagttgatgatgacctccgcaaggaggcctcggctggagtgacatggcttaatgcctcagagcaggtctcggttcaaggaacagttgacagggcagagagcttattggacaagctcaaacaaatggctgcagatatcagaggaaaatctagagatacccttcacaaaatcattcacgtggtttcccaatttatatcaaaattgagggaatgggcatgcaaaacaggaaaacaggctgaagaatttggagaagctgccatctcaaaggtaggcaagtcagtcagtgagttgcagcaaaatgctcttgaagttggaattggtatcaaagaaggtgcaaagcgagttgctggtgattgtagagaaggggttgagaaaatcacccaaaaattcacacagaagttcaagacctgaccttttctaccctcaacattttttcaagcttattggctgttgagtggccagagatggagtttgctttgattttctttttgcagtccttcaataaagacgtgcaccagacaccgacgcagggatgttggcagttactaacttcttataactgcctttcggagatcacaacatattcatgtgaaggcatgcttgtataattgatactagtaagaaattcagttaaggaataaccagttgtaattcaacatgttgccatgtctgcagcacatctagagtaaagataggcagcatgctgattataaattgtcatgatgattactctctcaaaccctctttaataaggagcatttcaataaggttgtaaaaataatcagtttttgctttatttaaataaatatctggataaacatattggtttgtggttgattataaccctcactaaattgtggctgaattattaatatattgttggtctgaatagaattaaataaaaaaacaaac

SEQ ID NO: 5477 - DNA, 440 bp, Glycine max
  Clone ID: PAT_MRT3847_104954C.1
ggtgttttttttttttttttttttttttttttttttttttttttattaatatgattaatactcattattaataacaatttgagggggtgagagatcgggaacaaagggaggactgaggctgttggagacaacattaagggctgcgagttccaaagaggagggctcctatgttcatcaagtgcgtcacagatggggatggtgctgagggcagaagctccctctgcttattttcctcactaccacccaaacactcttccacacattgtgttaaaggaaacgactgtgcttgtgacaaccttcatggcaaaggggggctgtcaaaggggagcattgggaaaaccgccttgtgggacactgctggacaagaagaccaccttttataaacacctttggggttccatggcgcccataaagggggactgcatttttttctcctaagg

SEQ ID NO: 5478 - DNA, 925 bp, Glycine max
  unsure (1)..(925): unsure at all n locations
  Clone ID: PAT_MRT3847_104955C.1
ggcctccgaaaaatacctcancaagccttttactcaaaaaaaggacagttttccaagggccccgaagtttccacactgttcccttcccggtgggtttcctcctttccaaggtggccaaaagaatgccctaactccaaccaaaaaaatccctttggacatccccaaatccttggccaacttccgggaattacccttttggcttaagggtcaatttaaaaatctgacctggttttcaaagatgagggactatataaaggcccttcccccgtaaattttggaaaaccagggccttaaatggttttaaggtcctttggaatggaattttaagaacatttccttacattttttccaagttggaattccttaacgggaatttcaaccaaaaatctttgtttggtaagaagaaggccgttgaaaagaaggggaacccttaatgggccaccctgttngccaccctgttgacctaattaaatgccctttggagcctaatcccttaatccttagggcccccaatcctagtaagtccttttgagaagccaaaatgggacctagtttaaaagggggaaaaccccgattttaccattcccaaatggttccagccgattggaaaattaatttcaaaaaattagagaaggccttgcaggacccctgggtttttgaagttaagaagaaccactgtaagttaaagatatcaagggtgaaaaagaccaggaccggaaaagggtcttcttttctgtaacaactgaaaatttaaaggtggccccttcatataccatggttgaacttgcgaaaagtctgaaaggaaatacctctcgaaatttcacaagttctacaaaaatcttgctactgggcctgaaaggattattttgtttggaaaaagcccaaccctatcgatgaaaaaaaaaagaatgggntgcccaatcca

SEQ ID NO: 5479 - DNA, 363 bp, Glycine max
  Clone ID: PAT_MRT3847_104956C.1
ggctcatgtgtcaatttagcttgggttttttgtctctataatagggggttgttccctgacgatgtgcatataagctacacctggaggtaaagaagacgctccttacccattactgtactctttgcggagattaggggcagggtttctagatgagagacgtcctttgggtccacatctcagatctcttcaaaagatgttcaaaccaccatctctgaccacatgagttttcagcctttgctagaagaggggggatggggtcaaaaagcccacctgaatcggtccgcacttcttgggggtcaagcacgatactggcaaccgcgcccacagcaggcggaattgattcttttgaaccaaacaacactt

SEQ ID NO: 5480 - DNA, 180 bp, Glycine max
  Clone ID: PAT_MRT3847_104957C.1
gttagatccgtaccacagatatgatcggacttggagatgtccatgctcttggatgagtatgctatagagcgatgcttcagagatgactttatatggggagttgtgactgatgacagggaagcgaacaggagagtagcggagaccgttgaacgacatattatgctgagagactatgagcct

SEQ ID NO: 5481 - DNA, 370 bp, Glycine max
  Clone ID: PAT_MRT3847_104958C.1
ccggaattcctgggtttgctccacgcgccgtctttccgcgaaccaggggcccaccaaagaccttttacaaaagcaatcgtgtcttgaccacaagaatctctcagatggttgctactcctgtgacagccaattcatagggagcagaaaatgactctctgagctggtcacagacttcgtgaatcattttcttttccactcttagtttatctgctgaacactctcctatttgatataggacttcgtgtcagattgaaacttcttctgcctctgtctcaggtccctgttcaattacccggccaagcgagagaagatgcgtgattagtgctcccactctcctatctgggataggactgacaaaaagagcccaacc

SEQ ID NO: 5482 - DNA, 334 bp, Glycine max
  Clone ID: PAT_MRT3847_104959C.1
gagacgatcgctcattcttctctgaaggacctacatctcagttccgatcgtaaattacttgcccctctgggaagtggtggccctcgcaatgttcgggacatttcttcatcaatggtctgagcatcactaccagtgaaaatcacgaaacttttaactcttgcagattttctcaaaactatgacgagactctgatcctatatactgctgccatgacagatatacgtggaagcattatgacctgcattacacaaacatgggaaatgatggcatcaaagcatactatgcgatgataaactctctgcatttaatgtctcacctgaaggaaagtttcttg

SEQ ID NO: 5483 - DNA, 1568 bp, Glycine max
  Clone ID: PAT_MRT3847_10495C.1
cgttcccagctccagaaactgaatcccgagcccatcgcatggatcatggactcgcacacacccgaatccctctccaccttcttcaacctcgtcttcaccatgcgcctcttctggctctgcgcctgccacgcgccccccgaagccggctccctctacttccactacctccgtcctccgaaccttcttcatcaccgtgggcgtcgacaccgaactctgcttcatgcgcaccctcggttacatcattacaaagcttcacatgatcaaagaactcagcgttggattgggcttaaaaacgatttttccttctcccagattctcttacgccaacgagactcacggtctttggattctcaaaggttacgcgccagtcatgaccatgaaactggcgcgaagcaataacgttaaaaaaagtcaattctctggcatcgatgccaaggagtcaattctccgttactctctggcgcaccaccaactcgaggcacacgtgcagctagaatacaccgttgggtttttcgatgctttcattcaggttcgtgcacgtgtcgataacatacgcctccacgtggcgaggttgggatttacccaaaacgacgacgtggatgatttcgttgaggagaagcactttccgtcccgggttcgggtttgggtgggcccggagatcggagcgacttattgcgctgggctgagcttgggccggtcgacggagaacaaagagagcgaagtggaaactaagagggttgtggagggcaatttggagaagtcgcagggttcgaatgtgaaagcgttagccaagtcgtcgaggaggacgcggagtaggagttggagaatggatcaagacgcggaagggaacgcggcgatattcgacgtcgttttgcatgataacactacgggccaggaaatgggctcgtggaggcccataagtgaaacgggtggtgacccgggtcatgggctgagagggcgatatgcgagggcaaatagagcgtttaataaaagcgggtcggtggttattgcaggggatgaatatggagaggaagtggggtggaggctttgcaaagagatggaagggagtgtgatgaagtggagaatagggggagagttttgggttagctatttgcccaaccaagcaaagggttcttcttttgaaactaggtacatggagtggtgtgatgaagttgatttgcctcttattcatggtaaaacaacctaagcaagcatgccagtatatatatatgaaagttgaaacccttaattctctcaccaaattacccacgcgaaaaaaaggatcggaaaaggaggagaggtttcggtaaaaatgcatgtaatagaactaaacttagcgactagcatggttagtatatgcctatatgatactgctgtttaggtgctatatatatcaatatatgtggaatagccattggtgcactatctaattaagaaaatgcttcatctatagtgtctggttccatataggattccttagttaaaatgtctaaaattgagtaaagctagctataatatataactcttggttaaacttttaagggcacgtttagtttacaatattaatt

SEQ ID NO: 5484 - DNA, 452 bp, Glycine max
  Clone ID: PAT_MRT3847_104960C.1
gatgagattgaaattagtggtttgatcactggttttggtgatgctatgcataaaggattcgtgcttgattggatgagagctcaggattgtgtagtgtgcgaggagtctaatggctattgcaaattcgaccaagccactaagcaatcgaggtgcttatgctcagatggtagaactgaagccaaaagttgcaaaaaagggcctgttgccaccccttgatgctccacaccatttgcgcaaacatgaatggggtccttatcgagaaggtaggcctttgcattttaggataatttgtaatagttatatcgagtaataagtagatatggaaggatttgaaacatatggtttgtgcagggattggttgagcttctttaatttgagtgacacatagcattcaagctggttgtaaattgatctttgcttgtcttttttatttagtatttatacatgcttgt

SEQ ID NO: 5485 - DNA, 503 bp, Glycine max
  Clone ID: PAT_MRT3847_104961C.1
aattgcaattaatatatgttggaatcttttagcggtttgaactaactaaatttttttgagcaaaatctgaatgcaacacatcaaacccatgcaatcaatatcctgaaagatctctggtcttcaaaataattgcatcaatttgaaagcattcattacataaccagttctaccaatttaggtaatgtcttgaatgaccaaatgagggtaactgtcttcactatgctcttcatctactaaaagatggatggacatgaatatccttttttcttcctcaataatttcagcttgcctatcttcttgaatgtcatctggttgtgcatcatggattggaggagaattccaatctacaatgtcttatcctctagacctccttccccattggctatagaattgggatcaccttttggtatcttcacgtgagctctgagttgatttctatacacgtttctacctcttgtgtaggcaactccatcattctttatatctatgttacctcttgagct

SEQ ID NO: 5486 - DNA, 370 bp, Glycine max
  Clone ID: PAT_MRT3847_104962C.1
attaatccaactgaagctccggagttccgcttcatagctaatactactgcggatttttcagtgcggactcatggaaaatcatcgagatacttatgaatatgcagctgcaaccttcattcttgctttggatatctttccagggattcatctacagtttctaaacctacgtatgcgctactcatataagcaacactattccaaagaccttacccactgaatggtcactacttaaacctcagacgcatcggagaacgccgtatgcattggatattcgacatcgaaaaaatctcacaggctaccatgttcacgttgcaacggcccttaggcccccagatatccattatcggctatcacgccaccgttgtgcaca

SEQ ID NO: 5487 - DNA, 282 bp, Glycine max
  Clone ID: PAT_MRT3847_104963C.1
tagctttttatatcacagaaaccggctcccccgcggtccgtaccctttaaaactattcctcctccacctacccagacatgtatcccatacccaattccaatgtcaacaatctttttttcaaatcatcaaccacttcgacttaaataactccacattcagccacactctcaattccatcatgtatcctaaccatttccaacaccaatccaaaccaattcaattcgacttctactctaccaatagagctttccttgaccttcttcatctttaagacagtcacct

SEQ ID NO: 5488 - DNA, 349 bp, Glycine max
  Clone ID: PAT_MRT3847_104964C.1
ccgggacaatgactctcggcaacggatatctcggctcttgcatcgatgaagaacgtagcgaaatgcgatacttggtgtgaattgcagaatcccgtgaaccatcgagtctttgaacgcaagttgcgcccgaagccattaggccgagggcacgcctgcctgggtgtcacactgaggaaaaagtcgcgagttcgagtaaacggttgtttgaactttgctaccattgattttcattaattactatccacttttcattatcctctacaaagtgtatcttaaccatttgaagagttatttataccttgaggttaaattattttagttcttaaaaaaaaattaaatagttttgttg

SEQ ID NO: 5489 - DNA, 501 bp, Glycine max
  unsure (1)..(501): unsure at all n locations
  Clone ID: PAT_MRT3847_104965C.1
cctaattcaagcattataaaaaagtgcttcagtgccacaattttttcatccttccttgctccattttgtatcatttaacaatagggttgcgcaagtggaagatttcaaatttgaattgatgaatccaatttgaaatcttccacatgcgcaaccctattgttaaatgatacaaaatggagcaagtggaacatttcaaattggattcatcaattcaaatttattttgaagatatttctagatgtaactcattcctaagtgtatttgatagccaaagtattaatcagaaatattttnagggttgtcactattaattctatcatctaagtaaacattaaatagagagacatgtggtccaacccaattgtcttatcattaaacatatttatttaatttttacggctggattgagaaatttgattccatgtcttccaaaaaaaaaaaaaaaaacagaaacaaaaacaaaacttttcttgtgaaagttgaacaatccaaaaaggaaaa

SEQ ID NO: 5490 - DNA, 190 bp, Glycine max
  Clone ID: PAT_MRT3847_104966C.1
ctcgagaatttctccctcttcgctctctctcagtgaccagagacagatgatgatggagatggcgaacgaaacgctgtcgttgcggcactcgggcgtggtgtatgggcgattgggtggagtcagagacgagtagagtgtatcagacgaagtatgaagtgattagcgcatagtgactacatcgtatcactca

SEQ ID NO: 5491 - DNA, 3170 bp, Glycine max
  Clone ID: PAT_MRT3847_104967C.1
tggtaactcaactgaaaatatcagatgtaccacagccagcaatgataagatccccaatttctcaaggatggcctatcagtgaagagagagtatcagaatggctttggaccttgcataggatagttgttgatgttgtgaggactgatagtcatcttgaattctacgaggacacgagaaatttagctaggatgtcagatattcttgctgtctatgcatgggttgatccttcaacagggtattgccaaggtatgagtgatttgctgtctccctttgttgtaatctttgaggataatgcagatgcattttggtgttttgagatgcttttaaggagaatgagagaaaattttcaaatggaaggcccaactagagtgatgaatcagttgcgagcattatggcatattcttgaactgttagacaaagaaatgtttgcccacctgtcaaaaattggtgctgaaagccttcattttgcatttcgtatgttgctagttctctttcgaagagagttgtctttcaatgaggctctttcaatgtgggagatgatgtgggcagctgactttgatgaatccatggcttatgatttagaagagaactgtctggaagcattggagttacaacttcctagagactcaagcaatgatatgagagaagaaattgcagatagtgatggtggtagtgtgaagagtggttcacggtcaaatcataatgaaaatgacaacacaaaagccagcccacagtcaaatcatgaaagagctgatcactcagtatatgacagcaaattgaagtcgctctcatcccataccttttgtggcttggcaaggaatatctggcctagaaatcatcaagttcaaatgagcagtatttccttaacaaggaaaggaaataatgagttggccatattttgtgttgcagcaattcttgttttaaaccgtcagaagatcattcgagaaactcattcctttgatgatatgataaaggcaggtaatcaagaaaatgaactatgttgcagagaaaggggactaaggtaatatcattgccattatacttgagacagaagcactgagtatcacttatatggctctgcatttccaaattggagtttggtgttaagactttagtcattacttatccactttggatgggagactttgcagcttaaagtggttttgctttcagaggttcatccagctgctgtatgtccattgtcttcattactcttttttacgagccagtgaaaagattgacaaggggatttttcatcactctggttgctcccaggtttgatcaatttgcagtcttggatacctggcacaggttacgcaaacaattctctttctttgaacttttggttcagctcatttctggagaaagtcgtacaaaatttatttctacccagaggatttggagttcggaaaaagcacacgcatacaagtagaaatagagggtgaatatgtcacgggattgttgtaagatatggaaacaatgtagtctatttttgtgggtgtttgaattgactgaggataggatttatgttttatacataaatactacatcaagaagattttttattgactcgaattgcgggtttgcataaattacaaaggacaaatagtgtatgtctattgtcttcattactcttttttatgagccagtgaaaagattgacaaggggatttttcatcactctggttgctcccaggtttgatcaatttgcagtcttggatacctggcacaggttacgcaaacaattctctttctttgaacttttggttcagctcatttctggagaaagtcgtacaaaatttatttctacccagaggatttggagttcggaaaaagcacacgcatacaagtagaaatagagggtgaatatgtcacgggattgttgtaagatatggaaacaatgtagtcaatttttgtgggtgtttgaattgactgaggataggatttatgttttatacatacatactacatcaagaagattttttagtgacttgaattgctggaactcataaattacaaaggataaagagggtattattcataattcatgtattattctttaccttaaaaacacaaaacaaatctgtttaaactggggatatcggagtccactcaaaacatctgatttcgcctcctacttatttgggttgcccttatttgtgtatcggcaatatcggcgtatctctccttggttgcctgttaaaaccctgtaattccccatcttgtacattgatgtagcaaaagatttccgaaaatcttcaaatccaacagcgaactcctcggagatctgtttagtgtcatcactatatagtaattgttgatcaactccaaggacagcttcgtgggataggacccttctgtagtatgattctgtgaagttgtaacttgaccctgattctgggtttaggtgtaccagagggtctgcttgtcccttctttcttggcgggcaaagttttctcaacgactctagtgaagtaacactcatgcttgggtcgggttttccggaaccattgtagttgtagagccgatcaacaataaagctacaatgtgttctgcccattgtgtgtgctcctaaaagtgtggtcatgtctagttcattcaagttcctggatttgaaatattccaggactttctgcagcgagacggatggtgatggcaggtctactgatgcagcatctgatttcatgccatcctttctacctgttaaaactgggtaacctgctccacctgccagtttaacagcatccctggtggcgaggtggagtatatcagcacaagacacagttccagggcatcgtgattccagaacagcttttatcttgtcaatgaccgcaaatcctccaagcccccggttttgtgctgcttttttctctggatttgctccttcgtcaagcagaattgatgcatcacatccagtgacaaaacagtcagcataaaccaagcggagaagctttgctgtaatgcttctgtcattcttccaaaacaggttcacttggtgccggacatactcctctgcgtcgtgacatctattcgtcaccttataataatgccaccgcaaatttggtgttttcacctctgcatctgccaatccataacacatgctcaccactacgagagctaccagtggaaaacccacacacataactcctcgagcctaggtgtttttgtttg

SEQ ID NO: 5492 - DNA, 847 bp, Glycine max
  unsure (1)..(847): unsure at all n locations
  Clone ID: PAT_MRT3847_104968C.1
tttttataaaacataaatcctatcctctgtcaattaaaaccaccacaaaaattgactacatgtttccatatcttacaacaatcccctgtgacatattcaccctctatttctacttgtatgcgtgtgcttataccgaactccaaatcctctggttagtaataaatttttgtacgattttctccagaaatgagctgaaccaaaagttcaaagaattgtttgcataacctgcgccaggtatccaagactgcaaattgatcaaacctgggagcaaccagagtgatgaaaaaatccccttgtcaatcttttcactggctcataaaaaaagagtaatgaagacaatggacataaagcagttggatgaacctctgaaggcaaaaccactttaagctgcanagtctcccatccttagtcccctttctctgccacatagttcattttcttgattaccttgttaaaatatttctttcggagtttgattgctgttgttatgcagcttttcacattcatctttaacatcttgtcattgaacatctttatcataccatcaaaggaatgagtttctcgaatgatcttctgacggtttaaaacaagaattgctgcaacacaaaatatggccaactcattatttcctttccttgttaaggaaatactgctcatttgaacttgatgatttctaggccagatattccttgccaagccacaaaggtatgggatgagaggacttcaatttgctgtcatatactgagtgatcagctctttcatgatttgactgtgggctggttttgtgttgtcttttcattatgatttgaccgtgaaccactcttcacactaccaccatcactaatgc

SEQ ID NO: 5493 - DNA, 284 bp, Glycine max
  Clone ID: PAT_MRT3847_104969C.1
cccacgcgtccgaccaattccactagggattcaattcctatgcgattccgagcttgctagggccaccgcggcataccgtccaggagatcgtacgcttacatacaacgatctacctatgctcaacaggcacctcggatcaaactggagcacgacatgactgactgccaagcctgctatgaacgtgccatatcgtacattaacaactgtggattacatgcaagtgcagccaccatgaatatgtgctctaaatcccacacagacatgtttttgaaacaggagcacac

SEQ ID NO: 5494 - DNA, 596 bp, Glycine max
  Clone ID: PAT_MRT3847_10496C.1
gttatgttcctcatgagaatggtccgtaattctgttgcatgcaaaattgtattgtgtttttagattattttttttaagaaaaaccaatttggattgcaattgcgtacaagtgactaatttggaactattctatcttggaggttaagtgactgattatagagtccactgaattatactatgaattcaaacttaagaaagattattggatgacttatatttttgacctatacatttgtggactttctcagaggatggatcctgtgaaggaagcatcctatgttcctaatatgtatttatgtttgctgctttgtactagttattctgagttatgatgatacaataccaaggagtctgtgttgtcttattttattttagatgttaatagcatagtcatacatctaggttccatttgattagacagtaatattcatttagagatagatcaattttaattttccaggtagaaacatgttatattatatcagtcaaggcatggcgttttaactaatgcattttgcctacttcagctatgatactcagaagtgcatgccattgataaatctctaatttttttgcttaattatctctggatatgc

SEQ ID NO: 5495 - DNA, 271 bp, Glycine max
  Clone ID: PAT_MRT3847_104970C.1
gttaaaacgcgccccaaatgacattgtctatgatatgaggagcttgaagcttttactttactctcacggaatttaaactgcctgaacatactgcatatttgtattattgccacctcatcgtgaaacttcgacctttctgagctggttccttttgtctctatcctactacttcctaggcatacgcggcatattctgctcttctgctcgttgcggcacgtcaatcactagatgatatatccatttggtgtgcaccagccacccctaacggttt

SEQ ID NO: 5496 - DNA, 465 bp, Glycine max
  Clone ID: PAT_MRT3847_104971C.1
ccttcccctggggcacctttgtcctacaccgcgccttctgctgccgccaggtcttcacggagaaccccaccgttgtccagcacattctgcaagaccaacttccctgtgtaccccaagggcctgactctgaatcgggcccttggagacttcctcggccaaggtatgttcaactcacatggcgctggatagaaagttcaacgccaaatttccagccacgaggtgaacactcgcgctctccacaagattcgtgaaaccgtagtcgacgcctaactctccgggcgcctccttcccctcctgggcgacggcgtcaaaaacaaaaccgtcatccccgacctttaggacatactacaacacttcacgtttgacaacatctgcaagatcgcgttcggcttagacccggagtatctccttccctgcctccgcgtaaaccccttcgccaccgccttctactacgccaccagaata

SEQ ID NO: 5497 - DNA, 536 bp, Glycine max
  Clone ID: PAT_MRT3847_104972C.1
cggacgcgtggggttctgtttgtttcataatgtaaagttgagatacttaaaactagcttgttttcacttatatgcatagctatctatacattgctccattaatcaggctcttctttatattgcagatttatctccttttgcagagttggtactggactctctgatgatgagcttgatgctgtagtgaccaaacttaaaccttacttcagaaagtatgaatatccaaagaagaggccaccaagtttttatcaagtgactaatcattcaaaagaaagacctgacgtgtgggttgatagccctgagaaatcaactattctgtctatagttcgaatatcactggctatagacagaataattgatttctcaggattgacagggtgagatatgacaaagcttggtatgaatgccttgatgttcaatcatttatagaactggtacattctagcaacggtaccacacagagggatacagaatatggcagcgaacaggacagtgatccataacgatcgaaatcctccactaggggagaaaagaaa

SEQ ID NO: 5498 - DNA, 430 bp, Glycine max
  Clone ID: PAT_MRT3847_104973C.1
ctgctttcttttttgttttttctttttctatttttttttgttgctttcctttttcttttttttggttttttttttctttcttctttccggggagggaatcccttgttgaaatgagcttccgggggccctacgcggcccccccaaaaaaccatttttttccgtagattttcctctttggaccaccctctttaattgttttcttttctggggggggggccaccccccctgggggcccttttttgattgagcaccctccagcctgccggagaatgggctttcttataaaccccccattgactttggcgtatatgaaacagcgccccccaaaggaagccctttgagggccttttcctccaagtcccctggggggtttgctaacttcccatattatttgccccttttttttgggctggacaaatttaaattcccc

SEQ ID NO: 5499 - DNA, 296 bp, Glycine max
  Clone ID: PAT_MRT3847_104974C.1
ataaaagctgcttatttgtcgcctattccaaactgcgggcgaacaaattcactatacatctcttgctattgacctagcacggtacaaaccaatttacataaattttactgccctgagccaaggtggcaaccatctgctgtcacccctgatataccaacaatctaacctgataaacacaattaccaatcttattgaacaaccgttgggtgtctgtccccttggttccaccacccactacaagtgcgccatggtatgtgatcctggaacttaaattccaattggtggcacccacattc

SEQ ID NO: 5500 - DNA, 309 bp, Glycine max
  Clone ID: PAT_MRT3847_104975C.1
gctgcatatgacgacagagggcggcagcgtctttgctgatatcgctcttagcgaaggataatgatttcatcattaagtgtaatgcggtcggacagaagatccttgataacgtacgcttatatgctatcgaatagaacggctttagcattgccagtgatttggtccactaggcttatattgacaaggttgcatatgaaaatacgctctgatgaccccatgaactgcatcttgcagaggattgaacgagcgaagtgagcacaatcctgcctgaatgagtctgaacccgctgacctgattgaaacgagtctg

SEQ ID NO: 5501 - DNA, 259 bp, Glycine max
  Clone ID: PAT_MRT3847_104976C.1
cacacttctgagtttcagttcctcatgctaaggattatggagccttcaaggaagacatttatatatatatgtgtgtgtgtgtgtgtgtggattttgctgaattaatgagtaaggaatatctctttgagaacaaaaacgaaaacgaaaccaagagaggaatcatctgtaaattggaattcattaattggtcgaagataaactcttcaaaatattttgtacttgtcatgatagtaagggatgttcttcttgtcccaatttc

SEQ ID NO: 5502 - DNA, 586 bp, Glycine max
  unsure (1)..(586): unsure at all n locations
  Clone ID: PAT_MRT3847_104977C.1
nnantaaaantaagacgtcgcatgcacgcgtacgtaagctcggaattcggctcgagaaggacaacacagctaagctcttcgactccacaagtcttgaacatcagaagactttccgaacagaacgtcccgtcaactcggctgctctctctcccaactatgaccatgtggtgctgggaggtggtcaggaagccatggatgtgaccacaacctccaccaggattggcaagtttgaggccaggttcttccatttggcttttgaggaagagtttggaagagtcaagggccactttggacctatcaacagagttgccttccatcccgatggcaagagctacagcagcggtggcgaagacggctatgtccgcatccactacttcgaccctcagtacttcgagttcgagtttgaggcctgaggggctggatctctctccccaatagggaagctgctcacagaaggttttagactctgaagaataaattagtttgttaaaaatagttccttgtcagacgttttgtgcagcctgaccatttttccctcttcactgagcctcgagtggctgatcataaagaatacttttattattgg

SEQ ID NO: 5503 - DNA, 436 bp, Glycine max
  Clone ID: PAT_MRT3847_104978C.1
ggctcgagcggaattgataatttagtttgtttcacctgaacgacaacagcaagcttgtaccgtgtgatgtggacagtgaggattaataaagacagctttgacggcacacgaacgacgatgtttgacggaaggagacgtcggactctaatgactagaaccagacggatgcaggttaagagctgggagctacacactgtcgacggagctgcggacgttgtcattcaagatagattagtagctggctctgtctgtgatacttagcagactattaggaagaatagggcacccgaacaaaggatacgacagtcatgctcagggctatacaccacattctttctgtgtggctgcttctttatggaactacagcatgggctctgaccatgacacgtactgtccaggagacatatgatatttgaagatgggaggccatgacaac

SEQ ID NO: 5504 - DNA, 200 bp, Glycine max
  Clone ID: PAT_MRT3847_104979C.1
cttttcactggtctgaatgatatttttatttaatatgatcctttgggaggcctagatcacaaaacgatcttagtggtgtcgctatatgttcccttgcaagagctgccactgtttatattacttctaatctcggctcatgatgctgctatgcccagttattgcacgactaggtaaggaacgagatgaacctaggtccttac

SEQ ID NO: 5505 - DNA, 2285 bp, Glycine max
  Clone ID: PAT_MRT3847_10497C.1
ttgttccccctcacactcaatactccacatcaattcacaacacacaattaaacaaacagtactatggatgtttggtcatggatatgtgagctccccaactcggtggaggggaccgagtcccactcgccacccatgaagttcgaaatcgcgagtgagaagaacgacgacaagctggacaactcaactcgttccattcacctgaaagctgagcgaacctccggctcagactcggaagctgcggtgatcttcaccgtatgcttgcaaggctttcacccacacaacgctcacaagcctctatgggtctccgaaaagtgccacctctcatcagaaaagccgttcctccctctcctcctccaactcctccaggaaatcatatcccactcccccacggcgcacgatagcacctgcccccgttcccagctccagaaactaaaacccgaccccatcgcatggatcatggactcgcacacacccgagtccctctccaccttcttcaacctcgtcttcaccatgcgcctcttctggctctgcgccttccacgctccccccgaagccggctccctctacttccactccctcctcgcccccgttctccaaacggcgtcgtccaaactcgcatcctccgtcctccgaactttcttcatcaccgtcggcgtcgacaccgaactctgcttcatgcgcaccctcggttacatcattacaaaacttcacttgatcaaagaactcgacgttggattattaggcttaaaaacgcttttgccttctccaaaattctcttacgccaacgaggctcacggtctttggattctcaaaggttacgcgccagtcatgaccatgaaactggcgcgaaccaacacagttcaaaaaactcaattctctggcatcgatgccaaggagtcgattctccgttactcactcgcgcaccaccaacttgaggcacacgtgcagctagactacaccgttgggttttacgatggtttcattcaggttcgtgcacgtgtcgataatatacgcctccacctcgcgaggttaggtttcagccaaaacgacgacgtggatgatttcgttgaggagaagcactttccgtcacgggttcgggtttgggtgggcccggagataggatccacttattgcgctgggctgagcttgggccggtccacggagaacaaagagtgcgaagtggaaacaaagaggattgtggagggtaatttcgagaagtcgcagggttctaacgtgaaagcgttagccaagtcgtcgaggaggacgcggagtaggagttggagaatggaccaagacgcggaagggaacgcggcgatattcgacgtcgttttgcatgataacactacgggccaggaagtgggctcgtggaggcccataaacgggtggtgacccggctcatgggctgagagggcgatatgcgagggcaaatagagcgtttaataaaagcgggtcggtggttattgcaggggatgaatatggagaggaagtggggtggaggctttgcaaagagatggaagggagtgtgatgaagtggagaatagggggagagttttgggttagctatttgcccaaccaagcaaagggttcttcttttgaaactaggtacatggagtggtgtgatgaagttgatttgcctcttattcatggtaaaacaacctaagcaagcatgccagtatatatatatgaaagttgaaacccttaattctctcaccaaattacccacgcgaaaaaaaggatcggaaaaggaggagaggtttcggtaaaaatgcatgtaatagaactaaacttagcgactagcatggttagtatatgcctatatgatactgctgtttaggtgctatatatatcaatatatgtggaatagccattggtgcactatctaattaagaaaatgcttcatctgtagtgtctggtttcatataggattccttagttaaaatgtctaaaattgagtaaagctagctataatatataactcttgtttaaactttcaagggcacgtttagtttacaatattaattaatttctcgtgttgagacctctattttaatacaaaatttgtgactaaattaatttataggcaccttttaatcacattcaataattttgaatcaatttattaattaaaactaaaagaaaaacagatggtttaatactctcagtatttcaaaatggttaattaatttcaataatacttgatgataagtgagttgaaaatgctattgcattcgatacttttaatgaagacagttagagaacaaatatttatttaaaataaactaaat

SEQ ID NO: 5506 - DNA, 899 bp, Glycine max
  unsure (1)..(899): unsure at all n locations
  Clone ID: PAT_MRT3847_104980C.1
gcttcggcatgaagacaagcttggaatgcaccctgcaaaagacttgactgatttctctctaatggatgaacgatcctcgctcatgctcatggtcctttcactactacaggcagagttagcctctgagagataaggagtgcaatgtgcagatttaggcataataacatcttgtatagttggcttgacttctttgtgtccatgaacatcaccttggtcatctttgacactttcgcgaaaaagctctaacaatttctttttcttttctggggatgtttcagccatagagccatgaattctattcctagaaggggtcccaaaagtgtggtgaactggtgtggtccctctagatggtgtaaagtcaccattgacactatagcaatcatcttcacaatntgagtctaaccaggccttggaatcaaattgtgaagatgaattctattcctagaaggggtctttaaaagtgttagtgatgtcctgtgtagtgttaggtcacccaccaatgcatttgtattggatatgagactctgatttcttctgttctggtcatttacttgtaatggtttgcagagacttgaaaatggggtggtgggaaccacactccaaaatggtgattttgacaagcctgagtatcagcttgatccataacaggggaaagccaatatagttctatcggtgaatatttgtacatatgcaatagatacggtttctggggggaaaaaaaacaaactgctaagatgtgtattgttctcattcttttctgttcataaatttgagtgtagaggttcattcccgcagatgaaaatctgatatccgtgtaatcgataaagggtgacactaattatccatgtcatatcataagtttttggagctgtggaactggaaattccttcagtttccct

SEQ ID NO: 5507 - DNA, 2192 bp, Glycine max
  Clone ID: PAT_MRT3847_104981C.1
ttcttagctgatgaggcagctgttctattgctgtactcattgttgcaagggaattctgcctttctggagtatgtattagtgcggacagatctggatgcattgttaatgccaattctggaagctctatacaatgctccaagtaggactgctaatcaaatttacatgttgctaattatacttctcatactcagtcaagattcttcttttaatgcaagcattcataagctgatattaactggtgttccttggtacaaagaacgcctgttccatcagacttctcttggttcgctcatggtcataattcttagcagaactgtacagtataatttgtcaaaactacgggatgtctatctccaaacaacatgcctggcaaccttggcaaacatggcacctcatgttcatcgtttgagtgcatatgcatctcagagattagtcagcctttttgatatgctttcacgcaagtataacaaattagctgaacgcagagataataagctccatattgcaaaaggaaactcagttgaaggaaacaaccttgtagaagatatgtcaactgaattgcacatttatactgacttcttgaggcttgtactagaaataataaatgtaatcctgacttatgcactacctcggaatcctgaggtagtgtatgcaataatgcacaggcaggaagtctttcagccattcaagaatcatccacgtttcaatgaactgattgataacatttatacgattttaaaaacccattccctttcgaacgcacggtgaatttttgcacaatgccgttaccctgaatctagcaccgaattagatttgatacactatctacgaccacatcgcgagagaaaaaaacccttacttcttcgaatggggtcggtgccgtcaacgccgcgcaggggtggcgcatactctccggagacggcggagtatctgatcggaactttcgtcggcgacacgcccttccccctctcatcggagttctggcagaaattgctggagcttcctctcaatgttcaatggtccactcagcgtgttcaacaagcttgcgagctattagccaaaaacaattgtcacaccaggcatcttgcgaagattttgttccatctagcgtgctgcttgcaagagtacatgtcttcttctggtgcgttgcccttggtctatgaaaaggcttttaatgcagtgtacatcagttcgatatttttaaagcacttgattgagagcgaccaaggtgagaatatccagttatacctgtctcttgaagataatgaggatgtgcagaaggatgttttaagagatcaaaccattgaaaatcttgctatgcgtaatgtgctgagctttatagcatcagtagaagtgagtcccgacacatttctcctacatctagagctgcttaatttcatgattattgcaatgtcaactcaacttctctgtgggccatcgaatgggccaaatgatgtgaacccctttctcgatgcagcaatggatcaggacagctctctggttggtgcagttgttcgcagattgcttctaaatttcatggtccgttctaatgttccatctaatagggctacttattccatcttgtatgatggaaatcagagtagtgtgctacagagagttggttctgcagctgcaaatattgttttatttccatttagttatctggtcagttcgggtggtgaagaatcaaaaagtcctattgcagatatcagtattcatgtgcttcttgttctcgttcattatcataaatgtcttgtgagtgaggactacgcgaatcacaaatcttccacatcagattctttactcaaagaaaatcctcactttttctgacaatccttactgcaaggccttagagcatgcaattgattgtgatggatcgtgtagatattgagggcaatgcacatagtgctccacacataaagcttccctttgcttcattgtttgatacacttggcatatgcttagctgatgaggcagctgttctactgctttactcattgttgcaagggaattctgcctttctggagtatgtattagtgcggacagatctggatacattgttaatgccaattctggaagctctatacaatgctccaagtaggacagctaatcaaatttacatgttgctaattatacttctcatactcagtcaagattcttcttttaatgcaagcattcataagctgatattg

SEQ ID NO: 5508 - DNA, 2608 bp, Glycine max
  Clone ID: PAT_MRT3847_104982C.1
tgaaaaaaatatttgaagccaaccaccgagtttagaaatttgacccataaaaaagccacccccctagaatttaagaacatacgcaatgataattttatataggaaatttaacaagaaaagtgaaaatataagggtatctaatttatgaatttatttcttggattaatgaagaaacagttatccaagatgttggatcactggcagaaaaaatttcattacataacgatttacagcatcccttttgtttatgtttacaagatttcaaattcattttgcttggttctttacagaatccattgatgtatattaccaaaatttaattcaacaaaagtttagtttaacttatatacactctataaaacagttttacataaacatccaataacaatttactttatcaccatattatatttatgaataagatgacgtgataaaacgatcaaatcttattggatatctatgtaaaaaatgctttacattgataatgtgtataaattaaactcataagagaaactttgattcatctgattgctagagaaatcaatgctttccatttacttctattgcaggacttgtctttcgcctcctctcgcgaaagcttcggcatgaagacaagcttggaatgcaccactgcaaagacttgactaatttctctctaatggatatgcgatacatcaccagtgtccatgaactaatatcagaagagaaaagctggtgagagttatggagtgcaatgtccatattttggaaaaacatcttggatagggcgtttcactttcctccattcgtgaaaacttcggcatgaagataagcttggttcgcggcaatgcatagcatttactgattcttttctaatgaagttacgatcctagatcaaggtattcgtagaattggatactaaagtgtggtgaatctttttggtccctcgagatggagtgaaatcattaatgcctcaaaaaaaattatattcagattcccagttttaccaggcctaggatacttataatgcttcttcactctatcgcggacaaccctctaggttgttgataactcattagggggttttgtaccttgatgggtgatggaggaatcacaagcttctcagatttggaaccaacgagagtttgagcttcatgtctgcgttagcgtttctggggaccgaagaacacaaacccatcactcaaaagacaataactttatgatcatcacggtcacggggtgacccaaaacttgatgtattaattgctctgcacttgcttcagagagagaaagagatgaagaagaagaacgatcctcgctcatgctcatggtcctttcactactacatgcagagaacagttcttgagagataaggagtgcaatgtgcagatttaggcataataacatcttgtatagttggcttgacttctttgtgtccatgaacatcaccttggtcatctttgacactttcgcgaaaaagctctaacaatttctttttcttttctggggatgtttcagccatagagccatgaattctattcctagaaggggtcccaaaagtgtggtgaactggtgtggtccctctagatggtgtaaagtcaccattgacactatagaaatcatcttcacaatctgagtctaaccaggccttggaatcaaaaaaggcttcctctttgctaccatggtcagtgaaggtggtcgttgaccgagccgttgaccacccattttggggttgttgttgttgttgtcccttgatggatgttggaggaatcacaagcttctcagattttgaaccgaacgagagtttgagcttcatgtcttcgttagcgtttctggggaccgaagagcacaaacccatcactcaaaagacaataactttacgatcatcacggtcacggagtgacccaaaacttgagttattaattgctctgcacacttgcttcagagagagaaagagaacaagaagaagaagaagaatgtgcaaagggtatgtatctgcgtgagtgtgtatgtgtgtttttggtgtttacttaaagggtcggggggggatgtgaatttgagaggaggaaaaagtggaaggtaaagaggattggccttgaaagtgaagttatgttatgtcaacagctttgtgtggtgtggtgcgtgagctgctatggttattgctccccttctgtcgtcctcgcagccgtaagacttgaaaatggggtggtgggaagcacactccaaaatggtgattttgacaagtctgagtatcagcttgatccataacagggggaagaattcctcgttctatccacgcgtccgtgtacatatgcaatacgtacgatttctggaaaaaaaaaaaaaagaaggaaactgctaagatgtgtattgttctcattcttttctgttcataaatttgagtgtagaggttcattcccgtagatgaaaatcagatatcagtgtaatcaataagggctgacactagatatccatgtcatatcataagtttttggagctgtgctcagttgcttgtggttcggtaactgcttttcacctgggaattctctcgctttgtattgcatgtctatttacgattgttataattgaacaataagggaatattgacatagaaattatgatgcgattc

SEQ ID NO: 5509 - DNA, 399 bp, Glycine max
  unsure (1)..(399): unsure at all n locations
  Clone ID: PAT_MRT3847_104983C.1
actgnactccgctcggcatgcgcttcatcgccctccaggttcgccgcccctccggcaggccacaggggattctaaacattggcttcaccgtcctcgacagctccatgcgcagcatgccgctctacactcacaacgcctcggccgtcggctaccgccacctcatgggtgagaaggacgcttacgacagccacaaccacctcagcccccgcatccgccccactgccgtcgcaactcccatgcctgagcttcgccggaccaagagcgacaccagctccatgctcggcgccgctgaagccgtggcgcgccaccaccgagccatggctgtacgagccgactccaccatttcgggatccgaggttagcgttaaaaagaagaggggggangaagaagaaaaacgaa

SEQ ID NO: 5510 - DNA, 324 bp, Glycine max
  Clone ID: PAT_MRT3847_104984C.1
aatattattagcatggatttaacattaaaattaaccgaactttatacatatgcgaccaattgcccaacattaagcaagaataaaaaataagcaaccagtaggttaactatcccattacagggccgaaacacttgaacctgattaaaggcaagacatggccactttattctaaggatgtttgtttaacacataacacccgatggcaccaaaaccatgtcaggcgttttacataagttgttagataccgattaatagatccttattattcctaatttagggctttctttggtcgaaacttggtctcacaaaacctgactttccagt

SEQ ID NO: 5511 - DNA, 191 bp, Glycine max
  unsure (1)..(191): unsure at all n locations
  Clone ID: PAT_MRT3847_104985C.1
gtaattaagttgaattaattagtaaatattggttatatatancnatggtttagattttagttttaattacgatggtggggatggatgttgagttggttgtaggggtttggttgagttgatggagcgttggagactctccaatcaatgtaatgaaagggatcgaaattgtacgcaatgtaacgtggtacttg

SEQ ID NO: 5512 - DNA, 744 bp, Glycine max
  Clone ID: PAT_MRT3847_104986C.1
tagaatccttctttcttccttctctcaccgtcaaaaacaattcctcatctgccaaatccaatgtttttgcctcaaaactcataagttcacattttttaaaatttccatttactttgcctatcctcatcttcattcattttcctcttgttttaaggttttgcttctgattgattgattgattgcctttgagagaaacttgtgaactcagttctttctttctttcaccctcttgggtaagctcagaaacttccataaagaaacagagtttctccctaaaattctgttaggtgtttgatctaggattttcattgggtccaagaaggaggatatcattgctatgattttgaaggtttctctcattgtggttctcctagtgatatgctcctgtgttgtggaagccatttctaggaatcacaatcaaaatcccaaccacaacaatatcaacaaaaatggatcttctctggctgcaataaagtttcctgattatccaagtttcaatgatgtctcttcttctggggacgattgcagcttctcaaattctgagcaacttgggcattctgtacctaccatgacatcgggtgaagaaactgatgaagagagtgaaggggcactagctaacaaacatgacatcaggttgggaaactgatacttggagtgcggcttgtccagcaccaaaaccacacaagaattcggtgaaactccacttgaaacacagatcagggagcaaaggtgctgagcctaaaa

SEQ ID NO: 5513 - DNA, 354 bp, Glycine max
  Clone ID: PAT_MRT3847_104987C.1
aattgggggttttttttttggggaaaggaccgttttaaaaacaaaaattgggggcgtgagagattgaaaaccggggaaaccgtggaaataaaaggcctgaacccagtgaaatggccgacccagaaacatcatcataggaaagatatagacacccaaatacagtgggccatgtgagaacccaactttgggcaaccccattggtacaatgaacaaccataaaacagaagggccggggggggcgggggaaatttattagtggagcttggtcaagaacctcatgcgcccgccaagaaaaagtgcccacgcccatatttcacattaaaaattttcccgcttgacaaaggataaaatgta

SEQ ID NO: 5514 - DNA, 406 bp, Glycine max
  Clone ID: PAT_MRT3847_104988C.1
agccaaaaagctttcaagtcttccaggtagcattggtgcatgaaaagaacaaaatggaactattccttagcgttttccttgtttcatgccttttaatattaactaaatgcgctgctttccaaccccatatcatgttatgtcctatttttagaatgcactgaatataaaatactaagtaaaatagtgcttgcatgtctcgtactatcacataaaccaaacgctacataagactcctttaattggtgcttggcttaggataaaatccttgaaacatcgctcacacacattttactcgttagatccaatagtctacgagtctcttcatccaacttaacattatcctttctcatcctctctgcgacaatcataggcattttaccagcagttgcataagttttaagaaata

SEQ ID NO: 5515 - DNA, 189 bp, Glycine max
  unsure (1)..(189): unsure at all n locations
  Clone ID: PAT_MRT3847_104989C.1
gtattcccncattccaaattcaaganattnnttaaacttgacatctcngnctatcaacctttncccgncnncttgcggaancgacgatggccgantcaaaagcttncagaaacggcgcttanacgtgagcagctgacganntcgtgcgtngtcnatattttgaacaacgaattcatgaactccggcntc

SEQ ID NO: 5516 - DNA, 350 bp, Glycine max
  Clone ID: PAT_MRT3847_10498C.1
aaaagggggccaataaaccggcaaccgatttccggcaaccctttttgcattttgcaatgccctttctcccaatttcggattttttttccttaaaaaattcaaggaaacggggttgtttgaagatttggatttgttgttgaaaagttgagcacttttttgtgtcacaagtttgattttttgggtattgagaaggttgtgaattattttttataattcttctttttttgcggtgtttcaatggggtgtgtgattgatgggcgtttcactgttgagattcaaaatggagtgagcaatggttgtggtgaagtgggtttgtggaatgatggtggtggtgccattgaggatgctgt

SEQ ID NO: 5517 - DNA, 331 bp, Glycine max
  Clone ID: PAT_MRT3847_104990C.1
ggaggaacaaggggcaaattcatgaaatttcttttacagataaccaaaataattggggggggataaaatgcaaagggagaagaaaatgaaggcatgttgggggcccaggattttgtatacaaatatatcactattgcaaggaagcacctcaagtttgaaataaaattttgaagcagtagggcattcagggcaaaaatgacagacaaggctggcaacccagtccctggagacaaatatgaatatacaaaagggggcaaagctaagatggcgaaaaactcacacatgttgagccggttatgtgtgacccaacaccgggggtggggtggggcgg

SEQ ID NO: 5518 - DNA, 166 bp, Glycine max
  Clone ID: PAT_MRT3847_104991C.1
ccgaaattcccggtccaacccacccgtccgacaacgcttacattaaatttcctaaaagttttctttcaccttctttacataaccaacacgagctctcacatgggtcgacgtacatatgcttttaatatgctacacatacatttttcaacaatgaacgatttctata

SEQ ID NO: 5519 - DNA, 851 bp, Glycine max
  Clone ID: PAT_MRT3847_104992C.1
gtgattgtgttgcagattgcttgaggctccactataccctttatggtcacttcatttttagccatgtcaattaccactccttcaactcctctcattttcataatgtatctctcaattttcttggcacatccctcacaatgcaagtccacaaacagcacacatggtgaaggtggtttaggctcttccttcttctcttcttctgtcttttcttctggtttttcttccttcttacttgtccaacttcgcaaacttgcttgtcatcttcgaactatcgttcgtcatctcgaaagatttgattcaatcttttgttggttaattttgaaaatcgagataatcctggataaatctgaagtcgtgtataaacactttcagattgaatcaaatttcggggttcaaccaaaattgttcaatcggataaaatcagaagattataattcaagagttttgttttggtcttgtgagtttttcacatgttatgctttctgaaccaggatgattatttataatcaaagaacaggtggtttttggcggttgatggaagttatttatttttaaaaattgccgttaatggaagttttagtaacttccatgtaacttccaacttttgattaaaccgaacatctcgttattacattaaaacaagcgtgcactcttattttaacataataaagagatcaattacactaaaatgtccaacaaacctcccccattttagtgtaattaccgatcaaatcaccaaagtcataacataccacaaactactgcatagatgaaatatcgtgacgattgaatttcatcttagcaaattacacgtttcaaatattcgaatatcagggtgtcactaaggattg

SEQ ID NO: 5520 - DNA, 425 bp, Glycine max
  Clone ID: PAT_MRT3847_104993C.1
gtttttggatatcaagctattgattagcattgacctctttttttaagatcaccaccgatcttttatttttccgaagaaaagggagaaagctcgaaaaaaccctattttttaagagatcaaaggtccgggggttggttacgcaaagggaaggtactagcaccctaaacgtctatagtactctataggaacctcttgcttattttatctttatgctaaattaattatttgtttggaaataaatgctcaagtgtgaaaagattaaagagataggttcgagggaaaggaaaagaaatgttcttgttatttttattgatttggaaagacaaagtcttttgcctacatacccgaatgggatcaaaatcatgtagttcggggtagaaagtcgagtggttggttttgattgattttaaagttctaaaaaagaa

SEQ ID NO: 5521 - DNA, 439 bp, Glycine max
  Clone ID: PAT_MRT3847_104994C.1
gagagctcagaatcttcagctctacttcttcttccagaaaacaaagagatattcattcaaaaatcacctatctcatccctctcttgacccctccaacatgaagaacactaacagcaacacaaaactaatccttctccacccatatatccagaaacaaggaagctcaaaccgcttatggcttctagccttcatatccttcttcaccttagttttccttgccacactcatttacacaagagacacaacctcatctaccactaccactacctcttccacccctttatctagtttcaccaacacccttttatcatccactgtaataaacaccctcctccactatgcctcaaaatccaacgacacctttcacatgccccactcagacctcaaaaccatctccgacatgctccgaaagtgtccctcgccatgccaactcctcgtc

SEQ ID NO: 5522 - DNA, 471 bp, Glycine max
  Clone ID: PAT_MRT3847_104995C.1
ggccgcccccccccccccccccccccccccccacaccaacacccccccacgcacccctcacaccaacttataacagggcaaaaccattccatttttaactaaagaagccacattcctttatttggaatttgcttaatgctggaacaaaccaggctccaccaaatgacaaacctttcgtgcaaataacaaacatttttggaaaccacttaaaaaataaccccatggaacctacctaaaaaaaccccgttaaaaaaacttatctaaaaagggaaaggccttaataaatactcatgtccatactcgccttaaaaaccttcaggaacctttgctaagacctcctaaaaatctttttcaagggcagcatagatcttcccaaccctaaaaaaacattcccttttccatgcccttaccaaattaccaaggcacaaacccctttttggaatacataaggctaaatttggggccaatgct

SEQ ID NO: 5523 - DNA, 579 bp, Glycine max
  unsure (1)..(579): unsure at all n locations
  Clone ID: PAT_MRT3847_104996C.1
accggaccggattacccggtacgattcacgcccccgggtttcattctttgccgcnaccaaaaaccggaaacaaaagctaacgnnacgagacgccaagaaccgcacaaanacaggctacagagaagagaacgacgacccaagggaaagaaaaacactctctgagctggccacagacttcgtgagtcattttcatttgcattcttagtatatttgctgaacactctcctattcgatataggactccgagtcagatttaaacttatgctgggtctttttcagttctctgtgtaatttcaagatcaagcaggagaaatcttggattagcgctcccactctcctatctggtataggacttcgagggtagactaatctatatctctcctttctttcactctattcatctcactgatccgcattgccgatcaaagtggtcttattagaaaaacacttgggcgttcgagcaaatgactgctaccgtaatttactttggagacaacatgttcactgagacaacaatttgtaattgcagagatatggacatcttggttgtgtatatacaatagcaactcaatttagaaa

SEQ ID NO: 5524 - DNA, 416 bp, Glycine max
  Clone ID: PAT_MRT3847_104997C.1
tatggtgttttttttttttttttttttttttttgtttgttttgttctttatttcttttttgggaaaccaaattggcgctgggatcggtttggcgcgaattcgcaaattggcgggaaaattttcaaacttatgcaccgttttaccaagcccccacttagaacatttacagtcctgtgaagcattttgaaacaagggaaagtaagcagcgaagcgagccgggggttccaccagcaaaagcgtttgtttaaagtactttagtcccggccgaaatatttttgggggagaacttttttggcgggccttgatccacgactcgggatacagtagctccggattgttgaaaggggggcctaatcccggacaagcctctaactggagttccataccaatttttttcaggaacgggggacccgttt

SEQ ID NO: 5525 - DNA, 182 bp, Glycine max
  Clone ID: PAT_MRT3847_104998C.1
ctcgagccgttctaacctatctctacaccatacataagttatttttatagcattatacattgtctgtctccatggtctctacgaggactttcatgctgccactcgttgcttatgatacaccaccctccaccagataccaaccacgttcattgtccattttttctaataaaaccatacgcaat

SEQ ID NO: 5526 - DNA, 815 bp, Glycine max
  unsure (1)..(815): unsure at all n locations
  Clone ID: PAT_MRT3847_104999C.1
gggggtagctttttttaattttttttttttttnnttttttggagaagaaaaaagtaagcatttattatgctgcagtaagttatcaagcaaaattagaaaagctttgttcaagcttgaaaaaccacaactcaatactcctcaacttagagaagttacttacataatccattccctacagttactatgactcggactttccgagcaaaaaacctatctttcttctcagcaaaagggttaaagaggggtcagacccagaagcaggtcaagctaaattgcaccataaactagctttctatttgttagcagaacagaaaattagctagttgatcatttccacaattcaatagttctgatgaggccatacgaagaacccaggaactgccagtggtggaagggtagcgagtgcgattgcatcggtcatagttgcagcaaattctgcagtgctactttcaccgttggtgggattaaaatggtggaagaggttgtgggggtaacatgtgattgcagaatcatagggtatagaagacactggctgaatggttgagaaattgatgctgctactggcgtttgtgttctgaggtggttgaatggtgctgacaagagctttgttctccgtttctggggaaactttaaagcgttttgctatgccgccaactggaagagagttgttcaatatagcgtcgacgtcatatcgcctcatctcgaaattggttacggcacttgcacctctgaactttatggctgcaatatcatatgcctctgctgcctcctcttcagttgaaaatgttcccaaatatagatccttgtttcccgca

SEQ ID NO: 5527 - DNA, 160 bp, Glycine max
  Clone ID: PAT_MRT3847_10499C.1
ggaatatataccgttgaagatttcacacatttttgtggtcagacatccacagagattggggaatattctggggagtggcatgtaaaacaaaatgtggcatcgttttatagaatatgcaaagacttgtgttcttagtggaaaactcttatgtatacttatt

SEQ ID NO: 5528 - DNA, 864 bp, Glycine max
  unsure (1)..(864): unsure at all n locations
  Clone ID: PAT_MRT3847_1049C.1
gtcgactttcgcgtcccccgaacctttaatagcgccgtaattcgctgctccttctgtaatccctaacccttctctcaaccatgtttccctcttcttcttactcttgatttggtttcgatattgtttttcagttggtgttgcttatatcatatatagttaagcttaacaacctccattcaaagttaaagatgcctcgtaccagcactctggagtgctccggttgccctccgcttcgcgctctaacctttgacgcgcttggtctcatcaaagttgtggaggcccgcgataagcaacgaggagctccccaggtcgtagagaggtggggcgaccctgaatcatccaaatgtgtgatggctgtttcaatgattgaccgagagtctcaccctttattagctgtagcgaggaaaaacaaccagattgaagttttgagccctgttaatggagatattcaggctacaatcacggatgccaatgatttagatgttcaatctgaagtgaataatattgttggattgcatttatttgcaaaacaaaattcggaattagcttccagggattgtactctacttacatgcacaaccaaaggaaatgcaagcataaggtccattgaacttgttgattcatctacagtatcctcctgtattgactctccaaaaatatggaatgtatgttctggtggtaacatcttgtgttgcaaggtggatggaaatgagaagtttgctttatttggagggaaaggtgttgaaatgaatatttgggatcttaacaacttcactaagatctggaattccaaacctccaactaaggataacctcggtatatttacaccgactnggttcacatctgctacatttcttatgaaag

SEQ ID NO: 5529 - DNA, 212 bp, Glycine max
  Clone ID: PAT_MRT3847_104C.1
tagaaagcctttttcttctacaactccaaacacaaaggcgtgtgattcatagctgcctgcgcctccactgacagatctgtcaacatatctcttttgaacctgaatggttctggagcttgaacttcaactaccatttcagtcttctttttgaccagcttgaaaacatgtattgccttaagggttccctacaccatagattcctgtggaagctt

SEQ ID NO: 5530 - DNA, 288 bp, Glycine max
  Clone ID: PAT_MRT3847_105000C.1
ggggcaaaccattttaaagggttggaatttttatccccccttttgttttcacatcccaacaggggtcctttactttaccacttgccccataagataaaacgaaatacaacttgttttaagggggcccaaaaccttataacattgggccaactaaacctataaaaattaaatttccctaaaaaccaaacgagggtgcaacagggcaacaaaaaaaggacaaactgggggggggctaaggacctttctatcatgctgaaaaaacgggccaaccgaaaagggggggtgttt

SEQ ID NO: 5531 - DNA, 155 bp, Glycine max
  Clone ID: PAT_MRT3847_105001C.1
gactaagtacatgacaatttgtgcattgccttgtgaccatggttttttatgcttgtgaaaaagattacacacaccgggatctagcacacggggcttcaccagctggaaccatggctatgggagaatgggagaccgatgctgttgaccaaagagaa

SEQ ID NO: 5532 - DNA, 379 bp, Glycine max
  Clone ID: PAT_MRT3847_105002C.1
tacatgtacctcaaggtgacaataattcttagacgcccatagaggacactaccactaacattaatgacccaaacattcatgagtaagggattcatcttagacgcgctctaatctcaaactcaccatccactactaatttcctaatcatataacgctactacctgagcacactggtacacaagcaatgcacaaattgtactgagctgcggctgattatcacacggttctttttcaccagctcaagccggtaagcgacgccctgtgtctctagctgccggagccccactacgcgttgatctgactgacccaccgctcgcggctggcccgatcgtcggaggagacagacactccactgagcacttgctcccagacgtaccac

SEQ ID NO: 5533 - DNA, 932 bp, Glycine max
  Clone ID: PAT_MRT3847_105003C.1
taatcctctgttgagtttgattcctatttactcaatgtcttctcaagctccacctgctggccagtatccttctgggttttctccgtttttcccatttggtgcacctcagcaaactccaactggggtgacgacaaggggtgctgccacacctgctccattaagggcatataagaacccactaggggcaggagactctagttcaacaatgaacgggttcaatggtcaagatacttctgggaagaaaaaacgtggatcaccgtcgcgccacaccaaatcatctgtaaataagcctaagaaaagtcaagagccacctgctgatttaagtggcttagttggtattagccctgcccaaagagaagatggtagccgtgaagtggttaatattgtgctcatggcgtatgatgcatttcggagaaggctctgccaacttgaagaggcgaacgaattgagctcaagttcgatcaagcgtgcagatttgaaagcttgcaatactttgatgaccagaggaattccgacaaacatgaggaagagaataggagcagttcctgggattgagattggtgacattttttatttccgaatggaattgtgtattgtgggcttgcatgctccctccatgggtggaattgatgccttgcatatcaggggtgagtttgaggaggaaactctggctgtgtgcattgtttcgtcaggagaatatgacgatgatgctgaggatagtgatgttataatttatactggtcagggtgggaacttcttcatgaataaagataagcacacaactgaccagaagcttcaaaggggtaatcttgctttggataggagttcgcgacaacacaatgaagtaagagtcatccggggcatgagagatggtgtgaatccaaataataaaatctatgtctatgatggtctttataaaatccaagaatcat

SEQ ID NO: 5534 - DNA, 343 bp, Glycine max
  Clone ID: PAT_MRT3847_105004C.1
cccaccaaaaaatgggcggagattgtttttgcttttaattggatggatccaccggcttaccaaaagaagaaattccgccaatgccccttttggaaattaccggtggcaccataataccaccttaattggcccttaacctaacttttgccaccggcttttttggaccaaaccggcaaaccccctttttcctaaggtggcaaataaaatccagggttgtggttgaccttaatggtacccagcttaaccagaaccttttttttttttagccttttaatggcccgggccaaccttaattttcacaggttgttaaacccccattttaggttcccacccaagccccttt

SEQ ID NO: 5535 - DNA, 229 bp, Glycine max
  Clone ID: PAT_MRT3847_105005C.1
attcattcaaaactacaaccttatcttcttcaacatattctactatctaaccttcctattaccccttttttctcatcaataacaccttaacttctcttgttctcatacatacttctccatacccactttcttcataatatttcatcactatacaatcataacatacctttccctttactacaatacaacttttacaatcttctcttcaatacttacaccaacttttttt

SEQ ID NO: 5536 - DNA, 391 bp, Glycine max
  Clone ID: PAT_MRT3847_105006C.1
gggaaaaagacaaatgtaaatttttttttattaatagagatgcttaaattttgagatagttgtggctagctaactaaactagctttacgaagtagccaccaaacgaggctcactccaatttaaaaattcgtggttgtcgtggtcaccaccttctttgcaccttttgagcctttcgtactttcccatgagaatgacataaatcttcacatacccacatgcaaaacatggctcatctggttcttgttactacccggtctcgaactatgtttactgttgttcttattcggaagcgacttatacttgaccacctatgacggtaccacagactctatgattgacaaggtggacttttttcatcaacgttatcgtatggaaattctggagctgaata

SEQ ID NO: 5537 - DNA, 313 bp, Glycine max
  Clone ID: PAT_MRT3847_105007C.1
gagaatgaatgtgagaggcaatagtcgcactctcgtttgcattattgttttcaagaaactattgagctattgaagggaggagattgtggtatcatctaaaccatccacctgggttggaaatattcgctcatcgtcgcaccggcattaccattaacacaccgtatacccggaaacgaatcgtccgagggtttttttatttgtttttcgagttcttccactgcgtcccacgttaaacgaacatggaccagcccctgtgaggaaaatagccacagccctacgcttaagcgtgagaatggttctcctcagcaacgct

SEQ ID NO: 5538 - DNA, 1019 bp, Glycine max
  Clone ID: PAT_MRT3847_105009C.1
tcgtaacaataccatcagaacttctaagcaaagatttggttttgaactactctggaaacattaatcttcacagagaaagcagaataaagggacacatgtatgttattattggttcatcagttggagcttctgttctacttttggctactattatatcttgcttgtatatgcgtaaagggaagagaagatatcatgagcaagatcgcattgattctctccctactcaaaggctggcttcttggaagagcgatgatcctgcagaagctgctcactgcttcagttttccggaaattgaaaatgctacaaataactttgagacaaaaattggttctggtggttttggaattgtatactatggcaagctaaaagatggaaaagagatagcagttaaagttttaaccagtaattcctatcaaggcaagcgagagttctccaacgaggttacccttctttcaagaatacatcacagaaatttggtacagctgcttgggtattgccgagatgaagagagtagtatgcttgtttatgagttcatgcataatggcactctcaaggaacatctttatggcccattagtgcatggacggagtatcaattggattaagcgcctagagattgcagaagatgctgccaaaggaattgaatatcttcatacaggttgcattcctgtcgttatccatagagacttaaaaagcagcaatattcttctcgacaagcacatgagagccaaggtttcagattttggtctttcaaaacttgctgttgatggagtttcccatgtttcaagcatagttcgggggacagtaggatatttggatcctgagtactatatttcccagcagctgactgacaagagtgatgtttatagttttggtgtaattcttcttgaactcatatctggtcaagaagcaatatcgaatgaaagctttggtgtaaattgccgaaacatagtccaatgggcaaaattacacattgagagtggagatatacagggtattatcgaccccttgctgcggaat

SEQ ID NO: 5539 - DNA, 361 bp, Glycine max
  Clone ID: PAT_MRT3847_10500C.1
cgccagacttgtcgagttgagtaacatcagcttgtgacccaggtggggacaccaaggtaatgggacaggtctctggcttagccaggttgggttggtggctgcaccatgctgcctgcccgctccaagttcagagttgaactatgagaactgagtgaagacacaggtctcctggttcctagacaaggggatactgcgtgaggctgccttcacagagcagcgttcacccctgcctcttcacagtggagggaataccggctgctgcactgtcagcccatataacctttactttttttaaaaaaaaataattttcaatttaccaacaaaaaagcttccattctaaaggatccaagcttacttactc

SEQ ID NO: 5540 - DNA, 419 bp, Glycine max
  unsure (1)..(419): unsure at all n locations
  Clone ID: PAT_MRT3847_105010C.1
anagttccgcctaataaggcnaacggcnnatnaacggttanaaggcttccggggnaaattttccggggcttccggaagggtttttntttttctcccaggnaanncctatnctgggacnagttgnancangnattncnggaacttccaggnggncantnnggagcaaggagantnnntcgcntntaggtnatccgaatnggttncatattntcctccnaattaccnanngttcaanccncggngcccnctaatgntctcntccgcantnggancgcntacntgncnntgangtngcnanangtcantgttcncggggacnggnagnatancggtnagactntnnaangatnnnangaagctnannnncctcgtataagaccantccactntttangntatacancgnacactgcnggagt

SEQ ID NO: 5541 - DNA, 515 bp, Glycine max
  Clone ID: PAT_MRT3847_105011C.1
gcagggacgacgggctcactaagctgaggccgccctggtcgtccttttttttttttgtttttttttttttggttttaaatctgaaatcttgggagaataaattaaaacccctccaacaattaaacatatttatgctgaatcaacgagttcaggattccagaaaagtgcgggagcctaagaaatcaaatccctattaacaatgcatgtccgaatgctagggtaggtttcctatcgaacatattcaacttggggaaaaatgtacccaaattgaaagggaacgaaccctgacaaaaagggttgatcccttttaagcttagcctgggcctgtaccaccatgagtggcttccacaggtccaatgtgaagccacggctaaccttgcctaagcgttccaatgccttacttcttaagaactgtgcccaatgcatccctctcgcgagacaaggggatcgtctatcaggccaggcgctgaagcaaaaactgtacttaacgaggcttaagatattcttgtccaggg

SEQ ID NO: 5542 - DNA, 353 bp, Glycine max
  Clone ID: PAT_MRT3847_105012C.1
gccctgactgtgaccgctttggactctgctgggacactacatgacggatttataagggaggcacaagccatgctcctgcagcaatactaggtgccagagtcaaacatccgcaagggagtgattgctccctggaagatgcccacgatcccccgagtattgaaggctttcatctcagaatatgggcccctgctcatgactacgaaatacccggatgccattgtgaccaggaccttaatggcaactaaacggccaagctatcatacgcactagaagccctataatggcctgctctacattaaggcatgcagggagttctattagcttcgattgtgagcttcatagactacacgccc

SEQ ID NO: 5543 - DNA, 658 bp, Glycine max
  Clone ID: PAT_MRT3847_105013C.1
ggaattcggcacgaggaatccatgtgatgaaacagagataccatgttagtgaagtccatgtgatgaaacagagatatcatgttagcgaagtccatgtgttaccaatagttatagtattcctgttcttatatataccacaaaaatttggtttatgtcctatttttatttttctgtttatgcgaattcaatttggtgattttggttgcttgtttgttcctttttttggttgctgccaagactttgaagtttgattccatttgcactttgaagtttgagcacgggtccaatcttaccagatgtatgacccgatgagggctgtaacatgggcactgtttgctagtaaaaagctctcaattcaatgactttcaaacacatgaatggatttgtccaagcatttcatagagacctgaaggataataacaccttttacatttattatgttcttgcaaactactccatggctgccagaggctacaatgagatcaattcacgcttattctagtctaatatttcccattgctctctggcagattatggaagttactattcattatataaaagatgcagagaaagatcatttaaaaaaaaacagtttgaaaaccaggtcggaattgggttggttttaaaaacttggtttgaactagttatgttcagaacc

SEQ ID NO: 5544 - DNA, 250 bp, Glycine max
  Clone ID: PAT_MRT3847_105014C.1
cactaactgcgactggagtgaacacgtttctctactataatagtatgatctctatcttcatgagcattccgtcatttggccgattactcgatcgatattgcggcttgtccgtactagacggtacagatttgagaggttcaggtccaatttgtagtgagagtctcacaagattaatgtcgtgcagcgtggacatctcaggtgcgtactgggacacctctgttggatgatggatgtccatctttgtatgcta

SEQ ID NO: 5545 - DNA, 452 bp, Glycine max
  Clone ID: PAT_MRT3847_105015C.1
tctagctatgtcgatcgaactgtccaaggtcctgtcacgcaaaagcgaaggcttagcgcgggcctaagataaagtgttaaagaagcgaagtggtccagcaagaaagcgcgcgtgcggagttgatggtaccgcgtgcggcgacgtagctacgtgcaagtagcgattacggttgcagtagacgcgagcgaatacgttagccgggcgccataggtgagaaaaaaaaaaaaaaaaccctccttttcatgacgcagtgtcgtcatttcgcaaggaaggttcgattccgattgctacatcgattagtgggtttgagcgcagcgtgaggacactgcctcgaagtagcagtagacgtgcgggttcgcgcaaaggcggagttctgtataaggttatataatagatgacttcaactagaaacgcgaaacttccccgcttgaacacgcactgaatgtatggaa

SEQ ID NO: 5546 - DNA, 319 bp, Glycine max
  Clone ID: PAT_MRT3847_105016C.1
ttttaaacatcataggaattaagggctctaccttatccatggccacacatgctgtccttaagattaagggaaacctcctgcttggattaaacgaaaattttgtttaccataaaagtcctggcctttactgtactctcgtaccatatctttgtaggtagcgtttctttccggcccggtatgaagtattcaagtattcatgttgcgcctttaataggcggcaggcccattgatctggggacaataacgaattccatacggcatattgaaccatgcatgatatcaagggttccccttttgagtacctctaccaatggcaatt

SEQ ID NO: 5547 - DNA, 738 bp, Glycine max
  Clone ID: PAT_MRT3847_105017C.1
gtcgacccacgctgctgggctttagcaagcaccctgatcatgaagttctcatctcttatgctcactagtgtgaaaggtgtgcgtgagtacataatgcatatgtgagatatttcatctcaacttaagaaacttgagattgatatgtctaagttcttcttgatgcacttcattttaaacaccctttcgcaagaatatgggtcgtgtaagatttcctacaacacacataaggacaaatggtctatcaatgaattaatgactatgtgtttccaggaagaagaaaggcttgtaatggagataggtgagagttcattgctaacaactgcttgtgggaagaaaaaagcaactaagtctcaagctaatcagaaggggagtggtaagacgatattaagatggtggcaaagtgtttcttttgcatgaagaagggacacatgaagaagaattgtcccggattccagaaatggcttgagaagaaagggtatgcaaaacctaaggaaactagtgggaagtgagcaaaacattttatcaagcaataagctaggctcacctatggaggctattgaaacttgcattttaactttaagtagtgactttattttgaaattagaaaagaccttttatgtaccaagcttttctcgaaacttgatttttgtttctagactcataccttttggatattcctttaattttaaagacacatcatttgagttattttataattctaaatgtgttgggaatggt

SEQ ID NO: 5548 - DNA, 377 bp, Glycine max
  Clone ID: PAT_MRT3847_105018C.1
ttcagttcagccctgtttagagctgtctgctaagtagcgaaggctatcgactctttgatgggcgcgctcatacaaatgaattgggaaagtgtatacatttgtttcaaggacattgagctgtaatattatgatctgcaattatcaagtacgatctatcactatttgtggatgactacatatactgtttgtccgagactaccgaacttctgctgggaatccagaagcaaccatgttttgaaaaagcatccttgatgtcattcttaaacaatttagacatatgttataataagatactgaagctaccacttaatgtattcgactgtttcggataatacctaccattttcaacagggaaacgtgacaatttatcattctta

SEQ ID NO: 5549 - DNA, 348 bp, Glycine max
  Clone ID: PAT_MRT3847_105019C.1
cccggaacaactctaaaaagaaaatttcctttttttttgggcaataaaggcccaaagttaaaaaataaacaaacccgttatcacgggccgaccccaaaaaaattttttttttcccaaaaaaataattaataaaaaaaataaattaaccgcggccccgaaggaccctggcccaccccaatcaattgggaagcatattcacaatccccccaacatagcaacaacatcagccacgagcaaaacaacggggagcacatggccccaaataatcgacaacaaccccccgagggccatttggggacacaacaacgggattcgccttttaaacaattccccctttcgggggaaaaa

SEQ ID NO: 5550 - DNA, 156 bp, Glycine max
  Clone ID: PAT_MRT3847_10501C.1
gaaattaatttctcgcatagagatagaaattaaagcctaaagagtatatagttaacactcatcttaaatgctttttatcccttttgtttgtgccagttcatgtaccttagcacgactctttcatctcataatactactatccccatcaccacaaac

SEQ ID NO: 5551 - DNA, 368 bp, Glycine max
  Clone ID: PAT_MRT3847_105020C.1
ggttgatagtttggtttgatttttgggtttgattgggaattttggaggggtaacttggaggggacaagggtagccaaaagggaggcggctaagagaatggcggaaaaatgggaatagaaggtaactgagcgaaatagatatccgctaagaattccaaacaaaatacgagacaagaagcagaaagggtgaagcctggggggaaaaaggggtgggcaaaaaaaaattaaatgctgtgcgataacggacaagctttacaggggggaaattcgccatgccaaatggattaagtaacgggcacaatcatgcgaaaaggcgaaaggtttaatggccaaccaagggggtcaactggtacaccagtaagacggcca

SEQ ID NO: 5552 - DNA, 446 bp, Glycine max
  Clone ID: PAT_MRT3847_105021C.1
cggggaaaaaaaatccaaaccaaaacccgggggaatcctatgcagggggggagcctagttgaatttaaagcagacccacccactaaggggggggggaaacctcggtgggtggaaaggcccaacaaccatcggttaaaaaaatggggaattggaagccttaataacaaatgcatcaaaccattccaacaaaacaaccaaaattttcgggatccaccaacaaaaaaaggcttgggacatttcttttaaaaaagggaaccacccccaaccatgaaccagaaacactgaccttgttgaatggctggccagaaagaccacggaataaccaaaggaaaaaattcctttccacaattctggaactcaagggaagctcccccaaaaccaagggtggaaaatggtttcgcataccccccaacaaaaaggcggagctttgttatctccgatggaaa

SEQ ID NO: 5553 - DNA, 219 bp, Glycine max
  Clone ID: PAT_MRT3847_105022C.1
gcgtcaaattttgcaatatctatgaaacagagcatcattgaaaaccaatattgttcaaaaatctaatcaccacatgtgcacatgataccattatttaaggcttcacttttgttaacagagttaagagttatcaaagagatacacttggattttgtgaattaacactttctttttcctaaacctgtcagtacaatcagattttgatgactgactaaactt

SEQ ID NO: 5554 - DNA, 367 bp, Glycine max
  Clone ID: PAT_MRT3847_105023C.1
caagaaataaaaagagttctgactgaagttcttttgaaggttactgatgaattgtttgacgaaatcgcaaccagagttcttgctgaagatgatcttactgctgaagtgggccacaaggttgccacctcaaatcataaggcatcagcatctcctccctcagctacagttcctaaggcatctgcaaaagttttagttccaatcaaagagaaggtagaaaatgaagacaccagtgaaaactctaattccagctctcctggagatgttttaggtcttggaaattatgggtcctgatgctgatgatggagacaatgaaattgagagttccagtgtgccaacaccttgcaagagatgctgcctatcagtcagg

SEQ ID NO: 5555 - DNA, 172 bp, Glycine max
  Clone ID: PAT_MRT3847_105024C.1
caccacgccaaacagccctaaatctctcttctctttcttcttcttcctttaacctgagagagatcttgcacgttcaggggaggccaatgcggtaaccaaatcggttccaagttctgggaggtgatctgtgacgagcacggcatggatcccactcggagagtacatctaggaa

SEQ ID NO: 5556 - DNA, 328 bp, Glycine max
  Clone ID: PAT_MRT3847_105025C.1
gttccaagataatacctatggataacatttgcagatcaggcatttgggagttatctgatgatattttaactaagattttagcttctatgggcccaatggacctcactagggtttctgcaacatgtcatcatttaagatccttggctgcttcggtaatgccttataccaagttaaatctgtttgctcatcagaggacagcagttgagtggatgttgcatcgtgagcgaaatgctgagcttttgccacatccgttatttgtagctctgtcaactgaagatggctttagtttccatgtatatactgtaactggtgatattgttactgggga

SEQ ID NO: 5557 - DNA, 2819 bp, Glycine max
  Clone ID: PAT_MRT3847_105026C.1
aacagcttctctctctctctctctctcccaccttatattgccttgccacatttcttacttctgagtcttttgtgggaattgagttcattcaaatgattcctctgtcccataacccagtctctgttcacctgggtggaacaccctgtgactctcttcacccaattacgttccatccaattctgaataagcctcgttcttctgcctctctgttttggaactgcaaaaggagaaggaagaggaaaagctccattactatggcttctaatctcagaaccaacaatttcctgcgccatgtggaatcaatgaagcttcttccatcaggtgcgggtcacatttcacacttgaatgctgtgatacttggtgaatctctcgccactgaagaggatgatttcgttcttccaagtgaggactttgctagccaagccaatgttcagtccccagaacagtatctgaagatgtataatagatccattgaggatcctgctggattctggtctgagattgattcaaagttccatatttcaagccattttccggatactatttgagtggtgatggttgcagcagggataaagatggataccattggctcactggaagagtgcatgatgttatcaattgttagtgggcatcgaattggcacagcagaagtggaatcagctttagtttcacatccgcaatgtgcagaggctgctgtggttggtgtggagcatgaggtcaaaggacagggcatctatgcatttgttacagttgtggatggtgttccttacagtgaagaactgcggaaggacgttgtactcacagttcgaaagcagataggggcctttgcagcgcctgacaaaattcattgggcacctggccttccaaaaacaaggagtggaaagataatgcgaagaattctgagaaaaattgcttcccggcagctggatgaacttggagatacaagtaccctttcagatccaaatgtggtcaatcaacttatagaacttgcagattcttgaagccccaaactttgtattattataggtatgagaaatgctagtaacatactctagcatactttttttaacacacttttcattattagttaaagtttattggaaattgcaataatttatggatcatcactacttatttaatgatccgtattcgtgatcttgtagtttcttataaattttaatcaatagtagagagtgaataagaaagagtatgttagagaaagtgttgttagtattccttgtaaaggtatattagcccatgagaaacgaggacaaattttgccttgtgtatctgtaatttttatgggaatcttagttcatgtgataaataataaatcaatcttccatctcttcttaaaattatattaacaaacatgaactaacgtgcatctgttggtgtgtatgaaggggctcctaattatcctgatgctgggagatgttgggacattgttgacaaatataaggtgacaatattctacactgctccgacattggtgcggtctctcatgcgtgatggtgatgcgtttgttactcgctactcaaggaaatctttacgagtcctaggaagtgtaggtgagcccataaatccaagtgcatggaggtggttttacaatgtagttggagattcaaggtgccctatctctgacacttggtggcaaacagaaacaggtggcttcatgataactccactaccaggtgcttggccccagaaacctggttctgcaactctccctttctttggagttcagcctgtcattctggatgagaaaggtgttgaaatagaaggagagtgcaatggatatttgtgtgtgaagaaatcatggcccggggcattcagaactctgtatggtgatcatgaaagatatgaaacaacatatttcaagccattttccggatactatttcagtggtgatggttgcagcagggataaagatggataccattggctcactggaagagttgatgatgttatcaatgttagtgggcatcgaattggcacggcagaagtggaatcagctttagtttcacatccgcaatgtgcagaggctgctgtggttggtgtggagcatgaggtcaaaggacagggcatctatgcatttgttacagttgtggatggtgttccttacagtgaagaactgcggaaggaccttgtactcatagttcgaaagcagataggagcctttgcagcacctgataaaattcattgggcacctggccttccaaaaacaaggagtggaaagataatgcgaagaattctgagaaaaattgcgtctcggcagctggatgaacttggagatacaagtacccttgcagatccaaatgtggtcaatcaacttatagaacttgcagattcttgaagccccaaactttgtattattataggtatgagaaatgctagtaacacactccagtgtacttttttttaacgcactcttcattattagttaaagtttattggaaattacaataatttatggacatcactacttatttaatgatccttattcgtgattttgtagtttctaataaattttaaactttagtagagtgaattagaaagaatatattagagaaagtgttgttagtattccttgtaaaggtataatagccaatgagaagtgaggacaaattttgccttgtgtatctgtaatttttatgggaatcttagttcatgtgataaataataaatcaatcttccatctcttcttaaaagtatattaaccaatgagaagtgacagggcaaattttgccttgtacatctgtatttttatggaatcttagtgcatgtgatgaataataaataaatcatccatatctctt

SEQ ID NO: 5558 - DNA, 1076 bp, Glycine max
  Clone ID: PAT_MRT3847_105027C.1
ggttcttcgcgtccgcaattatccctaatccccattcaccatgaacaaatcctcagatgcaactgcgtctcctacgtgcagaggcagatacaaaaaacccaatttccgaagctccaagtcccaacccccaagccccgtccagttcagctccaagacgccggagaagccgccgcagcgaatccgcaaccgtggcgtcgcgctctccgtcgctgacatcagaaaggccgcctgcaagcgcttgcaggatcagaagcaatgcactgaaatgacgtcggcgccatcgtcatcgtcgctgaacaagagtgtcaggaggcaaatctcactgtggccttcttctcccagcaaaccaaagactactgatgatgaatccaacaagcttcccgagaaatatgaaattttggatgagttcttcgatcgcttggatactttggtttcattgcaccgtctgaaacggtggactccaacctttacttcaatcagttcaaggattgaatctttaactgacaggaggtttactcacagtcatctagcccagttgaaatttatcttgcctaatgctattgttcttaagaagcatcttgtgcttgatgaacggacgagttgtatgaagccggatattcacatttctttagaccctgatgcggtggaggccgatgatgccaagttgcccccacaaggtggaagagtgtcgctgaagaaggtgtttcgggcacggttaaaagaattttgggaatctcatcctgagggtgatgaaattccagaagggacattgcctgagccattcaatcgccaaaagaaagacagtgttgtggacatgttggaaactcccctaccaacaaaattgccaccctgcatgcgctatagtgacattgtcaataatgcagacttagatgaaaaattgtatgtacctgtcaatgcaacagttgaattccctaatgagcatctggcagcaccttctcacatggctccatcctttagagcagatgatgtacagcaaaatcctctgttagattcattgcagcccctggcttttccagtttcagagtcaagccagaaagaaaatccacccttggtgg

SEQ ID NO: 5559 - DNA, 360 bp, Glycine max
  Clone ID: PAT_MRT3847_105028C.1
acgcgaagatcttcgatttacggttttcaatttcgtattcagcaaggtcagtgagcgcctgattcgctgaatttctttcaattcttaatcatttttttgttttctgttacagtagaataccaacccccaaaagctgtttttcatttggtagtagtactagtatatgatgatgatgatgatgatgatgatgatgacgatatttgtgtgtgagaaagaagtgtgcttgttgtgtgcaggcggcgagtgtgagatttttagagagagagaggtgaggacgctgagtgctctgctgagagattccataaccccaagaggaacatgaggaggagaacgtggatagattttttttccttttttttt

SEQ ID NO: 5560 - DNA, 117 bp, Glycine max
  Clone ID: PAT_MRT3847_105029C.1
tggcttgacggcctagactatgacattcacgcggacccgtgcgtaaggcattgggctcgagaattgccaaaaccatacaactatcttgttttaagaaaacatacacaatctttaaaa

SEQ ID NO: 5561 - DNA, 366 bp, Glycine max
  Clone ID: PAT_MRT3847_10502C.1
cttcctaccggttggagaaaaccaccaaaggggggttccagagaaggatgaatgggttatgggtttgccccggggggtacagggcccgaattccctttttattctggtttcctaaaaaaatgggagggccaccccaacggggcttgagcttttacccctacgttttggaactcgccggaaccctataagacttctttcccttcttttccttcaccccactttctcttcagaaacttcggcttttcttcttccaaaaccttcttttcactccatgggccttccggcgcgacgagcgctttcgctttaccgacctcttctttattcgccaattccggattcttcccggtttccccaccatttttcttt

SEQ ID NO: 5562 - DNA, 247 bp, Glycine max
  Clone ID: PAT_MRT3847_105030C.1
ggattactaccaagtcaaaaagcagttaacgaagcatatattgcgtgtaacacagtgagaattaaagtgttgggtaacgagaaatggctaggtgtcgcaccttgggggttcttgcccttggcatggttgcagttgccagaaagctgccaattgatccaggtttggaggaccagaggaatttcctcgggtacgggttcacgtgagttggcgaaattgggcttccatttggagaattgggtactgggtt

SEQ ID NO: 5563 - DNA, 435 bp, Glycine max
  Clone ID: PAT_MRT3847_105031C.1
gagcgacccattctttttatttcatcaggcaaagaagacagaaacgaaggctccttccatttcgccacactctatgtatcttacccaacaaatgtaattgaacgctattatactttcgccattctaaaccactgcttgagatcaattggacgtgtgtctacctctataaacagtctctttccaataacgggccacattgttgtgtaatatggtgtctctggcctatgaaggaaatatatggtagaggctgaaccagacacaccgtcgatgccaccaccatagctgagccttccagataggaggacggacgcgaaatcgaagtctgtgaagcttggctataattaccgcatctctcatggaatgaacctcattctttccccagtggaggggctgaatgctgaacagcactcgagcttctcccttgaagatctatat

SEQ ID NO: 5564 - DNA, 459 bp, Glycine max
  unsure (1)..(459): unsure at all n locations
  Clone ID: PAT_MRT3847_105032C.1
gggttggtgaaatatatgtttgttcttatgcaatgcacttattttcaatttatttctgtggaaaaaaagttttaaattaagtaaatcgtttttaatactgtccttacatataataatggtcatcttttatggtcctttcataaacactcttcttcactttattttatttattctgcattcaatcccgttttgtacatgcgattgcaactgattgtttatattgttatatcagccacttttcggaggtgcttgttaataaggaaatcatccaaacatgcggggtcgtttaacttgggaattcatcttaaaagttagcaaaatgaaaagggaaaccattagtgaatgtattaggcttttcttcctgttcaaatggacctgtttgcanggnagtagcaaatataaaataaatctgtcatatatgatcttaagctgtttattagctgactctgatcttaaaca

SEQ ID NO: 5565 - DNA, 252 bp, Glycine max
  Clone ID: PAT_MRT3847_105033C.1
agcctgccctatcggagcactcaacctccaaccctacctcctccgaccacatccccacagtcatgtacaccatggtggacccacctgccgccaagtgcaacctaaatgatgacatggatgaggatattgaagaggaagaggaggaggaagaagaggacgaggtggaatccggttccgaagatgaaactggagacggtattgcctgccaaactttgagaccatcaacggtggcagagcccagcgagctgatgc

SEQ ID NO: 5566 - DNA, 1229 bp, Glycine max
  Clone ID: PAT_MRT3847_105034C.1
ggctcgagctgtcccattctgagcgcgtggggcccatgagtcgaatacggcaattaatccaaagtccaaaacccatttcaaacccgccacttgtgtctgattggtgtgaccaaagaaaatcagaaagcaacaatgtttgctgccagaaatcttcctagacattgcttcaagcccctctcatctctgcttcaacttcaatccaatccagtcgtcagaaatgttctaccttcaggtctcacacccgagtgcggcaacactgttaaagttgaagaggcataccatagagttggtttgtattgttatgttaagcagttgaatcttttgaatggatcgttgtcccgggcaatgtcaacttccaaaggtaggagcatgcgcagcaaggtggaaaggcgaatgcagaaagagtctggtaagactttaagggagattcgcagagcgaaaaagttgaagaagaaactcatgactgaggaggagaggctcatttacaatctcaaaagagccaagaagaaagtggcattgcttctacagaaactcaagaagtatgagctaccggagctgcctcctcctcgacatgatccagaactcttaacacctgaacagcttcaggcgtataaaaaaattggattcaggaataagaactatgtcccagttggtgttcgtggtgtctttggaggagttgttcaaaatatgcatctccattggaagtttcatgagactgtgcaagtttgttgtgacaacttccccaaggaaaaaataaaagaaatggcttcaatgcttgcaagattgagtggtggaattgtgataaatgttcataatgtgaaaacaatcattatgttccgcggcagaaattatcgccaacccaaaaatttgatacctattaacacccttacaaagaggaaggctcttttcaaggccagatttgagcaagctcttgagtctcagaagctaaacataaagaaaatagaacagcagcttcgacggatgggagtaaatcccgaggatccagctgccatggccagcatccagagagttgcttccacattcttcaatgccatagaccagaaagaaggaagcccttatgtcttccgtgaaggcaagcagtcaataacagaacctgctgaaggttttgaagagtcagagcctatagctgatagtgatcaggaagagctagatcggttcattgctgagatagaggatgcagcagataaagaatatgaagctgaagaggc

SEQ ID NO: 5567 - DNA, 306 bp, Glycine max
  Clone ID: PAT_MRT3847_105035C.1
ggtcccgacttcccgggaacgaaccatccgtccaaccgtcagcccaaacctctctttatggtgccaacaattccaaacaaggggggaaatgacccccggacaattaacctttaataaaattcccaccggttttttggtttgtattttcaatttgtttcccggggctccctcttatgtcaccgctggctcaaagtctccacctcaaaatgccttttcacttatgttttcataagataactttcatctattttttctcgcttcgattcctcgtcccttggagctcataaccatgataatgtcaaaatt

SEQ ID NO: 5568 - DNA, 242 bp, Glycine max
  Clone ID: PAT_MRT3847_105036C.1
gggccgaccgacgcgtccgcccacgcgttcggccaccaaaggtttgtgtatagggaacttaatttgatttcgtggcagtggtgatttttgagaagaggcatgagatttcaatgtatgaagaactcaaagataggttgttggagggtgttgcggttttggactttgacatgctttgttctacaatggctttgttagctttacattgtaaatggtgaaagctgtgtgcttgtatatgaataata

SEQ ID NO: 5569 - DNA, 467 bp, Glycine max
  Clone ID: PAT_MRT3847_105037C.1
tttcttttttgactcgaataattaaattaaattatttatcaataattgaaactttttttcgtttcgcccccagaggggggaagtacgcattttgagtaattaatctaggtaattgatttttgtttattccttcttcattctcatctcttcgattcattcttcttcattctccttttttttacatggtaaacctcgattaattataggaaaattagaaacaaaaaattttacaatttattatttcaagtgattgatgtttgtttcatcaagttttcagtcatttttgtcaagcatctaattaatcagacagaacgccagacgttattaatgcccaggaacatactttcggatgatcgagtttcttcttttcacacagtcacgtcaccaaagaaattcactaaacgcctaaaggaagaaatccgtgtgagcaacgattcttggctgcgcattcttccattctttgacca

SEQ ID NO: 5570 - DNA, 361 bp, Glycine max
  Clone ID: PAT_MRT3847_105038C.1
cttccgacggacgctgaaagtgaaacgcaaaatcccgtgacggagtgcttccactgcactgtcatacaatggcttcctccaacactcccaaacccgaaaataagaagagtaccaaaaaatccgaaatctccaaagccgaaaagaagaaaaccaaaaacgctgaaatccccaaaaccgatggcaaaacgaagaagaacaaagaaatctcacaagaggagaacaagaagaagattaagaaggccaagctcagcaacggcacttcaaaacagcgagacgagggatccaaaaagggagtagcagcagaaggaaacggagaagaggcgaaaatgaacgtgtttccgatgaatcgcatcaggacgat

SEQ ID NO: 5571 - DNA, 235 bp, Glycine max
  Clone ID: PAT_MRT3847_105039C.1
aaaaacaaaagtaatgccatgtataacttatattgctaagctaaaaattgaatgaaggctaaaaactaaacaatggtgagaaattctgtacaacaaaaaataaactgtaaattataacgcataaacattatgcagtttgaaacaatgaattgacctggtgtaatttgaaaacaaaccaaaatggagattgcaagatttgctatttgtggtaaataaggagaagataccggatttg

SEQ ID NO: 5572 - DNA, 269 bp, Glycine max
  unsure (1)..(269): unsure at all n locations
  Clone ID: PAT_MRT3847_10503C.1
gacagcgtcacggagagagangagaaggaagtgggtgttggtggttgtcntcctccctcctcatgggtatggcaaccctctcctgcctctcttcctcttttccatcgctaccctaaccctaaccctaaccctaatccttcgctntttcgcccctccctttccctntnttctccttctntcgnantaaaccccgtcgtgnncccctttctcnttctcgcttcgtnttcccacgattncnnttccaactccangnnatcagtnctncactg

SEQ ID NO: 5573 - DNA, 372 bp, Glycine max
  Clone ID: PAT_MRT3847_105040C.1
tttcttatcacagcgatcacattgagccatagaacaccggtgtgttggagccactgaacaccaagactaatgaggcggaaaccaccaaggcaggggaaccggataaaccttgtgacggtgtatccaaaatgtacacttcctctgttgagagatagatctgcacagaacatgacggctatgatccttttcttggaggaataaataaatatgccactgccatgatgcctctataagacaaaatcatttataaggtagcactgagcttggctgctgaatggtttgattgtgtagataagaaggatctctctgaggaggatcccttacatgcagcacttagcggtgatgagggtttgtactatgtggaaagaaatc

SEQ ID NO: 5574 - DNA, 204 bp, Glycine max
  Clone ID: PAT_MRT3847_105041C.1
cttctagaaaaggctcagcccatacattactgtatatgctaaccttcatgtgactttccaaaaggcaatatttgggtttagggagcttggcaccccgctccgccccagtaaaaaaaataaactttccgagtctccaaatggacttgccgcaatgccaagcaggtaaatgccttgagagctctctgctctagcaatgacacatgc

SEQ ID NO: 5575 - DNA, 551 bp, Glycine max
  Clone ID: PAT_MRT3847_105042C.1
ttttttttttttttttttaaaaagtactacaatactgtattattattaaccctcctcttccatcaaatgcacaccaacactagctacttataaatacagagaaaaaaaagtgtgttcaccttcaccacggtcttcattctacaactcatgcagaaggtgaaaaagtcaaaacacaccattaagatggtaagaaaagaaaattattgacaataatgaaagtgggtttatgtatctatccatccttcatttattcacgagccaggtagcagttagggtttctggaccccacaccaatagaaccctgtttctcacttccccctcccaatcaaatcccgccacataagccattgattttcacaaagcaaccgacacccctttattcatttacccacatgcatgtaattggctccaattaacaacctgaacagcggtattaatcccaacgtttttaccccacccttaaccaaaacaaaaacctacctggactccaacatacataggcactgtctctgtaactattgaccacgtctggaactttgaacagcgaaaat

SEQ ID NO: 5576 - DNA, 298 bp, Glycine max
  Clone ID: PAT_MRT3847_105043C.1
ctcaagcattgcatccctcttgatttgtagtttgttttgcgctatagataaaagtactgccaaatcaagaggggttttaagatcatagtgtgtgtttagcaacaatggctaagttcttcgctgctatgatcttggtactctttgccatttccatactactaacattggtgatggctgcttatgaacaatgtggccacttgtatgtcaactaaagcaaatatggtagggcgtagtgttggagttaccaatgcccttcacaatgctcgaggatatattagtctggcccaagaccacaagc

SEQ ID NO: 5577 - DNA, 240 bp, Glycine max
  Clone ID: PAT_MRT3847_105044C.1
ggcgaattgggtaccctcgaggccggccgggggacgaatactctagagcgatcgacattactttgtacgtgctacttatgatagatttcgttatcgatgttcgtgcgcacggaggctagaaacctgcgattgcttgacaggctaaatggtgcctctaccctgaacagtggtctggatcccaatctcatccttgattatttctaagatcagagatgagtcctagatacatgaatcttactt

SEQ ID NO: 5578 - DNA, 452 bp, Glycine max
  Clone ID: PAT_MRT3847_105045C.1
ggctcgagaacatttagaaagggtttttttcctgccggcgctcaattttgctttcttcactgccatactctctgaattctactatatcaactactcaagggcaagggaaagcttccaaccttatgctggaggccagactggtctcggaatgggaacctacaaatgagctcatagttaataattttacataaaacatttacgggtgactatatctggggtatggattctgcaggacatttacttgatgttagtgcatttattgtatttactgtctagctactttacaagaaggggatccgtggtatgttaatcatctaaaggtgtggatacctattgtcgcatgttatggctgacagattgattgccattttacagtgaagaaggtcttcgtcatgcttacgtttaacaacatgagaactaatatcttgctgagtggactcattgataggtct

SEQ ID NO: 5579 - DNA, 483 bp, Glycine max
  Clone ID: PAT_MRT3847_105046C.1
ctaggactgcggccgccacttttttctatttctaagcccaaacccataatcccaaaacatacatgtataggtgttccatagttcaaataaaacccgtccaatgtatttaattagacatagcttctactccatgaggaccccacctttaacaactgatttctttacagacacactttccaacacacacgatcgacctgttacctttttcaaaaaataacatatctacccttaattttaacacgactgttaaggaacaaaggtctcaaccttttgatagatttgaaaccaagggaggtgatacctggttggctcctagggacatcattaactaacaatttaccaaacccgtgctaatgctgaagcgaaggaaaatgcgttaacacaccctaaaacatcataaccaacaataattggtgggattcctgccagcaagaagtatataaccctattgaggtatatagcactgtgcactttaatagctat

SEQ ID NO: 5580 - DNA, 551 bp, Glycine max
  Clone ID: PAT_MRT3847_105047C.1
tcaagcctagcgtcggtccgagcaacaatgggtcttcttgacatcgtgcagccaggcgtcctcaacggtggggacgtcatgaaggtgtacaaatatgctcaggagcacaagtttgccatcccggccgtgaacgtgacatcgtcgtcgacgacgaatgccgctctgcaggccgcccgcgacatcaagtcgcccatcatcatccagacatcaaatggcggcgccgccttctacgctggcaaaggtattgacaacaagaaccagaacgcctccgtgctgggtgccatcgctgctgcgtatcacgtgcgtgccatggccaaacactacgggatcccagtgatcttgcactccgaccactgtgccaagaagctgctaccgtggtttgacggcatgctggaggcagacgagaagtactttgcagagcatggtgtccctttgtggagctcacacatgctggacttgtctgaagagccgatggaagagaatgtggctatcagcaaaaagtactttgaacgcatggaccagatgggtctgattcagaggttgactgggct

SEQ ID NO: 5581 - DNA, 285 bp, Glycine max
  unsure (1)..(285): unsure at all n locations
  Clone ID: PAT_MRT3847_105048C.1
gaacagatcagcatcacattgattaccacttcattggtattgaaggagaggatgaggatgaagatgaagatggtgatgtagatcatgacgatgagagtnatgatgatgattatgatggggtgctgaattttgantatacgaaaaatgaatgctagcatgatgttcctatattttggaattgaatgaaagaataactggataggcttcgcaggaattcattctccttcaaggttangtcanctagccaatctgccnnactttttgttgattatttncgtgattttt

SEQ ID NO: 5582 - DNA, 286 bp, Glycine max
  Clone ID: PAT_MRT3847_105049C.1
gaaccaaggcaacaccgcgtggggaactgaaaaacgtggccacgaagaaggggggttcgctgccaaacctgaggaagatatgaacttcggttggaacatgcctttctacatcaacagccagaaaacggcgataatctacaggcaagctggcaccgcagaggatgctgaggctatttataataaggacacagacccgagtcacgagtatgggaatagcaacttcagtacagcatgaagacataagaagggagtccagatagtcacaggactccaccacaacggaaga

SEQ ID NO: 5583 - DNA, 289 bp, Glycine max
  Clone ID: PAT_MRT3847_10504C.1
agctgactggcgggcggccgccctttttttttttatatttttctattttcaatataaaatgaactagattcctggggtagagtgatcctttcattccatgaataccccacgcgtgtgtcaaattatataccttggggcaataaaggggaaagctggcggacgatctaaatggcttgtataatgtaactccccaactacactacatactcttagggtatcaaacaacaattcccacctgctgcctggctgttcatgaatgtctggtgaaacaatgaccctccctcacatt

SEQ ID NO: 5584 - DNA, 238 bp, Glycine max
  Clone ID: PAT_MRT3847_105050C.1
caagccctcctcggtcgcgtcgtccccgcatcattcccgacgcgagacttcttacaaagttgttagaagctgcgcgtcaaagaagtttatcactggatgcgttattctttttccaattgcaattacctcctttttaacatggtccgcttcttcatttctcgcgctggatttctctctcctttctctgctcaaatcgggttctttctcctacccgctcgcatcctcgtttctctttatt

SEQ ID NO: 5585 - DNA, 605 bp, Glycine max
  unsure (1)..(605): unsure at all n locations
  Clone ID: PAT_MRT3847_105051C.1
ctcgaaaaaacattcaactttaggcctttttaagttatcttagactccgattctcactgggacaccccctcagtccaccattaatagtaataacaggatcacagactgtagcagctgccaatgatgctctcatnacagcttccagcgagagactccgcctcttacaagggcaatggggcgggcgccaaactcagccaaaacaagattactcgggagtctttcgcaggaaagatacgaagattcccgaaaagaacacatcagagtcaaaaacaagggggcaagagcaacaagatcaatcagcactaagagacataacaaatgattctccaatagcagagctagcgagaggagtaattctaggtaccccatcggcgaagcagagaagaagcaaaatgaagaacactccagggtctggggaagccttgctgaggggacaagtgaagacccttttgcttaaggtggaagaagaggtcgagctttccaagttctcgcttgaaagcatggaacttgctgcaccaatgccccgtgatacgcgctcatttcagaatctgtctggttggggcttcagttaccaacccttcctgtgttctcaaaaacccactaat

SEQ ID NO: 5586 - DNA, 624 bp, Glycine max
  Clone ID: PAT_MRT3847_105052C.1
cactaggactagcgtagatctatgggtagccaactgtgccaggtacctgtacacgactgaaagtagtcaaagggtgggattgctggtgcggacgttgagcagcttgtaatattgataattacggtacttataggtggtcaccgccggacaccaccaaagagtgtggctgaatacgggcaaaccatggacaggtggccacaagccctatcgcagcaaattgcatggattagggaaactgctgcgcctaagtgtgcattagctgctatggctacggttgatttactaagtgcgaacgctgacgatgaagagcggggagctgtagcagtgtgtaaaactgcaacatgggctaagagtagttaaaaggcagcttaggctagtggtgccaataggtatgcagaatgtgcggcgcaaaatagtagttattggctaactgccgggcaaaaaagtgtgccgtacttcattggtgacctattggccattgttgttgccgggtacgtagcggttgttgaaataaccggtatttatgcgggtgcaggtaggacgcccaagttaaggagccagcaggatacggccggccagcccagagtacgcttgctagtaattaatcagggacctttgcagccg

SEQ ID NO: 5587 - DNA, 937 bp, Glycine max
  Clone ID: PAT_MRT3847_105053C.1
tttccacgcgttcgtccacgcgtccgattgtattcctcccttccttagctccactacctcttctctcttcctccttgttccttcctcttacaatggcaagaatgcctttagagcctctaatagtggggagagtcataggagaagttcttgattcttttaccacaagcacaaaaatgattgtgagttacaacaagaatcaagtctacaatggccatgaactcttcccttccactgtcaacaccaagcccaaggttgagattgagggtggtgatatgaggtccttctttacactgatcatgactgaccctgatgttcctggccctagtgacccttatctgagagagcacttgcactggatagtgacagatattccaggcacaacagatgccacatttgggaaagagttggtgagctatgagatcccaaagcctaatattgggatccataggtttgtgtttgtcctgttcaagcaaaagcgtagacagtgtgttactccacccacttcaagggaccacttcaacacacgcaaattcgcagcagagaacgaccttgccctccctgtggctgctgtctacttcaatgcacagagggaaacggctgcaagaagacgctagctatagctgctgattttgccactgcttcaaccaaactagtattgtattgtattgaataaagcgataaaaaaaggtacaagtacaaggagtttcagtagtggaattaagttgatcctcacatgtggcttcaaataacttgcaggaagggaagataattaatcattttctagtttgacccgtgtgtatgctacgttttattttactttccatctgttgtgtaaacattatactactacgtgtattattattacctcgtgggactactatgaggtgtgatcttatatatagaaataagaggtttggtacgcagaggtttggtagcc

SEQ ID NO: 5588 - DNA, 367 bp, Glycine max
  Clone ID: PAT_MRT3847_105054C.1
gtccgatatcctttttattgcagatggtgttttttacaaagttttttactttttcataatttttagaacattttacttttgtgattttgaaagcttgcaagtgtctgattattatctatttgtgcttttgtatccggagattagattctgtcatctgcagtgcactagtactaaggctctgtgatgacataatatcatgaattgcctaatgaatgtgcaaaaaagagttttgggcaccgctttgcagatctgacttcacatgtttgggctgccagtatcacccatacataagtaccatgtttggattttgattataatcttttggtgggttaatggaagttagattagggttctgtggcgccttttt

SEQ ID NO: 5589 - DNA, 504 bp, Glycine max
  Clone ID: PAT_MRT3847_105055C.1
attcatttaaggttcaacatatctccatttgatgtatcattcctaaattgaagaacctttcctttaacaacatcaaaccctcgttctccaacaatatcaagccctcgatgggaatgctctaccactactatcatttcctcaagttattatatagtagtaatgtattactactaaacttagttatttaagtattgtaaaatttatggtttagtattttattttattatgtttgttgaaatgtttaattagtatgttatttataagtatcttgttattattttcatatgaagtaaatttttacgagtcaagtctatataaactcttgagtttaataaccttgattgtgaacttgtgatgtactttttattattgttatcatgtttgattgaatgtttaacttttgaaaaggctgaaccatctctcaatctgtattcgttgctttgatcaagtcgtctaagttgttaaattcatttatgaattatcatcaaacttacagtatctata

SEQ ID NO: 5590 - DNA, 774 bp, Glycine max
  Clone ID: PAT_MRT3847_105056C.1
ggctcctttggaaccgtctatgaaggtttcaccgatgatgggaatttttttgctgtaaaggaggtgtctttgctggatgacggaagccagggcaaacagagccttttccaacttcagcaggaaatatctcttttgagtcagttccgacacgacaacatagtccgatatcttggcactgacaaggatgatgataagctgtatatcttcctcgagcttgtaacaaaaggatcattggcaagtctctatcaaaagtaccgtttaagggactctcaagtttctgcatacacacgacagattttaagtggcttgaagtatcttcatgatcgtaatgtggttcacagggacatcaagtgtgccaatatattggttgatgccaatgggtccgtcaagcttgcagattttggattggcaaaggcaaccaagttgaatgatgttaaatcaagtaaaggctccccgtactggatggcccctgaggttgttaacttgaggaaccgtggatatggactagcagctgatatatggagcttgggatgtacagttttagagatgttgacacggcaacctccttactctcacttggaaggaatgcaagcgttatttcggattggcaggggtcaacctccacctgttccagaatctttgtccactgatgcccgagatttcattcttaaatgcttacaagttaacccaaacaaacggccaactgctgcccggctattggaccatccatttgtaaagagaccacttctatctcccataggtcctgtttctcca

SEQ ID NO: 5591 - DNA, 356 bp, Glycine max
  Clone ID: PAT_MRT3847_105057C.1
ccggtacggctgcgatccgacttcggaagtgtactgctctccgattacaaactaccggggagtccataggaagtacctaccttgacaaaattttccacttcactagctatgttaccatcctccactttagctttgatataaccatcctcgtttctcatatacacaagtctattattgttaaaaggaattatttccattctatcaacaagtaccagacgttcaagaatatgcgctccagctctgatgatcatatcttacctacttttcgtttcaacgaaagagatctcgtaattattgacctatgcacaacactctgtaagactgtttacatcaatgtgattaaaaaaacccctgct

SEQ ID NO: 5592 - DNA, 356 bp, Glycine max
  unsure (1)..(356): unsure at all n locations
  Clone ID: PAT_MRT3847_105058C.1
ggtgtttgaataataataaagagtcattttatcacattacatcaaatggggatcaacaatcaagtcgtaattgtaaaactaaatgaaaatgtatatccctgcaaacgtgaactatttaactcaacatgcagctcacaatataaaagattcttcttangaggggtgtnannagaaagcccacacaaannacaataaatcattttataagaggggaacacgagggatcctatttggcaaagacacccgtgggtattccactacgtgacactgtggggctatgccaaaactgggatggcatcatcccggcctgcttggctgggatgccacaaaccacaaaactaatgagaggggggaaa

SEQ ID NO: 5593 - DNA, 1117 bp, Glycine max
  Clone ID: PAT_MRT3847_105059C.1
cccgcgtccgggttgtgccgttgagttgagttttgaggggatgggcccaaaactccactgagaagaaccaaagaaagaaaggagaaagattgttagttttttttatcagcgaggaaatcgaatctgcgaatttttcctttctttcttttcattttatcacccaatcaatcttataactccaacttcaaaagggtttctctttacctctttcagtgcttctccctttgcccccagtttcgctgtctagcatttagttttaggtttttggagcttctcatattctcacatgggtcttctccttcatcatgctttgtgattaatttccttctcaagtttcaatctttcaaagaggaagaagaaaaagaggctcgtgggactggattcgcttgaatttcgtgttgggtatggcgtttgagagataaaaacttcatttttttaaagccctgaaagaaagatggacagagttattcaacctcctttggttgatacgactgcgtgtttatgcagagtagatacaggcctaaaaactgttgctggagcaaagaaatatgtccctggaacaaagctctgtcttcggcctgacattaaaccatccattcacccaactagaaacaagccagcacgtggtgacagaagccgtagtcaatcccctctacttccaggactccctgatgatctggctattgcttgcctaatccgagtcccacgagttgagcaccgtaaacttcggcttgtctgcaaaagatggtatcgtcttttggttggtaacttcttttactttctccgcaagagtcttggaattgcagaagagtggatatatgtcattaagagggaccgagacgggaaaatatcatggcatgcctttgatcctgtgtaccaactatggcagcccctgccacctgttcctaaggaatattctggagctcttggttttggctgtgctgttctcaatggctgtcacctttacctgtttggagggaaggacccactaaagggatccatgagacgcgtcatattttatagtgctaggacaaataaatggcaccgtgccccaaatatgctttgtaggcggcacttctttggctcctgtgtcataaacaattgtctgtatgtggct

SEQ ID NO: 5594 - DNA, 918 bp, Glycine max
  unsure (1)..(918): unsure at all n locations
  Clone ID: PAT_MRT3847_10505C.1
tccatntaacaagcgtatctctccgccngctgcacgaattcggcacgaggaancaaccatggnaagatctaactcgtagttcgaagaagtttgaggagctgtgcgctgatttagaggaaaagctaaagctctcaggcgaaaattttcttagaacagattctcttttatcccaggcactttcaaacaatgcagagcttgagcagaaggtgaagtctttggaagatctccataatgaatctggagctgctgcagctactgctactcaaaggagtcttgaacttgagggacatattcagacatcaactgcagctgcagaagaggcaaaatcacaattgagggagctggaaacacgcttcatagcagcagagcagaggaacgtggagcttgagcaacaattaaacttagtacaattgaaaaccagtgatgctgagagagaagtggctgaattatctgagcaaatatctaatctcaacgctaaattagaagaggccaagggaagagaagagtcttcttaatagccagctacaggagtacacagaaaaagtagctctacttgaatccgacttaaatcagtcatctttgcggagttcacaattagaagaagaatttaagaatgtctacgaaaaatgtgccgagcacgaagaccgagccagtatgaaccatgagcgtacccgaaaactgggaanatttaatccananctctcactcccaattggaaaattctgataaaaaggtgagtgaatttggaattgttacttgaagccnaaaaattccgaattccnggaactanaacnaccaattagccccctanaaaaaaaacnttgtgcttccgaaaggcanccantaaaatacttgatgattttctaatctgactcnaacttgaagcatttcagccncaacctccaccctccaaactta

SEQ ID NO: 5595 - DNA, 439 bp, Glycine max
  Clone ID: PAT_MRT3847_105060C.1
ctctagatgtctttgtcacacacccttctttgcagtaaatgacattttgatcctttagtgagtgtgaaagggattttcctagtcctactctcctctaagtagtgggagtttggttcagccttgacaggtcatttttctttaaacaaatcattgttaaacacctagagactttggttcagctttgacaaatcattgtgctttaaagaaattttatttgtagagattttgtgaagctgtaatttacccaaataaataagtattgagttaatttgttataggtgaatgatgttgataacctgcatgtttaagggaatacttgagaaatataaaaaaagttggaatcatgggtgataatgtttcctatcatattttttctctccatgtttctttgctattggagttggtatccaatattcctttaattggaagggccctcttg

SEQ ID NO: 5596 - DNA, 210 bp, Glycine max
  Clone ID: PAT_MRT3847_105061C.1
ttaaatcaatccaaattaaacatttttttgaacatattatatttttcttaaaatgtttacgataattttatatcactttgaaatcaaatatttatattattgatcctcttccttccatcaacaatacttattctcttttcttacaacaaatattacaacttcaaattaaatttaactatttacttaaacgttttttttaccttttcaaat

SEQ ID NO: 5597 - DNA, 298 bp, Glycine max
  unsure (1)..(298): unsure at all n locations
  Clone ID: PAT_MRT3847_105062C.1
gggcggcaaaatttttgggggagnngatttcatatttttgatttacaccgagaattttttgnaaaattnnttggnggggggnnnngggggccanaaacacacctggaagaaaaggggggcccccttatttttttttcccccttttttagcccccccaccctttaaatttttttggggcccaaaaaaaacccctatggggcttcttttgaaattttccccaaaggggaaattgggtgagaaaaagccacccttttttaaaaaggcgccctttttattgggggccccccgagattttttt

SEQ ID NO: 5598 - DNA, 567 bp, Glycine max
  Clone ID: PAT_MRT3847_105063C.1
ccttccccgattctcaaaaaaaaaatggaaaaggcatggaaacttaaatgggtaaaggaaaaaaaatggaaaaatcatttttgaacttatcctattggattattccggctacttcatttttttatcagcaaaaaaagaatattttttataggagaaaaatcagtccaagggggccggggggatttacatccttgattgactgcaaagctatgggggcctaaaacaagctggagggcaagaattaggccgccataaatctgaagggaactagattattcccgctactttatttggcactcattcaaggcagggaccctaatgggggggaacatttcttcatttccattcttccaaaatagggggttcacaaactaagatataactaacaattttggtttacaaggcattttatctatttttaaatattaccctgaacactatgcatcatttatatgaaatatttaaaattatatttcattggcttaaaagggtccgattcgatacaaattatgactaaaattagcttaacaattcatggttcacgatatgaacccgaattttaatccc

SEQ ID NO: 5599 - DNA, 320 bp, Glycine max
  unsure (1)..(320): unsure at all n locations
  Clone ID: PAT_MRT3847_105064C.1
nnnttgntnntattnanatntgnantntgttggtggngtantngtgnaggttgcgtatgaggnanattttncttgttattctngtnnttgtngttntgttggtttntnangtnggttgtnatgagaatgnnncngggngatggttagnntatnaagcaagattaaggnatnntaaagtcangtgcntcagtgantttnngacgtnaaggaatatnntaagnaatntggtgngtagntaangttggtnngcgttatgngagcgngttngngtagttggnaaggtttcnantangtttnanattgnctgntgagnatgnggn

SEQ ID NO: 5600 - DNA, 535 bp, Glycine max
  Clone ID: PAT_MRT3847_105065C.1
cctacgcgtccgatcctttttcgcttttcactttcccatacgcgtctccttttcttctccaccagcatcaccactgagtcacactctccgagtcatgaactcactcttcacttctccgtagcaaacaaaacactctcacacgacaaagaaaaataaaaacacacacactgaatactcattcgcaaattatgctttcccggtttgcccctcgctccactctctatttcccaatctccgccacccaaccaaaacccctaatcggcgccaaccatacctcagcaagattctgctcccgataaaaaaaagaaaagccagaatccaacttcaattctttctctttattcggtattttgtgaaaaaaaaaaattaccatttttttattgttttttctgtgaaggaaaaaaaagaggagaggaaagtgcacagttttaccatggaacctaccgcagggaagcccggttctctccggaaccttctgatacggtttcttctcttcggcgttttggtcatcggcgttcgtttagcttacctcatc

SEQ ID NO: 5601 - DNA, 458 bp, Glycine max
  Clone ID: PAT_MRT3847_105066C.1
aaataatactctgctctacactatcaaaatgtgctaattggcaatattgttttgaataacttgtgagttggccttctagttgattgtatactgtgcatgaaatgttctttaactagtgtctttaaggtactcgttgctagaagaccttataaactattctcaagtgagaaatgctaataacactaatttgtccgataacagctcactttatgacagaatttaacactccgtttttaaatagcaggcaacaagtaaaccagtacttgtatatcccaacagtggggagacttatatcgctgagagcaaccaatgggtggtgagttctgcttctctctttttacatggcctcagcttgtttttatgttcatgtttaaccaacttcaaatctaattccagttataataaatgatacttcctcatcaatttaaatgtctgaacctcatttttgcatgttttca

SEQ ID NO: 5602 - DNA, 217 bp, Glycine max
  Clone ID: PAT_MRT3847_105067C.1
tgcgtctcgaggggatagagcgtgtgcatatgtgttggtgtatgtgcatgacacctaattagtggaagatactcacagaacctgtgcctcgacatgtctcatttaaggcagaggcaactgtggagaaaaattatagcaagtggtcatggtggcggatgatgtaatgttcctatactctgacgacatgtctgtcttctatgttattacaatctgcttc

SEQ ID NO: 5603 - DNA, 238 bp, Glycine max
  Clone ID: PAT_MRT3847_105068C.1
gggggggggtacttttttttttttgtttttttaaaaacacaataaacgacttggttatattctttcccaaaatgaccaccctttttaaacaggggtttttttttgcagtaaaatacaacaaaattgatttttcacccttcgtttccaaaacagtttttttttgaacaacttggggtgcacccgaagcattctaaaccaaagcaaagttgggtcaatgcagttgcccattggttgttta

SEQ ID NO: 5604 - DNA, 271 bp, Glycine max
  Clone ID: PAT_MRT3847_105069C.1
gcgacgttcttcttgcgtttgatgaggaagcaagcgacaataagggagaccaaaacgacaccggatactgcacctgcgacggcggcaagagttcttgtggtgtcgctgcttttcttttttgagttttcaacaggagccttgggggtttgtaaaggaaggtctgggttcggtccggcaagattacctgttgattcgttaattttgaagagttcaagggcgtttagttgtgcgtccttgatgttgctttgagggtgaggatgcagtttcagtg

SEQ ID NO: 5605 - DNA, 675 bp, Glycine max
  Clone ID: PAT_MRT3847_10506C.1
ctcaccttgggtactacttaccctcaccgtcagaggactacacgtcctcgccttgagaggactacacgtcctcaccattagagggctgcacgcccttacctccagaggactacatgtcctcgccttgagagggctacacgccctcaccttgggtactagttacccccaccatcagaggactacacgtcctcgccttgagaggactacacgtcctcaccaccagagggctgcacgccctcacctccagaggactataagtcctcgccttgagagggctacacgccctcaccttgggtactagttaccttcaccttcagaggactacacgtcctcgccgtcaaagggtcatgtgccttcacctttgtagggctacatgccctcaccttcagaggactacacgtcctcacctttagaggactacacgtcctcgccatcagaggactacatgttccccattttcaaagggggccatgccctcaccttcagaggattgcacgtccttgccatcataggactacacgccctcgccatcagaggactgcatgtcctcaccttcgtagggctgcacgccctcacctttagaggaccacacgtcctcaccttcagagggctacacgccctcgccatcagaggactgtatgtcctcaccttagggctacacgccctcagaggact

SEQ ID NO: 5606 - DNA, 1713 bp, Glycine max
  Clone ID: PAT_MRT3847_105070C.1
tttgttttttcacatgctataggataaagaaagaaagatccaattggaagttaaatgttattggataaatttctctcaggtttagccttacgggctatttgaaaagctctaggctgaagaaataaagtttggagcaaaagagaggaacagaacagaactgagagaagcaagtgaaacactcaatcacctaggctaaaatcgtctcgtcttcattccttttttttccggtttagagaattgaaaagatttcattgataattgagcaaacacaatgagtgctccacctcatcatgatgatgacgacgacaacgaagaagttttccttgatgagtctgacatcatccatgaagttgccatggataatgaagatcttcctgacgctgatgatgattctgaactcctcgaagaggatgaggatggtgattttgtgcacaaattcactgctcataccggggagttgtactcagttgcctgcagcccaacagatgcagacttggtggctactgcaggcggtgatgacagaggatttctctggaagattggccaaggggattgggcttttgagcttcaaggtcacgaagaatctgtatccagtttagcttttagctatgatggacagtgtttggcatcaggaagcttagatggaattattaaagtctgggatgtatctggaaatttggaaggtaaaaaatttgaaggacctggagggggcattgagtggcttaggtggcatccaagaggacacatactcttagctggttctgaggatttcagcatttggatgtggaatactgataatgctgccttacttaatacatttattggtcatggtgatagtgtaacctgtggtgattttactcccgatgggaaaataatatgtactggttctgatgatgcaaccttgagaatatggaatccaaaaactggagaaagcactcatgttgtgcggggccatccatatcataccgagggattaacatgcttgacaataaattcaacttcaactcttgctctttctggttctaaggatggatcggtccatattgtgaatatcaccacaggaagagttgttgataataatgcccttgcttctcattcagattccattgagtgtgttgggtttgcaccaagtggttcctgggctgcagttggaggcatggataaaaaacttatcatctgggatatagagcatttattaccccgaggcacttgtgaacatgaggatggagtgacatgtttggcatggcttggtgcgtcttatgtggcttctggttgtgtggatggtaaggtgagattgtgggacagccggtctggtgaatgcgtaaaaacattgaaggggcactctgatgccattcagtctctttctgtgtcttctaatcgcaattaccttgtctcggcctcggttgatggaacagcttgtgcttttgaggttgaaaattttcggtgaacaatccctgttgtattattgcataggatgaggttgtcattcatccaagcaaatccctctgtgtttatgtccttggaggaggggatgttacctacagaaatcatattacatgagcttttcctggacccagacaatcatattgaacaaaaggctggatatttttttcgaagattattttttatctttaacattattggttttgaattataatgttcatacttagagaattgtgtattcaatgaaggtgggaatttttcctaacagat

SEQ ID NO: 5607 - DNA, 425 bp, Glycine max
  Clone ID: PAT_MRT3847_105071C.1
accagaaagatccaattggaagttaaatgttattggataaatttctctcaggtttagagagagttgaagaaaacatttcattgataattgagcaaacacaatgaatgctccacctcatcatgacgatgaagacgacaacgaacaagttttccttgatgagtctgacatcatccatgaagttgccatggataatgaagatcttcctgacgctgatgatgattctgaactcggtatgaacttgccaggaggaggatagtaattttgtgcacaaattcactgctcataccggtgagttgtactcagtttcctgcagccccacagatgcagccttggtggttactgggagcggtgatgacagaggatttctctggaagattggccaaggagattgggcttttgagcgtcaaggtcatgaagaatccgta

SEQ ID NO: 5608 - DNA, 428 bp, Glycine max
  Clone ID: PAT_MRT3847_105072C.1
caaaagagaggaacagaacagaactgagagaagcaagtgaaacactcaatcacctaggctaaaatcgtctcgtctgcattccttttttttccggtagcaaaaaaaatgattggataaagaaagaagcaagtggaaagtttaaatttattggataaatatctctcaggtttagagaattgaaaagatttcattgataattgagcaaacacaatgagtgctccacctcatcatgatgatgacgacgacaacgaagaagttttccttgatgagtctgacatcatccatgaagttgccatggataatgaagatcttcctgacgctgatgatgattctgaactcctcgaagaggatgaggatggtgattttgtgcacaaattcactgctcataccgggggagttgtactcagttgcctgcagcccaacagatg

SEQ ID NO: 5609 - DNA, 431 bp, Glycine max
  Clone ID: PAT_MRT3847_105073C.1
gcacgaggttcgacgtcgtcgaaggtgacgatctgacccggctccagggcgcgcttgagcacgctgtgcttgagcaggccgatcggcaggtgatccgggcactcagcgatcttgaccgcttcgccgcgcacgctgtagccaccgatgccgcgctcgatgacgtcgccggccgccatgggcttcttcatgatggcggccacgctcagggtcggcgtggtggagttgttgagcaggatcttgccgccggcgatgacgcgtctcagggtcttgccgacctccagggagcacaggtggaaggggcgcaccatcacgtagtacgggcccttgcccagcttgaagtactcgatggcaccggcctggtcttcgtcatggcgaccgaccacgaagactccaccggcggagtagccgctggggatcacgtagtctacgat

SEQ ID NO: 5610 - DNA, 426 bp, Glycine max
  Clone ID: PAT_MRT3847_105074C.1
attcggctcgataacagaaataggatccgaagagtgcctttcttgccaacttagacttgttctcacatggacttgtcgttcgcaactataaccgcacggcagcactgacatccctgtttcaagtttcaatcttcaagcaaaaagttctaaaacaaatctttgaacaaccaaagggcaaaagtgaaactccatgtctactactactaaagggtcaacaacagagcaaccaattcctccacaagtggaagaagaatcaagtgtttgtaaacaagaagaggaaggagaagatgcaaagataagggtggttatagcacaagagggaattgaagagtttgaagagtgcaaaactccaactgggtcaggttacaagattcccatagttaaaaaatgcccacttgctccaagaaagaaaagaattaaaagggc

SEQ ID NO: 5611 - DNA, 257 bp, Glycine max
  Clone ID: PAT_MRT3847_105075C.1
gacccactcgtccgattgcgcgcgctctaccgtggtttcaacatcttatgtgttttaatcatcgtctatcaaagtggatacttgggcatttattattctcataatactatttgtcctcacagcgccattgcatgatatcttatttgccacctttacccttgaacgtctcatcatcaatgatccatctcttgcatcatacccaatatacactgatataagaagaatcatcatcacctctgattaatctgtcaagtaca

SEQ ID NO: 5612 - DNA, 274 bp, Glycine max
  Clone ID: PAT_MRT3847_105076C.1
accagcaccttctgcaagcctgttcatcagtgctgtctcaaccccaaccacaccttattgcgatcccctcccagcaagagtgcaccacgtcgtacacccgtcagggtgtcaaagtccccactcaaaaccagcagcttcaacacccacaccaacaccagagtcgttgcaccatgtgctcagtcctcgaccgcatcgagtgcctcgagtggtgtttgaagcggtacacccaccactccgtccgccacgccgccgcgcgcgtcatccaaactcgttt

SEQ ID NO: 5613 - DNA, 174 bp, Glycine max
  Clone ID: PAT_MRT3847_105077C.1
gcagtgaacagtatatcattcagaccagttgacactcctttgaagctggcagattacttcaacattggaagggtttttcaagttggaagcataccagatagtccttctggtagacctatgtatcttgacacctcagtcatgggtgctgattttccagcctttgtcgagatcgtg

SEQ ID NO: 5614 - DNA, 349 bp, Glycine max
  Clone ID: PAT_MRT3847_105078C.1
gacattttgagctctggcttataatttgaagtaaaagggcttattcaatttcggccataaattggagtggagataatagaatctgcagacctaaatccctcggactatataaaatcctggatggcgcatgttcgggcttaaaaaccagagattcacattgttatatgtgaagacaggcttgatatactaaaatatcacgtgggatcaatatgcgatgcccattctatatgatacaaatgaagctccagcttaaatcaacgtctcaaccatggacttattggactacatgctgattctgatcactctcccgaattaacactaattgatgtacattactcgtttaagttct

SEQ ID NO: 5615 - DNA, 248 bp, Glycine max
  Clone ID: PAT_MRT3847_105079C.1
agcctatctaccatatcggttgtgcttctccttatgcgaaattaggattacgggtatcatctatctatgtatctatcttgttccacgcttcacagatgataatacatggctacacaaatacgcaccttgcgggttcccgaaccctatccttacagcagaggctacgtaaagtccgtgggcgaggccacggtgaacctggagaaggataacactttcttctccaagttggaccaagagtcgaagccggt

SEQ ID NO: 5616 - DNA, 2206 bp, Glycine max
  unsure (1)..(2206): unsure at all n locations
  Clone ID: PAT_MRT3847_10507C.1
gtttgcgacactattaattaaacaaatactaccaccacacaataatttcctcttcttctctcacctctctctctttctttctctcaaagtgttgaacttgaagttgcagagagaaaatggattgagaattctctctcttttctctttctcttcccaactttccttccttgggatcattctgcttctttgctatggaagactcagattcagttgctacgctgatagattccacaacttctaagatacagcagctgcaaaaggcatttgctgaacttgaaagttaccgagctgttactctgaacttgaaatggaaagaactcgaggaacattttcatggtctggagaaatccttgaagaggcgctttcatgaattggaagaccaggaaaaagagtttgagaacaaaacaaggaaggctcaggagatactggagaagcggcaagcagctgtttatgccaaggagcaagccacgttgcagaggcttcaggagaaaagggatgctgctgtatttgacattgtgaatgctcgagaaaagcagaggaaggtcacgataagtgatttggctattgtctccaatgggggtaaggggacatttcatgtggaggacaaaccagtggatgctgtgtcctttgcagctaatggtaatgtggaagaggtggtactttctcctgaaaatggaaatgtggagttgtcttatccagacttggtaaaactttgtaaagagatggatgctgctgggcttcacaaattcatatctgacaaccgtaagaaccttgctgctgtaagggaggaaataccacatgcattaagagcagctcctaacgccgcctgtttagttttagattctctgaaggggttttactgtacagaagtgtcaaatcaggacgtaaagaaggatgctaacttactgggtgttcgccgaacatgtatcatgctgatggaatgtctatgtgatttcctgagcaactcaggttgtgtttctaatgtaatttcagaagatatcaaggaccgggctaaggcagttgctgaagaatggaaacccagattggatgctcttgacatcgatgctagcaatgtgaattccttggaggctcatgcatttttgcaacttctagccagttttggtattgcctctggttttaatgaggaggagttatctaggctgattccaatggtatctcgacgtcgccaaactgctgatttatgtcgttgtcttgggttgtcagaaaagatgcctggtgtcattgaagttttggtgaatagtgggcggcaaattgatgctgttaacttggcttttgcatttgatcttacagaacaattttcacccattcctttactgaagtcttacttgaaggatgctagaaaaatttcttctcctgtcagaagtgttaactcatctcccactgcacagattgatgttaatgatcgagagctgattgcacttaaagctgtaatcaagtgcattgaagatcataaacttgatgagcagtatcctctggatcctctccagaaacgatcgatgcaactagagaaggccaaagctgacaagaagagggaaactgaagcaacaaagcctcaacccaagagaccccgtgcaaatggtgtgggatatggtccacgtgtcactaacattctttcggacaaaacttcctatgctagagttgctgacaggtatcctcaatacgtgtatgaccgacccttacatgtaccctgcaccaactgagaatcattgcccccctctcatgaccactgcaacatataacatctctcccagccatggcaactactttggaaatgggtatcagtaccaagcctcatatctccactagagttagctgatatgtgaaaacaggcaactatgatccttttgtttaatatctagtctttaacctttaagctgttgtatgttgcacttcctcaatgtagtcttaagaacctctgaaaagaggtaaaatgacgagctaaaatttaacttttgtagcacaagatattctgatcctctaatgtatgaactctgttctcgttttgtacactcttacgatatttttctttgtttattaaaaaaaaaaaaaaaaaaaaaaaaaaaaaaaaaaaaaaaaaaaaaaaaaaaaaaaaaaaaagggggggcgcttttaagagaacccattttttccccccggccctggaagantttttttttttttttggggcggccgccgaaaaataaat

SEQ ID NO: 5617 - DNA, 340 bp, Glycine max
  Clone ID: PAT_MRT3847_105080C.1
ggctcgagtgatagcaaatgtaatgacggaacacactaccagttacctttccaagtggaagaaaggaaagcttcttggtcgacgaacattggggcatgtttacctgggattcaatagagatagcggactattgaacgcaattaaagaagtcagggctgtctgggatgaccaatcatcaaaggagtgcctcatacaacttaagcaggagatccatttgctcagttagcttttacatccaaacatcgttgaatactatgggagtgatttgcgggaagaaacactatgcgtttatttagaatatgtctttggtggttctattcataaattactacaggaaaat

SEQ ID NO: 5618 - DNA, 1226 bp, Glycine max
  Clone ID: PAT_MRT3847_105081C.1
aaaagaagaaaaaaatagacatgaactatccttacaccgtgtactaccattggttgaggaatcgtgtttgagctctctgttctgctaccgtgctgtgtggtgcttcgattacagcttatccatggacacaacttgcatacgatttgctttaggacccatcctcctccacctcctattcttgtccctccctaacctttccctagcagatgttatttatagtccccttgaactcttcagcatcaactgtggctctaacagtagcttgtccacgcgcgatggtcgcaattggactgcagacatcaaattcctctcagaaaacaaggactcagttgctgctcctgcactcacaccgtctatcctagagggtccttacaccgatgctcgtttctctcactcccaattcacttactctttccctgtctccacaggcccaaagtttcttcgcctcttcttctactcaacttcctaccaaaacttccatcgctccaaagcctatttctcagtcaaagcaggcccatacaccctccttcaggatttcaacgcttccctccatgctgatgctggtaacgagcctggcgactacttgttcagggagtattcaatcaacctcaaagatggcgatcggctcaacataaccttcattccaagcaaaacatctcagaatccagattcgtacgctttcatcaatggaatagagattgtttcaatgcccccttttctctactacaccaatcctgacgacgtcgacatcagtggattgcctcaactcgttggcctcaatacgaacccgttccccattgaaaacaactatgctctggagactaactatcggttaagcgtcgcaggaaaacaaatccccgcctcaagagacacgggtatgctcagaacctggaaagccgatgacaaatacctaactactcaaagtgcaccatctgttgattatgggggtagaactaaactcagcttcattacgactctaaactacatggcaccagacgaagtgtaccgaaccgtaaggaacatgggaatgaatggctctaataacatgaggttgaacctcacatggcagcttcctgttgattctggcttcacctacttgctaaggttacacttttgccagcttgacccgcaagttcgcctggctggtgacctgatgttcttcatctacatagaggatcagttggttaccaattgggcagatgttctcttatggacctataaccaga

SEQ ID NO: 5619 - DNA, 402 bp, Glycine max
  Clone ID: PAT_MRT3847_105082C.1
ctgtcacatccacatgcaaatgcgtgaggtggttccctttatgatccattgcttctgttaaagaacacttagggttctctctctaccgacggtatgagcctttatatcaaggtgtcctaagcagactgtctaaagcttaggagaaaaaatagaaacgcctacggatagctttgacccctgtcgacacaggaaatgaggagtggtgttgcgctaataatatatagaacttggttggctctaaagaggaacatctatggctacctggcgattactgcattgttggttcgagcgaagacatacctccattcaaggaatggattgctccggatgaggctgacgtgaccgattctgggcgttgtgggcggcatgatgcagagggcactacccttgcaggtgctacac

SEQ ID NO: 5620 - DNA, 614 bp, Glycine max
  unsure (1)..(614): unsure at all n locations
  Clone ID: PAT_MRT3847_105083C.1
aattttttttgtaatttttaacccttttttttttattttttctatggggtttttttttacctgggaaaatggggcctttaaaaacaggttcccaaacgggaccagaaggagaaggaaaaaaccgaaaaaaaaaaggggcaaaaccgggcccaccggaaaacgggaaaagaagagaaaaaaaaaaaaaccccacccggaagcaacaaggagaacaacggggaaggcaaaggggccaacaaacacaaaccaaaaaaagtcgcagcccaaaaatgaaacgcaaaaaccccncaaaaaagtaaaaaaaaaaatctggccaaacccacaaaaaacggaaaaagaaagagcagaaagggagcccaaattggaaaaggaaaccggggggaaaaggaaaaaaagagcccccccccccgcgggaaaaaaaaaaaaccccaaaagggcagccccagtatgcccaaaacccgggagaacgggaaaaaaggcggaaacggccgaaacaggcaggggcataaacgaaaaagactaacggaaaaaaggggaaaaaaagcgcaaaaaaaagacctaggccaaagggcgaaaaaaaggggccacaaaaaaaaaccccaaaacaatggtgc

SEQ ID NO: 5621 - DNA, 531 bp, Glycine max
  Clone ID: PAT_MRT3847_105084C.1
cctcgcgtccggcctccacagcactactgttatatatggattcgatgcttcttcgatcttttcctaatattaacaacgcttcttctctcgccaccactggtatgtctgcttataatttctcgatctgttttccgtctgagacagatattcccactggcaggtggaaatttctgcagaactaaatgtttcgccaacatttaccatgcaagtatgtcgtctcattatcaaatatgcatatacccccccttttttaatttatttctttattattattattattaggggaagttcctttctatattaatatttttttaaaattaaaaaaaaaaaaactgagagagaaagaaaggaggttgggatggactattaagtgcacctttggaaaacttaagtttgggccaaacaagtttgttaaagtacctgatttttctggttaaattttagcctcaaacatacttttggaggaaaccaaacatagcctaactctgatagttacttaatagaaattaaaaataaaaagtccaactaaaa

SEQ ID NO: 5622 - DNA, 431 bp, Glycine max
  Clone ID: PAT_MRT3847_105085C.1
ccgcctaatacggattctttcgacggactgaacaaggatcacttggacgcctttttttaattgcctgcacgcccctcatatcgtaacgcgaaaacatgcaatatgctgcactttgttaggaacctcatacaaaacgtatcctgttttgcaccctattaaaagcgtataactgaataactgaatgatgctaatgataatatgtcacttaaagttgcaaatataaagcacttatcacacaaacgcacaaagaataagcctgaggaaatttccaatgttctcatgaatattacggctggtggtgctagatacaacaataaatatgacttatttactagttctcatattcactatattgacctgtgtattgattaactaactttcatattaatctttttttcaatcatattacttcaatatttttttttacaaat

SEQ ID NO: 5623 - DNA, 119 bp, Glycine max
  unsure (1)..(119): unsure at all n locations
  Clone ID: PAT_MRT3847_105086C.1
gggaatcccaatggctttggggctantggcgatgatcctctacgtcattgcttcctncttccactcacctcgttcgcncttccgatgacgccgacgacgcgatcttctacgagtcgttt

SEQ ID NO: 5624 - DNA, 183 bp, Glycine max
  Clone ID: PAT_MRT3847_105087C.1
acctccacgcgtacggcataatgacattgacaatacgtacatgatatcacatgagaatctatggcatatatgggaagcacgggggatgacgatgacgaagatagagctgcgtgctcacaaatgatagggctgcttggcagtgaacttgacctcactaggactaacattcttaccaatagacct

SEQ ID NO: 5625 - DNA, 712 bp, Glycine max
  Clone ID: PAT_MRT3847_105088C.1
gtccggaagtcccgggagagagacagagacagcaaagcagaggcgactcttgctcctccttcctcagtctctcattttctctatctctgaagccaaagatgaaccaaatcgacgacggtcgaaccctctcccctctgccggaccaggtcctggagaacgtcctggaaagcgtgctccacttcctcacctcccggcgcgaccgcaacgccgcctcactggtctgcaagtcctggtaccgcgccgaggccctcacccgcaccgagctcttcatcggaaactgctacgccgtttccccccggcgcgcccaccggccgattcccccgcgtccggtccgtgaccatcaagggcaagccccgcttcgccgacttcgacctcatgcccctgaactggggggcccacttcaccccctgggccaccgcactctcccaatcttaccactcctccctcaacaaactccacctcaaacgcatgtccctcaccgaccacgacctcaccctcctctcccactccttcccctccttccaagacctcgttctcacgtgctgcgaaagcttcggcaccaccggccttgccggcctcacctgcaactgcagattgctgaaagggcttgaactaatggaatgcgtggttgaagttggcgaccaggaaatggattggatatcgggttttccggagagggatgctcaaacacatttggaatctcttggttttg

SEQ ID NO: 5626 - DNA, 802 bp, Glycine max
  Clone ID: PAT_MRT3847_105089C.1
acggcgtatcacccacgcgtccggtaacattgggttgtgatttgtgagggaagaaggggtagaaagaatcaggagaaggaaataatcatcaaccatggcagggagattgacgaacgcagcatcgaggatcttaggcggaaacggcgtcgtttaccgatccgttgcttcctctcttcgcctccgctccggcatgggcctccccgtcggcaaacactatgttcccgacaaaccccttcccatgaatgaggaactcctgtgggacaacggcactgcatttcccgaaccgtgtatagatcgtattgctgacactgtcggaaagtatgaagcattggcctggctgtgtgggggattgagttttttcgcgtcgctgggattgttggctgtgtggaatgacaaagcctccaagacaccgtttgcacccaaagtatatccatatgacaatctgcgagtggagcttggtggtgaaccataggtagatccaaggcaacgatcggatgagaagttcttgtttgatgtattgttcttctacgtttatttgtgcttttgtgtagttcaaaataagggatcatggaggacttgctgaaaccatctaaaggaatagaagagccgaatctggttgttcttttgatcatgctaatgcttatggtgactattgtgaggagtgagtaagtattatgcccagcatgtgtttggatatgcatttaccgaattgattttggatcaatgagtttataaaattggtgttaatatactcaatcactgattttggaaaaaacagttaaaaaaaaaaaggggggccaaa

SEQ ID NO: 5627 - DNA, 597 bp, Glycine max
  unsure (1)..(597): unsure at all n locations
  Clone ID: PAT_MRT3847_10508C.1
tttttttttttttttttttttttttttttttttttttttaaaataaaaaacttggtttttttttgaaaattttagaccaattcttttataatttccaaccaacccttttaccagccctaaaaaatctgggcgaccccagggacagacaccacttttctttaaaaagggtatactaaaacaatccgnnaaaaaatacaatcctgaaacacatggaaaaaatcttgggtgcccaaaatagcaaacaaactaaaaatcattancaaaaaataaaaaaccgggggtccctaaggaaacaactcaccccaatttatttcttgaaaccccccccccctttcaaaagggaaaaacctttttgccccccttattaaattaaattttcacccccgcggaaaagagaacaattttttttttcttccccccacgggtttttttatattaaaaaaaaaaaaacgcgccaaacatattttttttctttttatacaaggcggaaaagaatccttataaaaaaaaaaggtggaaaaaaaaacgcgcggtccatatattttttatttttaacccccctacatttaaaggaaaaaaaaaatccctcttattttg

SEQ ID NO: 5628 - DNA, 211 bp, Glycine max
  Clone ID: PAT_MRT3847_105090C.1
acgtctgtttaatatacaaaattctagctttatttctgacactcaatactacatactgacgctggtttaaaatcaaggtgagcttccaaactagccccaacattacaccgttcaatagactacgctcacatcaaatacttctataaactatacaacatccagaactcttcattatatcaactcctatatattactatcagacttaccaaat

SEQ ID NO: 5629 - DNA, 406 bp, Glycine max
  unsure (1)..(406): unsure at all n locations
  Clone ID: PAT_MRT3847_105091C.1
aaaganctatgacgnctgccgcgcgcctccataagctcagtatgcgtctcgagctgttggccatcattgattatgacaaaccaatcaagacggatggggacagaactgttgcgaagggaacaacgttcacacatgttctggctgcctccttcgccggtttagttgccgtcgacgtcgtctgaagctaccggcgggcaccctacacgggggtgggagagcagaataaggttatttccgagctacgtaagacggaatctgggcgtctctgggagataggaaagttctcccactatgttgctaagcaaatggagtcggaagatgctgatgaggattcagagctatgcatatcggccgcagagtatttgaagaaatccaaaaggcgcgatgaaagcatgtttgaatatat

SEQ ID NO: 5630 - DNA, 252 bp, Glycine max
  Clone ID: PAT_MRT3847_105092C.1
ccggggaaaaacccccccaagacctgggagtttttgggtttttattacaaaaaccgggggacaccccatttttgcccgatcccgccgccccgtcccttgaacaaaagcgaatcaaaagccccctactgcgggctggggggccctcaattaaagccaacccacgccgctaaaaaaccccccgggcggggtgccacgggtttgataataagtaaaaaggggccttaaccctcccacccccaagggggaataaaa

SEQ ID NO: 5631 - DNA, 482 bp, Glycine max
  Clone ID: PAT_MRT3847_105093C.1
ccacgcgtccgatgtaagtgggtcagagggacacgttatgagcaggcaatcgcgtgtggccacatgaatgagagaaagcggaagaggaagaagaagatgatcaacaacaacaacaacaacaagcaacacagcaacaccaactgaaacatcatcatcagaatcatcatcatcatctacgaccctaaattttttcactttctctctctctctctctctctctccctccctctctctgtctgtgtctgtgtctgtgtctgtgtcttttttttttttttttttaattgtgagagaggaaggagataaagaagatgaaggaaaacagtgatgggtttgtgagagcggatcaaattgatctgaagagcatagatgaacagttggagaggcaccttagcaaggggttgaccatataaaagaaaaagcgctctgaagggggcgaagaaaatgctgctgctcatgatcatgttcacaccaccagtgccact

SEQ ID NO: 5632 - DNA, 273 bp, Glycine max
  Clone ID: PAT_MRT3847_105094C.1
ctcttgcgctctacgtccggggcgattgtcacaactgcacgattattcctctatggatcctgcatgcgtaccacgttttcctacagtgtgtagtcctaaagctcggcgtactcatggcaatagcagcctaccgtgagacattgacacccaattacaatcacggacgcctactaaacggctgcctactgtgtgagacctcagatgcccaatgactgagctacctgacattcgttccgttgcggtcactgcaggctctgaagcgctgaaacatgc

SEQ ID NO: 5633 - DNA, 333 bp, Glycine max
  unsure (1)..(333): unsure at all n locations
  Clone ID: PAT_MRT3847_105095C.1
ccgggacagcatatatatcaataatctattttatactatacctacattttgataattttctttgtagttgatagccatgatattntctgaatcccgacccttggtcaaaagaattttgccagtcaaagaaattttccttaagagggtccgatggcctaattgttcaaagccacacgcataagaaaagggttttattcttatgccatgccctttaatttaataagggttaaggtttaaatctgggcatgtattatggcctattattaaataatatggttgaccttgtcccataccttatctaatataaggttgcagaatcatgggtctttcgtc

SEQ ID NO: 5634 - DNA, 592 bp, Glycine max
  Clone ID: PAT_MRT3847_105096C.1
ctcagattgcaattgcctcttctcttctcccagaatcggtcactaatccgatatcatgaagctcgatacgactagtctcgaatcgtttcccacactgattgcacctcaaaacgacgtcgccggagaactctccgccgctccgttctttgaccttccgaattccaatgacttcgatgggttcttgaaagacgctattcagatggtgaagcccgcgaagggtactacaactcttgcttttatatttaaagagggtgttatggtagctgctgattctcgagctagcatgggaggatatatatcgtcgcagtctgtgaagaaaattatcgaaatcaatccgtatatgcttgggacaatggctggtggtgctgctgattgccagttttggcacaggaatctcgggattaagtgacaggagcctcaaagctacttgccaatatttcatactcttatcgtggaatgggttcatctgttggtaccatgattgccggatgggatgagacgggccctggtctatattatgttgatagtgaaggaggaagacttaaaggcactagattctcggatggatctggttcaccatatgcttatggtg

SEQ ID NO: 5635 - DNA, 524 bp, Glycine max
  Clone ID: PAT_MRT3847_105097C.1
ttttctttttttttcaaacacaagcttttttatagtgcaaaacataatatttaatacaggggggtatgttagaccaactctaaactcaagatctctcgtttaacggtttacccacaagaaatcaaccaccctttaaggactaaatataattatccgtatacagtatacctatttgcctagctagtcggttcaagtagttaacttacaaaactgatctattctagactccttatctaccaaaagtcaacagctactatttatacattagagtggcctaaatatgcactgtttgaaacaatgcgactgacaaccatctcaccatttttcctcattgcattgctctcgtaatctgttttctccctacctgggttatgaagtcccatcatttttggccttcttgaaatgatatctttatctctaccatcgtaacccccaaatagaattgcttctcttatgggccctggccaaacggattctttcaaaataaggtttgactatctcgcctttacctcccctttaataaa

SEQ ID NO: 5636 - DNA, 1404 bp, Glycine max
  Clone ID: PAT_MRT3847_105098C.1
ccgcctcgttgtgcgtctctttgctttttcccattgcttctaacgtgagatctcagattgcaattgcctcttctcttctcccagaatcggtgtaggttacaggtttaagggttttgttttcatttaggtcactaatccgatatcatgaagctcgatacgactagtctcgaatcgtttcccacactgattgcacctcaaaacgacgtcgccggagaactctccgccgctccgttctttgaccttccgaattccaatgacttcgatgggttcttgaaagacgctattcagatggtgaagcccgcgaagggtactacaactcttgcttttatatttaaagagggtgttatggtagctgctgattctcgagctagcatgggaggatatatatcgtcgcagtctgtgaagaaaattatcgaaatcaatccgtatatgcttgggacaatggctggtggtgctgctgattgccagttttggcacaggaatctcgggattaagtgtcgtttgcatgagttggcaaataaaaggagaatttcagtgacaggagcctcaaagctacttgccaatattttatactcttatcgtggaatgggtttatctgttggtaccatgattgccggatgggatgagacgggccctggtctatattatgttgatagtgaaggaggaagacttaaaggcactagattctcggttggatctggttcaccatatgcttatggtgtattggatagcgggtaccggtatgacctgtcagttgaggaagctgctgaacttgctcgacgagcaatttatcatgcaacatttcgtgatggggccagtggtggagttgctagcgtttactatgtgggaccaaatggatggaagaaactgtctggtgatgatgttggggaacttcattaccattactacccagttaccccaagcaccgtggaacaagaaatggttgaggctactggtgcttgatgaagtaactcgtggatgtctttttaagtttcctttgcttgccagcgtattttgaacccattgcatgaaactgattactttataattggaaattgacaatagtttgataaatacaagtgctgtcctatcctgttgtgttttagatcaagccatatttatcatccaaaatgatagattagagccatatataatgtggagtggtttaaattggtaaagcaggtcagacgtgtattgctagctattgctaatgtaatccatcttgcgattaatggttttcgtggcaacttctgaaagttgtacaagaaacttcctagggagaattgtggttcaatgtcttcgactgattgtagtagttagtaagcatacttttggtacgtcatggttttaatttaaagcttcgtcaaattgagacttaaaaaaaaaaaaaaaaaaagggcggcc

SEQ ID NO: 5637 - DNA, 508 bp, Glycine max
  Clone ID: PAT_MRT3847_105099C.1
attccttcttctcccagaatcggtcactaaatccgcaatcatgaagctcgataccaccggtctcgaatcgtttcccacactgcttgcgcctcaaaacgacgtcgttggagaactctccgccgctccatccttcgatgggtttgtgaaagaagctattcagatggtgaagcccgcgaagggtactacgactcttgcttttatatttaaggagggtgttatggtagctgctgattctcgagctagcatgggaggatatatatcatcgcagtctgtgaagaagattattgaaattaatccgtatatgcttgggacaatggctggaggtgctgctgattgtcagttttggcacaggaatcttgggatcaagtgtcgtttgcacgagttggcaaataaaaggagaatttcagtgacaggagcctcaaagctacttgccaatattttatactcttatcgtggaatggggttatctggtggtaccatgattgctggatgggatgagacgggtcct

SEQ ID NO: 5638 - DNA, 302 bp, Glycine max
  Clone ID: PAT_MRT3847_10509C.1
aaaaaaaaaggccccattttattggcccccgaatttttatctatccaaaacttaaaggggggcccccagggggtacccctattacccttgggacaaaacaaaaatttccccttggaaattaaaaaaaccccaatggggggggggaaacttcaattttaacaaaaaataatcctttaccccctaaaaaaacggggtctaaaatttggcctaaagaaaaggggggggggccccctttcttcttttaaaatcacaaatattttctaaaaaagaaattatggtcaaaacaaatctcgagccgaatt

SEQ ID NO: 5639 - DNA, 236 bp, Glycine max
  unsure (1)..(236): unsure at all n locations
  Clone ID: PAT_MRT3847_1050C.1
ggtcaatcaatatagagagagagcaacagttactaactgagctaatactgntggtatgttttggagtctgcaggaaggttgtacatctgtccatatttatgcaatgggcttggatgtctatgcatactcgagtataatactaattggatcaaagtgacattactattcattatggtctcattaccacactgcagggctaaaggtggacctgcgacactcaagcttgtagactggtg

SEQ ID NO: 5640 - DNA, 490 bp, Glycine max
  Clone ID: PAT_MRT3847_105100C.1
gtatagaaaccctttactatattaattaatgcatatacaggacagtaaaaaatttgcactgtcaaactcggtaagaggggatataagagttagttaagtagtgcacataaattgtattaaattttctaatattctaattggatttctagagttaataaaaaaaaaagaggtgttagtcgcttgaaatcctattcctgcggcggaaagagcctgcgaacttcctgtttgcggcagcactatgcagcgcctcctgtcgactcgtggcgcattctatatattcttgcaaaggtggaagctgtgctttttcgccttctttaggaacttgccctcgaattatttttgacgcccacgatcgttcggcttgctgacaaacatctctaatatctcttccagacatattttctgtaacttttgcaagctcatctacgttcgggttcggacaggggctttgcatatttggaatgcgaatttttgactcattctaatgatc

SEQ ID NO: 5641 - DNA, 753 bp, Glycine max
  unsure (1)..(753): unsure at all n locations
  Clone ID: PAT_MRT3847_105101C.1
gtgcctctgtctacttttccctcattgcttctaactcaacaattgagatctcacactgcaattgcccttctcttctcccagaatcggtcactaaatccgctatcatgaagctcgataccaccggtctcgaatcgtttcccacactgcttgcgcctcaaaacgacgtcgttggagaactctccgccgctccatccttcgaccttccgaattccaacgatttcgatgggtttgtgaaagaagctattcagatggtgaagcccgcgaagggtactacgactcttgcttttatatttaaggagggtgttatggtagctgctgattctcgagctagcatgggaggatatatatcatcgcagtctgtgaagaagattattgaaatcaatccgtatatgcttgggacaatggctggaggtgctgctgattgtcagttttggcacaagaatcttgggatcaaggtaatctatgcaaccttgaaccttgtatattgcatggttgcttntgtctgttctgttatctttaggtcagtctcctgcaaaatttctgccctagtttcccacaccttgtcattccttggttatttccttgcaattattgttattggtgtcgttattgttgttatagttgagtagagtagaatgaagtacatttatacacattgcctgaaaaatatttgtccaccggcagcatcttagcctgtgtattttggaagcaaggagtgaaagaaattgaatggaatggaaaatgaattatggg

SEQ ID NO: 5642 - DNA, 300 bp, Glycine max
  unsure (1)..(300): unsure at all n locations
  Clone ID: PAT_MRT3847_105102C.1
anacancataacatcctcaagnctttgancatcggtttgcagccatggaaacaggcatagnatgctnacantcngcgggcctttctggcctagtgtgtcttccaagcactctccaccctccatcnntccatcntttggcttgaggagtctgaaatcgagctntttatttggagaatctctaagagtggcatccaaatcancactanaggntncnaagacnnagantanttcactcgtgaccngangtnnaattggtgacagtctggnagaatcctcanaaacagcaacaccagataaggg

SEQ ID NO: 5643 - DNA, 639 bp, Glycine max
  unsure (1)..(639): unsure at all n locations
  Clone ID: PAT_MRT3847_105103C.1
ccacgcgtccgaaaaaacttaaggaactaaaaatttagttaacccaactttttaacctaaattaaaataagaaaatactaaaacaaatgttctcatcatcttgattgaggtattaaaagtgatttgttttatgaaaaatattatcaatgtattcctatcctgattttcaatgcattgcattgtgattgttgatatttattgattttttaactaatatccttaatacttgtttatatgatgcatgtagattaaagccgacaagtcaaataaaaaaagaggaatagacaagctaatgagatgcctaattgtaaatggctagtgaagatagaacttggccatcgacttaccacaaaaggcgagagtcacatggttgattcctagtcccactttntgcatgtttgatccataaactcctttaggctgtgttnggtttgtagagataaaaagagtggaaaaaaaaatgaacggtaaaataatgtgggatacaaatttttacactttaatttaaaattttatcttaatttattttattttcatttcttttcactctatcaaatggatttcttagtaatatcatgaactagtaatccaataattntggcattatatggtatccccctatcctacaactaaagattg

SEQ ID NO: 5644 - DNA, 565 bp, Glycine max
  unsure (1)..(565): unsure at all n locations
  Clone ID: PAT_MRT3847_105104C.1
ccgccccggaattcggtcgacccaccgtcgtcgctcttttatttattcgaaagacagggaccgggctttagcgtgtggcaaaatcaagacttttgctaagactacgtncgacagaactaccgttctctacaggctcggaggccctacttaacatctggacgaaggagactctacaggggatgggcgcctgacagatagacactgtattgatgtaactgacccgataactatctccaccctcacattaagacgtcttcatcccaagactattgttattaagctgctgatatatttggcaagtagaggtaatacttctgaccatgctaccttaacaacagctgtgcactgaacatccctgtcattgagttctgcacattggaccccaaccatgttgggtgctgagcggcttgacctcatctggggtttacaaatacactgtggattaggcacgagacccgattttgcttcagaatcttgggacagggtgcagcataaagcatatacctcctcatctggactattgagaagaggcgcagtgcagagatcacgagaaagttcacaaatg

SEQ ID NO: 5645 - DNA, 249 bp, Glycine max
  Clone ID: PAT_MRT3847_105105C.1
cttaattattaacacttccgtagttcaatatggggaagacctacagtctctcgctttcttccctttgcttgcgagtcttgtcgaatgcatactttgctattagctccaacaagctctacgagtgcgaactccagaacctcaacgcgctagctacccgtctaacgcgctgagctccgaaggtggtatgactcaaacatggaactctcaatactctgaggctgaaatgcgccggtgtcactgtttccaaac

SEQ ID NO: 5646 - DNA, 442 bp, Glycine max
  Clone ID: PAT_MRT3847_105106C.1
actcgcgtattcttcgagggggtgatccagagacatacgcctgttcctacccagcggcagcttactgctaatgccactccgcgtgccgatgacaacattcaccatgatggtttcatgaatcacatgcacagggatgaagaggtcaagaacttccctccaaggcatgatcctgtccgttatgcacaaaaggtccccgatcctgctcgtatcctatgcgggaagcgctaaaagagcatgactgacacggagaacaacttcaagcaacctggggagagataccgaccctggccctgtgacaggcactaaagggttgtccgacaatgggttgatgctttgtatgacccacgtgtcacccatgaaatccgaaggatgtggatatcatactgttctcatgctgatcgtgctgttggacataatatagcatgtcacctgaacttgaagc

SEQ ID NO: 5647 - DNA, 518 bp, Glycine max
  Clone ID: PAT_MRT3847_105107C.1
tgatgaaccccacagctatgtgagctgggatggcatccatttcacggaagcagcgaacaagattgttgcacatgccattctaaatggttctctttttgatccccctttccctcttcatgaacattgtgatctccaacctattggttgatccaatgcttgcggctagggaggggtctttcttctttaccaattaaactattttgaaatgctcagccatcatattgttaaataatgtttttgatttttggggtgtcactttcatgcttgtgtgtaatagtttgaacaaaaacatggtacttgttggtagcattacaatttgatgaaaaacaaaaatcatatacaagttcaagttaagctttgataaatttctgaaagtgctgaactaattggggttcagagttgtcctatcttcatagaaagattgttatatgttgtaatgttttttatttgagtattcacaaaaaaaatgttttgatttgagttccaataaaaattccatcagatttgagttctaaacc

SEQ ID NO: 5648 - DNA, 1254 bp, Glycine max
  Clone ID: PAT_MRT3847_105108C.1
aaaaaagaagaaaatatataggggatttagatcaattacaatttaaattcaaatcatatctaatctttataattaatggattctaacataaacctaggggaaatcttgtctatcctgtaaaaaaaaaaaatttgtaatatgtaatgaatttttccccttcaattcaatgattcaaaactaatgaggaagagatcaacaaagcaagttttacctttcttaataaagggttttccatttatacatcaagaaatcgaatcctaatatccatctaaatgaaatcactaactaaactaagcaatcaatcaatcccacttccaaacaactattttactcccactcaatctataacatgaaaaataaaatattgaaggaatgttccttaatatttgcaagagaaatctatgcttctatcgttgaatgagacttccttggtttgggactgacactcccaccatggctaatcttcaaagttgttaatgccttctggatctcgattgtcatggcactatctacgctccctgatgacagctttttgtgtgatttctgaagatgtagtttaagcgagctactgcttagtccagtattcttgccacagatggggcaatttttcatcattggtttccgttgctgccattccattgaaaccttcccgtgcagtttctggtccagatcaagtaagatctttgcaaaaccatcgttaggctgagatcggcgatgaactcgttttagagcattccatgcttctaacaaagtgaatttctttctaagcatcaggtaagcaaggaccaaagtagcacttctgcttttcccctcgaagcaatgaactaaaacactgtgaccagcttgttcaacataatctataaaatcacaggcctcttcaaatatgctgctgatgttagaatcttcatcgtcacatacagagaaatttttgtaagtgaatagatcaggaaattgagaatctgattggccaatttcatttgtacacaaacataaaatatgcgtgattcccaagcgttgcagtgtgtatgtagatcttgcagccagtgctccaccaatgaacagactatttgtaaccgcagatggtctctctgtatttgcagcctcagatatcaaggcaatcctctcaaggatatgctcaagtctgaccttcagttcatatgcatcaacaacagtgttgttatcactaccctcgaaaaatcctgtgttaaaattgtgctccaaacataacttgacagcatcatttttaagcatttc

SEQ ID NO: 5649 - DNA, 337 bp, Glycine max
  Clone ID: PAT_MRT3847_105109C.1
cgcgcgctaagatagacggtgagtgaacaacgaagatactgtgttgcattgaaatactggcactaattgctatggggacgcgtaactagggactatgtgattgcagatatttcaccagcttcaacaccaacatgaatactatgtaaatacagagatcgattcccttctttacgagaagccgacaatggactctgtaaaagacaatctgcttggccacatcaccttgtggggatccatgggtgcagtggattgatgtgatctacttggcgaagatactgacacttatcgcgagctctctgatattccgagactgttgatgatccagtccttactcagg

SEQ ID NO: 5650 - DNA, 314 bp, Glycine max
  Clone ID: PAT_MRT3847_10510C.1
cagggatggacgtttattcgtgattcgataactgaatcaagatcggaccgatcgcgccttctctctcttgtgtttatgccaaggctgacagtgtataagaggcaaggcaagaaacgcgagggagagcgtcattgtgaaggtataaagccaccgaatgtaacattaccttacatgaacccacaacctccttattttgaaaactactcactaactcaaagttatctcagtgtgcaccacattgcgttctgctgagttctcttactaacaagtatgaccgcgccaacacgtactatcatacatagtggcatgctgag

SEQ ID NO: 5651 - DNA, 680 bp, Glycine max
  unsure (1)..(680): unsure at all n locations
  Clone ID: PAT_MRT3847_105110C.1
cgaaacctcttttcctcaagaacaatatatatctgatctgatttctttgacaataatagcagaaatttttaaccgaaaagacagaactttacaaattagagaaaagttttcacagaatcagctaatagcaaccttaaactgagagagtttcctctaattacgtgaatcaattctactatgtgtgcaaagtccagtatgccttttcttccgaaccagccagagttgttctaacacgggtgaacatatatacaaaacaggtgcttttacactcggaaattacttgaaaggtaatcaacttgcctctcaatgatatgatgcttgtataacgtaattattgtcccttaacactctttgccttcctctttgtctctacgagtgaaacaagaagagtacatttcttctggatttgtttcaattcgtcctctaagtccacaaccgtctgtttcagttcagtctctttttgcctgtactcctcacacctctcgaaaagttttatgttttctgcacagatttcatcaggagatacagatcctggagtttctactattgtaccaaggtgctcatgacgcanaccttgcatgccagtcactgcaagacccacaactgactgactcagaccactttgatgctcagctaccaagctagtatcctgntgatcagcaagcaactgattctgggga

SEQ ID NO: 5652 - DNA, 357 bp, Glycine max
  Clone ID: PAT_MRT3847_105111C.1
agttgataaaggggcattgtggattcattagatatacaatttgtgtttggattgagaatgaccactgaaaaggagatttctgatgatgaggacgaggaacagaagaaggttgatgagggtaaagttgaagatgtggtttatgataatgagaaggatgataagaaaaagaagaccagtgatggaggtgtcatcatgagtggtgattggtgaacaagcgccaatcctatactgatgacgaacgcctgggagatcacgctgaactagtgggctggtttctacatgagatttaccattgattgggaacagcatttggctgtgaagcacttgcttgtggagggtcatatggtgataaagggt

SEQ ID NO: 5653 - DNA, 491 bp, Glycine max
  Clone ID: PAT_MRT3847_105112C.1
tgtacgtgacacaattcgtctagggacaccgttcgacgagcgtccaggtaatatcttccctcgaacatcaagttcttacggtttcgagccgccagcatcatttgagcaacgttttgctgcggcacccagcatctctgagcgttagccctgtttttaggtggcctgtttctacatcaggcacagagtgtgcatcggcgtctggggtcgcatcatcatcggcgtttagcatcagaagcttcgagcttcatctgtgacatgtcagcgagcgagcactcgcgtgccatttgatctctcattttctttctttctctgggcgcatctcctatgtttccagcttcactttacccataacttttgcatggcctggccagcaagccttcattagatgggctctgcggtggtccacggtcgtgtctccttctgttttcccctttgtctctgttatacttggtactcacgacggatcatgacgatatgtatacatgaacatg

SEQ ID NO: 5654 - DNA, 204 bp, Glycine max
  unsure (1)..(204): unsure at all n locations
  Clone ID: PAT_MRT3847_105113C.1
atatttttagtggacctgtctcagcttacccttttacncgttggtattcactactcatgggcagggttcatcatggtgtaaggggggccaatgggtttcctaatgcaatctaactttggcccctactggtcttaataattaaaaataaatgaaggtcctggtggcaatggatttttaccattaaaaaaggtgaatggtattacc

SEQ ID NO: 5655 - DNA, 339 bp, Glycine max
  Clone ID: PAT_MRT3847_105114C.1
atgatcataacagcagtcacatgcatacataacgtcattaacaccatgaacatgccctttttcccaactctaagctgcttgcatagaactacatattttatatcctttttgcaactaaaaaaagaaacaacagtaacattggaagattaaaaaacataggcttttaatactgccatgcccataaacctgcacaggtgttggttcattgaaccaacccatttaaaggaaaagaccttaattatttttaggatacatatattacagattttgttcatcgtttcatagacgaggggaggaaatttcaagggtcctgatcatggcgtttgttggtaacattgg

SEQ ID NO: 5656 - DNA, 761 bp, Glycine max
  unsure (1)..(761): unsure at all n locations
  Clone ID: PAT_MRT3847_105115C.1
ccacgcgtccgatcatcatcattttcactattttttatgttttgttaatttgtttctcgtttttatgtaatattattttatctggcgcgcagattcagaggcagttgattggttttggatcattgaattattagcacagtaagcattgatcaaatgctcaaatcacaacgcaaataaaaagaaggaacaaagtggaaacgttgttgttggaagtgaagtgattattatggagatgtctctgcagctaaactgcaaaacggtgtttccctacagaggcggtgattgtgtttctggcgtattacctcgtcgtcattcagtaacgtttacgagtggttacatatgttcaccgtgcaaagcaggttggggtgtttcgttcttccgtgccagtgcagatttttctcggaagaggcaacagaagaaggtgccagttgcaaggaccaagggcactgctggaaagggttttgtcccaagcaaaaagagtacaagagtgaagaagggagacacgttaacttcagtagtgagtgaggtttcagggggtgataaaaagcaaacagttgatgtcaatgttgatgctgataaagaaggggaacttgaattctcccaagagaagtttgaggctgtagatagaattgacgaaattgtcagggatgtggnggagttatcgttgttagatgagacggcgggggagttattattgttggatgagagcaatgaagctaatnatttctgtattgatgaggatgatgaggttcttgagttgc

SEQ ID NO: 5657 - DNA, 265 bp, Glycine max
  Clone ID: PAT_MRT3847_105116C.1
cattacctctaccttcaacaacaatgcggacaatgactataactgttagtggcaatggtggtgaaatgcctcaattatcaccatatactattactgttccaaaaaatggaagatttgaagatctgacccgtgctcttagcattgcatgtgctttgggggctgatgagaccttattagtagctgaggtatacaacaattgcatcatacgtttccttgaagatccaactgattcattatccttaatcagagatgctgacaaactagt

SEQ ID NO: 5658 - DNA, 491 bp, Glycine max
  unsure (1)..(491): unsure at all n locations
  Clone ID: PAT_MRT3847_105117C.1
aattcggctcgagcttgcctctcgatctccgccctaagaagaccagggctattcgcaggaggcttactaagcaccaggtattgttgttatcattattgtcgctactgttattcttctttatttgagtgattatctgatttagttttgtgtaatatgccttgaatgtgtgtcatctttaatatgctgctccagagaaacttttatcggttatttatttaagttatctatccattttactcggatcaatttgtgtgcttgtttctgtgcgttttacgaaatacttgtttcttgttcaaattccaatttaatattccccagtgcccttctgcactgtttggttagagtgaaggtgagaggccaaaagtaccttccatctaatattgggggttggttttgcatccttcccctcatttgaagcaaatagttttgtattattattcttttatcaacaaaaatagttttatattattttaataattnggatatacatt

SEQ ID NO: 5659 - DNA, 352 bp, Glycine max
  Clone ID: PAT_MRT3847_105118C.1
attttctgtttccctcccccttctgaaaattttcccgcgtgcccagaaagggcagaagcggcaacttgggtctccccaacacctcttttcccgtactcctatttccgagttaaaactcacgtccgacccctacactcattccgttgttgattccatctcacaacgtctctttgtcccttgtcgttgttcttgtttctgaaatgctttgtttcccatagcggtcacatataccccctgcattgatggagttcacgttcctgtgctctttcttccatttttccctcgaattttcaagcattccctccctataggtaggagagggaagtggggaaaacatttgtagatggtttca

SEQ ID NO: 5660 - DNA, 254 bp, Glycine max
  Clone ID: PAT_MRT3847_105119C.1
cggctgcgagaagacgacagaaggggtttttcagttttttctaactgtttaatttagcatgtggatgcctacattttttgaaattggttgtaaacaattctgactgcctaatgtttctgaattctttgtatgcatactctgtgttcttcgtttttgatgttatacagatataaaaaaataaataacttttggaattaatagctactacaatagtttgtctttggttactattatggatattaaaggtatataat

SEQ ID NO: 5661 - DNA, 130 bp, Glycine max
  Clone ID: PAT_MRT3847_10511C.1
aaacataaaagggggtacaatcctaaaaatatatgtttgtaactaattacataccctactaagttgaaaactcactcctaaaccaacgcttgagtcaatccgtgaattccaaacacatacctgcaaaaca

SEQ ID NO: 5662 - DNA, 677 bp, Glycine max
  Clone ID: PAT_MRT3847_105120C.1
ctcacaaaggcttgcagatgcaaacattcttttctcggagttttctagccttaaaagcattgtaatgtggaccgctttaatttcaggacatattcaaaatgagtgcagtgatgtggccttaaacttgtatcgagaaatgcgtgacaacaatatctcacctgaccaagcaacatttgttactgttcttcaagcttgtgctctcttatcctcgttgcatgatggtagagagatacattctctaatcttccatactggttttgacttggatgagttaaccagcagtgcccttgtagacatgtatgcaaaatgtggggatgtaaaaagttctgttcaagtttttgaagaattggctactaaaaaggatgtgatttcttggaattcaatgatagttggatttgccaaaaacggttatgcaaaatgcgccctgaaggtcttcgatgaaatgactcaatcatgcattaccccagatgatgtcacatttctttggagtgcttacccgcttgtagccatgcagggtgggtttatgagggtcgtcaaatttttgatgtcatgggaaaattatatggcattgagccccgagtaaatcactatgcctgcatggttgatcttcttggtagggggggtttttctaaagaagctgaagagttcattgacaaacctgaaagtgaacccaatgc

SEQ ID NO: 5663 - DNA, 448 bp, Glycine max
  unsure (1)..(448): unsure at all n locations
  Clone ID: PAT_MRT3847_105121C.1
aggggntttttttttttttttttttttttttttttttttttttttttttttttttggacaaaaaactcatgggaatttctccttttattcccgcaaaagtttcgggactcattttagagagtccttactttttttttttacagggaacaaaggggaggctaaagccttgggtttcttattcattattattattattattaagggggggctagcccttttgccaaaaagacaaaagggggggagcacatacaaaaagggctttaagccacagtttttttttgaaactcctgggggggaacccggaacttgaaagggggggggttttttatttgcccggcccgctggctttttagggggaaagggggccgaaacacttcctctgggaaggcggccaacaatgagtttgcccctgcaaaaaggcccaacatggggggatcattgggcttga

SEQ ID NO: 5664 - DNA, 307 bp, Glycine max
  Clone ID: PAT_MRT3847_105122C.1
agaaaccaaatttcatttgtcaactacgcacttaacaaacaaagggcgtattatcaccaaggcgcgggcaacccacaacacaaaccatcatatggacatcaacagctactaccacacttacaccgctaggcccaacaaatctaaaaatgtgctcttcaacaacaaccctccacaccgccgtcaaggtctattgcgaggtgcaaaaacatcgcactctgtccctatacaactgccccactcatagatacatatgcgataccatttatcggctgaccactgataacaaattgccccaactactgctgta

SEQ ID NO: 5665 - DNA, 1547 bp, Glycine max
  Clone ID: PAT_MRT3847_105123C.1
cctcaaatgtgcatcccaaactgtttctgattttttatccttcttttccataatatgtttgcttaaatcttccaaacctgtattgaaggtgacctccatattctggacattatcatgttcattgcctccatctgaatcatcaccggcctggagcaaagcacggtacttagctcgttttttttgcccttttatcaggctgatcatctgtctcattattatccttcctatctaattccctcattcaatctttactttaatttggtataaataaaagttaataaatagtagagtgactattggcagacaactaaccagaaatgaaaaataatgattagcttcgattcaattttcactacggcagtgaaagaagttcagtatggtgaattttgaatacgtacttttccatctgcttttcatcctttttacaagagaaatgtagtataatatgacgcagccataaagagcactcaagcattaatacagaagatagttacggagcctgtacacctggtgtctttctttcctaaccactgagctgagaacatttcccaaagttgcagttcagtttcttcaatcctcaaaagatgaataacgtgatcatttaaacttcagagccagggggctctgtggacaacgatgagtctgtgccataattccaaaggctctccaactcacctcttatacatcccagtatgactgtgacacctagtgtacatggaacaaggtagagaagtgcaggttgtccatttccgttcatcaggtatagtcccaaatatgtcaaaccgaggccgatgccatagccaactaccaaccaaagaaaatatccatttgatgctccccttccattatctttgtcgaatctatgagcaaaggaaataagcaaaccaggaaacagaatatctccaaatccaatcatgtcataacctcccacagggatcaaaaagacgaggaaatcccagaagcataggaattgcttccccaccagccttgtcacctcgagcaacctaaaaagaaagcccatgtaagagtatcacaaaactataaaaaaccagaattctctcttcctttttaataaagacacatgttaacacagaatccattagaaaaagaatataagtgttaacagaatagctaacttattattatttactacatgtatatgtgttaatgtcctctatcttcatgtttctactttctcttcttcctttctacttaattttcctttttatcgagtaaaagaaaattagtacttatattgctctacctataaagatgccagcagagctgagacaatagaagtaaaagaaatatagaagtactaggaaagtaaatacttactgcaatcataacactctcatggaaaatcactggagatatgaatacccaaaaaatgtcatagacaaaagcacaacaaaggagtacagttgcaacctattatatcagatgcatgagaaattagtagagctgttttaatagatacataacaaaaagggtaagagaagaatgattaattgattctttatttctacaatcaaacggacgcgtgg

SEQ ID NO: 5666 - DNA, 412 bp, Glycine max
  Clone ID: PAT_MRT3847_105124C.1
gcttcaactaactaaaatccacatcatttcataccgaaagagaaaacgccaaaacagatactgagcgaaaggaggaggcatgatgtgtgtagtgtcgattattcttttcaaagtggcgtttgacatagaagatgatgatgcttaattaagaaattaacttttctattcaatgtagccactcacctccaacatcatctcctctataattctatttttttactcttgttatgttaaattccttaatgttgcagatattaactctacgagaatcctttgttatacaagttttattcatgctactgagtgatattatatgttcttaatgctccttattgatttgtcattagttgaatgatttcaagttgcatgtgtttataattagaaatctttgtaaatgtaattgatcttgagc

SEQ ID NO: 5667 - DNA, 550 bp, Glycine max
  unsure (1)..(550): unsure at all n locations
  Clone ID: PAT_MRT3847_105125C.1
ccacgcgtccgctggtattatttattactgaattaacatctggtatctctaagaagcttatttgtttatcttgatgcctgattatttcaagttaggatttaggttttcttgatgtctagtggagtatgctgattgtttgtcactggcctaaaggcatatcttaataaatttataccactcattgacaatcttgtcctgaacttattgaattggctgttaagagaaatggcaaccttatttaaatattcagatgggctgattgtgtgataagacccctatattacaaaatagtggggttttaatttgcagcataggctctttattttactctaggctttaaaaggctaggaaattcaagttcataaattgaaagacttatcttaaagtcggttggctgcatggatctaaaagtcatgtaaagagtaatgcccattactccatttaattgtttcaccaaaagttttctttcagtctttttactcttttatctttcannttttttgnatatcctaaagtcatatgttttcaaaaggattttaaatcngacacc

SEQ ID NO: 5668 - DNA, 254 bp, Glycine max
  Clone ID: PAT_MRT3847_105126C.1
tttattttttttttttgggatttggttttttcattgttgtactttttttattagtttaccggtggccacgaacttggaacaataaggaggaggaaagggaaattcccagggccccttttttccgtgtgttgatattaaccaagaatttaagggacaaccaaaacagccaaactttaaagggctttcaaggtttttttatttgccactggcacggatatgaatggtatcggtgatttatgagggggggccacaac

SEQ ID NO: 5669 - DNA, 1252 bp, Glycine max
  unsure (1)..(1252): unsure at all n locations
  Clone ID: PAT_MRT3847_105127C.1
ttgttgttctctcacttactcacccttcacagttctcatgttatgattcaatctcacagagaatcttaggattctttgagtgagcagagagaggaagacacccacccctctaagaaatgcggtcaattcctttggggaccttcagtatctccaactcctataaagacctaaaaagtaacaccgttcggcacccctccctctaagaaatgcggtcaattcctctgggaacctcagtatctccaactcctataaacacctcaaagttatcacctttcagtgttaattttaagaaaccaaccactttcccatcttggggttcaactcctcctcatgaattctctctctcccaatcaggattatgtagagcaagtcaagttgttgatttgttcccgtctgtgtctcctgaaattacttgacggttgctccgctttcaggactgttgggaggtggcagagactcactgcagctccttcttccctgaatattccttcccattagattttgtgctgagaatggacagattggtggccatgatggcaggattcactctaccaaacggttgcaagagaatttgtttggttgccgttactggcaactcatttggtgaaactgtattatttggaagtgaagatttcaaggttggtggttttgatgggaaaatcagcctcaacaagggatatgtggctggtatattaacagtggatactgttgcagactttcttcctaggaagggaccattgcgacagagaaggactggagttgcatacatatcgaatgtggcagtccgggaaaaatttaggcgaaagggaatagctaaacacttggtagcaaaggcagaatcacaagccagaagttgggggtgtcgtgctattgcattgcactgtgatttgaaaaaccctgcagccacaaagttataccaaggccaaggtttcaggtgtataaaggttccagaaggagctaactggccacatccaaagacctcaccggatgtaaagttcaacttcatgatgaagcttctcaacaattcaactgtttctaaatgaattaaatactccagagtagggaagaattgtgttctaaaacataatgtattttaagaagaaaaatccacaagaaaaggaccgtctgttattgaattgtgtacatgaaaaaaccaacgaattagaggaaaaatcacttgagaaccttttaggttgctccagtagcaaacattcgtgtatagtaattggcattctttggtatctnaaattcg

SEQ ID NO: 5670 - DNA, 352 bp, Glycine max
  unsure (1)..(352): unsure at all n locations
  Clone ID: PAT_MRT3847_105128C.1
ttattttatttttttttaatnaattgtttttaatttaataccaaagcatatccaggggggattaatactagaaggggggggattcacaacactactaaaaggatgtaattttcagatccctatgaaggggatacaataaacctacatacaattaacttattgacccttacataacgaaatacctaagattagtacacataaacaataaaggaggccataataattataaaattatttaatgatgctaatattaatacagggcttaaaaatgaaggcatacaaaaattataaaaaagcccataaattcatttacacatgttttagagtccataaacttcaaagaattcattaa

SEQ ID NO: 5671 - DNA, 565 bp, Glycine max
  Clone ID: PAT_MRT3847_105129C.1
gtggccccacaagtctggaaactcttgtaagcatagcttggctaacccaaccaaattgttgttctctcacttactcacccttctcagttagttctcatgttatgattcaatctcacagagaatcttatgattctttgagtgagcagagagagagagagagagagcaagacacccctccctctaagaaatgcggtcaattcctctgggaacctcagtatctccaactcctataaacacctcaaagttatcacctttcagtgttaattttaagaaaccaaccactttcccatcttggggttcaactcctcctcatgaattctctctctcccaatcaggattatgtagagcaagtcaagttgttgatttgttcccgactgtgtctcctgaaattattgtgcgggaggccaggctagaggactgttgggaagtggcagagactcactgcagctccttcttccctgaatattccttcccattagattttgtgctgagaatggacagattggtggccatgatggcaggattcactctaccaaacggttacaagagaatcttgttggttgct

SEQ ID NO: 5672 - DNA, 586 bp, Glycine max
  Clone ID: PAT_MRT3847_10512C.1
ccaaggaaggtttcccgtcatcactgtatgacgtcctccttctttgggggggggggggggaggtaaaccatttgggtgaggaaggaagggaagctagttacggtacatagctaaagagaatactaacgtcaatgacgaaaaagaaacgatagaagtgaaaaggtacaataggagacgactattacaaccaataaccgaaacgattgaaaataaccgaaaagattatcaggatgcttggcagtggcatgtgctttcgtgcgtggtagtgccgcgaccaaccaaatcctgttatagattggcagttgagccgtaggggagttggccataggcatttgtggacttgttggcgtacaaataaatgttatagaccttgtgttacgcctgggtttagtaccatcatatctaacgcggatttgagtggtgagtactggcaaagtgggaaacaaggcaataagggcacaggggcgtatgccaaaccaaccgttacgtagtggtaagagggtacgcgatgttagggccgtgggagtaggcaattgtggtaattcccaccgccgacctgatgattaccgacgtaggagtagagagg

SEQ ID NO: 5673 - DNA, 424 bp, Glycine max
  Clone ID: PAT_MRT3847_105130C.1
cataaggaaaacattcgcttgagatggggtatcccccaattaattatacctacgacgacaatgtgacttttgaaaaagtcaaaaaacattacagttaaaggcgggccctggggtcctttgtctcactttttttgcttaggaaaggataatctgggtatcctataacaggatcctgggagaaaaatgtctctcctgttatactggggaagaggggcattaagcttaacccctaaaaccaactctggattggaaatgaaaagtgaaccataggataccaagtgagtttggccttgagctacagcttcctttcccaaatccctaggaagccccccactacacatgaatggtccctcataaccctttctgaatttttgtatgaaaagatcgtcctcctgttcactcccagggttacctgactcggttt

SEQ ID NO: 5674 - DNA, 395 bp, Glycine max
  Clone ID: PAT_MRT3847_105131C.1
agattacttaatgtactcacggttgtcacataacgtgtggtagaaccaacattatcatcgttaaaatcaagctagtcatcggcaaggcactatgcatgcgagtcctaagcctacttttgcagtggccatttcggtgaatccttagtgtctactgttgctaactaacaatggcagctatgcctgacactagaaacagggtagctctagaaaatcataaatattaaatagtcactaatcaatagtagcaatccaatttcattgctgtaaattctctgcaatgaggtatggatttgaatttttaccaacttgtactggaaacacaagacaaaatgtcaccacggcatactatcagcttttgctctgccggtatgtctatctactcggctgttacgcat

SEQ ID NO: 5675 - DNA, 1481 bp, Glycine max
  unsure (1)..(1481): unsure at all n locations
  Clone ID: PAT_MRT3847_105132C.1
attggattggtgggcgtgttagtcccggaaacaagtttttaggtttgggcagtttgagtgctcagtgaaggagaaaatggcgaaggagttgttgactcttgataatggcacaacctgcacatcatggaactattctggcaccaggctcgctgcgggttccgccgatggcactctttcaatcttcgattcccgcgagccgccttcttcttcctccctccgttctactttcaaatctagggttctagaaggaaacatcgtgaagattgtttggattccgccagaatatggtgatgcagttgcgtgcatttctgccgatggaattgtgtcattgtgggaggaggtcgcagaagattcccagtctcttcagtggaagatgtgtaaaagctttggaaacagttcaagcaaagtccttgatgttcaatttggaatctctcttgctagtttgaaaatggttgctgcatattcagatggtaatgtaagagtttttgagctctcggatcccttggaactgagaaactggcagcttcaggctgaatttcaaaatgttattgagtcagtgtcttcatttggaaaggcttcatgcctctcagcatccatatcttggaatccacaaaaaggtggaagccaggaatccagcttccttgtaggctttaattcaaatacaccagagcttaattcttctaaggtttgggaatttggatcaggctcatcaaagatggcttcctgtggcagaactggcactgcctgtgaggaccaagggtgatcncaggtttatgctgttgcatgggccaccaaatanttggcagaccatatgagatcattgcggttgcaacccacaagggacttgcaatatggcatcttggattgaaccctgatcatgatggaagactcccagtggagaaagttgcactactgtcaggtcatgagggcatggtgtggcaaatggagtgggatatgagtggaatgactttggctactacaggtcatgatggaatggtccgattgtggcagtccaatttcaatggtgtttggcatcagcaagctgcatttgaacccactttttagtcacttgtccccaagttatacccagccgttttatgtggaaaacgaatctcgaatgataaccgatatttaaacctcattcaatttgtcgtaagcagtaagctggcctgggttctctctctccttttgtttttgcccccccccccccccccccccgaagaataggatgaagtgtattctgttgtaatttaggtggacaatattctcgtgctacatgaaagctgtgatgctagatgcctttcatttgctctcgtcaccgatgtacgttgctgtttgtacaaatcatgcattcgctttctagtatgtttaacgataagattttccttgatgctatattggaaatacacgttttactttaaaaaaaaaaaaaaaaaaaaaataacacccccacccggaaacaaatggaatngacaaaaaaa

SEQ ID NO: 5676 - DNA, 262 bp, Glycine max
  Clone ID: PAT_MRT3847_105133C.1
gaacacatgggaaatgctagagtagggcctggtagttttggtatggttgaatgtcacgtccactgtgcaacaatgcgttcttgaatctggcggactgtgatgtaccagcaggatgtgcatcatccaggacatgtgtggtgccgaaacacctctctatactgataaccttctaaatactgctaaaacaacttctgccgaggcaacatctacttcagtgattgattaggcgcaacaaatgccttatagacatattatctgatat

SEQ ID NO: 5677 - DNA, 415 bp, Glycine max
  Clone ID: PAT_MRT3847_105134C.1
atttttgagcctgcttactgaaaatgggaacaccaatgatgacctcccgcttcccactgatgagagtgtgctcactcagataaaggattgttttgctgagggcaaggatcttgacgtgtcatgcatgtctgctatgggtgacgaacatatttgccccctgatcgatgttgggccacagaactacctcctggtgctggcagcctgttgtttctatttacgcctacatcctcttgaaagcttatatattggctgggtcacgacctggcttatggcttatagattcttggcaccactagtcttatccatggtgctgatggatgtgtgcacacaaactatatcacaccttgtctggttatctatgctcgtcctatgactctgttattcaggacgaatcgtatgcgggacggtttttttt

SEQ ID NO: 5678 - DNA, 280 bp, Glycine max
  Clone ID: PAT_MRT3847_105135C.1
ttatggggtattgagattaacttatgaaagaagatgcgaggcgaacaaatgaagctgctgagctttcgagcgagaccatttggtaaaaggattgagtggtctataaaactatatgcattgcagtatgagtatatagaagacgatatctgctacaagactactctcattctggagtagaacccgattcacatgagctttccagctcttgttcatgcataataatccattatagctgaatcattcataatccgtgaatacataatatgaccatggaatgcaa

SEQ ID NO: 5679 - DNA, 517 bp, Glycine max
  Clone ID: PAT_MRT3847_105136C.1
ccctagaacatataaaaaaacttagggttttgatcataggaaatcaaaaggggccttcagttaaaagcccattcgaagtaatgggagggagcccctttaggcgcagtccaatttccacatccaaagaaaaggctcccttggttgggacccgggtttctaaccatgcccctggtggttttcaccccacaaaaacaaaaagggggatactgaacaacggggggagggaaatcctttgctttggaggggcaatgagggaaaaccattgggtgttctggggactggttccacataagggggcgaacagctgtctgccacattatggaattgggaatggaaaatttaaaaccccggggcatgaaaagcgccaacaggcgaacagtttttttggcattatcaagggcgaaatgggcacaaccctgccaggccaagccgggtatttaaacagctttctttagattgcacttcacagcaccaaataccttacggaaaggaatccttaaattgatccaacggttga

SEQ ID NO: 5680 - DNA, 298 bp, Glycine max
  Clone ID: PAT_MRT3847_105137C.1
ggcagcagcctcctccatggctctctcttccccatccttggctggcaaggccgtgaagctgggcccatcaacccccaaattcaggatggtcatcatgataaacaccaccaccaagcaagcctcctccataaacccatgatactacccagaccacctcaattacttagacccattctctaacaatcccccgtcctacctcactaactagttcccagataactactactaagacactactaaactttctacctacccataaaccttcgccacaaaccgttacctcaaattaatccactcc

SEQ ID NO: 5681 - DNA, 343 bp, Glycine max
  Clone ID: PAT_MRT3847_105138C.1
aaagggacacaaacccaacatacttggtgagtctattgatatctagggcaactcgatgcactcaatgcagccattcctttctcttcttaaaaatcctccaagtcgtaactcataaaaccttctatgactcaaaaatccggtagagaatttcatgataagagctgtgcaagaaacaaatgatcccctctttcactgcttatacccaccggatcctcacacatatttgtctcctttcatcaaagaaccttattcttgaaccttgaacgtagaacttacttctattttcactagggaactactctctgatcatacctgctataactttctattggagatacacttt

SEQ ID NO: 5682 - DNA, 231 bp, Glycine max
  Clone ID: PAT_MRT3847_105139C.1
ggattgggctcgagtcgggttccggtcctcgcactcgtcgttgaataggttttcaagtcgacctcgcactcttcccccactctctctgcagcttgctctctcgatctcagcaaaaccagatagatatctctgaagcgagcaaatccgagggttgctctcttcaaatgggttagccatagctctctcgtcacgtcgagctcaaatgtagttcacattcagcgcactgcgcat

SEQ ID NO: 5683 - DNA, 240 bp, Glycine max
  Clone ID: PAT_MRT3847_10513C.1
ggctcgagctcacattccgcagacttcgacccggtctctgatacatgtcaacttctatatccatgagacagctatcatttactggcatgtgcacagtctctctaatccagaatcgctctctactcctgcactctcatgctcaacaacgttttcggcgtagaccgctagctattaagggacatatacaccccgcctggtatgcggcttaaagagcctgctacccataacaaattgctcgat

SEQ ID NO: 5684 - DNA, 464 bp, Glycine max
  Clone ID: PAT_MRT3847_105140C.1
ccaccgtccgggttagcagcgaaacccatccaagaaatatgagtatggttcccagtcccaaacaaaaacaagttgtgcaattgcagcatatccagaacaccaagaagctctcttactcattctcacattcctactcccaagcctaagaggtaccggagagaccaccggcatcatccaagggatgaacattccgacgcgtggcaggccaactcgtcgacagccacctcatcttcgccactctccaacgcatcgtcgacgagtccgacaacgtttcctatgcatacatgaggaaaactggattggaaagatcagaagggcttttgaaggatctgaaatggttttaggaagaaggaaatgtgattccgactcccggttctccagggcttacatatgtgaaatatttggaggaacttggggagataagcgcacccttggttctctgccattgctacggtgtgtattgt

SEQ ID NO: 5685 - DNA, 190 bp, Glycine max
  Clone ID: PAT_MRT3847_105141C.1
tctcaacggtctctgaaacaactcgagcgagcttaacctatggatgtagcttcgttacagggcacatctccaccgtgcaggctatcactcctacagtagagcgatgctactgcatgaaacgctgagacgcagagttgacgccgacagtagaagtgttcggctccacaggcgcaaccgctacacggagagc

SEQ ID NO: 5686 - DNA, 458 bp, Glycine max
  Clone ID: PAT_MRT3847_105142C.1
ggggaaaaaggaaaatttcgggcggcgggggcgggccccgggggggacccatggggggacccgtgggaccacccggaaatatggacccgggtgctgcgggggtaaaatttttctctattgagaggggcataaaagatgggggccggaagggtaaaaggtgaagcctggggggaaaagtgagggggctaaaatacaaaaaaagatttgggctgaatgcctaaatggaaaaggcgggggggcgcaaggggggggctttcaagaataattcgggtggcgtgagaggcggtttcgaattggaaaccggggggcccctttttaaaaaaaagaccaccccccggggaaagggggttagcgcatgggcccccaggaggggtttttttttacccagggaggggggccccagggggggggactttccccccgcgggccctttaaaaggggggaaaaaaagccgggcc

SEQ ID NO: 5687 - DNA, 2149 bp, Glycine max
  Clone ID: PAT_MRT3847_105143C.1
attaagccgccacccgtatcgcttcctctaactgcggaacaccgtgcactgaccctaccaccgtcgccgacgcgctgtgggcttataccactctgcgaatttgcctatacatacagggaccccaacgggtctttcccttttatctacttgtcctcgtgacccctttctctgtctcttctctctctgctcctgaatttaacactactcagctttcatacacttcaatccctttttattggccacctttcccttcttcacagtgctactacttccttatccaacaccaattcccgtttctcttttcgggtttcggaatcaatcaatgccgtgtttttagatactagtacctgctttagctacccttctcatagaattggtaataaaatagcaagtcccagattttttatttctttcttctcctctgtctattttattcccaatcctctagggtcttggccttttcttcattccccccccttttttttataaaaaaaataaggcaataacttttgttgcttgtactttttgggtttagggttttgcaccccctttagctaaaacacacaagtggcaagcctatgttcaacttcaactccatgcctctccaattctgaacattctaaatttccgattatataaatccaaacataaaaacaatgtcttcttcgtgtctgagtggagccgggggaagaacctatggattcgatttcgaattcgttaaatctccgtcttcatctactttcacatcacacacatcttcttcaccttcctcaacgatctccgaatcgagcaattcgccgctggcaatctcaacgaagaagcccagaacgccgcggaagcgacccaaccaaacatacaacgaagccgcggcgcttctctccacggcgtacccgaatttgttctccacgaagaacttgaaaactcagggcaaaggcaaaggcaaattctcgaggcccacatcggagaatttcgattacgattcttccgagctgttattgccgttcagagtcttcgacggaacggcgtcgtgttttccggagccgttattgccgttccgaagcccatggagaggcccaaagtggtgagcgtgcaggagaaggataataataataaggcgtgtgagagccccggcgagataagctccatcgtgaatttcaattcagttgaattgaacgatgacggcgaagagagcctcgacgcggaatcgattctcgatgaggaaatcgaagaagggatcgatagcatcatggggagcagtattcaagaggtctcaaacgacgccgttagtaacttgccctggattttgccttttggcgggaaattggagttcccgagaccccgtgttagggctctccgccacgtcgacgacggtaactggtggaattttcctgccgtcgatattctttcaatatcgcccaaaattaacaccaagcctccgccggtggccgccgagaagaagatgaagaagaagaaggttgcggcggcgccgtcgccggtcgtcctggagttgaagaacacggaattgcccaaaccgaaacagggtttgatgttgaaattgaattacgacgacgttcggaacgcttggtctgaccgcggaacaccgttctccgacgacagtcccctagccgacgtgccgggaaatgacgtcactgcgcggctgtcgcaaattgatttgttgtgggacaatggaggagtgagagaagctagcgtgctgcgctacaaggagaagcggcgaacgcgcctcttctcgaaaaagatcaggtaccaggtcaggaaagtcaacgcagatcgacggcccagaatgaaggtacgagtcagttcacagttgagttgaggacacttgaagaaacttgatttatgtcagataaaaaaaaagaaaagaaaaaggcaaatctgctttttgatttggtgatgataattggataatgaggtgcgtgcgtgggtgcgtcacagttttttttttttgttatggagagtggaccccgtttatggtggttggtcactttgtccaacttttgaggatctatctattttttcaccttagtttgataccctgccactgccaatgttttaggttttcctctttaatttctgccactccgcctatcagaaggccccaccgctgccctttccttctttcgccatctta

SEQ ID NO: 5688 - DNA, 651 bp, Glycine max
  Clone ID: PAT_MRT3847_105144C.1
gacaaatctaatatcgagaagggcattgtgtgacgtggcaatcgtggattggtgcgtaggcgtggacgctgcgacattcggtgtgcgatcttggtcccgatttgtaaacgttgaccgttaaggaactttcgtcggaactcggaagtgggtttgcgtcgtcgtgaggtttaacgagacgatgagggcactgtttctgttcttcattctcttctctctcagctatgcctccgaacaaatcttccccgctcatatcggtagcatatttggtggtggcggtggtggccgctctcgcgaaccaaaatacaagattgaatttcatcccgaagatttcccttttcaccctgatgatgatcaggaatctatagtcatgccagataaaaccggacagaaatatatgtgttacttacctaaagtggaaaaggaaaaaagtggaaagcctgttatccaacacaatattagcagcatgattgtagaaactgagaaaaggattaagcagaagacaccagatgaactgctagaagtattaaagggtccatgctttgtcagacaagaaggttgggggtcatatgaattttgctatcaaaagaagttgcggcaactacatctggaagatgattaggttggccaggagtttgtcttgggagcgtttga

SEQ ID NO: 5689 - DNA, 1037 bp, Glycine max
  Clone ID: PAT_MRT3847_105145C.1
gatttcgaattcgttaaatctccatcttcatctactttcacatcgcacacatcttcttcaccttcctcaacaatctccgaatcgagcaattcgccgctagcaatctcaactaagaaacccagaacaccgcggaagcgacccaaccaaacctacaacgaagccgcggcgcttctctccaccgcgtacccgaatttgttctccacgaagaacctcaagacgcagggcaaaggcaaattctcgaggcccacatcggagaatttcgattacgagtcttcggagccgttattgccgttcagagtcttcgacggaacggcgtcgtgttttcttttggaccaaacgggcccgaagcccatcatggagaggcccaaagtggtgagcgtgcaggagaaggagaataataataacaaggcgtgtgagagccccggcgagataagctccatcgtgaatttcaattcagttgaattgaacgatgacggcgaagagagcctcgacgcggaatcgattctcgatgaggaaatcgaagaagggatcgatagcatcatggggagcagtattcaagaggtctcaaacgacgccgttagtaacttgccctggattttgccttttggcgggaaattggagttcccgagaccccgtgttagggctctccgccacgtcgacgacggtaactggtggaattttcctgccgtcgatattctttcaatatcgcccaaaattaacaccaagcctccgccggtggccgccgagaagaagatgaagaagaagaaggttgcggcggcgccgtcgccggtcgtcctggagttgaagaacacggaattgcccaaaccgaaacagggtttgatgttgaaattggattacgacggcgttcgaaacgcttggtctgacagcggaacaccgttcaccgacgatagccccctcgccgacgtcccggaaaatgacgtcactgtaagttccaaaaactaagtagtactctgttttcgcaagtttcgttaaaaccttaattgtgaggtttatgtggaaataacaacgtgtttagc

SEQ ID NO: 5690 - DNA, 414 bp, Glycine max
  Clone ID: PAT_MRT3847_105146C.1
gcggctgctaattctggctcgtgtgcaaaaagaccagttcgcgggttttgtgaacatgtgagttactccaccttgccaagggaagcatccacagttcctctctttggttaacactttatcagcatgaggcagccttgacatgggcatgggactcctttatctctaataggggtggacataatcttgataagcagtgcgctgataatgaccactttgcttgccattaactctttagttgcaactctttgggaccattagtgcttcaaacgatatgaactattagaaggaccatcttttctcttttacgaaactttgaaaaccttagcatccctggcatcaggttaggagagcgaattcttcaattattcagaagatctaattattagcttcccagttctcatagtgcttgaaact

SEQ ID NO: 5691 - DNA, 3156 bp, Glycine max
  unsure (1)..(3156): unsure at all n locations
  Clone ID: PAT_MRT3847_105147C.1
gaggttgtggtggtttttggagtttgggtgtgtatttatagtagttcttctgtttggccttgtaaaatttgggagggccnaggtttacatagtcacggttgagggagagcctatcataagctacaagggaggaatcgatggctttgaagccaccgcggtggaatctgatgatgatgatgatgagaagcttgattccacaagtgaggtggtggtttcttatgctcggcaccttgaaaagagacatgacatgcttctggggatgctgtttgagcgtgggacatacaacaagctctatagctacctagactacctttgggttcatttttcacgccaccatgctcgcgccctggaacgcgcgcgtcgagttagcccgggcgggagggactggtgatccctgggactagcaacgcgtcccccacaatccctggggttgctcctttgcggttgcaattcatgacacgagtttgcccggtcgactctacatttgccttgatcaatccatgaatgactttcgaataatccggaactcctattttcccgtttcaatgttatggaatagaatctatgatgcaggtcaagactactcagttttattataggagtggacacgttgatccacaacatgcctttgaacctggaactatatttggggcagtatacgtggattttgttgtgttttcatctataacgccgggtctgcatgttaataacacacaatattaagcgcatccgccatgggttaagcccatgggggtcccagtatattaaagcagtcccacaaatagaattttgcacctgtggagaaagggatttatcatacggcccgcaagttttgcaactcataattctgaaccatatgggccagttccaaggttcaaaggaaaatgtgaagctgatccagaaactaaaagaagttactgtaatgggaagattgttggagcacaacactttgctcatgctgcaatagctgctgggtcatttaacccttcaattgactttgcttctcctcttgatggagatggacatggaagtcatacagcctctattgcggccggaaataatggaattcctgtgaggatgaatggccatgaattcgggagagcgagtgggatggctcctcgtgctaggattgctgtctacaaggcaatttatagactgtttggagggtttgttgcagatgtagttgctgcaattgatcaggctgtatatgatggagtggatatactcaacctttcagttggacccgacagtcctccagcagccaccaaaactacatttttgaacccttttgatgccacacttcttggagccgtgaaagctggtgtatttgttgcacaggctgctggaaatcatggtcctcttcctaagacattggtttcatatagtccatggatagcatctgtagcagctgcaattgatgatcgtagatataaaaatcatttgatctttggaaatggaggaaccttaccaggaattcgtgtaacaccttccacacaattaaacgaaatttaaacacattggctgccgcaaatgctgtgttggtgaatacttcacttatgacgtgtagcctcacggatggtcagaggccagaactctaaaataagaacttacaaaagggaaatttttgtcgccgtggatgttacttcaacttcgttgtctaccaaggcgcgatcatcgcggcatcagacacagtaactgcccgtggtgcaattggatttgttctttgtgttgatggaattgccctaggaacaaaatttagagcagttcctgttggccttcctgggattctcatcatagatgtcagcaattcaaaggaactgatagattattataatatcactacaccaagagactggactgggcgtgtaaagagtttcgaaggtaaaggtaaaatcggtgatggtttgatgcctattctgcataaatctgcaccacaggtagcattattctctgctcgagggccaaatataaaggacttcagcttccaagaggcagatcttctcaaaccagatatattagctcctggttcattgatttgggctgcttggtgtccaaatggaactgatgagccaaattatgttggtgaagcgtttgccatgatatctggaaccagcatggctgcaccacatatagctggaattgctgctcttataaagcagaagcatcctcattggagccctgcagccattaaatcagctttgatgactacatcaacgactctagacagagcaggggatcctcttctagcccagcaaacttctgaatcagaagctatgaggctggtcaaagctactccttttgattatgggagtggtcatgttgatccaactgctgcattggaccctgggctcatctttgatgcagggtacgaggattatataggcttcttgtgcacaacacctagcattgatgttcatgagataaggaactacactcacaccccatgtaacacctccatgggcaaaccatcaaatttaaacaccccatcaataacaatttcccatcttgtgagaactcaagttgtcacgcgcacggtcacaaatgttgccgaggaagaaacctatgtgatcacagccagaatggaaccggctgttgccattgaagtcaaccctccagcaatgactatcaaagcaggcgcatcgcgccagtttttggtgtcacttacagtgcgctcggtgacaggaaggtatagttttggagaggttttgatgaaagggagcagagggcacaaggtgaggattcctgttctggccaacggataccgacgatagatagcatagtgaagtttggtcagcaaaggaaaggaaagcaagtgctgcttgtaatattctttgtaacctgtggggaataaggtatggcgctacatttattcgtctaaatatataaatatgtaatgttaaattatgaataggtgtaaaggtaagcaggtgtaaggggtcactcctagtttcttccacatatagttttgcttatattgtctagtaattttgttggaatgcttcatcacaagttttaacctgtatctgccccattccccaaaagttcgttgcttacagcatgtgtaatacatgaaataatttgtataacataaggtatcaatggcacagcgtaaatcctaccaaagctattggctagttactcgagactagttctctc

SEQ ID NO: 5692 - DNA, 2091 bp, Glycine max
  Clone ID: PAT_MRT3847_105148C.1
tcgtacgtcagctcggaattcggctcgaggttcatatttcaccagaacaggcagaaactcttagacatgctcctggggtgaaatctgttgagagggactggaaagtgaagaggctcacaacacacaccccacaatttttggggcttccaactggggtgtggccaacaggaggtggctatgagagggctggagaagacattgtgattggatttgtggactctgggatctaccctcaccatccaagttttactactcataatactgaaccgtatggtccagtttcgaggtatagaggaaaatgtgaagttgatcctgacactaaaagaagtttctgtaatgggaaaattattggagcacaacattttgctcatgctgcaatagctgctggggcattcaacccttcaattgattttgattcacctcttgatggagatgggcatgggagtcatacagcctctattgcagctggaagaaatggaattcctgtgaggatgcatggacatgaatttgggaaagcaagtggaatggctccccgtgccagggaacttttaaacaagaacttgataaagggtaatattcttctttgtggatattccttcaactttgttgttggctctgcatcaatcaagaaagtctcagaaacagcaaaggcccttggtgcagttggatttgttctttgtgttgaaaacaattccccaggaacaaaatttgatccagtccctgttggtcttcctgggattctcatcacagatgtcagcaattctaaggaacttatagattattataatatcactacaccaagagactggactgggcgggtaaagagtttcgaaggtaaaggtaaaatcggtgatggtttgatgcctattctgcataaatctgccccacaggtagcattattctctgctcgagggccaaatataaaggacttcagcttccaagaggcagatcttctcaaaccagatattagctcctggttcattgatttgggctgcttggtgtccaaatggaactgatgagccaaattatgttggtgaggggtttgccatgatatctggaactagcatggctgcaccacatatagctggaattgctgctctcataaagcagaagcatcctcattggagccctgcggccattaaatcagctttgatgacaacatcaacaactctagacagagcagggaatcctcttctagcccagcaaacttctgaatcagaagctatgaggctggtcaaagctactccttttgattatgggagtggacatgttgatccaacagctgcattggaccctgggctcatcttcgatgcaggatacaaggattatgtaggcttcttgtgcacaacacccagcattgatgttcatgagataaggcactacactcatacaccatgtaacaccaccatgggaaaaccatcaaatttaaacaccccatcaatcacaatttcctatcttgtgagaactcaagttgtcacgcgcactgtcacaaatgttgccgaggaggaaacctatgtgatcacagccagaatggaacctgctgttgccattgaagtcaaccctccagcaatgactatcaaagcgggcgcatcgcgtcagttttcggtgtcacttacagtgcgctcagtgacaagaaggtatagttttggagaggttttgatgaaagggagcagagggcacaaggtgaggattcctgttctggccaatggacaccgacgatagatagcttagtaaagtttggtcggcaaagggaaggaaagcagtgctgcttgtaatattctttgtaacttgtggggaataaggtatggtgctacatttattcgtctaaatatatatatgatgttaaattatgaataggtgtaaaggtaagcaggtgtaaggggtcactcccagtttcttccacatataaagttttgctttgttggaatgcttcatcacaagtgttaacctgtactgccccattccacaaaagtcccttgcttactgcatgtgtaatacatgaaataatttgtataacataaggtatcaatggcacggtgtaaatcctatcaaagctattggctagttaaattcaattgctctgatttcagc

SEQ ID NO: 5693 - DNA, 161 bp, Glycine max
  Clone ID: PAT_MRT3847_105149C.1
cacttcagctcgtggctggtcctggcggattttggggctgcactagtcgtttcttccctcaggacaagaagaccatgatccttcagatatagtggccctcggtgaatagttgaaggccgagagttacccctaaacctcttgtagagatcaccaaagggtgg

SEQ ID NO: 5694 - DNA, 352 bp, Glycine max
  Clone ID: PAT_MRT3847_10514C.1
tatctacccaggaaatgccatcacatattttcacagacattctcaagttatcctgtcagcaaactcctaatttaataggtcttcacacaatcgcctaaaacatacaaagcttacctgcactgcaatgtacaaaaaacaacacaaaaaggacattgctcaataagatatgaggaaaatgagacttgctgcaaaaaaaccttactctatgtccattgttggtgcgaccttgcaattaatccatataaaaacagctgacaatccaaaactcctagatgcaactaatgaagctgctctctttgaaattaaggagacgatcaagaatacaaatgatgagaacaatgctaataagccg

SEQ ID NO: 5695 - DNA, 285 bp, Glycine max
  Clone ID: PAT_MRT3847_105150C.1
gggccggccctgagcttacgagggaagaagaacacgccgcagaggcgccacagccggacgcgggcctacaggaccaggagaccaacgggctcgacccaaccataaacacagacaatgaccccaccccacgagcacaacggctgaaacccggacacgaaacatgtaacgaagaggcggaagcacaggcgaaaagcaaacccgaaaaataagagaggagaccgggacactactcaccaccaccccacgtacaaagggcaggccctagggcacaccaagaagggaaga

SEQ ID NO: 5696 - DNA, 179 bp, Glycine max
  unsure (1)..(179): unsure at all n locations
  Clone ID: PAT_MRT3847_105151C.1
gacagaaggnaaaatgggtagtttctcgcgaggtggctgcaccatgcttagtgcgatgatcttgcccgagactaagaatacgcaggccggaaaatgcaccttggataattaaatgtcgcgccttacagaagaaagaggcctatactgaaggacacattgttagtggccatacctccaat

SEQ ID NO: 5697 - DNA, 634 bp, Glycine max
  Clone ID: PAT_MRT3847_105152C.1
ggtgttcacagttttccaagaatttttattcagactcataggaccaactaactaactaactacacaaactgatagtcaggattatcacaatactggggcgcatatcggccacagggaagacaggactcataacttttaaccgtaaaaactgacagggatgcagaaatcaccacaagggggcttctatgatatgacaaatgttgatatgttatacattttgcaagtttttgaaaaccagagctttcaaggaaaattttcaatagttacatttcatgattttactaaaggtaatatttacaatcatataaaatagtagaactgtacatcataaatacatcaataatgagcactttctatataaaacttccatccaagtacgccaagacaaattaacccaccacattacacatactgaacgtgttatcaaacgaattttgaccaaatcaaatttgggtgcaaattttttagacttttcaatagagcttttctaattgtagcacaaacacatgcaggtacatttgtgtgtagatctaccatcaaaacgaatcagttacataacagccctcgagaagaaccaacttacccagttttatctttaaatactgttgtagctgcagggggcggtttgaataaa

SEQ ID NO: 5698 - DNA, 305 bp, Glycine max
  Clone ID: PAT_MRT3847_105153C.1
ttgtttatgcgttcgtccacgctgccagttgattaggtatcctgccacagtaccacatattgttaagatatcgctgacgaagaattgtatatatgagcagactgggaagtcaggaggtgcccttggtgctgtgattgattgggacgatgaaattgtgggaagatgtctgatcatgtttatgaggaccacagtctcgactgttcatgcagaactcactgaggtctgaacggttagatggatattgaccttatggctaataatagtcttaaatcggtataaaatgcatatattcttgacatttatgg

SEQ ID NO: 5699 - DNA, 341 bp, Glycine max
  Clone ID: PAT_MRT3847_105154C.1
gaattccgggtccgaccacaggcgtccgccacacgcttccgccaacgcttccgccaacccttccggggggatgggtaatttttatgtttggaactttgatggagtaatttgggatagctggggtaagacagttatttttgtttttaaggttgccaaatggagatggcctccctggttggatggggggaattaaaccataaaagattggatggttgcccagttaattccagtccggccggggggggaaacgggttttgaaaccctttaactgggaaggtggttgctggggactaaatttccatccataaagaaatttttattttcggaggggcgaaatgtgg

SEQ ID NO: 5700 - DNA, 286 bp, Glycine max
  Clone ID: PAT_MRT3847_105155C.1
gacagttcagtagataatatccattcaactaaatttgagaaaaaacaaaaagcatggcgatatataatatgtccttcaatagaagatgagataacaaagggtagcccagcatatacttactgggtgctagggtgcttacgacgaggcacaatgatccgataacatcaaaactgctgctgcttctgctaactcaagcctccaccctttcctgctcggggataagggccttccctgttggctctgccaatcaatcaaagggctctgggaagggcgacacggagaaccg

SEQ ID NO: 5701 - DNA, 135 bp, Glycine max
  Clone ID: PAT_MRT3847_105156C.1
gctcagtgcatcaagatctatcgctgtgtaagcgaacatggtcaaaggagcgggtcgcgctctcgagatcgggaaaggatccggagatggagcgactgctgccaatacagccgatcaggggctcagcatgaccac

SEQ ID NO: 5702 - DNA, 644 bp, Glycine max
  Clone ID: PAT_MRT3847_105157C.1
ttccagtgctcttgcaatagtcagtgttgagtgatgattttgggttttcttttcctagtgcttaggttttgtcttttgttggatatgttcgtacaagaacacagttgggcagttggttacaaggccgtttgttgctgagcatatgtacctttaaccagtgtatcttgtttgggttttagtcacaaggttgttttattttgttgttatttatgtccttaacctagattgtttctggtaatggttgggatggttgttgtttttgattctgctgttttgtcacaacagaaattctgcttggacttgtgggaagggatttgcagcttagcctgatgtgttttttgaatggcacaaggcagtttattgcagaatggtccaggtttggtattttagagaaggcactggttctcatgttcatcttttcggggatatcttatgaaactttctgtttaagttcatttgcagctgataatatttgcatgtattttaatctcagtgaataacaaccgttctaataataacaaacagaaatagctttatatttgtagataaatattaaataatatgcggaatgggctaaagccataggcgactggaaacatacggaattgacagatcttcgaaaaagtcgaatattaattaggttt

SEQ ID NO: 5703 - DNA, 237 bp, Glycine max
  unsure (1)..(237): unsure at all n locations
  Clone ID: PAT_MRT3847_105158C.1
ttntataattttttttttttgaacgaaaacaaaacaggagcgattaaccctttctttatattcgaggcagctagctcaactcgcgaaacaaaaatgcagcacacattggttccggcaattcaagttaaatcctgaacaataacttcccacctatgctttttgcggggcgaccaatatatatagttgctcctcacatttataacttacacctaagtgtgtgcttttcaaatacattat

SEQ ID NO: 5704 - DNA, 324 bp, Glycine max
  unsure (1)..(324): unsure at all n locations
  Clone ID: PAT_MRT3847_105159C.1
ggccattgttgctggcatcatcccgagctgctgttattcgcaccgcaaacaaacagtgagccatgggcggaggaaagaacacgcgcatgtgcaaacggaaaaagggtggtaagaagaagcagctgatccattgccaagaaggattggtatgacattaangcccgttatatttttgaggtgaaaaatgttggcaaaaccgtggtatttcgtacgcagggtaccaggattgcttctgaaggacttaaacatagagcgcttgacgactacttggctgatcttgatggggatgaggatcatgcattgaagaagattatgttgagagct

SEQ ID NO: 5705 - DNA, 306 bp, Glycine max
  unsure (1)..(306): unsure at all n locations
  Clone ID: PAT_MRT3847_10515C.1
nnnntcaangtacgtnnactcaantcggaattcggntcagcgtntgttnttnacactttctgggtctttacttcnncaggtcaangtcaccaattnctggnaggtcngncacctagaaatcntggngnaganantttntgtaannggncctancttcganggtncacganagagactagnaggnagatnctccagggagngcnaaggncanctgcangttntnttnncggngganccccntnacacaganancccnanggnanacannnggngaanggcnactttctcaagcacaacnanacaaac

SEQ ID NO: 5706 - DNA, 350 bp, Glycine max
  Clone ID: PAT_MRT3847_105160C.1
acttgatgtgtcaacatcatcaaagcctcaagaggatgcaaagaagcctattaggatatatctaaattatgatgctggtggccactcccctgacagggattgtcgagcaattggcgatattgtcaaacttggggagcctcccatgacttctcctggttttccttcttgcaatcctcatgctattcctccaatctttggtgattgttggtataactgcacttctgaagatatctcagaagatgacaaaaaatgtcgccttcgtaaggcattaggtcagacagctgactggtttaagagagcattggctgttgagcctgtcaaggggaacctgcggttgagtggatattctg

SEQ ID NO: 5707 - DNA, 367 bp, Glycine max
  unsure (1)..(367): unsure at all n locations
  Clone ID: PAT_MRT3847_105161C.1
gggaaagccggcacgccggcacgggaccggaccggaaggcccgggccgacccacgcgatacgaatactctccagagaaggngcgaggnccaagagagcgagcgagaaaacnaacccaccaccccgcggagagagaaagngcaagaacaggaagaaagagagagagagagacncacggcccaaccccgaaccacccgacaaaacccacgccaggaccagaaaaggccgnacaaagacgagaagccacaacgcangcccaccccggcgcagcagaagaacaaacaaaaaaacccaccgaaacaaacggcccggagaagcgcacgggaccccaaggcccccaaaaccccaagcaacaacccgaaggagcc

SEQ ID NO: 5708 - DNA, 177 bp, Glycine max
  Clone ID: PAT_MRT3847_105162C.1
ctcaatactccatagtcttgaaatagggccttaaatgtgtcctgggggacactggcatcaatgggttcctcaaatccactaaccttcagctccttgacatgagatctgcatcacacagggatttctaaccacgcacaatgtggaactgaagcatctcaaatagcatacttattaagc

SEQ ID NO: 5709 - DNA, 281 bp, Glycine max
  unsure (1)..(281): unsure at all n locations
  Clone ID: PAT_MRT3847_105163C.1
ctttagctgaaatagggtatgctgattgtaagtccatttcttgaaagggatattaaccatgggagaggttatataggaacactgccgttgnaatttggaaatcatgtgtatatagttgggtnncncnggatgaaccctataccaagaggtggatatttgaatttttttcccatatggtgttggaaggaaacaccgggcaccctttatttgaaacagcatttggaaaaattgcattaatatttgttttgttatgctcctttctttaaaattggttagccttt

SEQ ID NO: 5710 - DNA, 252 bp, Glycine max
  Clone ID: PAT_MRT3847_105164C.1
ctcagcagcctaccgtcactgatatcctgagaatagataagtaccttttttccgtcattattgtcccttcttgaaaactggtcatcattggtgatgttggactcatcttgacaccaccccacttccatagtctgctcctatctgtgcatcttctacttgtgctccatttctgacttctgggttcctcctgttctcttcgtgcgttctaagaccatgattcttagcatgcctccatattttgtatcaataagt

SEQ ID NO: 5711 - DNA, 216 bp, Glycine max
  Clone ID: PAT_MRT3847_105165C.1
aggtaactccacaactttaatgccatttgctttgcctatcctcctctctggtggagggccgaaaccaaactggttaaaatgtgcaaattaatattgccagaaccaccatccaaaaatttccccacctttcaaattacgaattttgaacctgaggggaaatatttcttaaatggcgtttgaatttggctttaacctgtaccaaacaagaattttttg

SEQ ID NO: 5712 - DNA, 409 bp, Glycine max
  Clone ID: PAT_MRT3847_105166C.1
gggaaaaagcgcttctgggacgcgtttcctttagggacatgtattccgcgctcaacgctgtttctggtcactacattagcttcggaccaaccgctcccattcccgccaaacgaagggcaaggatcttggaggaggtcgacactgctgaaaaggcgcttctaaggggaagataattgagcaaaaagaaaggttttattgacgaaggcttcaaatgtggaagtcgttattccttcaaattgtagacgttcttgataatcatgatctgtattttcaaatgagatctgatgcaactagtagaatgagtctttcaccattgaagaagtgtactgtagcaattcgtatactggcatatggatcacctgttgatagtgtcgagtgtatgttatatttcaaacattgaagtatctcg

SEQ ID NO: 5713 - DNA, 402 bp, Glycine max
  unsure (1)..(402): unsure at all n locations
  Clone ID: PAT_MRT3847_105167C.1
ttacactggaaactgaaagcctttgctattatattcgtgccactatctgtggttatatatcacacataaccctcatgctntgtctggtaggncccgccataatacggattagagatacctagttgttttttgtccgggaaactctttctctacaaagagtggccttgctaatgtgagccagtagagcaaagcccgctacgcgagcgacgaatacctagcacacttgctgttccgccagagagcacagagtaaaatttgattacatagttctcgataacgctccccggttgacccacttctgcctagagaatctttcttcactagccttttacattgtgtgctccatgccttgcctatgagctgtaatcaatgcgtgctcctcctcccgctctgccctgccct

SEQ ID NO: 5714 - DNA, 277 bp, Glycine max
  Clone ID: PAT_MRT3847_105168C.1
tgctcttttattaattgagggtctaaaggtcaaaacataagagaaaaacgtcatctatttgtaaactaaggtctgtgactgctatatatttatcatataaaggaaaatgaagtatatatacgaagactaaaatattgttaccagctatcgtctgtgacgccacttgaaaactttcactgctaccatgacataaatagcgtctgataaattgcttatgaacttgaaataagcatgtctccaagaacgattcattaagattgagccaaaaacgccccaa

SEQ ID NO: 5715 - DNA, 771 bp, Glycine max
  Clone ID: PAT_MRT3847_105169C.1
ggttcgaagcacatttggaagttcatgcaggatcaatagatgaggaggaggacgagcaaggaattgcacatatgattgaacatgttgctttcctaggaagtaaaaaacgtgagaagcttttgggaacaggagcccgttcaaatgcttatactgatttccaccatacagtgtttcacatccatgctcctacgagcaccaaggattctgatggtgatttacttccatttgttctagatgccttgaatgagatagctttccacccaaagtttcttgcttctagaattgaaaaagaacggcgtgccatactatcggagcttcaaatgatgaatacaatagagtatcgagttgattgccagttgttacagcatctgcattctgaaaataagctcagcacaaggtttcccattggcttagaagaacagataaagaagtgggatgcagataaaataaggaagtttcatgagcgttggtatttccctgcaaatgctaccttgtacattgtgggggatattgataacatatcaaagactgtttaccatattgaagcagtttttggacaaactggtgcagacaatgagaaaggttctgtagccactccaagtgcatttggtgcaatggctagttttctcgttcctaagctttctgttggttcgagtggaaattctattgaaagatcagccaatgctatggatcaatcaaaagtattcaataaggaaagacaagctgttcgtcctcctgtgaagcataattggtcacttcctgggagcggtg

SEQ ID NO: 5716 - DNA, 233 bp, Glycine max
  Clone ID: PAT_MRT3847_10516C.1
gttggagatgcatgattgtggtgtgccttggtttcatttcatcataatgacagccttgtgggtttctttggtgtttcttgatgcatacttaatttacattaatattgtgtagttatctcttccatttacaacaagaaaagtttgtgtaggtttccttctttgaagtaaaaagaaattaaatatgtactgaaaatggaataatagtgtgttttagttgtgtttacaatacagtg

SEQ ID NO: 5717 - DNA, 340 bp, Glycine max
  Clone ID: PAT_MRT3847_105170C.1
gtgcacccgctcttacgagaaagccacgggcgcgagtgcttggcgtcttggtcctgcctctctagtaggcagagccggtcatgataaagtggacaggggacagatgagcggggtgagtatgcacgagtgtgtggattggcttgacttatagagagaaaactaggatggatacatatgcttcggatgcctttgctgtgttgatgatcaacaactatgcgagataacatgcgggatccagacatcaggacgtgattgactatgggtggttccggagaaaagagggatggagcatgagaaggaggaagagaacgagtactggctgtcctaagggtgtgaagag

SEQ ID NO: 5718 - DNA, 283 bp, Glycine max
  Clone ID: PAT_MRT3847_105171C.1
ggctggattggttaaagtgaaccttagtggtctctcagacattgccgaccaagtaatttcatccttggccgatctgcatggttcgactcttgagaatctaaaccttgatggttgcagaattatcagtgatcgctgcttgatggccacttgtgaaaactgggcattgctatgtgaatcttgatggcttcaagtgcccaatcacctgtgctgggattgcagggctggcacattgccggaacaaattaatttgcggaggcgttcgttggcgggttgagctttgggt

SEQ ID NO: 5719 - DNA, 241 bp, Glycine max
  Clone ID: PAT_MRT3847_105172C.1
aatggatgggagggtcagacttgagagagttgctgatgatgaatctaataagggtaagcttgtgtcctggccacaataagctgaggatgacaagtgtggggatattgggattaggattgatcatgaggatggaaccacgcttttggtggagtgtaagaacaaaccgtgagtggttcagttggagatagttgatgagagcattgactgcgcgggaataatcgatggcctttctcgccgtgag

SEQ ID NO: 5720 - DNA, 351 bp, Glycine max
  unsure (1)..(351): unsure at all n locations
  Clone ID: PAT_MRT3847_105173C.1
ccggcccggaatgctctttttgacccacgcggtcatcatttgtcggngcaactngngtgaagggaggggatcattgaaaatcacggcggttctagccgcaggaaagcaattgaggagcttcttagcgggcgtgatcctgcccaacaactgaagagtgtcatcaatgggacttagcaagatggaccaccccccccattggcgcaacaacatgtgcaagaggagctcaagagcttcacaaactccctctagctgttgcacaacaaccccactgctgaagcacatcaagtcgtcaacggtcaagcacgggacggtcccaaggctgaagactcgcaagagagcaattgcaaaagc

SEQ ID NO: 5721 - DNA, 258 bp, Glycine max
  unsure (1)..(258): unsure at all n locations
  Clone ID: PAT_MRT3847_105174C.1
gcggccgctttttttgggttttttttatttatttttttgcttgaataatttagataatccacgtaaaaagttgtccgatttttatccatggttccagcaaattacaaaaccccagacaaatttcccaccttaccgttttctttcggatgataggataatcaaattgatataaacaaattacaaaaacagctgcnnnnaaattattaacttaatcgtttatattttcactttcttaactccatttcctctgtcaacttc

SEQ ID NO: 5722 - DNA, 282 bp, Glycine max
  unsure (1)..(282): unsure at all n locations
  Clone ID: PAT_MRT3847_105175C.1
tacggctgcgagaagacgacagaagggataagaattaattttactccacaaaatcacggtgttatcatgaaaaagtagaagtaattatttgttattttgtttttatcatgaaagttttattgattgtttatcaccaaattttaaccaagcacactatgaatctcgtaaagtccaaaatgactatggctaaggaccatcttaacgaattaaaagacttccaagtataaaaaaatccaacccnccaaaaaaaagcgccaaatatatttaggggcgcccctttta

SEQ ID NO: 5723 - DNA, 431 bp, Glycine max
  unsure (1)..(431): unsure at all n locations
  Clone ID: PAT_MRT3847_105176C.1
agaagacgacagaagggcaataaaatatctcatatatttttcaaaaaatgatactattttagtgattaaaatcatttaagagtacatcttcaatgttgttatgtaccaaatacaaaaaaaaagtacattttaaatcagattaattatctttatctaaatatctaagaaatatttttatccttttgcatatttaactattggtgatatttaaaatcgtatttttttgtagccaaaattagttttttatagtaattctacttgattaatnttaaaaatataatatccacagtgccattcacatttcacaatttaaataatgtaataaatttttatttcataatattctatttcattttattttctctcatttcattccaataatctagatattacaagttctgattcacgcctatactgcataataggacatt

SEQ ID NO: 5724 - DNA, 259 bp, Glycine max
  Clone ID: PAT_MRT3847_105177C.1
caccaattcaaattttcgtttgaaaacgatcttcaaccgttttccggggggcactatcaaaaggatcgcctctagtgttcgatatgccccaggggaaccaaccttgagttctgcctttaaatctgcccttgtcacttattcaggaaaaccttccaggagcaatatgcctcactgaaaggatctgctaccttgagggcccccaaagtcttagccgttcatgcgtcaaccttacatcccttcacgctcccaaacatcgccc

SEQ ID NO: 5725 - DNA, 164 bp, Glycine max
  Clone ID: PAT_MRT3847_105178C.1
atccactgtttttacatcggacgtctccgctttttgggaaaaagccttgggcgcataaaagttcgacactagcgggcaagccgaaaacatggacttcgctttctcactgagtgtaattggaatccacacccaatatcccagtttttttgcccccggattgcccc

SEQ ID NO: 5726 - DNA, 1722 bp, Glycine max
  Clone ID: PAT_MRT3847_105179C.1
gcaattaatccaaacagggcaagaatattcttccgcacctttgtacttttacaatggagatatggaatagttggtgggttttgcaaattatgcaatttctgggtttttttagtttttggatttcatttgcaaagtttaggactttattctcaagagcttttggttatggccaaaggttgtgaagggtgactgcagtacttggatctttgtttccttcaatgggttggtcacagttggttctttcatattcttcctcttggtcctttcctgggcttatttatacgcatttcccagttctcaatcactgcttcagattcatgagattcccatcaacagttctgactcatttgttcagagttatgagattcccagcaacagttctgactcacttgttcagagttatggtgtgattctaaaacccaatgtttcaatggacacatgcaatgtgtttgaaggaagttgggtgagggatgatagctaccctttgtatgatgcttctcactgcccttttgttgaaaggggtttcaattgccttgctaatgggagaaaagatagagattacacaaaatggaggtggaaacctaagaactgtgagattccaaggtttgatgtccgtggaatacttgaacaacttcgtgggaaaagggtggtattcgttggcattcgttgagtaggacgcaatgggagtccatgatatgcttgctaatgacaggagttgaggataagaagagtatctatgaaatcaagggcaacaagatcacaaaacagataaggtttttaggtgtgaggtttagtacttttgatgttagaatcgatttttatcgatcagtgttcctttcagagccttgagatgccccacaacagttctgactaatttgttcagagtcatgagattcccaacaacagttctgacacccttgttcagagtgattctgaggttcttatattcaattcaggtcactgggacacggactaagctttttgcgtgggctggtattttcaggttgataactcgctggagctttgtatgaacccttttgctgaaaggggtcttaattgccttgctaatgggctaaaagatagaggttacacaaaatggaggtggaaagctaagatctgtgagcctccaaatcatctcattggagtggacagaatcacaattcttgcaaagtgactaaaaggccttggaagagaactaatcgcaaagagagaaacccaatttcaaatatgatcaataaagttgtcaaaagcatgagtgctccagtaacagttatgcatgttacaccaatgactgcatatagaagtgatggacacgtgggcacttggagtgaccagccatctgttcctgattgtagccattggtgcttacccggtgttcctgatatgtggaacgaaattctcctctcgtatttgctaccaaaataaggagcatattagcatgagaggtaccaacatgttagaccttatatcatttaagccatatatagcttggtactcaattgtactcagcaatcaggtcaacctgttagcctttaacgtcaccggggggtaccaaatgtacattggaaatgaataatgtttataaaggtgatttcaaataattggcatttgcaaaaaaaaaaaaaaatgataccaggactaaagtgtttatgtgcaaattcttggaggactaaatgtatattttatattgaagttctgaaatgatttttactttactaaaaa

SEQ ID NO: 5727 - DNA, 895 bp, Glycine max
  Clone ID: PAT_MRT3847_10517C.1
tccacacagcgcttatgagaggctcttgttcatgtcaaccaagcaataacgataaagaaagaaattttatggttatggaggtctcagcatacatttgcaacaacaacttcatcttctcttcttctcgtgccataacacaaaaatcttctgcttctttctcatcacctatgcttgtcaaatccatggccactcccaagcctcttccctcagtctctagaactgtaggctctagaaagaactcaactgtgttcccacttggggaacaacctaggagcagccccgcgacagccacgcctcccataaagcttttgacaaggatggagcagctgaagctgctgagcaaagcagagaaagcagggttgctatctgcagcagagaagtttggattctccctctcaacaatagagaggcttggactcctctcaaaggcagaagagttgggtgtgctatctgctgcaactgatcctggaactccaaggacactcttgaccctcagcttggggttgctgatccttggacccttatttgtttacttcgttcctgaggacaaccttggattggtggggttgcaggttgtggttgccttggtcagtgtaattgggggttctgctggcttggctgcctcaaattttgtatccaacttgcagaaattgaaataaatttgatgacccttttaatgtctctttaggtctcttgggacctgaaagtacttttctttgctatctcaccaagcattgttgcctctagagtgcttaatcaaggatttttgttacacttatgttgttacaaccaattctgcttatggtttttacaatcgattcctagcccggacaaaggaggaacgttgtgttagaccattggcagctaacataaaactagtccatttcaatatatt

SEQ ID NO: 5728 - DNA, 524 bp, Glycine max
  Clone ID: PAT_MRT3847_105180C.1
aaaaaaaaaaaacaaaaaagggcccctggcccaaaaaaatttttaacaaaaaagggggcgcccccccctgggctcaggggaaaaacatgttaaaacttgggggcggggggaaaaaaaaacaaaaactcttttccattttaaggggggggcccaaacaagaaaaaaaagcgggcctttcccaaaaaaaaggccttgggttttaaaacatgggctgggccaaaaacaaaaaaaaggggggtttagggacaggggaggcccccccccccgggaattaaaaccttctcccctgggaaaggcccaagggtaaaaaacctcacccccttttcacttattgggggaactggggagggggaaaaaatttttaggggggggacacagcctacaaattcccgccgggggccccccccaccaagggaaacccccccctcaaaacccacacaccccaattcccccccggggcctttaggggcaatcagggggcccttgggcccaaacctgcttttgggggcccggaacaacccccc

SEQ ID NO: 5729 - DNA, 1609 bp, Glycine max
  Clone ID: PAT_MRT3847_105181C.1
ggctcgagccataatcatttagctattaagagaatatgtttttaatgaccaaattgtcctcaacctcaaatatacttcctcctcttcatgctgcaaacacaaccaacttcttcaaccacaaccacaaccactttgtgcattaaaacccccacccctctcagttccacacaatttatcttatctttgttttcctttttttttttgtttcccctctcatcactctgcaattctctgtctccaaacatgccattttctagtcttggatttgagttattataattataaatgttctgttttttattttgtgttaagtaagctggtttcccaaatttagacattgaaagtggcatatgttttcatttttttataaataaaagtagcatttttttttctctcatttccttcttagagaacttgtgcttacaacgtaaatgactaaatgtagagcctgatttgtgattgtttcattcctgagtacttacaatggaaatatggaatagttggtgggttttgcaaattatgcagttgctgggtttgtttagtttttggatctcatttgcaaagtttaggactttattctcaagagcttttggttatggtcacaaagttgtgaagggtgattgcaatgcttggatctttgtttccttcaatggtttggtcacagttagttctttcatattcttcctcttggtcctttcttgggcttatttatatgcaattcccagttctcaatcattgattcggagtcatgagattcccaacaacagttctgactcatttgttcagagtcatgagattcccaacaacagttctgactcatttgttcagagtcatgagattcccaacaacagttctgacacacttgttcagagttatggtgtgattctaaaacccaatgtttcaatggacacatgcaatgtgtttggagttgggtgggatgatagctaccctttgtatgatgcttctcactcttttgctgattttaaaatcatctcattggagtggacagaaccacaattcttgcaaagtgactcaaaggccttggaagagaactaacggcaaggatagaaacccaatttcaaatatgatcaacaaagttgtcaaaaacatgagtgctccagtaacagttctgcatgttacaccaatgactgcatatagaagtgatggacacgtgggcacttggagtgacaagccatctgtgcctgattgtagccattggtgcttagccggtgttcctgatatgtggaacgaaattctcctctcatatttgctacctaaagaaggagcatattagcatgagaggtaccaacatgttagtccttgtatcatctaagccacatatatagcttggtactcaattgtactcagcatcaaccatgttagcctttaacgacacggtagggccaaatgtacatttggaaatgaataatgtttataaagagtgatgtcaaataattggcatttgcaaagaattgataccaggactaaagtgtttatgtgtcacttaccccctgcgatgtggaatggcttttgcttaacgtggatgtgtctttggttggtcatgctattgtagaattgaatttgaatcaatataaaattgattttaagt

SEQ ID NO: 5730 - DNA, 1166 bp, Glycine max
  Clone ID: PAT_MRT3847_105182C.1
gtccactgctcgggtgtggtcagccttgcctttcggctgccttggcggaggaccggcgtagtggcaatgagttccccttgcagttgcgcttgcgcttctactaattggagcgttgattatggttatggaggtggtggcgtgctttcaaattcaaaggtaagaagcaggaaatccaaagaaatatccatggcacattcagtgtgtggatcgaggaattacagtgcactccagacgagaatctaaactcctggctggaaatcgtatcattgctcagccatatgaattcaaagtgggagctccaccgggaaaggaaaggaagcgcgaatttgttgacaacccaaatggtttattctctgctcaagcagcaccaaaacctccccctgctgtgtatataatagttgaaggaatgcgagttggtggaaagcgaactgtgattgttcctcctgaaaatggctatggtcaaaagggaatgaatgagattccgcctggagctacatttgaactaaatgttgagcttctgcaagttgtagctacctgaagactagacctcagcttgactccattcttatgaaccggttgataattttgacttcagaatttgtagcctgtgaagctgcgactattattgttttttaccctatgtttggataaagaaaaataagatagagaagaaataaaaaatttgaaatacaaaagagaaaatgaagaaaaagaagagaaaaaaagttgagtttaagaataatctttttttaagtaggaaaagaatatttatattatttatttattgaaattgtaatggactcatcttctgcgattctaaaactaatcttagtatattacctgaagactagacctcagcttgactccattcttatgaaccggttgataattttgactgcagaatttgtagcctgtgaagctgcgactattattgttttttaccctatgtttggataaagaaaaataagatagagaagaaataaaaaatttgaaatacaaaagagaaaatgaagaaaaagaagagaaaaaaagttgagtttaagaataatctttttttaagtaggaaaagaatatttatattatttatttattgaaattgtaatggactcatcttctgcgattctaaaactaatcttagtatatattgaatttaaaaaaaaaaaaaa

SEQ ID NO: 5731 - DNA, 766 bp, Glycine max
  unsure (1)..(766): unsure at all n locations
  Clone ID: PAT_MRT3847_105183C.1
gggtaattgtagggagtggataggctaaaacgaagcgcgagaagacgacagaagggggtagtggcaatgagttccccttgcagttgcgcttgcgcttctactaattggagcgttgattatggttatggaggtggtggcgtgctttcaaattcaaaggtaagaagcaggaggtccaaagaaatatccatggcacattcagtttgtggttcgagaaggtccactgcacttgtgatttcatccttgcctttcggcttccttttcctatctccgccagctgaggccagacgcaacaagaaggccatccccgaagaccaatacattactagccctgatggattgaaatactatgatttggttgagggcaaaggtccagtcgctgaaaaaggaacaactgttcaggtacactttgattgcttatatcgcggaatcacagctgtctccagtcgagaatctaaactcctagctggaaatcgtatcattgctcagccatatgaattcaaagtgggagctccaccgggaaaggaaaggaagcgcgaatttgttgacaacccaaatggtttattctctgctcaagcagcaccaaaacctccccctgctgtgtatataataggtgaaagaatgcgagttggtggaaggcgaactcaaacttccttctatggggtggcatcttatactggtattacttattaggttaggcatggggcatttcctngatggggacagggaactggggattggtccttcctgaaaatggggtatgggcaaa

SEQ ID NO: 5732 - DNA, 303 bp, Glycine max
  Clone ID: PAT_MRT3847_105184C.1
aaaaatgagtttaatttttaagcatgtgatttccaaaaactacaaaaccgttacacaaaatcacaaatgctatatatcaggagtcaggtaaaaaaaaaaatgcccttgacacaaccaaggggcccccaaaaggaagaaagcctccaaaacttttcttcccccaataacaaatctacctactggggcaatctgacggggaggggggtaaatcgactaacccatttcggaaagaaagtggtggggtacccaaaacttttttactcaaaaaaatcaccttctatgaaccccagaaatgcgattatt

SEQ ID NO: 5733 - DNA, 333 bp, Glycine max
  unsure (1)..(333): unsure at all n locations
  Clone ID: PAT_MRT3847_105185C.1
ggctcgtgctgtggtgcccaatagatgnttctctcagcgtcttccttctcttatattgctttttttgtttttgtgtccgccgtacgcccaaacaatggcgggaaaaggagagggtcctgctatcggaatcgatctcggaaccacctactctagagcaggtgtgcgggaacatgaccgagatgagatcatggcccactgaccaagggaacagagcgacaccgtcttacgtcgtgataactgaggccgagcgcctcatgggagatgcggctaataaccaagtgcccatgaacccaatcaacaccgtgtcaaatgccaagaggtggattgtccgga

SEQ ID NO: 5734 - DNA, 551 bp, Glycine max
  Clone ID: PAT_MRT3847_105186C.1
ggggaccaaaaaatggcacccccttggggaaaaccaacccaccgggggctaggggtggggattcccattttttggggggtgggccccccccctttttaaataaacaaaaggggggcccgagggggaaaaaaaagctttttgcaaatatcaattgggggcctggcgggggggcccccgggaataaccccccaaaaaatccggggaccttccttttttggcagggggatccggtattaaaaaacccacccctaaaccagggcagggccctttaggaatttaaggaagggttggcaggggtttggttggcctcccaatggtataaaatttggcccctttggggtttggaaggctcccagatgaccagggggggccccaacccccacctttttttggcccaaattgtgccctttttataaggaagggccaacagggggcccaggggccaaaaggaattcccgggggaaggggggcccccaaattaccttttttttttagggggggaagtgggctttttgggggcttgaggccccccccttagagcccaaaccccc

SEQ ID NO: 5735 - DNA, 3484 bp, Glycine max
  Clone ID: PAT_MRT3847_105187C.1
gttgaaatgtaaaatggtatagttgatttactggtgtactatgaaaaactatggtgtcgagggagtccatgaatgtgcttagttaataattttcagatttcagcatcttccattaaagatgagattgtgggaatccaattgtttgttcaattgcttttcattatgcttatctttcggtgcaggcaaggtcccacccttaatcgccctcgcagactttgtgtttggattcttttctactccggtttctatcccatcatacgtgatgttctgttctgctgtgccgaacttcgatttttgacgttatgtggaaaatgttattattgctttccccgatctcgtattttccgcgtggctcgtctctcgctgacagcccgagctgaggatggcagggattgcatgcttcgtgctattctttactgttttttccgatggcgacgccgtttcgttgtaagatataaaaaaacttagctcaatcagacatatagtaaattgaagaatgtctgtgaagtgtgccttctggatcttgagtatggactccaagttcaagtccgagactgagctgtcagtattgattccaaggatgccattccacagagttatctttattgtgagtattttgctgcagagacagaccgtaagtctggatgacgtatagtgagtatatcaatgtgtgctaaatttgtccaagatcattcactgtttttagatgaagaactagtcgagatacaagatataagaaaacggagttctctcagatattttggaaatggaagcatatatgttaagtgtgctttgtgaatctggagcagtcaatactatgaaagttgcggaacgcacacaaccaggtattacagaacgttattatgtcctagaggatcctgagtcccctgagcgacatggcatgccagtagcggtggacactctcgcggctaaatattaaaggaccttttgatcgcgtgatctcgccagactctttgctgctgcttcgcagggcgacagggatgttcactttggagcgcatggaagaattggagcattcaaaatcgttctccagcgggcttttgcgtttgtaacacatacaaccagagaaggtgcagaaaaggcagcagttgaactctccaaccaactggttagtatcggcctcaggctaatgctgatgtggggcaggcctcagacatcaaaaccggagtcagatggctctgatcaagcaaagcagcaggcttctgtggctcatagtggattgttgcctcgggcagtgatatcacagcagcagaaccaggaccaaacacaaggaatgctttattataacaatccaccacctcttcagcatgaaagaaggtcttgcgcgtttatagcacataaaagaagggaggatctagctcaagcagtggatgactataccaatctaccacctctttagggggaaagaagatactacccgtgaatggatcctcgaagaatggaagctcttgcttcatcccaagatgctcctggtgggccttctggttcagaggagaacaaccccggtttggagaagcagcaaatgcaacattatgcccatccaatgatgcctcctccacctggtcaataacatcagtattatccaccatatggttatatgccaccacctccgccttatcatcaatacccacaacctccatacaatgctgcagcggctccatcccagccacctgctgcggctccatcccagccaccagctgcaaatcatccttatccacattctatgcagccaggttcttcataatcaggatcttcacaggctgcatctgccccagctgaaactggaacatcaacatcagagtcacagcagcaataagattgctcgtgtactgatgtttctagttatgtttaattattgttcaaagtttttccttaaactgaccgtgctgacagggaagatattttcactcaagctgtctatttactatctctgctagctcaatgttgatcgccttgtggcttgaacaagttattttattttgtgcttttgtaactcttggcttcctggttagatcagagtgatgctcagctttagtatattactttgcactgaattctaatgttacaacttgtgttttggtatatagcatttggtaaagatgttcaattaattttatataccatcaagtagttcgtgcatcttgtatatagcttgtgtaaagccagtctaattactattataaatacttctatcctatgaaaaatatagtagtagctcgcattcatttctggtaactttagtcgttttttcgaatgtaaggtagagttatcatttaaatcaaatgcttcataatgtttgtccgtagcactcttcacggcctacggccaggtcgcgtccttcgcgttattctgtacaccccccctcttcacaaagcggcgctttctccccctccctcatcccatgctgatactcccgcttggccctttctgtcgcggcgggctccacaccggctagatgactcagcctctgcctcatcatgcgcaaccactgacaccacctcatccggctcagcacccctagcagtctcccccattttgtcatccttttccgccttctttttatcttggctccccccctcctccacgcgttgccgccggggccagggccaagataccctcccccaaccaccctagtcaccatcccgcccagccaggtgctcatcgcctggtcttcccaggttgctttagcgcttgctctaaccctttccccttcagctggccctgcgcaccgggaagatttgcccacccacgctgcctatttcctgtctcggctagcttgtgtggccggtccgttgggctggagctgccagtggctttgaagcctcttggcgaaaccgggcacatatttgcagtttctacataaggggtgaatgtactagaagagctgagtgcccttatagacatgagttgccagaaactggggattgtgtgaatgcactattaaagatcgttattatggggtgaatgatccagtggctttgaagctacttggcaaggcagaagagatgtccactcagtaggcgctgaaggatgagagcattaaaactctccatggtggtggacttgatgcgaggaccaccgagccgcctgaggtcgagacacttctatccctatggattaattgaatgcatcaaaatggtgctgtgccgggctggtgcttttgtcatatataccaccagagaaggtgcagagctcgtattggttctccctccgccttgggctttggtcgcccatacgacccgagcaggtgccttcaaaggccagaagaactctccaacagactggttattaagggcctgaagctaaagctgatgtggggcaggcctccggaggagctgagtgcccttatagacatgagatgccagtaactggggaattgtctcaacaaaatattaaagatcgttactatggggtgaatgatccagtggctttgaagctacttggcaaggcaggagagatgtcc

SEQ ID NO: 5736 - DNA, 614 bp, Glycine max
  Clone ID: PAT_MRT3847_105188C.1
ctcagtgacccgcctcacccgacctgcctacattgccctccgggacgcgttccgcatcggggcctcgcatctgaagcgcgcgccggagttctcgctcttcgacacgtgtttcgatctgtccgggctcacggaggtgaaggtacctacggtggtgttgcatttccgaggtgctgacgtgtccttgccggcgacgaattacttgattccggtggacaacagtgggagcttctgcttcgcgtttgccggaactatgagtggtttgtccataattggtaacatccagcaacaaggtttccggatctcgtatgatctgacgggttcgcgggtcgggtttgcaccgagaggttgcgtttgagttttcttaggaaatgggagcaactctttccctgctgttctctaattatgaatatcaattattgttgccatctctttcttcttttgttttttaatattaaaaaacaaggttagattagagaaggagggggagatctcaatctagatctgaaggagaaaactaggattcaacaaaaggagaatgtttctgtttgtcgcttgttgtgtattttatttcccaatccaatccaatacaatacaaggggttattcgacgaattt

SEQ ID NO: 5737 - DNA, 258 bp, Glycine max
  unsure (1)..(258): unsure at all n locations
  Clone ID: PAT_MRT3847_105189C.1
cttcggagagtactcaaagccatggatgaattgaatgtanatagtgcagcagaggaaccaagtnggagttataaggnaaactttgctcancaagcatcancaaggagnacactgagtccaagaagcattcagagtgattcaattgatttggctattgatggagtggtggatacctcaattgancaattgtatcacaatgtgtgtganatgaggagctctgatcactcaccctccgggctagtgtctantcttacgact

SEQ ID NO: 5738 - DNA, 530 bp, Glycine max
  Clone ID: PAT_MRT3847_10518C.1
tcgatctatcgctagccatgtgccagagtaccgtacaccccggctgcggggggttgtacgcagagcagggcagggttattggtatgtaacggtgtgggtggtgggtttggttgggtagggagggaggggcttgagcgggtgggaaaggggaagggagacggggagattagcggagcggaagcgtagagcgctcagggggtggagaggggcgataacagggcagcaggtaaggagtgcacaaggttaacgatgggcggcaggcgcagggcgcaactaacgggtaaggcccaggtgcagcgacctgggccaccggtggtgatggtttaccagctgggtaagggagtaaggagattatattatacaccaggttacgcaggcacgcacgccagagcaagagccaaccattggagcaggcagtagctaagccacaactgccgaataaaacttggtacagtaggaaagatgtgttggagaaatttgctattagcagagtagtagtattggccgggcagtgaacacgcggggagcgc

SEQ ID NO: 5739 - DNA, 870 bp, Glycine max
  unsure (1)..(870): unsure at all n locations
  Clone ID: PAT_MRT3847_105190C.1
cccacgcgtccgacggctgcgagaagacgacagaaggggacgcaactgaaaaagaaaagccttccactattccatatatagcagccaaaaaagaatgaagaatactgcgttgttcactatctttctactccttgctttcacctcatacctaccttcagccaccgctgctagtgtgtacgatacggatggtaatattcttcaaaagggtcgcacatattttgtgttggcagctacaagaggaaacggcggtggaatagaatttgccgcaactggaaacgacacttgccctctaactgtcgtgcaatctcccagtggcgactctattgggtttccaataaggttttcatatccatttatagaaacgcttgatgatatccttgaaggctttggtttggagattcgtttcgcttatcgaccgccgtgtagccccagttctatagccactactaagtggactatcgtcaatgatgctgttaagcttactaaaacttcatcatcgataatacccggttttttttatatttggggggcttcacctaactctaaggactataagcttgagttctgtgatcttgacaatatcaaatgtggggatgttgggattcataccgatgatgatgggagcaggcgtttggtgatcactcagaacgatccattactagttcactttcagaatactagatcatcatctgcatgaattaaggcaccactggcatagccctgaaaaaaaaaattggtgctttttttcttctagtgagagactagtataagacttaaataaatgctttggttgtaatagcattattgtaagactgcataaaataatcagagcttatgtcttatgctgttgtaaaaaaaaaaaaacgncca

SEQ ID NO: 5740 - DNA, 456 bp, Glycine max
  Clone ID: PAT_MRT3847_105191C.1
ggtgtcaaccaaaacatcctttattatgttactataaagattatttcaatttgacaagcccactactattaaagggaccaccactatccaatgttgggggaaaggaccctcctctgatataactcaactctctctacgtaacttgtgcaataaacaaaacaaaagctttatattggcctaaaacctcatgtcccaaaatgatttgggctataacatctgcaatcacactttttttttttcattatcaaagaaaggctttaaacatcatcttttatttcacagctcgccccaatgacgttgctcacgagacactgtattcaataagaattgaacaagcttatggaacagagaaaaaagaatttcttacgtacaatctttttctacacaccttagcatttataaacgttcgaaagaccgaaactaataaattctggcacctgatatttaacaccttat

SEQ ID NO: 5741 - DNA, 785 bp, Glycine max
  Clone ID: PAT_MRT3847_105192C.1
atcaagagcaaaagaagaggcttctagcaggaaggctatcatggagaaagtggagaagtggatgctagcatgtgatgaggagcactggctagaagaatatagcagggatgagaatcgatactcagtcagtagaggagctcacaaaaacttgagacgtgccgaacgtgcccgtataatggtcagcagaatgccagctttggtagatttgctaataaaaatgactaggagttgggaagaagaaagaaataaagttttcttgtatgatcaggtacctctaatggccatattggaagaatataacatcctaaggcgagaaaaggaggaggatacaaaaagacagcagccatgggaaaaaaagagaattcaaagccaagtagttgagcgagataatacttatgtgtcaagacccggcaccagcagtaggcgtcttccaagtagaagcatgaatggagctctagacagttctgcggtcctgaacagaagactttctatgggaatacaacagctgggatccaacagcataaattcgggaaatcacggcttgtccttcattaaggatggaaggaatgccctaagaaaaaagatttatggcgaacccaccttcacttctcctacaagagatggggcatcttctgcggtgtcaacacattctatattgttttccccttaaattttttatcagaaacatagattttgactgaaactgcttcagaaagcttgctttccaagatttccaagaaaactgttgtgcaattgcaaaagaataagcatggagctttttatgt

SEQ ID NO: 5742 - DNA, 444 bp, Glycine max
  unsure (1)..(444): unsure at all n locations
  Clone ID: PAT_MRT3847_105193C.1
gggggagagattaaaaaaaaataaatatnagagagaaaagcgcgagccggggggggtgtctgtttccggggtagggggcccttttccctgggcaattttggaaaacaagaaggcccagagagaaaagagnagaaagagttttgtttgtttattaaatgggcctttggggggggccctaggggaaaaaaaaatccttggggtttattaaaaactggggcaaaaaaaaagggaggggaaaaatgctgattggggtggggaaaaaaaaaaattgtttctagggttctaaggttggggcaaggagtgggggttggggctttaccccacgggaaaagaaaaataaaattttaaccttgctaaagcacttccttcaaaggggggatggatatattaagcacagataagggaagcaaaaggacccgattatctcgtttttctaatttcccg

SEQ ID NO: 5743 - DNA, 152 bp, Glycine max
  Clone ID: PAT_MRT3847_105194C.1
ttatcgacaccaggaaatcagtcactcaatgaccatgagaacacaaaacacagcatggccctgagcaggaagaaatggaagtcacactctcagccagcttgtccgttagctagccttacagttcccgtagcaagtttgttgagcaggagaaa

SEQ ID NO: 5744 - DNA, 234 bp, Glycine max
  Clone ID: PAT_MRT3847_105195C.1
acgaaacaaaaccgccaatattaaacactttttatcctacacacatttttctcatttcatataaaacaaaccatcccatcacattataatcaccaatctcaaacattcaccactacctcactctatactatcaataaaaaaaacactatcattaagacttgaagattatgcttaattttactaactccaaaataaaaaatgtcgataaacaccttcttcacaaaaatcccccac

SEQ ID NO: 5745 - DNA, 233 bp, Glycine max
  Clone ID: PAT_MRT3847_105196C.1
gacagcgagagagagagagacacatagagagagtgatagagttggtgactttctcacatgatgggttcgacaaaggggactggccccacctccgaacgcaaaagcaactcactgcagaggaagatgatgatgaagaatatatcagcaacaacttcaactcacagaaatggtgtgccctcaacctggtactcaggttcaagaagaacacgcatctccaccccacaatgaatcta

SEQ ID NO: 5746 - DNA, 500 bp, Glycine max
  Clone ID: PAT_MRT3847_105197C.1
gggggaaacccaaaaaaccaacttttaaagcaaaattttaaaagggttatacgggggggaaactttaaaattttggaacccggccaaaatttgctaacaaaaaggcgggggatttttggaaaaagcccccccaagggggaaaaagtacaatttccaaggtaaaaaaaccccttggtaaaaaaccccaaaaaaaacttggggggaaaaaaccccccaaggggcccttgttacccaaaaaaattttaaaaaaaaaaatggggaaccccttccggtgggggggcaaacccatttttttttcaccccaccctaaacttgtttttttccaaaaagggggaggggggaaccccccaaggggggggggggggcccccccctaaatttggcggaaaaaaaaaagggggacccggggggggggaaaaacccccccccaaggccccaaattttgggaaggggaggccaccccaagggggggaaaccccaaacaaaaagagcccattgggg

SEQ ID NO: 5747 - DNA, 293 bp, Glycine max
  Clone ID: PAT_MRT3847_105198C.1
ctccttctctctccgtccaaaagcgacgtcctcaacgcgagagcgagagatcaggcccaagggctcggagtggttccgactctctctagacttccaaactgcgcgtctatgaatatctctcatatggaactcatgttctccatcatctacggcaaactctatcctttcaacgcattctacttgtgctcacaactctgtattggtcgtactctttaagaacctcacagctcctaattctacttatgatccacatctgcgaactcgctttctgcgttcaatagctactctcacat

SEQ ID NO: 5748 - DNA, 217 bp, Glycine max
  Clone ID: PAT_MRT3847_105199C.1
gttcattcattgatatggatgatggtgactattacaggatactgaaggtgcagcatgatgtcacggatgaacgattgaagaaggcttatatggagttggcgatgaaatggcacccagataagaaccttggagacccttcttaggaaagaagagtttgaggctaagtttacacaagtttctgagggctatgatgtggtaagtgaccgcaggaagcgcc

SEQ ID NO: 5749 - DNA, 154 bp, Glycine max
  Clone ID: PAT_MRT3847_10519C.1
tttttattttttttttttctgtttttcaacagatagggaacccagaccctcccttggtaccccatttacaagaaagtggctggtcccttttataagtgcccgcagccataaactatagttttagatctctaacttgcctcccataattaaggaa

SEQ ID NO: 5750 - DNA, 526 bp, Glycine max
  Clone ID: PAT_MRT3847_1051C.1
cctctgtgtgttttttttttttttttttttttttttttttttttttttttttttttttttggggggggaaagaaatacctcttaatttctaagcagttccaaagagggaaaaaaaaaacatggcaatttatagcttgcttcacatcacatgcgggggggggaccgactttcgtccttttgacacattggacaggttggctacctgggaaaaattaaaagcccaaaaggggttgagaaaggggaccggaaacaacaaaggaacccatctaccctagggcttgctctatcgggggaaacccaaaattgcgcaaaacaattctggcaaaaatttttgcttcaaggggagcagttgctgcagcaactgccccacccaaaactcttgatgcccccaggctttgcatgaggctaacatggggcatggcatggcccccaccaggaatgggaaaccggaaaaaagcaaatgctgcccaagccttgagtataaaagagggatttcggagcatagggaagaatcttccaatttcag

SEQ ID NO: 5751 - DNA, 289 bp, Glycine max
  Clone ID: PAT_MRT3847_105200C.1
aaagacagggccgggcgccgcgccgctctgaggccagcctcctactgagaacagtccctcccttgtgcgggtcgcacggctagccgcaggttcggccacgtcaaatccattctctaaaaaagcagggagcagagctctctcttcgccgacgacgcaaaaaggagctggggaggaaaaagctgctgccttttgcgctggagattcgtgatcaaggcttctcattttcccaggctgcttccccttccgcatgaggagcgtcctgagactaaggaaagagcctggaaaatgg

SEQ ID NO: 5752 - DNA, 117 bp, Glycine max
  Clone ID: PAT_MRT3847_105201C.1
gccatgcagccggagatggggcatcagatgagagatcagatatcaaatcacagctctatcaactgctataggaacctatagagagacctagtgaaggagcaagtttgggggcactag

SEQ ID NO: 5753 - DNA, 165 bp, Glycine max
  unsure (1)..(165): unsure at all n locations
  Clone ID: PAT_MRT3847_105202C.1
actaacaaattggttgttgtttcatttancctaacgacctgggggcggacccgtgggaagacccgaaaattcgggacgcggccctgggggtgtaccaatttttcttaaagggaggtgttttaaaccttggactaatatgggtaatatttgtttcctggggaaaat

SEQ ID NO: 5754 - DNA, 541 bp, Glycine max
  Clone ID: PAT_MRT3847_105203C.1
ctcctctgctgagtctcgtaagcacagatttgacacctcatcttaccaacaacgcgcaaaggcattggagggtttgcttgagttttctgcacgactcctacagcaacagaggtttgaagaacttggggtgttgttgaagccattcggtcctgagaaggtttcccctagagaaactgctatttggttgcccggctgcctcaaggagtctgtggcctgtggtcttgcttgttagatcaaaacaagaggggtcttgttgaagagtttggttgagttcagtgcacgtacggctcctacaactgcagaggtttgaacttcgaagagtcctggagtggttttgaatgttgaactatataagttacccgagggaaacagcttgttgaccaaggttcaaagaaactatagtccaagtatttctgacgtacttttatgatcgttagcaacagtgtaatctaatgttgaactatatatgttacaatataaagattagcttagcttctttaatcggattttgctcttaattgatctaggtggcaccattggc

SEQ ID NO: 5755 - DNA, 1207 bp, Glycine max
  Clone ID: PAT_MRT3847_105204C.1
gttttgaaaaggcgtataaggaaaggaattcccgattgtttaaggggccttgtttggcaattgatatctggaagtcgagacctattgctgatgaaccctggagtttatgagcaactagtcatatatgagacatctgcctctgaactggatataattcgagatatttctcgaaccttcccttcacatgtattctttcaacacacacatggacctgggcagcggtccctttacaatgttctaaaggcttactctgaccttgacagagatgtaggctatgttcagggcatgggatttttagcggggcttttgcttctttatatgagtgaggaggatgcattttggttgttggtggcattgctaaaaggagcccgtcatgctccaatggagggcttgtatctggcaggattgcctctggtacagcaatacctctttcaatttgaatgctcggtgagggagcatctaccaaagttgggagaacatttttcctatgaaatgataaatcctagcatgtatgctagccagtggttcataactgtattttcatattcctttccatttcatttggctcttcgaatttgggatgtcttcctctacgagggtgttaaaattgtctttaaagttggcttggccctattaaagtactgccatgatgacttgattaaactacctttcgaaaaactcatacatgccttgaaaaactttcccgagggtgcaatgaatccggatacattgttaccactggcttattctatcaagatatccaagcgtttagaagaattgaaacaagagtatgagaagaagaatggaaagataagacgatcaggagaactttctgaaaaaccaatacttcctagtgtccagggcaattgaagcaggagcatatgcaagacaacatttgctggacatgtaaaactattggtaaagctgagcggaggacctcccagtaaaggtctatcttttctgctgggaagtaatccattgtgaaaatcataccctcaaattctatgttgagaccatatgttgcatactatgtacagttgtattagttgctcactcttgtcaaaattcagtgttttataaagatgaagttgtctttatatagagactgatatgggtcttctttcttttgctttcaactctttaaagatgaatttgttttattaattgtggttattgttattataaaatgagaaaatctttattgtaa

SEQ ID NO: 5756 - DNA, 564 bp, Glycine max
  Clone ID: PAT_MRT3847_105205C.1
ccaagaataaaaagagcaaaaatacatatttaaaaaacaaaaaaatatatgcatttcaattttccattatttctagatagtttcaaacgccacccactctcaaatggatagatgaaacaataaatggtcaagttgagtaaagtggaaatttcattcttcactctcatttggtttgaagaataggaatgttgtcattttcttatttgatgttggttggaaccttcttttggtttgtatcctggtttagttttattgtatgttgctggttgagttcgaaccttcacaccttgtgatctgtgtttgactctttcatctgtattcctcccctaattattgattatatattatatcctttgccttccaaaaaaataaaacaataagtctataatttaggtatgctttggtttgattgtattaaatggtccacattttgtaagtaactttttttagagtgcaaatacaaattcaaacaagttatgtggacaagtttataaaggagaaatttatagctgattcacgatagtaggaaagaaaatatttaaaattttggtatggcttatacgt

SEQ ID NO: 5757 - DNA, 429 bp, Glycine max
  Clone ID: PAT_MRT3847_105206C.1
cccacgcgtccgcgcttggataatggaggcatgaagttattccaaagcaaaaattaagtcagtgcctaaagtgcctgaccggacgcgtgggtggactttccccaacttacaatgacattacctgatggtcgtgaagaatctgtcatgaagcgcacaacactagtggctaacacttcaaacatgccagtggctgctcgtgaagcttcaatttatacaggaatcacattagctgagtattttagagatatgggttataatgtcagcatgatggcagattctacatctagatgggcagaagcattgcgtgaaatctctggacggctggcagaaatgcctgcagatagtggatatcctgcataccttgctgcacgtttagcctctatctatgaacgtgctgggaagggtaaatgtctaggaggccctgaacgt

SEQ ID NO: 5758 - DNA, 1479 bp, Glycine max
  Clone ID: PAT_MRT3847_105207C.1
ccacgcgtccggcgcacaacactagtggctaacacttcaaacatgccagtggctgctcgtgaagcttaatttatacaggaatcacattagctgagtattttagagatatgggttataatgtcagtatgatggcagattctacatctagatgggcagaagcattgcgtgaaatctctggacggctggcatgagacacatgggaatggacattgatcaatgtattttgatgatattgttgtcttccacaggcagaaatgcctgcagatagtggatatcctgcataccttgctgcacgtttagcctctttctatgaacgtgctgggaaggtaaaatgtctaggaggccctgaacgtacaggtagtgtaacaattgttggtgctgtttcgccacctggaggagatttctcagaccctgtgacatctgcaaccctcagcatagttcaggttttctgggggttggacaaaaagcttgcccagaggaagcactttccttctgtaaactggcttatttcttattcaaaatactcaacggcacttgaaaccttttatgagcaatttgatccagattttataaacattaggacaaaggctcgtgaagttctgcaaagagaagatgacctgaatgaaattgtccagcttgtgggcaaggatgctttagctgaaggagataagatcaccttagaaactgcaaagcttttgagagaggattatcttgctcaaaatgcctttacacccatatgacaaattctgccccttctacaagtctgtttggatgatgcgcaacattatccatttctacaatttggcaaatcaggcagtagagaggggagctggttcagatggtcagaagatatcttacacccttatcaagcatcgtatgggagatctgttctaccgattagtgtctcagaaatttgaggatccagcagaaggggaagctgctttggttgcgaaatttcagaagttacatgaggacctgactaatggtttccgcaaccttgaggacgaaacccgatgattgatgattgaagatttggtagtttgctcaaatattgtgttatttccaattgtaagacgcagtctagcatcgcagggttgcaacgtcccgagtgttctcatatttgactgttcgattcattcatatcacatttatttcctttcttggtgctggtttggcttttgatctagtctcatgtgtagctataatcatgtgtttcagtcatcctcagtttgtttattgagaataagaaacgagacttgctctttcaatatgtatttaggagaataaaattatcttaggacatgaagtgcctacagcaagcggattctggattcatataggtggaatttttggtggaagtggattatcttgaatcctgtatttcatagatggacttcttgtagcaatgagtatttaattatttattcgaaatatgttgcatgtctagttttatcccaaaaaaaaaaaaaaaaaacccaa

SEQ ID NO: 5759 - DNA, 292 bp, Glycine max
  Clone ID: PAT_MRT3847_105208C.1
ggggtatcactgcgaattcactcatatgatgaatcagaccatggggtttgatgaagcagggatgaactggcacttgtgtgattcaccggcacgaagttactcaaagcatgacacggaaaaaggtccagatcaagcgtaataccatgatcaacctgacatcgctattgaagacactgttactcaaaaagaacctgccaagcgatcagtcatccaacgttcacatgcggatttgtcatctgcgccatgccatttttactcatatgaatgtggaagtggtccagttgattataga

SEQ ID NO: 5760 - DNA, 112 bp, Glycine max
  Clone ID: PAT_MRT3847_105209C.1
gaatcataaagtggttgataaatagcaatgtcttatgacactggacggatattattagaaggttatgtctgtgacgaaggtgtctcagcacgtctatgattgggatggccaa

SEQ ID NO: 5761 - DNA, 379 bp, Glycine max
  Clone ID: PAT_MRT3847_10520C.1
ttttcattaatacatccttttgggtgtctggggggttctttggtttgggacccttaaaggcgggtataacacaagatatttagttttaaagttacattcactggcccataacattccagaggttattttatgggacttttgcaatattaaaaatttatggccccctaatggggtaaccgggaatcctttaagcgtgtttgggtccccaaaaaacccgttaaattggggaggtagggggttttaaaataatcccttcctcctatttttttccccccaggatgtgtcgcgccgggaaaagggcgcatagggggggttttctttacaaaacaccaattttttttttttttttgaaaaaaaagggacaacaactttttttttt

SEQ ID NO: 5762 - DNA, 351 bp, Glycine max
  unsure (1)..(351): unsure at all n locations
  Clone ID: PAT_MRT3847_105210C.1
ttttctccttttttncaaacacccccncaagacgctttaagcaaaattataaaccaccacctccacccatttnnaaagcttctccctttctcctccactttcacccaacaaaaaaatgatattcaacttcaagcttacaacaatcctttcatcaccacttcatacataacatacattttcacataccacacctctcatttccaatgaaaacattatgatattaaagtaacagactctaatacccttctcttntttgacacacccatcacccattatcaaaccacaaaccctaataaaaatccatttacctacaataaaacttataacaataattaatcaaccaatctattc

SEQ ID NO: 5763 - DNA, 598 bp, Glycine max
  Clone ID: PAT_MRT3847_105211C.1
gaggagcacagagcacattttggaaataggcttatacagaaaatggtttgatccgctgcatggtccttctcatcaattatcaggaggcaattaacttgctaccatgcagtgacgatcaaaagcatgttacaaggtacaacatctggctgccagaagcatcaaaagcatgtaggacacaaaaaaagaaaaagcttactcccaataacagccatttaccacttttctagtggttttcccactatatcaggaagaaaagagataaggattgagtgtctgacatacatacatgcatacataagttacaggttatcaaattggagatactaaaactggggtatttccaatcgcaggctggagactggctgcatgctcgagttgtttccacgcttccttccgcttctctgccgccatgtttagcattacttcttcttccttgaattgagaatgagaagccaggaacagcttctcatccatctctacaaacatttttctcacgttataagttaggttgagcactgactggctccagtggccctgagaattcttcggacgcgcgggaaatatgattggcaggatcacttgtcggttcggacgcggg

SEQ ID NO: 5764 - DNA, 270 bp, Glycine max
  Clone ID: PAT_MRT3847_105212C.1
ttgatgatacaagtgattgactattgatacctacttttgactttccatttcatgttctcaatttccctttgattacttcttctgggagttttttcccctccccctcctcaattagatactcatttttctgaatgtttcacactggaacagttggtgtaaaaaaaaatactccaatggcagaggttttctagctctctagggagggcttaaatggagccatctgtgatgagtcaagagcatatgatcatcagagaggtagtttgccaggag

SEQ ID NO: 5765 - DNA, 466 bp, Glycine max
  unsure (1)..(466): unsure at all n locations
  Clone ID: PAT_MRT3847_105213C.1
cnnctnngcnntnntntcttnntcnttncnanntncncttnnggattctcnttttnntcgtgntnnttncnttnaangtcnacttnnngantanncntgttggtgcatnncaacctctctgcacgncgtngcgngagcttngcaagggctctnnaanacangntnccccaaatgntggantcanaancttntcgtagncnttcccncncananaaaagtncagcccaaagggggaaacggttnngaanaanctanaacnaaaanaantggatcagnntnncaacccttngnatntncncncccagcganaaagaaanaaaggngangntanaaganggttanangncccccgngtgaaaggnanctncacgngangggacaaactgcgattngcacctattacnccccgggttgggcccacccccacaagagaccnaaagngggncaaattttnatgngngnggna

SEQ ID NO: 5766 - DNA, 411 bp, Glycine max
  unsure (1)..(411): unsure at all n locations
  Clone ID: PAT_MRT3847_105214C.1
ctcgagccgattcggctcgagggtgaccatgaccatcatagcggttcttctcgtcttcttctcctataaacaaaatgcctagcttctcttctctttgcttccacatttgactctctcgtcaatggttgtggaggctctagttcctcttcttgagagcaacatgcaagctatgaatgaagactattcagcttcatttaccagtaaaatgaagaaggaggggaatcacaaaacctattcttccaccagagatagtaacaataacatgcagcagggtggggaactttggactaatggacttatttgtgcttttgaattcatgaggggaaatggacctaccaagaagaaggattattgcttanggagaattggaaacagtttgaatgaatcagattcacatggagatgattttca

SEQ ID NO: 5767 - DNA, 348 bp, Glycine max
  Clone ID: PAT_MRT3847_105215C.1
ccacgcgtccgcagtatagccaagccctatacaccaaaccctacacacacccatttgattcagtttccatggctagcctcaaggttgcatttttggctgcagtgctctgcatgggtgtggagagtgcacccatggcacatgcagctatcacgtgcggacaggtgacgagtagcctggacaattgcatcggatacctacagaagggaggaacgccggcgtcggcatgctgtaacggtatgaagagcctcaatgccgacgacaagaccaccgacgaccgtcagacggagatgctactgtctcaaggcggacgacaaccaaatgtccagtttcaaagcccacaacgccacc

SEQ ID NO: 5768 - DNA, 488 bp, Glycine max
  Clone ID: PAT_MRT3847_105216C.1
ccacgcgtccgttgggttacatcatcaagatggaggtctcggactgcttattaggtggtcctttatttaaaggctaacatgttctggtggtcacacttcactggtgtatggtggtggtggatccggtaacaatagccttactgttggtgtgaacgcctttggacgagcctaaggaatactcgaacactactatatgtcatgaggtgacatggttctccaacctgatgaaggtcattttggtggccaaaatgttatatgacccttgctgattcctaatattaattggatgtttaccgatgctcactagtcatgcactatatatattacccaggctttgatttccattatgggggtggtgaaccatatatctaaccaaaggctatttatgatctcaaatgcatgtatgcttgtcttgcatatgtatgcatggagatgtatccactacctgcatatattttattcagatattcagggctcactttgggagc

SEQ ID NO: 5769 - DNA, 559 bp, Glycine max
  Clone ID: PAT_MRT3847_105217C.1
tcgatctgtcgctaggaatgtgccagagtaccgtgcaccacacatggtaacgcacccgcacacgctgtaaagtgacacacactatgacgatgtgaaaacgtgaggagaggtggtaaaagagcattagctagtctcacgtggccctggggcgtggtcctcggagccctaatagtagtgctgggccacgcggttggctgttaggcttaattggggattaaagtgataacaacaaagttatgcaaccgggttacgtatggttggagcggcggctatgcggtacgctaagctgggccagggatgagctgggtcgcaaaacccaaatgctttgttggtgtaggattaggaatatagggccaagccggcgccacgtaagggattgggtgagtggttgaagggagcttttaaccaacttaacctggataattagcaactggtggtgtggatgcaacgcgggccaggtccgcttagctggtgagtaatgtgcgattgcgtaaacccactagactcgtggctgagtagaccagccagggcttggcagggtaatagtacgcgtgggctg

SEQ ID NO: 5770 - DNA, 245 bp, Glycine max
  Clone ID: PAT_MRT3847_105218C.1
aatagccccattttctgaaatgctggaaggagcactgaaaacacatcaccagcttgtgatgctaatagaaaatgttgactttgctgatgcccagttcaagaaattcctctgtgatggattcgaaacaggaaactttggaaatttcactgaagagaactcaagccaagtaatattcatattgacaaatggtggaagtggatccactaacattgagcagcagaatgaggactcggttatgaggttgt

SEQ ID NO: 5771 - DNA, 506 bp, Glycine max
  Clone ID: PAT_MRT3847_105219C.1
ccaaaaaaaacgaataatacgctctataataacgcacatgaatttggattaattaaatttctacaaaactcggcagccaacgcttttgaatatatacgacatactagcctttaggagatatacagcgaggcttaatggttaaaaagggcgcttaagggcggagggagaggttgccagttccaattcttaccaccctattcctacaaaactaacaaactaatatttgccgctaaaaaaaaaacgacttaatgacctgtgccaaactggaaggatcaaagactgcctaactttcatggggtgcatgcccattacatcatcgacgcatcatctgtagtagctgcaacactagatttatttgttatgcaggcaaaagatctatctgctctgttgtgaggctcatgacctgctgaacatggccttctccatctacagtgtcaacctactaggccaaagaggctgcttagaaaaagcacccatctgaccagaagctacaaagggggggccaa

SEQ ID NO: 5772 - DNA, 383 bp, Glycine max
  Clone ID: PAT_MRT3847_10521C.1
aagcaacaaaaaatcagtttttttgcccccaaaggtgttgatgcaattccccctgctaaaaaaggggtaaaatgcggaatttcaaacaaaaaaacctgtttggggtttccttgaaaaggggggatgtaaggtgagataattcaataataatccaataataaccaatgggggggccatcccccatgaagcaattaaaagggctgtgtttggcaataaaattgaagattcacccccctcctttggccattgttttttcttttaccaatacagaaacaccttgttttttttccctttccatttttatcccaaggcattttatttttggggggaatttgaaaatgttttgcccccccccctgaaagggtttcattttggtggcatca

SEQ ID NO: 5773 - DNA, 340 bp, Glycine max
  Clone ID: PAT_MRT3847_105220C.1
aacgtgtattaatattactaccaaaaatgctactacatggaataactaaaacaataacataaaagattatgggttaataggtgcatattcacctgaaaattgttattagcccaactggatccaggaccatatataatgagacatcctggtgtacatgacgcaactacggaaaaacgcttttttttgaataaggatcagattgttgaaacttgatgcgatatacatcagcctgagtcttctacagtgagggcttttcagaaggagcatgaggagcatactatttaatgttcaggcctagctggaaccaaacggaggagcccgattccaaaagtgtcggggt

SEQ ID NO: 5774 - DNA, 419 bp, Glycine max
  Clone ID: PAT_MRT3847_105221C.1
aatcaagtaatttcaaaccatttgagtatatattattttatgggcttggcacttaacacagtacacatgcatatatagagcaacacatttcaaggaaacattcttcaaaccatactgatcttccaaaataaactggaagatgattaacttaaagacacacatatatatataagccaaaagcatatatatatataagacaagtagaaggaatatgctcataattggttgcttatgcttcagccaaagagatgcttgtggtgcttctcttccttcttatagtcaacctcatcatcatacccaccaccacttgttttgctgtacccaccatcagtggtagtgtcagggtacacaccaccaccaccagcggcgccatagccaccacttggtttgccgtagccaccatcagtgacgtcagagta

SEQ ID NO: 5775 - DNA, 551 bp, Glycine max
  Clone ID: PAT_MRT3847_105222C.1
ctagatggaacgctggtacgcctcgcgggcgccgttccggaattgcccgacccacccacgcgttcgggcctttgaaaacgatgacaaacacattcccctcttggttcaagaagaaattcagtcttttactacttgtgagtgcacaactgcttaggggagagaaaataacatgctttactctactgcgatgtatgtgaggaactatataaatcactatgatagattcgctgaccctctgcaacatatatggggcaatgctttagattgatacttatcatgccaatccttaaaatgcatgtcgtagtatatgtgtagcgcctttcagaggtggaatgcccattcgggtggtttcattggcgaatgccattgtgcagagagaaccagacatgaattcatggtttcagtcttttgagtatcacctaccaatggtgattttgatcaaggaaatgatctcacaatggttaaagctaatgtagcatgtgctgctgttggcttgacatcaagttacactccaactccattgatggaatctggtttgaaaaagacagagg

SEQ ID NO: 5776 - DNA, 163 bp, Glycine max
  Clone ID: PAT_MRT3847_105223C.1
tttttaagaagtgcaccttccttaagattttttacatggcacacccataaagtttccagggaaagctaggcggatgtcaatacggataaagttacagcaagagaagcctattcttgtacaaatcttggataagcataaattattctgagcctcagtttttttt

SEQ ID NO: 5777 - DNA, 379 bp, Glycine max
  Clone ID: PAT_MRT3847_105224C.1
atcttgtcaactgaattgacaaatttggccttttcaaaaactgataaaaaaaaaacttatatttatatattcaacttctcttttattcgatttttcttcctgtctctttctttattttccattgatcataactattaatttcacctatataccctaaaaaggatgtgtatggttaatattttcatatgttataacttttttaaacacaattaataatcagtcacttaaaacttcttcatttgatattatatgcattcatcccaacagaatgtgcatttcttaattctaggatgctaatttattgaaaaggtcattcttaaataaataaatgtattaaaagttttacataaccagtaatcaaaaataaactaaagacatg

SEQ ID NO: 5778 - DNA, 177 bp, Glycine max
  unsure (1)..(177): unsure at all n locations
  Clone ID: PAT_MRT3847_105225C.1
tgangttgtggtttcctttgttggtgtttgtgggaactgtcttcctggcatcagtttgtgtctcattaaaggtgagagaggatgagaatctccctttctactgtagaagctctaagagcttccagactctctttgagctccataacggtcggatacgtctcctaccagagattcaac

SEQ ID NO: 5779 - DNA, 375 bp, Glycine max
  Clone ID: PAT_MRT3847_105226C.1
tgccgaagtgctggaatcaaggtcatcatggtcaccggagaccatcccatcactgccaaagccattgccaaaggtgtggggatcatctcagaaggtaatgagactgtagaagacattgctgcccgcctcaacatcccagtgagccaggtgaaccccagggatgcccgggcctgcgtggtacatggaagtgatctgaaggacatgactcccgagcagctggatgacatcttgaagtaccacacagagattgtgttcgccaggacctctccgcagcagaagctcatcattgtggaaggctgccagagacagggtgccatcgtggctgtaactggagacggtgtcaatgactccccggctttgaagaaggcagacatt

SEQ ID NO: 5780 - DNA, 1930 bp, Glycine max
  Clone ID: PAT_MRT3847_105227C.1
ctcgagaagacgacagaagggggcagtacagtggtgattggtgaagtgaatagcggggagatgcagaagggcaactatcaaaccgatgcgttcattggtgccgaagggaagcagcagaagcatgacatgtctatgccttacccattcactcactcaaacccatagccataacctactggctactaccttctcttcttctctctataatagtaacaaccgtaaccccctctttcaattattctccggtattctccggcctcgaattcgagcattttccaccgacttcaggagcgcccccacaccaactgcttcttcttctgcctttgcccaaagcatggcgaatttcgacgctgattccgtcacttaccttaagcagcgagatgccgcggagatcgacgagacactcatgggtccacttggcttcagcgttgaccagctcatggagttggctggtttgagtgtcgccacttccatttctgaggtttacaaaccgagtgagtatagtcgtgttcttactatatgtggtcccggtaacaatggtggtgacggtctcgtagctgctcggcacctgcatcacttcggttataagccatatgtctgtgatccaaagcgtacccccaagcctctatatgctgggttagttactcagaatgaagcactgtcaatccctttcttctgataatatgtgttatcttcgaatttagatttccgatttaatttagttaatgaggctgcagctggtctataatggtattgttaaaagaggtgtctaaggactgatttgattggttagttagaatctgttatttttaagtaagaactgctaaggcgatgatatttgtcaaatgtatacttgttttatcttcccactaggtggcatgttgaagagggagatgttgatggtacaggcattaaacctgatatgttggtttctttgacagccccaaaattaggtgcaaagaagtttggtggtcctcaccactttctaggaggtagatttgtcccacctgctattgcagaaaaatataagcttatacttccaccatatcctggaacttccatgtgtgttcgaattggaaagcctccacgtattggtatctcagctctaagagagaactatatctctccagaatttcttgaagagcaggtggaggctgacccttttaatcagtttcataaatggtttaatgatgcattggctgctggtttgaaggaaccaaatgctatgtccttgtcaactgtagggaaggacggaaaaccctcatcaagaatggtattgctaaaaggcttggataaggaaggatttgtgtggtacacaaactatgaaagtcgaaaggcacgtgaattatctgaaaatccacgtgcatcacttcttttttactgggatggtttaaaccggcaggtacgggtggaagggcctgttcagaaagtctctgatgaggaatcagaacagtatttccatagccgccctagaggtagtcagattggagcaatagtcagcaagcagagtactgtagtgccgggtaggcatgttctttatcagaagtacaaagagctggaagaaaaatactctgatggaagtttaatccctaaacctaagaactggggtggatataggctaacaccacaacttttcgagttttggcaagggcagaaatctcgcttgcatgacaggtggttgctaccccgtttatgataggtttcttgttttcttttttttaatggatgaagccaaacagtatgtacataatattttttaatgacatatatttggttttcaagccatggtttaggttcaagatccatgatgtatgcccatcaatttgagttgatctatatcctaggctggctgcttggttatgatagttataaagtagtctgccatgtctacaataataataacatttttactaccaacccacaccccccc

SEQ ID NO: 5781 - DNA, 926 bp, Glycine max
  Clone ID: PAT_MRT3847_105228C.1
tcaagcaatggccgccgcagcaccgcccccggccccaactccagccccggagcccgccacatccctcccggaaaccacccctctcttcacccgcatccgcctcgccaccccttccgatgttccccacatccacaagctcatccaccagatggccgtcttcgaacgcctcacccacctcttctccgccaccgagtcctccctctcctccaccctcttcacttccccacccttccaatccttcaccgtcctccttctagaagcctcccccacccccttcctcaattcaaccctaaacccaaaccctttctacaaacccatcaccaaactccttaacctttccaatcccatcaacgaccccgagagcgacacgttcaaaaccctcgacggtgttaccgttgttgggtttgtgttgttttttccgaactattcgacttttctagggaagccagggttttacgtggaagacctgttcgtgagggagtgttacaggaggaaagggtttgggagaatgttgctgtctgcggtggcgaagcaggcggtgaagatggagtacggaagagtcgaatgggttgttctcgattggaatgtgaatgcgattagattttatcaagagatgggtgctgaggtcttgaacgagtggagggtttgcaggttgactggggaggcacttcaggcttatggaggtgctgattagaatttaaaaatgtttcttttttatttttctttttccctatatatataataataataataataataataataataataataattgttatttttaggtttggaattagtcaattaggcatggtttaactgggttgagggaaattgtgagtgtaaacattttgatacctatctatctggtttgaaattattataggacttgttgttttaattggaatttactgttgttctgttta

SEQ ID NO: 5782 - DNA, 598 bp, Glycine max
  Clone ID: PAT_MRT3847_105229C.1
cttgatgacactctcattatatatacaacactagcaaaagaccatgtcccctcaacatcaaggaacacccttctagaaaatgaaaaggctagctttggtgccaacttagtcataatcagttcctcatcatcctgagtgccagttcttgcagctcccccaagtcattgttgttgtatggtctttctttagcttggatttggaaatcctctctgctttgtatatcttgcatgctcattccatcattgatgctgctgtgatcaattgactcaagagagctttgaggagatataggattcatgtaagtgggacaaaatggatggttcattggttgtcctgaaacactgttattattccctgtccactgatgattgctctctatgttcctggactccaccaggttctgagccagctgagccttcacctgcatcagctgtgcctgcaagcatgccacctgcatttcatcataaagaaaatgtaagaaaattagaaaagtcagaattttaaagagggcattagagaatttgtttgtttctagatacattgactggcgtgtattttatatagccaatggcaataataataaatattattcttggag

SEQ ID NO: 5783 - DNA, 542 bp, Glycine max
  Clone ID: PAT_MRT3847_10522C.1
ggctcgagctcgagccgaatcggctcgaggttccatagactatgcaatgtagctgttcaacttggatttgagaggtcatgggttgatgaaatgcatcaacgtgttgtagcgagggatcctgagttggacaatgcacgagtagcaatcccggaagcttcttaagaggcgtgatcatttaactcaggaactacgcgacatacagaatgaacttaagattcttgatgactttcttgatgcccagacaaaatgtttcgacttttgatgatttagaagttctagccctacgtgttggacgtgtcccacttgtggggattttctgtttctccatacaaatacactttgcaattcttctaagaatgagactatcagtttctgagtctaccgtgttctttgtgacgtgtaatgctagcaatttaagtttgctatgcagcattttattatgtggaaaatggatattattattggtttggacttttgcaacatggtgttatatatatggtgttataatgcttagccagggttacgcactgaacgcgaaccat

SEQ ID NO: 5784 - DNA, 300 bp, Glycine max
  Clone ID: PAT_MRT3847_105230C.1
gaagtttgagaaagaagaagctgctaagggcaagaataagaagaggaagaaggtgggcagagccagggcaggacctagaggatttggccaaaaatatgttgaagacgaggttgatgaatgaaccatttcaggtcctcttgccttgcattcaaatgaatttttactttaacctttctttttcttttctttttgtcttttccgtgttgctattgcttagttctcatcacagtgtgattttgagtttccaaaacaaaacatgtgtttaacggcggaatgcgagtaattaaccttgttggatta

SEQ ID NO: 5785 - DNA, 550 bp, Glycine max
  Clone ID: PAT_MRT3847_105231C.1
ggctcgaggcttgggctagtttcagatgctatatcagagaaggtagattctctcagaaaagggaagagtgaagtgattgaaaaaaaccacatactcattcttggttggagtgacaaattgggctcacttttgaagcagttagcaatagcaaataagagtattggtggtggtgttattgcggtgcttgcagaaaaagaaaaggaggaaatggaaatggacatagcaaagttggaatttgatttcatgggaacatccgtaatttgtagaagtggcagtcctcttatactggctgacctaaagaaggtttcagtttctaaggcacgtgcaatcattgtattagcttcagatgaaaatgcagatcagagtgatgcacgtgctttgagagttgttcttagcctaacaggtgtaagggagggcttatggggtcatgttgttgtggagatgagtgaccttgacaacgaacctctggtgaaacttgttggcggagaactcattgaaacagttgttgcacatgatgtaattggacgtttgatgattcagtgtgctctac

SEQ ID NO: 5786 - DNA, 189 bp, Glycine max
  Clone ID: PAT_MRT3847_105232C.1
tcggaagtcggctcgagtaccgtcaattacacaattaaatttctttcacatttttttttttaaaaatactggctttcatcgacttatctttaccaaaaatccgggagggccttcataacacatactccaatttcgtctcaaccctaatataccaatttctcgcacaccaactctttttcgttcaccctg

SEQ ID NO: 5787 - DNA, 467 bp, Glycine max
  Clone ID: PAT_MRT3847_105233C.1
ggctcgagatcgatccttaaacaataagagaatattagtctatataatatcagtgctaattaggcgtgtcaaaagggctaatcgtgctcgtttatatctaaatagccgtagctatgtcaagactttgtgcatgcgtgtagtacttgctcatgaattttgagtgcatccttttcatcaagctgagactagaagatcctggtgaacattcaagttcatgtgctaaaaacctgctcctgatgattaagcatgcaacggacatctgtacacgcatggaacatggaccttgagcatctccaagacgccttgaccatgaaagacatactacgtcgctggaaacctactgggcgccgaacatgtctacggaagctgtcacgtcaagcatgctatgtacgggcacaatttatctcctgtgcatgacagaggtggagaaccacccacggatgacatggacgggccattgacacaca

SEQ ID NO: 5788 - DNA, 148 bp, Glycine max
  Clone ID: PAT_MRT3847_105234C.1
aattcccgggccgatttgtctttctagacggcagacgaccacctaatgggggggttttattataagcaacgaattataataagcaaaagcatcaaataataatgactacagaacctcataaaaaagacaaaaaaaatgcctaaagaca

SEQ ID NO: 5789 - DNA, 469 bp, Glycine max
  unsure (1)..(469): unsure at all n locations
  Clone ID: PAT_MRT3847_105235C.1
atatgagacaacactgagcatcgtctagctatctcgatcgaactgtccaaggtcctgtcacgctagtgcaactgcaaccaagagataagcgtgtggttacaaaggcccagaggccatagccacctgggcaggcctgggtttacgtggcgaagtggcgaaccgaagccgatgtcgggaacaacactgggcatacttgttgccaggtgtgctaaccacaaccgtgaaatggtgatggaacnggcctgtacgttatgcaacgggcaatcgtagccggacgaaggtacgctgcgcgagcagcctagtgagccaggaagaaaacgtactcgtgcgcgtagggcacgtgctgctaacgcgtggtagccacgtagggagggacatcagacgcagatggcgaaacccaaaaaggcgttctggtaacgacgtcggggcggggggttttatgagataagcgcggcgcgtcgggagcggg

SEQ ID NO: 5790 - DNA, 863 bp, Glycine max
  unsure (1)..(863): unsure at all n locations
  Clone ID: PAT_MRT3847_105236C.1
ctactatacatacaccatatcaatattacataaaccaaggaattgaactagtaactgataacgaatagaactgaacatggcaatcaaagaagatgtggaggatcgcacacagaaaggaatcagagagccacttgttgtgggggaacagaatcaccatgcaagcaaagggcatccatggatggtttactttactacattcgttgcagtgtgtggttcttatgaatttggagcttgtgcgggatattcatctcccactcaagatgctatcaggaaggattttagtctgtctttggcagagtactccttgtttggatccatcttgacttttggtgcaatggttggcgcaataacaagtggacctcttgctgattttattggacgtaaaggggcaatgagagtgtcaagtgctttctgtgtcgcagggtggcttgttatttatttttctgagggtccagtgcctttggacattgggaggttagcaacaggatatggaatgggagttttttcatatgtggttcctgtctttgtagcagaaattgcaccaaaagaactccgaggggcactgactaccttaaatcagttcatgatagttactgctgtgtctgtgtcattcataattggaaatgtactttcatggagggctttagctataattggtctcgttcccactgctgtgttgcttttgggtctgtttttcattccggagtctcctagatggctggcaaagagaggacataaaaaagattntgtggcagcactgcanatacttcgtggcanagatgctgatatatctgaggaggcagaggaaattcangattatataactagtttggagcagctcccaaaatcagtctgctgggata

SEQ ID NO: 5791 - DNA, 1107 bp, Glycine max
  Clone ID: PAT_MRT3847_105237C.1
ctcgagccgaatcggcctagaaaatgaaaagatactcatgttatatatgcgaattcgtcacataacaacacacccccacttactcttctcatttcattcttcttccttcttttgtcttcccttagcttagtttgaagatcatggggagaggaagggttcagctgaagcagatcgagaacaaaatcagccgccaagtgacgttttccaaaaggagaactgggctgcgaaagaaagctaatgaaatctctgtgctctgtgatgctcaagtggcactgattgtgttcaatgctaaagggaagctttttgagtattcttctgaatccagcatggaaaacgtcctggaacgatatgagagacatactcatatagggaaacttgttggagatggtgatgaatcacagggaaactggtccttacaatgcttcaagctcaccggcaaagttgaagtcttagagaggaacttgaggaactttgtgggagaagatctggatcccttaaacttgagagagcttcagagtctagagcatcagcttgagacagctataaagcgcatccgaactagaaagaaccaagttatgaatgaatccatctcagatctgcagaaaaaggcaaggcaattgcaagagcaaaatggcatccttacaaagaagattaaggagaaagggaaggaagtggttgaacgtccacactgcggaccagaaaccttaggtctaacttgtcctccagagctacaacgacagcaaagagtatttccttctttaacactctgtgagactttacaagcagggcatctggaggaagttgttgaagcacgaacggttcctactgccagcactcacatcccaccatggatgctgcatccatttacaagataaatctgcatgtgacacgttatgtttgtgacacatgtgatgaatgttagaagcataagttatatatctctatatgtcaaaaacttaatgttatatagctaagtgttaagtttgataactgctcatccttgtaagtactacatggtgcaagagtgcaagtgattcttgcatgcaaatgtcaactacatttattatgaatcaatattaataatagaaacatgtagttatttttgac

SEQ ID NO: 5792 - DNA, 592 bp, Glycine max
  Clone ID: PAT_MRT3847_105238C.1
agtgacggctacgagaaactctaacgaacaagtgacaaagcgaagacagccatgactgacagttctccatcccaacctggagccgaacaataactggttcgcggctctacacatggaaaccgtcgccgaacgcctccgcaaatatggactccgatacggccatatgaacaagccttactacaatactggatgtgaatgaggggtgactcaccttccgaaagaagcgcgaggacgctccccaagatcgccgtacaggcgccatcgatctttccgtgacagacgagtaccgccccggcatcctgcatccaaagcaaacaccattcaagcgctaccttcagaatatggcgactctcgcgaatagagaaacagcagaacgcgaatcatcgggaggtatgaccctatatcaacaatccattccttgagcgcctcaatctcccgtggatgaattgtgagagaaatgccgaaaattcaagacgtattgatcttgcggcacaatgttctcttatcagagaaaaatatgaacagatctggcgcaagagacctagatgaaatggatgctgtcacgacatatacttgcctcgccaactgtcta

SEQ ID NO: 5793 - DNA, 476 bp, Glycine max
  Clone ID: PAT_MRT3847_105239C.1
tctatgtgtccgtcgagtccttcgtctcacattcaaaggaggatctctcttgcgtgttctatacgtttgcggtatgtcctccaaccgaattctgaatgagctgacggattccgacaaagatcctccaacatcttgcagtgccaagcctggtgctgctgaagatatgtgccataggcaagctacaattatgggtcctgcagacagtccctatgcacgaggtgtattcctagcgaccattcattttcctccagagtatccctttaaggcacccaaggttgcatgcacgacaaatgttgtccacccaaatatagatagcaatggaagcatttgccttgatatattgaaggagcagtggagccctgctataaccatttccaaggtgttgcatctaattaggtccctattgacggatccaaatcctgatgatcctttggtccctgacattgcacacatgtacacgacagatctgaacaagt

SEQ ID NO: 5794 - DNA, 689 bp, Glycine max
  Clone ID: PAT_MRT3847_10523C.1
ggaattcttcaccaggcgcagccccaccaccagccccgtcatccacctccgccgccgcaaaaccctccgcatgttcctcgcccgccgccgcttccatcccccgccgcaagatccgccgcccctcccagactccgaggcccgcgtccgccacaaactcaaggacctcttcatctcatctccaccgccaccacccctcaacgacgaaaaaacaatcttccacaatcatcaacaacaacaagaagatcagcacgaagaacttctccctaactccgccgtgagcgtccgattccgcaccggatctcccttccggcgcggcgcatccaccgccgctctccggccggtatcgtcggtcttccgctaccggttactgagaagagcgtggcgaccggtgcttgtcagcatccctgagtagtagtagcagatttttctctctactgttataactgtacggatgactccaattcctaatttttatttttttatttatttcattttttaaaataattctcggacatataataatggtaataaagcttctaacttgcgcggtgtgcgttttctcttccgctaaagccgtgaaagtgatcaatgtaactaacgcttgccgcgttccgcaacgaaacggttctgatgcgacgtcggattatcgaattctgttcttttggtcttcgggggttttgtttgttacc

SEQ ID NO: 5795 - DNA, 436 bp, Glycine max
  Clone ID: PAT_MRT3847_105240C.1
cgcagtttttgacaaagctaacgcattatactgcaccagctatccctgctcctgcgatcctctatgccctcctatgactcattgacgtactagaagtttattaaaatagtatggtggataagacagactctcttgcttgtacttgcgcattctccggagtacagcctgctactgtgcagtatgagccacatactgcggtgttaacttcaccaccgaagatcatgtacgaactcaatgcgccagattcacaatctctagcactaattcacactcctgataacttatgcgatgactatcattatacaatgacctcaaagatcctcgggacaatgattactccaacctagggtgctttgtttcaatatgcagatgcttatataaccgatatgaagggacatttacatgatgtctttgaagaacaacagagcacgacata

SEQ ID NO: 5796 - DNA, 242 bp, Glycine max
  unsure (1)..(242): unsure at all n locations
  Clone ID: PAT_MRT3847_105241C.1
aatttccgggtttattatctnactaagangacttctccctgcagggattgtacagtctcttggcgggataacatacataaatttgtcttatgataccatcaatttttaggcttttccccacaagctgttgcattttggagagatttagaaaaaagatgtattgaaatttttacaagaggaattttttacactttttcttctcattgttcttactgtaacactctgtttgttgatggttgtcc

SEQ ID NO: 5797 - DNA, 410 bp, Glycine max
  Clone ID: PAT_MRT3847_105242C.1
aaaattaattcaatttaattcaatccttaattttgccttagaatccaaaattccttacttaatgggccccatttttcaaagggccacggaccttaaccttttatggtggcaggtccgattccaccaacccaccctttttttcttaaggttaaacccaccaaatttaagggttaaactttaactaagggccaaaaggatttaaagttaaaaaagggttcttttaggtaaggacaccaaattattttgatcttggatcataacatcgtcccacagaaaattataaggtaagcacaaccttatggaccaaatttttggttggactaccacaaaaacaatggcactagttccaaaatcatccccaaaaatcaaaacctacaattggaccttaaaccgaaactaagtagtgagct

SEQ ID NO: 5798 - DNA, 336 bp, Glycine max
  Clone ID: PAT_MRT3847_105243C.1
ccttccttccggttgcaagaagacaccagaaggggcctttattcggtattcaaatccggcccaacccctttgcctggccttctttcttcaactctgtggtccttttcccatgggaggtcaaaattccaatccacaccgtttttgacgtccccttttttttccaagctggggccgccgcccctgttttggccgttgcccaatctttcgcttgattggattttctgttgcctatggcccctatttaatggtccccaatttggccagcaccaattggaaggtttccttaaaaaaaccttttgggagggaaccttcctttttagaaaaccaggattgggg

SEQ ID NO: 5799 - DNA, 146 bp, Glycine max
  Clone ID: PAT_MRT3847_105244C.1
aaaaaaccattggaagttttttttttaacttaggcaaaatttcaaaatgccgcatttttgtttggcatggaatttaaaatcccactagaaccttaaagccttctacccgttctaccactctttctacgtgtgctatcggaaggaat

SEQ ID NO: 5800 - DNA, 279 bp, Glycine max
  Clone ID: PAT_MRT3847_105245C.1
ccaagttatgattatatctttttccagaagatctaccattatacctacaatgatagatgctctggtaaatgatataataagaacttggtccagagcatctatcattgtaggtataatggtagatgctctggaccaagttattatgatacctacacggattggccatactatggctatcgacaacggaaaagagcatttacgtatttatataacagatcgaatggtaggccataaattaggagtatttgcacctactctaaatttccgaggacatgcgaa

SEQ ID NO: 5801 - DNA, 363 bp, Glycine max
  unsure (1)..(363): unsure at all n locations
  Clone ID: PAT_MRT3847_105246C.1
ngtggcnnggcccgcttctagnnaactatgtggtnatcccccccgggnctgtcannggcttctctttagcttggacccgagtgnnaattagnannttcattcattcaagnnatgtncnngtcttcttgtatagnncagaagaatgttgnannagagcagtnatcagnnaggttgtactcnnacggggnacccgaaattngtgccccaagtgtatatgtccaaaggtagcccttcttcaaggggaaatcnngcccttnncccaanncggcctttctnttccccttcaagnggacatggnagggagttggcgggcttaccgaacagaaccaaaacccggccctttcgttcttgggcctccaaaac

SEQ ID NO: 5802 - DNA, 301 bp, Glycine max
  Clone ID: PAT_MRT3847_105247C.1
attttatgatatgaaatgtagacaactcccttatattcctactttagaatattcaacacgtttgacgaatgtactataacacagcttcgatctcttgtcaattgtcatgacctttctggattggctattcaataacccctattgcaacaacttgtgatttttcttttgcaagataagggaaagtgtaaaagtacattgagattagctagcgataaaaaggcatcaagtgtatcattcagtactctacgctgttctttattttatactaatgtgaacaaaaaaataataatgatggctttag

SEQ ID NO: 5803 - DNA, 731 bp, Glycine max
  Clone ID: PAT_MRT3847_105248C.1
aaaaaagtatgttagcctatgctcgcaggcgtttggttcacagacccattttccatcggattcgcttaattgacacgtggactccacaaaattccaacaacagcgccaaacatcatgcatctccatcgcatagcatacaaaaatacaatcacactcctgagtcttgaattgaacctctttgcccccacaagatctgcttctgggctttttaggatacaaaatgggtgagaaagactcagagaacctcatttgggaacagatgagaaccccgacagctgccactcccattgctgcaccccaacagcaccgcacattaccaaggcttcttgtccttctcatcctcttcgtctccgtcacctacgtcgtctacacgctcaagctcgtctccacctcacgcgcctgcaacaacgacgcccctttctccaccgacaacttctccaaaaccatcctctccgtcaatgccaccgccgcagttctccgccgaggctccctcgagacgaatcccgaggaccggacggacctccgccacgtggtgttcggaatcgcggcgtcggcgaagctttgggagcagaggaggagctacatcaagctctggtacagggcgagggacatgcgcggcgttgtgtggctcgacgaggaggtgaaatcggaggagagcagcgacgcactccgccggtgagaatctccggcgacacggcgatgttcaagtacacgaacaggcaggggcaccg

SEQ ID NO: 5804 - DNA, 1724 bp, Glycine max
  Clone ID: PAT_MRT3847_105249C.1
ctagaaatggcaaccaaactagtcatcttcatcaggacttttagaaccccttactggtctcttgtcaccatggattcagaagtacttaacttattagcccttatcttgccctttttactcttcgttattgtggcactgaaaataggaagaagaaatctcaagaaatctgagtcaactccaaaaatacccccaggaccatggaagctacctatcatagggaatatactccatcttgttacatctacaccacaccgaaaattaagagacttggccaaaatatatggacccttgatgcatctccaacttggggagctcttcataatcgttggttcctcagcagagtatgctaaggagataatgaaaacccatgatctcatctttgcatcgaggcctcacactctagttgcagatatattggcttatgaatcaacaagtattatcacggcaccttacggacgatattggagacagctactaaaaatttgcacggtggagcttttcacccaaaaacgtgtcaattcattcacataaaggtctttctatcaacctcgctgaaatagtagttttatcaatatataatatcatttcaagagccgcttttggcatgaaatcgcaaaaccaagaagaattcatatcagctgtaaaagaattagtaacagttgcagcgggttttaacataggagatctgtttccttctgttaaatggcttcaacgtgttactggtttgagacctaagcttgtgaagctgcatcttaaaatggatccgctattaggaaacatcatcagtgagcacaaagaggcaaaatcaaagccatagaaagcaaggatgaaacagaagaagatttggtagatgttctcctgaaattcctggatgttaatgatagtaaccaggacatttgtttaactattaacaatatgaaggctataatactggacatctttgccgctgggagtgagacagctacaactaccataaattgggtaatggcagagatataagggatcccacgcgtccgcccacgcgtccgtaggcacccagagaggtattcaatatgaaaggaagggttgacgaaatttgcatcgatgagctgaaatatttaaaatcagttgtcaaagagacactaaggttacacccaccagctccacttttacttccaagagaatgtggacaggcatgtgagattaatgggtatcatataccagtcaaaagtaaggtaattgtgaatgcttgggcaattggaagagatccaaagtactggagtgaagcagagaggttttatccagagagattcattgatagctctattgactacaaagggactaattttgagtacattccatttggtgctggaagaagaatatgccctggcagcacttttggtttgatcaatgttgaggtggcacttgcatttttgttgtatcactttgattggaagcttccaaacggaatgaaaagtgaggacttggacatgactgagcaatttggagtgacagttagaagaaaaaatgacctatacttgataccggtcccttctaatcctttccaggtaagataaactggtaaagcctacaagaaaaggctagaacctttgtatttgttattacccatttactaatgaaagaaactttgcattttgttaatttttgcgatgtagcgtatatatccgttgaacagtgtgaattggtcttaagatgaaatctaaaagatctctcatcccattcct

SEQ ID NO: 5805 - DNA, 355 bp, Glycine max
  Clone ID: PAT_MRT3847_10524C.1
taggtcaataagatgtataaccactgatgttaaatctacaaaggagaagagataataacacatgctcccttgtagatttaacatcagtggttataggtcaataagatgtatagattattcttgtaccgtttccactaatcaatccttcatcaataagcacacttagaagttgtttttttttgtgagtgaattggtggttgagccattagatatgatgcatagaatgccatgatggaatcctggtgctgcttcatgtgattaatttgttagtatttcataagtttgtgttcggttgttgtgaaggggggagggaccccaacgaataaaaaaacaaagaagagaaaaaagaaagttg

SEQ ID NO: 5806 - DNA, 622 bp, Glycine max
  unsure (1)..(622): unsure at all n locations
  Clone ID: PAT_MRT3847_105250C.1
acccccccccatcctccaaatttggtccaaattttattcgccccctggggaaattaccttggagggaccccaaactgggaaatgtcgggtggccctcctccacgacggggcttattcacggggcttacaatttccaaaataacaacagctaatcatgagggaaaacctttcccccctcccccccggattaatatgaaaccggggaacaggatttgaatccccgcctcggaggagaggtttctatctgcccagaggattggggggggaaaaataaaaagtgaccccccccccaaaggcgaagccccgcctgccccggggactactgtgagctttcctatggtttctgatcccactctgagacgatggggtttgggagtcttggtagtccctggctccgaggggggcctagggggcttgctctgcctcccccggcgcgattggcccggaacgttgtnaaaggaatgcgggttcggacctgttttctttggttgtgtaaactgggggccttctttgggagacttttggtttggaggccccgggaggcgctttcctggcccttccaaaaccgtggggctttttccgcccccccccgggggggccccttttcggggaaaaaatggga

SEQ ID NO: 5807 - DNA, 314 bp, Glycine max
  Clone ID: PAT_MRT3847_105251C.1
gcatatgcgtatgaacgactgcaccggcatgaaatcttttataatccaaaaaccccaatgagatgtccactccgtctaatgcaaagcaatatcattcccacctacaacgaattttaaaaggggtggaaaataacataaacaccctgataacacgtaacgagactcatatttcagagtcttgtttcccagaggtgaagaccctccatgatatatagatcctcccggggaaggggaagttttgctgaacagggacaggatcaacctgtatgaaggcggggattattctctgaccgagggagtggagcatgccaagg

SEQ ID NO: 5808 - DNA, 506 bp, Glycine max
  Clone ID: PAT_MRT3847_105252C.1
ctgtgtacatatatagtactataataacagaccaagacaccgagaagcctagtcatactgccgatgtcatggcacactgtctgtccttacttttcacgcgcgtactatgttgcacgcaccgagaagggttatactaaatctaatatatacagtgagcggtttatctatttgcgaagcggagtgctaatgattaataagcacatgattgcactgctgagtgtgatagtccatgacacgtaccgctcaaccattaggagatttattcttccaacatcttcaggatgagagactcacatgagcctgaagaccaactattatcacctggatcttgtagccatacgcaaggactaaaagctgcttcaaatccccctggagttgcaaccgagtacgtggaataacacggtctatgtggaatgactttgccttggatctgtgaatacggagaggaagctaatactgtaacggtggatggaccattgctgactcgccgaatgggaatagtcatc

SEQ ID NO: 5809 - DNA, 407 bp, Glycine max
  Clone ID: PAT_MRT3847_105253C.1
gcctttcgctagcattacaacaaaacagaaaaaatgacatcagattcattagctgcggacgcataggaattcattcttactgtagccacacagcagagaaaaaatgcgattgagaatacaagagcgacgaatgagcgaagggcttccctacgaagatgcttttgcccctggacaagaaatggttatgaactgacaaggtcaatgcacctccttccctttggatagggcttgggattgacaaatcaaaggcccaagaacgagccaaagatcagctcttttcacaagccggaatgaagatgaagcttacaacgagacgagaaagaaaaagtccaccttctgcagatgatccagcggtaaaagattctctttcaaccgaggggcattagtcaatcaatgaaaaggaagaa

SEQ ID NO: 5810 - DNA, 385 bp, Glycine max
  Clone ID: PAT_MRT3847_105254C.1
caaaatatgaggacttgcgttgcatgggaaccaataatcttccaagacggattcatgagatgacaacaaaggctaagggagtgcaaccttctagggcaaaaatttatattgacactcgaacttgaaaagatggaagcattgttactgaaaagactgttattgtaattagagtttgcaaaatttacaaagcacccaagattttactaattggacaaatgatatatattcaaaagtcaaaggacctgaaaaaagaggacgtgtgtgttgtcttggcaagcttccactcaagcaagttcatctcaaagctcttatgcaaacaatagaattcaaaagttggagaatttgcttggaaaccttgtagctgtgcttaaagtacgaattgcag

SEQ ID NO: 5811 - DNA, 2006 bp, Glycine max
  Clone ID: PAT_MRT3847_105255C.1
ctcgagccgaatcggctcgacggcgcaggttcagtttctggagaagagtttcgacacatacaaacatagtaaccgcttctctctctctctctctctctctctctctttttccatgtccatctgataaccctttcctgattctctttcgtggttgttgctattctgagtgatgggtatgccctgccgctctcccccaaaaactcccgttttctctctctgtttttccatggccatctgatcaaacttttcttgattctctctctcagtttttgctattctgagtgatgggtatgccctgccgctgttcccacacctcccacatcactgaaatcatcatcaccagcttcttccgccacaagtcttaaattacaacaatttccctcaattattcatcaaccaaccaccttaatagccttttccaatggttccttaaagatccaacttggtcggagtaaacatggcggctagtggaagttccttttccaacatcactagcttccttcgcaaccaacaaccctcttcccaacctctcgattcttctctcttcctctctgctccttcaatttttgtttcaggttcgagatccatggtgagttttgaagcagaaggagggaaggggtgtaacggctccttcttccgcgcgtttgacatggacgacaatggggacgagtgcatggatgagtactttcataaacccgagaagaagcgtcgtctctccatgaaccaggttcagtttctggagaagagtttcgaggaggagaacaagcttgaaccggagagaaagaccaagcttgccaaagaccttggtttgcggccacggcaagttgctatttggttccagaaccgtcgagctcgctggaagaccaagacgctggagaaggattacgaggctctgcatgcaagttttgagaatcttaagtccaactatgacagcctcctcaaggagaaagacaacttaaaagctgaggtggcgagcctcaatgagaaggtgcttgcaagagggaaacaagaggggcacatgaagcagcaggctgaaagtgaagaagaaacaaaaagattattgcatttgcaggaacaggaaccaccccagaggcttttactggaatcagtttcggagggagaaggatccaaagtctcttctgttgtcgggggttgtaaacaggaagatatcagttcagccaggagtgatattttggattcagatagtccacattacaccgatggagttaactccgcactgctagagcatggtgattcttcttatgtgtttgagcatgatcaatcggatatgtcacaagatgaagaagataacctcagcaaaagtctctacccttcgtacctctttcccaaacttgaagaagatgtggattactccgacccgcctgaaagttcttgtaattttggattttctgaggaagatcacgccctttggacctgggcatactaagttttcttccatgttcatgtgtgtgtttgtgtcatatgtttttttagtaattagtatttagtatttgcactttttgtccaggcttcaaaaatggctatagctttagctttatcaggaaagaaatgtttgttttctttttgcctcattttgttagtacttgtaatcaaactgttggttccaatgtaattaaataatgtcttctcgttgagaatgtaactatggatttcatttaatttcactaagaaattcaaataagaaacttgatgaaatggggaaaaaaaaatggaagccaattgcttggtagagtggaaaagattgaggcctatagtatttatactatttaagatgactatgattcattgattcttcttcacttgggttctggacttctgggtccatgttgttttgattggtaagcaaccctgcatgacgaagttgacttgcttgcacctttgcaatactttcctacttgagagcatttaagttttgtgacagaaggggtgtcactttcactatgaattggacaaaaatggccactctccattggatgaggatcacc

SEQ ID NO: 5812 - DNA, 695 bp, Glycine max
  Clone ID: PAT_MRT3847_105256C.1
ggcttttactgcaatcagtttcggagggagaaggatccaaagtctcttctgtcgttgggggttgtaaacaggaagatatcagttcagcaaggagtgacattttggattcagatagtccacattacaccgatggagttcactctgcgctgctagagcatggtgattcttcttatgtgtttgagcctgatcaatcagatatgtcacaagatgaagaagataacctcagcaagagtctctacccttcgtacctctttcccaaacttgaagaagatgtggattactccgacccacctgaaagttcttgtaattttggatttcctgaggaagatcatgtcctttggacctgggcttactactaagtttttttctttcatgtgtgtgtttgtatcatgtgtttagtatttagtatttgcacttttttttttcaaggctttaaaaatgagcaataagtcagagcaatggctatagctatagctttagctttattaggaaagaaatggtgggctttttttgcctcattttgttatttgtaatgaaactgttggttccgatgtaattaaataatgtcttcttgttgacaatgtaactacagattttatttcacttcccaaaattcaaatagaaaatttgatgaaatagggcaaaataaaaggtaacccaaatatagtttgacaagggaagccaattgcttagtt

SEQ ID NO: 5813 - DNA, 310 bp, Glycine max
  Clone ID: PAT_MRT3847_105257C.1
gtcgtaggctgcgagagggaacatatgcgtctttgggatgtaatgctcttaccacaatgggtttcataggccgtccgaacactttgtcgggttgggccatcgctagagcagacgtgcagctcaccattatagttggtggtcatgtcgtcagctggagatgaaccaacaactggatgtacagggcacgggctctcagcagtgaaggacccgcggatctcgtataaaaggatgtacgtatcacctccagcgggaaccagaatcttatctttaactactagacggggggaatattgtataatgtcatcaacag

SEQ ID NO: 5814 - DNA, 324 bp, Glycine max
  Clone ID: PAT_MRT3847_105258C.1
gttaagatccacctcgaatatatactgctataatcatactctttacccttataagtgtgcagagcccttcccaaactttcaaatacaaaaaacctttacgggagctccgcatgctgatacacagagtagctccgtgttcaacccatgattactcattgtattttctctgaaacagctctatcgggtatgccttcactccaaactgaaaaaggctgattgccccctctacaacaagaagaaacttacacttgccaaacgacgataataaaggccacatgaccgaggatatcgaaaatgcctgtcgttttctgtattgcaaacaag

SEQ ID NO: 5815 - DNA, 463 bp, Glycine max
  Clone ID: PAT_MRT3847_105259C.1
aaaaatcacttccttggagttgccaatttatttgttggtgccttctgtatattagtctccatcatcttcctgttgcttcatgtgaagaatcctagaccttatggggacacggcctacttatcttggaataggaacaacattgctacgttgtattgtacgtggtacaatggtaatacttttcttaagcgacacacaggatacacattcttgttattaaaactgatgtatttaattgtaaaagatgaagcagggtaaacaattcctttggctttaactatcatggaaatgagccattaggagtgggatagttgagtttgggtggtttgcttgaggtcataaaatcaaacctcagctttgccattgtacacgcacaaaaaaaaaggtactatattgaaatagaaagtgtgtatgttgtattgtattttgctggatatttttacagaatggaattgaaacacttatt

SEQ ID NO: 5816 - DNA, 399 bp, Glycine max
  Clone ID: PAT_MRT3847_10525C.1
ggttggaacctttgggctgtttatgtgcttgctggtcgtgagaagataatagaaggggataatgtacttcaaacaagtactccaacctacagctgcccggcttccttccttcctcctcgtctaacaagcgcgcgttatctcaaccaaccactatttttcctcagatacagcctcctctttctcgcctctcacctctcatatcgcgaaattaagacgaaggcagtacccgtagtcgcctcatccacacgttccgcttctagtcttcttccgcctgaggcgctaacggtcggcctcgtccctcgccttcttaagcgtgtgaagaggcgcctcagggtcgggacgaaggataggcgtacgaagcctcgtgggacccgtcgtaataagcgttaattgcgcgtt

SEQ ID NO: 5817 - DNA, 432 bp, Glycine max
  Clone ID: PAT_MRT3847_105260C.1
gcacttgtcaggacagccatgatcgccgccctgttcgtcgtcgccctcgtggcctccgcccaggcataccccggccaggaccccattgaagaggcactgtccagcaaccagctccgtgccaaccccaccatctgtctcatgtccaaaatccctgagatcgcgaaagccggcggcgaggccaagaaggacctgcccctcctcgaagagatcatcccactgctgaagtcgaacctcgccaagtgcagccagagccagcccgacgactccgacgagtccggcgagtccgtctactccgacaagttcgagtgctacttgcaggccgtccgcgacacctgggagggcagcgcaaagacccgcgaggctctgcaggcgggagctcagaagatcctcgccgccgtgcaggacgtggtggcgtgcttcaaggacgacaag

SEQ ID NO: 5818 - DNA, 497 bp, Glycine max
  Clone ID: PAT_MRT3847_105261C.1
aattttgttaaccgggatcacaggctggcgcacctgaaaacttgaaacaaaagcaaacgttacttgatttgaagaatcttgcaatgtataactacttaggggtgttacgatttataatgggaaagaaaatcactctctgtgctggccacagacttagcgaatgatattgttttccactcttagaatatttgctgaacactctactatttgatataggactaagagtcagatttaaactatgtctggttctttctcagtactctgcttaattttaagttcaagctggtgaaatctcgtattagagctcacactctcctatatggaataggacttcgagggtagactattgtattcctgtcgttactttcactctattcttattactgagccgtattgcctgacaaagtggccttatttgaaaaacacttgggcggtggtgcaaatgttcgcattgttaattgtctgtggggacaacaggttaactgagaaaacaattt

SEQ ID NO: 5819 - DNA, 270 bp, Glycine max
  Clone ID: PAT_MRT3847_105262C.1
aatgcaaagaagtttgctgcttacagttgggttgaggttgggaacaaagtccacagatttgtttcagaagatcactatcatccagaagtggggaaaatctatggtgaattgaacagattgatctcaatattgcaacaaattgggtataatccagatacaaacattgtcctacacaatgtgggtgaggaagaaaagttagatccatttcttaccacagtgagaaacttgctcttgcatttgccttaattagaaagcccaatggagttgcac

SEQ ID NO: 5820 - DNA, 399 bp, Glycine max
  Clone ID: PAT_MRT3847_105263C.1
aaatcttgagaccaagcgtacttttgaaaacgctgatattatgtcggagggtgaccctcttgattgtctttttagttatgctcctccggtggaagatattcatcattcaaattccccaaataaaccatcaggaatacataatcgggctcgtagaagatctcaccgtaggcgtcggatgcgtaatcatgatgacctttcaaattctgagtctgcagcagctatttgactgccatttaacatttgcagaagttgatgttagaattatgcaaattgtgggtgtatgtttttttactaacgttcagatcagtgatcagtccccttcttttcaaacaacattacagaaaggaacagtgtcactagtatgttaattgccatttactatgtcacagattattatgc

SEQ ID NO: 5821 - DNA, 441 bp, Glycine max
  Clone ID: PAT_MRT3847_105264C.1
accagatttggaccagacgggtcgcttggaggtgcacttggatcggccgtgtttggctcagtacgagacgagggtgttcttcgacagtgtggtgagggctaaccttagtttcggacaactcaaggtgttggaagggatgtcaagggaagagcttttcttgtggttgcctgtgaaatatatcttagtgaccgatccttcttccggactcattgttattgatattggtcttgcttttaaacatctctccttgtctcggtttgaagatcctccaatttgtaaatctcattctggtcttatgcttaaggttggtggaaggaagggcgttggatttacagctcagagatgaaaggctgttcgctcggctgaggatggcttcttcttttctcttttctgggttctgctgttctggttttccatagaaagaattatgtgaagaaatgt

SEQ ID NO: 5822 - DNA, 195 bp, Glycine max
  unsure (1)..(195): unsure at all n locations
  Clone ID: PAT_MRT3847_105265C.1
gctgaatcgaccatttaccncccagtggatatgtgatatatatatataaaaaaaaggcaaccatgaccttaacacacccatcacaagtccaaaacacttgaacttgctcaagggcaagaattgaccacttttatnctaagggtttttgtttagcccctgaacaccagagtgcaccatattactttctacatattt

SEQ ID NO: 5823 - DNA, 412 bp, Glycine max
  Clone ID: PAT_MRT3847_105266C.1
atattaaattttttaaaaaaaaaaaaagattaatatttatatacacaagacagaggagcggccctgggagaaaacaaaaaaattcaaaagaagaggccaatgggtgatgatgacattattttgggaacaagttgtaagggggggggctgaatgaaccaaaaggcttattacaaaaaaatatagggccgcacaaaaagggaaaacaaaaacgccaaagcatagagaaaggggccaacccagaagaggcaatggtggggccaaactttaaaattgggggagataacagctgcaccaaatctaatggcagaaatgatcccggtaacggggataggaaaggtggccacgcgaacgaggaaagcggaaaactcaaggggcaaaggggctaatactttgacataaacagtgggattaa

SEQ ID NO: 5824 - DNA, 532 bp, Glycine max
  unsure (1)..(532): unsure at all n locations
  Clone ID: PAT_MRT3847_105267C.1
tganatnaaanagaaggggagacagtgccggatttcggannacanctnanacactctatccgcacgctccgaagctggctagagaaatcacgagtgacacaatccatacagttaagctctttctatattcaaaaacaggcaaccgcattattgcgctggatctctcataacatcatcacacgtcatggccaggcccttattttgcacacaggaaccatctatatgctaacgctgagaccgacgaagaccggacccggatcttcttcctacgacgccaccacaaatcacacagcacttccgtcaggtaccaaactccaatcagtggcgatccccgccgtctacctgacactggagctacgacgccactaccgatgtgacactggacctctttcacgccacccagataatttaccgagacaccgacagcttcaacacatccaatcaccttgaggccttcctgaagtgtcttgctgcgtcttcctgcacttactacaccgcagtcatgctcagttaggagaacccgtacggtata

SEQ ID NO: 5825 - DNA, 173 bp, Glycine max
  Clone ID: PAT_MRT3847_105268C.1
attctgccggataggttaagatctgttcaggggtggaataaacctcggctatcgatcattctttgcaggctcggcgaaaatgagctcatgctgaaagcacgggggcttcttctcataccaaagcgtactcatactgaggctccgggagcgactggacaaactcgagccgaact

SEQ ID NO: 5826 - DNA, 216 bp, Glycine max
  Clone ID: PAT_MRT3847_105269C.1
attttaagaaccagattttgcactatttttcttcaacgaaataggccaacgagtctgcttcattggggttgacgggccctcaccccctaatcattgcaccaaaaggattaggttctttcaggtctgccaaacatacatccctatattattcttcgaacgaatgaaacattaacaatactgcgggacacggcacacacctataaaagttggcccttt

SEQ ID NO: 5827 - DNA, 372 bp, Glycine max
  Clone ID: PAT_MRT3847_10526C.1
cgtaagcggggaattggggtcgagagaacaaagatacttccaaccatcgtctgattcctctcactgacacacactacgtttggggggaataggctcgtgcatgtgatcatgaatccactaacataatctgatcatccaagatttttattctatcatcttgccatggtagaacaccacatcccacttaaattaatgatgatcataacatggcctaaggatagctgtaccagtttctatggaaaatagtaaactacattgagaatgatattaagatgtgaagctgacattgtttctcccacaaaatcctaagggtgagtgcaaagacttgctgctgaggatgatatcgtttgcagtctattttacatatcccat

SEQ ID NO: 5828 - DNA, 352 bp, Glycine max
  Clone ID: PAT_MRT3847_105270C.1
cggacgcgtggtcggacgtttgggaaaaaaaaaaaaaaaaaaaaaaaaaaaaaaaaaaaaaaaaaaaaaaaaaaaaaaaaaaaaaaaaataaaaaaaaaaaaaaaaaaaaaaaaaaaaaaataaaaataaaaaaaaaaagagtgggggaatttatggttttaggcatattaatcgtattgtgggacatgcaaatttttttatctggagtaataaaataaaatgaatggacctatcttgattgccattagttgggaaaaatgaaatggttaatgaaacttaatctgtttcggtgcaattaactttttaatttgtgggggtaacgctaaaaagggaaaaggtccatattgcctt

SEQ ID NO: 5829 - DNA, 482 bp, Glycine max
  unsure (1)..(482): unsure at all n locations
  Clone ID: PAT_MRT3847_105271C.1
cccaatactcggcttccggctcacgacaagtacatagggatcgcttgttagncgccaagaagcagttcgaaggaattgaaaggaagaacctttccgtcgccgaagaacagctccaccacccccacatatcacaagttcatttgcttcttcacaccggtggatgtgaaagaggaggagttgcatgtgtttgtccgctacttgtagaacgagattgcgatgatgtctaggatggagaatgagcacatggttcatatgatggatcagaacaaagagaattttgttgtgcgctcgaccaatatgtttcacgactacgtgcgggcgatgaacgggaacagcgacaccttgagtggtctctgacgtgaggatggtattgtgaataccatctgtgagctttatcaggagtgtgattcatcgcggacctgccattttgaacaaatatatggagtatatgcaggtggttaaggttgtctctcatatcaacg

SEQ ID NO: 5830 - DNA, 471 bp, Glycine max
  Clone ID: PAT_MRT3847_105272C.1
gttgaatccttgcagatgcaaaatccattaatgctcaagtcttcatttaatcgtcctaatatatattatgaagatacaaagatctgttggatgatgcttatgctgatttatctaatacactcaaatctctgggagatgtctgtgcaatagtgtactgccttgaacgttcaatgtgtgatgacttgtcaactaatctatcccaaaatggcatttcatgtgctggtacttttatataattttactgttctttgctaattgtctacaactcagttgttacaatgttcatatattatgttaggtcttttcagcttatcatgcaggattgaataataaaatgcgaacttcggtgttggatgattggatatcttccaagataaaagttgttgttgctactgttgcttttgggtatgctttcccctttttatgtttgttttaagtagcatgcaattacatgttgctttgtggtggtgg

SEQ ID NO: 5831 - DNA, 229 bp, Glycine max
  unsure (1)..(229): unsure at all n locations
  Clone ID: PAT_MRT3847_105273C.1
tcgagctcgagccgaatcggctcgcgtgtaattattgactgctgttcaagtcccttgtgcgctacgccgctacatgatatagctatcctgtcattcatgattacttacctttcctctccttgttctcagttgtacgcaataggaagcgagcagttgcagttggatcctcattaaaatctaataagaaggcttcaagcttagntagataggcaagccttttttaaacaaa

SEQ ID NO: 5832 - DNA, 522 bp, Glycine max
  Clone ID: PAT_MRT3847_105274C.1
cacgcgtccgaattgggggctcgaggggcggggggggggggggggggctgaagaaagaacagaggagacgaggagcaaaccacacacaagtgtggtgtgtggtggtggcgcgccactcactgcccccattttctatcttcaatttctgcactcaacaatttcacaagtaacgtaaaaacccaacactttcaactcactctcctctcaaatgcacgatggaggaacaacagcggcaacaacaaaaaccaaagagtcctctccccattgactggagccggcagttccaaagtgactcgccgccgcgcgactacgacatcctgccggcctcctcctccgccgatcaggacgacctctccgctattcccgatcacaagctcagggagtcgattcagagcaagaagagaaccctcgacgttaccggcaagaatttgcccgacaaaggcaccaagcttcgcgctaccatcgaccgctaccagcaggaacttacccaccgggagcaacaaaagcgtcttcgtcaggaag

SEQ ID NO: 5833 - DNA, 412 bp, Glycine max
  Clone ID: PAT_MRT3847_105275C.1
ttaaaagttctgtttgtctagatagttatttattcaagagttttcataagggaccatgctaaggccctaaaattatttgcttatgaaatcaagttcatttatacacacaacatacataatgttattattgcatgcaaaactcatgtctattaatccaatattatgcttgaattcatatagtatggcagaacgtttttagtttctgagattctgttgatatatattgtcattcatgtgttgattccataaatctaaatgtttaatgctatatttcaccatttttttttgaatttatatagtacaactgttagtggttgtcaacatagtcatacatgaaagaaattgtcaaatcttagctttatgttagcatttacatttcttggcctgatgattctcatctctttgatcactg

SEQ ID NO: 5834 - DNA, 139 bp, Glycine max
  Clone ID: PAT_MRT3847_105276C.1
gctcagaaactcgattctttcctttgaaaaaatacctaatgaaacaaagttacttttgtgcattgttcaaaacatttcatgggttgggcatacttggctcgtaactagctcttaatgggggacaaagatggagctttgg

SEQ ID NO: 5835 - DNA, 472 bp, Glycine max
  Clone ID: PAT_MRT3847_105277C.1
cttaaacatacaacgttttcatttttcttttcccctcacaatatgtttactgtttagagtggtgtgatgtgataatcctagacataaaattatcgagggatgcattatcgtcgtatacaacaaatattgtgttttagaatttgttttctagaaaataaaattacgcccaggattgtcagttttgctaacaccagaaaattaatctgaatggtaaaaacagatgttttacatagacaaactgcctcatttgtttaaagatgaattatgactcatttaatttgtctcatttatttaaaatgctcgtgcttacatgtacagacactattaaatgttatttcacctatattgtataatattggtttgaatactaagattatttttattattttttacataagatttcaaatacgagtttcatagacaaggaaaataggtgttaaaaaagaaacttgtcattttaaataagtagtac

SEQ ID NO: 5836 - DNA, 373 bp, Glycine max
  Clone ID: PAT_MRT3847_105278C.1
acaagagagaatgagaataataacttcaacctttgttcatgtggtagcttattggtaccctttatttttttccctttgagtggtgcattgccactccaaacttaaaacttttcctaattcctagacctatgctctcctatctctaagtgaaacaaggttcatcctttcctttactagggggaaggaattatactcataaaaataatacaataaaaaatagagtgtctaatggaataatggagacgtatattaggtggaagtctaaaatataattttgaaaaactgctcagaacttctacactgttataatgaatgtctagcctcctatttataaaattgtagttggggttaattaaggagataatcacaagaa

SEQ ID NO: 5837 - DNA, 2016 bp, Glycine max
  Clone ID: PAT_MRT3847_105279C.1
cccacgcgttcgagccggcgcgtcttcttcgagttgtaacttctctcttcaaccctagcttagggtttatgctctaaaaccctccctttcaggtttattgggagataaaaatgctcgtattgtttgaaacacccgcgggttttgccctgtttaaagtgctggatgaaggcaagctttctaaagttgaggacttgtggaagaacttttccagtgcagatactgctagacaggtggtcaagttgaaagcattttctaaatttgagaacacttcagaagctctagaggcagctactttacttattgatggaaaagctagcaagggtctgcgcaagttcctgcgtgttcattgtgaaaatgaaacactaggtgtggcagattcaaagcttgggaatgtgatcaaggagaaattgaaaattgactgtattcacaacaatgcagttatggagttgatgagaggtgttagaaatcagttaactgaactcatatctggtctagctgttcaagacatggccccaatgagtttgggtttatctcacagcttatccagatacaaattgaagtttagtgcagagaaggtggataccatgattgtccaggctattggtttactagatgatcttgataaagagttgaatacctatgccatgagggttcgagaatggtatggttggcattttcctgagcttactaaaataatacaggataacatcctatatgccagggcagtcaagttgatgggtgatcgtgttaatgcagctagcctggatttctctgagattttgccagaggaagttgaggcagagctgaaggaggcatctgtgatatctatgggaactgaaattggtgagcttgatttggcaaatattcgagaactctgtgaccaggttttgtctctctcggaatacagggcgcaactctatgattatctgaagagtagaatgaacaccattgcacccaatttgactgcaatggttggggagcttgttggtgctcgcctcattgcccatggtggtagcttattaaatcttgcaaagcagcctggtagtactgtgcaaattcttggtgctgagaaggctctctttagggcactaaagactaagcatgctactcccaagtatggtcttatataccatgcttccttgattggtcaggcagctccaaagttcaaggggaaaatttcccggtcacttgcagcaaagacggcattggctattaggtgtgatgctcttggagatagccaagataacaccatgggattggagaacagagccaagcttgaagcacgattgaggaaccttgaaggcaaagagttaggtcgttttgctggttctgccaagggaaagcccaagatagaagcatacgacaaggaccgaaagaaaggagctggaggactgataaccccggccaagacatataatccttcagctgattcagttattgggcaaatggtcaattctgctatggatgaagatgcacaagagccttctgttgctgataaaaagaaagaaaagaaagaaaagaaggaaaagaagaaaaaggagaaaaatgaaggggatgaaactgtgcaagctgatggtgacgttggtgaggaaccagaaccagaagttgtgaaaaaggaaaagaagaagaaaaggaaggaaactgagagtgctgagttgcagaatgggaatgacgataatgcaggagaaaagaagaaaaagagaaagaagcatgccgagaaggaagaatctcctgaaatgccaagcaagaagaaaggcaaaaaaaagaaaagtggggactaaggtgaagtcatctgctaatcaatctggtgaatgacaaccatttttgtatactccgggcagctcagtagtttgtttggtataatttttgttttcatttttatgcaatttgtagctttatacatcctttattattatttaatgggcttgagtggataatttgatgcaatcatgtttatgaatggaagatggtggtgcgctaccctttgtaatgctatttttttacgcttcttttctg

SEQ ID NO: 5838 - DNA, 340 bp, Glycine max
  unsure (1)..(340): unsure at all n locations
  Clone ID: PAT_MRT3847_10527C.1
ggttggggggttttttnaagagaaaaagaaactaacaaatttttagtttaggaaaattttcattttgaacacaaatcaactacattgttaacaatggtgatgatacatatcaatgcacataactcttggggtcacactttattccatacataagggtttctaaggaaatttatgcagcctttttccttgagctgcatgttccttaaacattttttccccataaccctggacattttagtggaacaagggaaagaagggcaagactgtggccccaaccaaggagccaacaggggcgggggaggcaccgttttttgggccaggggcgggtgcaaaaaccttt

SEQ ID NO: 5839 - DNA, 375 bp, Glycine max
  Clone ID: PAT_MRT3847_105280C.1
accacgcgtgcagacacccgtacgggctggtgcgagaagactacatatggtgtgcgacggtaaatgcgaaggtgtgaccgcaagagacgcgatagcaatgccaagcctgaaggaattgctgaagaaagggttaggtttaggcatacatggcgttcaactccaagaagctggtcctatatctggctcctcttccacatggcacggcacacacgctccatatctcaacgtttgaaacttaacgacctggttatggaattcctctactctatgattagcttatactaccccaactccgttatggagacacacgtatgcgtcaatcgacacgtagtaatactcaataaaatagacctcaccgaccctaacgttatgcat

SEQ ID NO: 5840 - DNA, 435 bp, Glycine max
  unsure (1)..(435): unsure at all n locations
  Clone ID: PAT_MRT3847_105281C.1
cacgcgttctaccacgcgtgcgtacggctgcgagaagacgacagaaggggggaagtgaaatgggtgacgtggatttggcaagggggggagaactctntnaccannttttgtctctctcggaatacagggcgcaactctatgattatctgaagagtagaatgaacaccattgcacccaatttgactgcaatgggtggggagcttgttggtgctcgcctcattgcccatggtggtagcttattaaatcttgcaaagcagcctggtagtactgtgcaaattcttggtgctgagaaggctctctttagggcactgaagactaagcatgctactcccaagtatggtcttatataccatgcttccttggttggtcaggcagctccaaaggtcaaggggaaaatttctcgggcacttgctgcaaagacggcattagcttatt

SEQ ID NO: 5841 - DNA, 419 bp, Glycine max
  Clone ID: PAT_MRT3847_105282C.1
caagcttgagtgaattggatctcgcgggctcattagggttaggtataagactcaaagaatgcttaattacttatagatcactcaccaataaaatcttcacatcatcagcaaaaattgaactcatcttattttagaacgaggcacttccttatcaaggggaccaatgactccaattattgaattttaccgttctttctccactattttcaacatcttatgttatgacgtctttttggcataaaatcaatttctggtaattaatattttgacaaagttattttttacatatagaaatttacacaattggaagatcacaatttaaaaatgtgggcattatttcctattttagtcaatttataatttaattattttggcttctggttattttgctagatcttctgcaccaatcataggttaat

SEQ ID NO: 5842 - DNA, 694 bp, Glycine max
  unsure (1)..(694): unsure at all n locations
  Clone ID: PAT_MRT3847_105283C.1
gttgggtcgttntgctggttctgccaagggaaagcccaagatagaagcatatgacaaggaccgaaagaaaggagctgnaggactgataaccccagccaagacatataatccttcagcgnattcagttatcgggcaaatggttgattctgctattgatgaagatgcacaagagccttctgttgctgataaaaagaaagaaaagaaggacaagaagaaaaagaaggacaaaaaggaagaggatgcaactgtgcaagctgatggtgaggaaccagaacctgtagtagtgaaaaaagataagaagaagaaaaggaaggaaactgagagtgctgagttgcagaatgggaatgacgataatgcaggagagaagaagaaaaagagaaagaagcagggagagcaggaagaatctcctgaaatgccaagcaagaagaaaggcaaaaaaaagaaaagtgaggactaaagtgaagtcatctactaatcaatcctgtggtgaatgacaaccatttttgtatactcctggcagctcagtagtttgtttggtataatttttgttttcatttttatgcattttgtagctttatacatcctttattattatttaatgggattcgttccatctttcgggacttgagtggataatttgatgcaatcatgtttatgaatggaagatggtggtgcgctaccttttttgtaatgc

SEQ ID NO: 5843 - DNA, 808 bp, Glycine max
  Clone ID: PAT_MRT3847_105284C.1
aatctcacttctctcgtcgtcgccgcactggaccgcaccgcaccgcacgtaagcacccacggcgagcattcacgaattgaattgaattgagtttctttgtcagatgaagaagggagtccatccacagaagcaatggatatcctacgttacacaaacgggtaggttgatgcatgtgatgatgacaaagatacaccctgttgggaaagtttatcacttccgggctaagcgccaaatggccgagagtttaggacagattgctaagttcagacgccgctttgggctagaaaatccagagggcaatgaaaaatgacagcatagggaactttggttttttattttgtgcaaattggtggaaaataactgagaaattggtgatactctcaagcagggttttttttttgtagcatttaatatctgtagtttaactgcagaaatctttccttctttagttcatattaagtgatgtcttaagttagcagttgatatttgctggtgggtttattcaatgcaagttcaagctgaggttctttgttggcacttctggatattactgaaagagaaactttgatgttggggactaggacacactaaggatcaaattactaatttgaattgaataaccatatccagtgattgtttggtccaaagcataaatcttgtcctaaacaggttgcaaccgtcaacaatatgccctttttaatttgttcatacgttttttgtttgtgattggctctcttgtatctgcattattcttgtctgttcatatgttttagagaagttcaggaacataattatgcttcaacgcttt

SEQ ID NO: 5844 - DNA, 396 bp, Glycine max
  Clone ID: PAT_MRT3847_105285C.1
ccacgcgtccgtacggctgcgagaagacgacagaagggggccgccgcctcttcttcgagttgtaacctctctcttcaaccctaacttagggtttatgttctaaaacccttttcaggttgattggaggagataaaaatgctcgtgttgtttgaagcccctgcgggttttgccctgtttaaagtgctggatgaaggcaagctttctaaagttgaggacttgtggaagaacttttccagtgcagatactgctagacaggtggtcaagttgaaagcattttctaaatttgagaacacttcagaagctctagaggcagctactttacttattgatggaaaagctagcaagggtctgcgcaagttcctgcgtgttcattgtgaaaatgaaacactaggtgtg

SEQ ID NO: 5845 - DNA, 295 bp, Glycine max
  Clone ID: PAT_MRT3847_105286C.1
ttctctcagaccctctcaaaacatccaatcaatacccttcaagaacacaacacactttcatttatgataaacccacatctttatttaagctcaatttaattactagcgactcatatttctcaacatttagtgagtgaatttctttacttctactatccttgatatataaaaacgaaaattctatattacatattatcccttctagtttgatgattgttcgttctacataatcatcagatattactaatatttacatgcttcatttccaataagttctttaaactaattcattttt

SEQ ID NO: 5846 - DNA, 396 bp, Glycine max
  unsure (1)..(396): unsure at all n locations
  Clone ID: PAT_MRT3847_105287C.1
cctggcgcgtgcttttttttcttttagcttttgctataaagtttctttcctttttaacctctgcctgtctgaatgcgaagaccccggcgcaaaaaaggaaaaaaaaccggggcaaccacctggatttttaaaattccttttttcttctttaaaggcccgctctttccnaacgaggggccaggaaagaggccaaaatagcggttggtcatcaaccccgttaaaaaaaaaaaccgagatgggtggcgtttcctcannataaagaaagaaaggggatcggccccctccgggaaaattttgatcccccctggggagaaaaaaacaaaaaccaggggggggggcccccccccccgggggacacggccgggggccaggggacaaatttttttgggggaaaaa

SEQ ID NO: 5847 - DNA, 118 bp, Glycine max
  Clone ID: PAT_MRT3847_105288C.1
ggctcgagcgcaaacagactattttggcttttctaccataccgctagaaagagagacagagaaattactgggatcataatgagacacgataccttagcaagatgtcagtctcaatcag

SEQ ID NO: 5848 - DNA, 585 bp, Glycine max
  Clone ID: PAT_MRT3847_105289C.1
ccaagcagaaacatgatgaaaaagaatgatcatttcccctgctgaattccttttcattatcgtgaaggtgaccaagtttgcttaaagttaactatcactacaattaagtctgatataaactacaaaggattaattttatatgagaatattaattttattttttggaatttttgtttttacggtggtgttttaattttttggtggatatacagttgcaaaatttttggaagactagtagtgatgttttaaatttttgagagactaatgttgaccaaattttttggaaaactaatatgtgcaaaacgaaccttgagagtttatcaactttattctataatcatatagtattctatctttgcttatctactgcacaaaacaagtcctaattcaatgtataaaaacaaaatagataaagcttttagaacagctcgatcagattgtatttacggtgcaagtcttgtaatatcttatgatgtcctgcataactttaaaaatgatgatttgagtatttgactactctgattatatattttcagagcaaatacatgtgaattaaaataaacatattataaacactgttggtac

SEQ ID NO: 5849 - DNA, 370 bp, Glycine max
  Clone ID: PAT_MRT3847_10528C.1
tgggaatctctcaagataatatcaattacttttgattgtgtgggattgtcaatagggacactcaaacaatctacagtgggggatattctcttgggaatctctcaagattttgaaattgctggtaatactcttatgccagctttttctgttccacatgctactgccagatcttctgaaaatgcggaatcctatgcatgatctggaatttgggttatctttctcttgttcgcttgattaattcaataaaggaaattaggcatgaccctcttgaagagtatgctctgcctatttgaaaatttccacacctcttttaattgtccgaatgatatgtgaagtgagtgttattttatacctttagctcttctaatta

SEQ ID NO: 5850 - DNA, 2741 bp, Glycine max
  Clone ID: PAT_MRT3847_105290C.1
gtgactctggttctccaccctctggagatattgccggaaccaaggaaaatgctgagcaaatcaccgcacaagcccactgtgggtccgacgcttcccagaatgggcagcaagctgcgcacttcaccaggtttgccactgaaagattgcgtaatccagtttgcacccgaatacatccaagaagaaatgaaccttcctcctcgaacatagcaatgatttcagacaagaatgtttcgaggaatgttgctgattatatatttagagaaagtcaatgatatttcaacaatcctccatgcagtcatatgagatggatatttaaagatttgccggaaacttagtgctattgaagatgtcaattttgttgagaaatcttttgagggtggtgaccgatgcaatcctgctgaagactcaccttgctggaagggagcttctgctgctcgcttttctcattttgaaccttctgcagctctgtctcaagaatatgtacacaaaaaagaaagtagctttggttctgtcattaaggagcctcagaattatctgcttgatacagaaaacaatatgaaaaaatcatgtggaaattcaaatggctttcaaatgcatactggaattgtctatcaggacagaagttcagcaggttctccaaggagattttcagtaacaaaagtttgcacctgaatattgcacaaattgcccttctactgaatgatggtccttttcaacctgagacttgttgcgttgctggagatccacgtgagtttcaccagaatgcaagtttcaagaggccacaattaaccaagacagaaatgacaaaggcttgtaacatgactaaggatctaaagaggattcttagtgagaatttccatgatgatgatgaaggagcagagcctcagactgtattatataagaacctgtggcttgaggctgaagctgcactttgttccgtctattacaaggctcgctataatcaaataaagattgaaatggataaacattcataccaggaaaaagagatggagaagcaatctaaatctgaggttgttccgtctttgagccagagtcagagttttgcaactaaagtgcatcatccaaaccctgattcttctgctgcccttaaatttcgtgtcttggatgcaaccaatctggaggaactatcttgcttgaatatttccactgatatgaacaagcctaatgcaatgacacctgaaggaaaaggtggtcaaaacctggatagcttcatcaataattattttgttccctgctcagacgatgaggctgaaagaaatgatgagtcttctgttatggccagataccaagttctcaaagattcgggttgacaagtcatctatttgataatctaacttttgccttcaggtctggcaaaccacgtcagcagctttctgattccatttccccaagggttgatacagaaatgacaaaggctgtataacatgactaaggatctaaagaggattcttagtgagaatttccatggtgatgatgatgaaggagcggagccacggactgtattatataagaacctgtggcttattgcatgagctacactttgttctgtaaattatgggggacgcaataatcaaatgaagattgaaatggataaacattcttacaaggaaaaagtgatggagaagcaatctaaatctgaggtcattccgactttgagccagagtcagagttctgcaactaaagtgcattatccaaaccctgattcttctgcggaccttaaatttcctgtcttggatgttaccaatctagaggaactatctcgcttgaatatttccactgatatgaacaagtctaatgcaataacacctgaaggaagaggtcaaaacctggatagcttcatcgataattatcttgttccctgctcagtcaataagactgaaagaaatgatgagtcttctgttatgatggccagataccaagttctcaaagcccggattgatcagtcatccactgttactaccaatctggaggaaccattagacgtagcagacagctcatcacctagagggagggataatcaaaaccaagttaatctatgccaagattcccctattcctgaaaaaaacagtgctgaatatgaaacatctgttctggctaggtttcatattcttaaatcccgggatgaaggttcaagttctatttcttcagaagggaaacagttacatggagatgaatctgctgctgtcgaaggaatggatggcataacagttgcaacaaatgtatctgagggtaaaagtttggatgtccatgcaaatcctgttgtggtgcatctcaattcctacactgccgtggacaagtcaatcccaaaggagtttcatctggattcggaggacaatcaagaaactcagcctagcggaacctgtgagtttcagcctcctacttactactccgatggcttcgcgtcagactgggaacatgtggagaaaagcttgtagaacgattttgaaaccttttaagagtttggttatatggttcaataaatgtttatgttttgagcatatgactctgaataaatgcttatgggttagatttattatctttatcagacatgcatattgcagaatttggtctttttcagtctttatcctgtttgatataacaatgtcagactttatttttatctaatgtgtgcttgctcacttgcacatgttgataaataagtgcaagtgaaagaaaaaataagttgttaaattgccaaagaacagaccatttagttttcc

SEQ ID NO: 5851 - DNA, 479 bp, Glycine max
  Clone ID: PAT_MRT3847_105291C.1
cagtcttgtaaaattcaacatcactggccagcattttgaaaatcgcataagcaagtttccctgctttcttgggtacaaatacctgaaatccacaaagattcatttggattggagccttgtgaattacaacagaataaagtcttcaaatggacataatgatcgatttaaagagaggtaaaagatggctcgatcaaacctatggagacaactttataatcaggttctataccagtttggtaatagggctgaaaatgataatatcccagtagaaatacaaaattatcaactaccatgttccaatttccaataagctacatgatgtccattgactgatggctgcttacattcaaatcttgatttcttcatcaaaagaaaaatgcatagtgctttttcttttcccaagctacattattcattaacaagtcacttaaggaaatgcaaatagagtataaatgtcatacaccatgaaacaaagcttt

SEQ ID NO: 5852 - DNA, 379 bp, Glycine max
  Clone ID: PAT_MRT3847_105292C.1
gcaccaggattacttcattaatgctaattaaccatggcaacaccagcattgtcttcaattgtagaaccagagcagcaacacgcagaaccagaagctgttgctgttccaagcactagtgcatggaaatcttcaggatccgtgggtccattctttgccgtcattaccgtgcttataattctgtctgttctttcgtgctatttgggtcgcaagtggaaccgaaggccgaaaaccccgttggagagtatcagaggaaggggcttttttgggtggctaaagcgcgtgtttagagaacgtattggcaaagatattgaagttggaggcgttggggcgaaggtgatggtttgtgatgaccatgaggaaattgatcattgtaaggtca

SEQ ID NO: 5853 - DNA, 295 bp, Glycine max
  Clone ID: PAT_MRT3847_105293C.1
ggttacagggccaatgaaatgagatgaaattaaatttcaacaaattatgaatgccctttttttgactagcattcatttccatttaggtacaacactaacccaattcatcaacgtatagcatgacaaacaataacaccactccttactagtcaaagagattaactcggattgcttttttttcattccaaatccattacaattcaactcaacaaacttaacgtaaacaactacacattttgttcacctttaaaatattatcataaacagcagcagcatttgccttggcagcaaaaag

SEQ ID NO: 5854 - DNA, 480 bp, Glycine max
  Clone ID: PAT_MRT3847_105294C.1
ggctcgagctctctttctctctctaaatccttagagagaaccctcacagtcacagtgtgaaagcggcaaggcctggcctggcttggcttggctaccattttattctgattctgtttttgctacaatggaggagaataacaactacaacaacaacacgctgcttgtgcttccttgttcttcttccacaacatcaatgacccttttgcccttccccccaaacaggtacctgttcacctcctctttgtaaatccaacctcgtttccctcctttcgtagatgagacatgggcatgagcaatacaatgtagctctgtctcctcttccattgcgtccaaaaaggcagacaggatggagccaggcataatccatatttatatatttataacataatcttataaatactaccgcctctatatattctcttttcatttatattaattttgtttctctttttgccttttgatgtcatcaaaagctgctgc

SEQ ID NO: 5855 - DNA, 359 bp, Glycine max
  Clone ID: PAT_MRT3847_105295C.1
acggtgctaaaagagaccgaaggggaggatgacactctaagcattgaaactgctctctctcaccccctttatattgcaacagcggaactcaacaactcagtttctttaaatagttgatatctggaactgtacgaacagaagacatggcaaatctgccgaaagaaaaccatcgagaaacaattatcacaccatccatccatagaagagaggacgatcaagctgccagcactgctatgggctttaaagattaattggaaaagctatctgtaaaagtcaaggatcatgcagaaacatacccttatgtagggcttcttatctcgatgcatgtggaggctttgctctctggactacctatagat

SEQ ID NO: 5856 - DNA, 400 bp, Glycine max
  Clone ID: PAT_MRT3847_105296C.1
tttctttttttttttatttgggaaaatatcaatatattttggatggactaaacaccgtactgatacagcatagatgttgccaccactgcattggggaaatatattgggggaggggtagtagataaacaaagcctatgacggatgcatgtctttaccccctttttgctactcgcttgacatagacgacacggtaaagtgacaaggctcatcgctgtagtttttgcgtatatatccaacacaccacatttggtacatgcatggaatttttcataggctactgggacttttgctgtggcctacacatgtgagggcaactacttcattgacgggtgtgttaccccttctattattgaatgaggagggacacacaccatgatatttggcgcaccaagatttattg

SEQ ID NO: 5857 - DNA, 433 bp, Glycine max
  Clone ID: PAT_MRT3847_105297C.1
agtccaggcgtcagacggctacgaaaaggggacagaaggggaattcacaactgagtttggtgatttaaatgactagaaacaatgtgattaaaatgaacggccttggtatcctcggtgctacgaatttgggaacattgcaattgcatgcgtacgatatgttccctctccaaaatgacactagctaaggagcccgtactccgaatgtgaaatgcgcaagttggacgcatgctgtgtaagcacataatatcattggctttgagaccattcctgaagagtgcgtagacgcatcagaggaatacatccattgtgaacactagatatcagactccaaaacagttatccaacacgcttacctttatgtcagagacctcgatctccatctcaaagatacatttgtgttcactatagatggcagcgtactctctaatattcc

SEQ ID NO: 5858 - DNA, 372 bp, Glycine max
  Clone ID: PAT_MRT3847_105298C.1
cataactagaggcacattgccttctagggtaacgactaacaaacaaacactataaactctccgtgccctccatcccttaaagagatctagcttatgaatcactgtcaaaagcaaacatactcacattgtatcaatctaactgataccacaataaaaaaaggcacgaaaacatcaaaggatattccaaccctccacctcaacaccaccgccaaaagccctttactcagcttgagaactctgcagtcatatcctggcctcattactcaacccgtcgcgtcgctcaacaaggttccataccggcacatagcatgtgctcaaaactataacattgagaaagagaatgcctatcaattgaaaaatctagaagaggag

SEQ ID NO: 5859 - DNA, 170 bp, Glycine max
  Clone ID: PAT_MRT3847_105299C.1
tgagacactagaatgcttgaagctgctaattgaaaagaatgaatgtttatttaacctcctcctcagggggcaggggattcttcaaacatggggtgaccaaatattctataacactttctttgtcattgatactggatttcattgctggattattcatataaagatgtttt

SEQ ID NO: 5860 - DNA, 331 bp, Glycine max
  Clone ID: PAT_MRT3847_10529C.1
cacccacaacatattttggaagttagatcatggagaagaaaatacatcaattataaatacccatccttgaatgcaactccctacaaggaggggaggaattcatactttaagaatatttattcttgaccaaccaattaaaaaccctcttttgcttaccaatggaagccaacggaaacaccaatcaccatttggccaaatacacaaactgaagtgctctccaaaaaagaggccctagaaaaattttaaattgatattctttggagagaacccaaaaagttaatggccttatgctttctttaacaagacgcccaagaatcacaagctgctggtt

SEQ ID NO: 5861 - DNA, 1204 bp, Glycine max
  Clone ID: PAT_MRT3847_1052C.1
aaaaaaaattacttttattacccgcttcgtgaaaaaagtgtaatctttgtcttctgaattctgaaataactattaccaaccatgttgaaaagcaacgatttcgcacaccagagtagggcagtactgaagcattgaaaaagcgagcaatgatcaagctcgcaaacttgctgacaaggtataacaagatttggtatgcatataaataaagtaaaaacatgagtaaatcgaatgacaaactgctcttgaatttcacatatattgaactgctgatgctaatcaacctgcgccaactgtcacacatttaacaggacaaaatggggtaaagaaaaaggaatcgatgatttaacatcactcatcataggatcaagtacaaaaacatgacagcgttaccatggattagacctactccaataaatttcaaattctcagctgctccaaactacgcatagtctctgattctggtggaatgttctcagccttgtccatctcctgaattttaacgggcagtttgtcttgctggccagaggcaccagcagttggtagatctttttgttgtacagcagcaggttcattctttttttgaaggtggagcagcatatacaggaacagcttgccgaatagtgactggaggagcaactcgtactggaggagcccgtatagcaggatggggcactgaggcaggtggtggacaaggtggtgtggcaaatgcaggtacaactgtccttatagttaccggaggtgcaatccgctggcaagatggtctcatttgtcgaatgggaacataaggtgctgctcctgctgcacggaatttcagtggacgagttgctcggctttctagagaacaagattgtggtggcagggtggaattgtcactggtcactgccactgctgcctgtggatgcctgcttcgaggactttcatttgttgttgttgttgccaatgaaggcttacttcgaggtgctgtcttctggcaaattaggggaaggatctttgatgaagtggctgggggcggttgagaactgattggccttggattttgaatctgaaacctttcatgaaatggaaggggagcatttggattagacatagtcatcttttccttcaaacggtagttcagtaaagcccgcgctattgtaatctgttccacttcgtcattgttctctggttcagttgaggagcttgcagtctcttttgccaattgttt

SEQ ID NO: 5862 - DNA, 498 bp, Glycine max
  Clone ID: PAT_MRT3847_105300C.1
aatatatatgtattcaaaatgtggatatgttgctgatgcttttcaagtttttgacaacatgccggagaggaatgtggtttcttgggaatccatgatattggcttatgcaaggaatgggcatgctagagaggctctgaagctcatgcatagaatgcaagctgaaggttttgtggtggatgattatatccatacaacagttattagtgcatgtggaggcgttgagcatggagacattcatcaggatagtgagtattcttcacattacttgcattcctagtaatcttctacaagataggagcatcaatgaacattgtagaacaagtgaatgtactaattatagcagctaaaggataatgtataggcagtagatgaggatgatacatagtgattttttgtaacaatgtgcccccaaatgctagtaatggcctttttttgttttcggccaaaacccttgatgttaaagatttaacatgatgagaaaatgaaaatgaaaaagga

SEQ ID NO: 5863 - DNA, 399 bp, Glycine max
  Clone ID: PAT_MRT3847_105301C.1
cacgccccatgcgcccgtaattaagctcgatattcagctggaggaatatactaacattgcaccactctctagggagacccgaatcgtagtagctatgaggtgctacacggagcttgagcctcttaccacctaagaaaagcgaatcatatgctaagattacaaagcctacaatataatacttgatgatcgtctggagtgtgctaacttcctatctgatatatttaatgaagtaatgaatgaggaccccccatctgtgtttaattataaagcaaacttttgctagattttttttctatcgacagacatagtagcggatattaaaagtccactgccacaggaagcgagcctgtgacctactttactttatggaagttaattaaccatctaacgcactatata

SEQ ID NO: 5864 - DNA, 430 bp, Glycine max
  Clone ID: PAT_MRT3847_105302C.1
gcctttgccctctattgctttcttttccacacttcttactccatactacactttgaagtttgaaccactaccactaccttgtacaacttcttgctttctttcttattttctttctttctttcttttgtagatagccatgaatttccataaccccaatacttctcttcacctaagccaacacgatgatgagaaccatctcaacctagatcttcttcttgagccatcttcttcttcttcatcttcaccttcacctatttgttccatggagccacggatattctcatgcaactattgccagagaaagttctatagctctcaagcactagggggtcaccaaaatgcccacaagcttgaaaggacactggccaagaagagcagggaactgagtttgaacatgcaatcttatgcagcagcggagcaaagatcaaac

SEQ ID NO: 5865 - DNA, 178 bp, Glycine max
  unsure (1)..(178): unsure at all n locations
  Clone ID: PAT_MRT3847_105303C.1
antttgtagaacaagtcgctactttattttgaagggaagactcagccatagccaagatatcttgagcncaatgtaacactccaaggactacatntcataatagtctttgcataaggttggatataaattgactaagcttgtggacattgaagcttaagttagacctagtattagtaac

SEQ ID NO: 5866 - DNA, 323 bp, Glycine max
  Clone ID: PAT_MRT3847_105304C.1
acgttacggttcattcgacattgaccaattctatttccttttctcaaaacccaatttgcttctggtgcagtttatcactatccttcatcatccccaaatactcttgacctcttctccttcacactccttcttcatattcctcttcatctgtcataactcctacgcctccacttactttcttcaaaaccacccaacactctcactcacctaaccttcttcgacttcacgttttttcccttcctaaccccgacgcctattaacccaccaacaacttccctttaacatctcatcctcatcaaaacttaagccattcttaaacttat

SEQ ID NO: 5867 - DNA, 304 bp, Glycine max
  unsure (1)..(304): unsure at all n locations
  Clone ID: PAT_MRT3847_105305C.1
caaaaacaaanaaattaaaaaacccttatccaacacaaccatcatgggcacctatgatgtgcggcaatcaacattcactgttcaaactgctctgaagcagctcaatgagttctgcctcaagaccggtggcgcctgcaaaggtctaactaacatgcgccacaccgactaaagtgctcctcagagcatttggtatggccctgaccgtcccaagtacttgggtccattctccgagcaaattccatcataccttaccagagaattccctggtgactacagatgggacactgcttgattatcagctgac

SEQ ID NO: 5868 - DNA, 458 bp, Glycine max
  Clone ID: PAT_MRT3847_105306C.1
ggctcgagggcgactctcttatttacaaaattatggggtggtggacatgcgtatggcgcctaccgactgtgacatgctgggattgtcggttttgacaccctattatacagaagaagagggatggtccttgcctgaattggatacacagaatgaggatgggggatcattactgttctactagctacagatttacctagatgaatggcacaattttcggggacgagggaaacatactgaggaggatagtacagggcgtgaatttcatgagatatgaggagatcgtcgagctctgccagcatatagagggcaggcattgaccacaacggaaagaggtctgaggtattatataaaagctggaccactccagggtttaggtgatatggccgaagattaagagtcgatgggaggctgtagcgccctgggaatctcatatgacatttcaatgggggaaaggtgat

SEQ ID NO: 5869 - DNA, 398 bp, Glycine max
  Clone ID: PAT_MRT3847_105307C.1
tttttcatgcagggcataactttcgtatctatactatctctaagcccacaatgctctacgcaactgtgcacttgaacggaagcccacaaggacctttactgtccgcctcatccttctcttgagccgcagcagaaggcgactgctgttgcagtggtgcagcagccgtagtaaacttcccaccaccagcagcagcagtgccattctgcccattactcactcctccctcccctcccgtcttcgtcgtctcctcttgcttcccagcgacaccgccatctagtcagtggaagctgaccttactcaccgcctcataaaactgctttccctgcgcagtagcgagctcaagctctttcgccgaaggctgacgagatccgtcaccaccagagaacgttccagcgccc

SEQ ID NO: 5870 - DNA, 786 bp, Glycine max
  Clone ID: PAT_MRT3847_105308C.1
ggtcgcgtgataccatttaatttcacagcgattaattatttatagttaagtgtggagtgcagtgcaggtcaaggcctgagattcggttctttacttgttgggttgttctgatcttctctcatagcaatcaaatcacactcccatcttctcatctcgtaaaccctaaaccccgttttcagtgacatcgagatcgatcgaacatggatgaggagtacgatgtgatcgtgttgggcacgggtctcaaggagtgcattctcagcggtcttctctccgtcgatggcctcaaggttctgcacatggacaggaatgactattacggaggagaatccacttcgctcaatcttattcagctttggaagagattcaggggagatgacaagcctcctccacatttgggagctagcagggactataacatcgatatgaaccctaagtttattatggctaatggcaatttggtgcgggttctcatacatactgatgttactaagtatctctctttcaaagctgtggatgggagctttgtgtttaataaaggaaaggttcataaggtgcccgcaaatgacatggaggccttgaagtctccacttatggggctatttgaaaaacgccgagcacgcaagtttttcatttatgtgcaaaattacaatgagagtgatcccaagacccatgaagggatggacttgacaagagtgactactaaagagttgatagcaaaatacggtcttgatgataacactatagacttcattggtcatgctttggcgcttcataatgatgatcgct

SEQ ID NO: 5871 - DNA, 1356 bp, Glycine max
  Clone ID: PAT_MRT3847_105309C.1
ctttcaaacataagggaggtgattctgtgttttttttaataggatctttgaggccaaaccccatctcaatcaaccctttatttctctcttgctaccttgaattttctctagtctttctgtgcaaaacttgcagcccttattcttgtagaattgatgtctggtttgtacaatcagatctcctcaccttcaacagcaagggccaattcaccaaacataaacatgagaagcaattttgaggttgaaagtcagtacttaacggagctgctagcagaacaccagaagcttggacctttcatgcaagtcctacccttgtgtaccaggctcttaaatcaagagattttaagggtttctggaaagaatggattgatgcagaaccaagggcttagtgactatgacagagtgcagtttggaagccccaaacccaatcttatgccttctttagacatacaacctaattttacaggctggaacagcttgtcacatgaagggttagcaggagtacaaggactaaacgttgattggcaaacatcaccaggtgtcccaagctctcacattgtgaagaggacattgcgcttggatattgctaatgatagctatccaaatttcaatttagttggacggcttcttggccctaggggcaattcactgaagcgagtggaggctaccacaggttgccgtgtatttatcagagggaaaggttcaattaaagacttagataaggaagaaatgctacgaggaaggcctggctatgagcacctgaatgatccgcttcacattataattgaagctgaactacctaccagtgttgctgatgtaagattgatgcaagcacaagaaatcatacaagagctacttaaaccagtggatgagtcacaggacctttacaaaaggcaacaactaagagaacttgctatgcttaattccaacttcagagaagagagccctcaactgagtggtagtgtttctccattcacttctaatgaaataaaacgagtcaaaactgatcaatagtgattatatgttgagaattgttgcattgcttgaatgcttcctgtaactaaattttgtaaagctgcaatgaaaagaccttcctgatttgatgctgctgatttggagaacaaaaataaaggggagaaaaacatattcattgccacaatgtcactagacaagaaaaaacattaaactatattttgatctatttatcactctatttgtaatgcgtatcaatatgatgttgttgggatttttattatttataaactgtttatttatagtattggaaagatgtgtttccatatcagatgaaaaagaaaaggctgaagctgagaaaatactgcaaataaagaaagcggaagg

SEQ ID NO: 5872 - DNA, 460 bp, Glycine max
  Clone ID: PAT_MRT3847_10530C.1
gcagaacccttccactgtggtgactctgcgatgggtactgcctctaccttctttgctattctgcttatggtgtggtagaaccctgtaattgtggtgactctgcgttagatctgatgcctgaattgaacgattatttggtttaattgttctgctggagctttcttaagagggtttggggttttaacgccaaagccaaaacaggagaaagaacatcatctcttcgctaacttgaactagcatggatgtttgctactgtgcccccatttttttgtttccattttgcttcatgactctatatttgaatctaggctttatatttggtccatggtcgtgcttttttttttgcttgccatttttcttttatgaaatggccattggttcttatctatgtttctcatattcgttctacgtccttgtatatggtttttcttgttgtaaatgttcttgggtatataagttt

SEQ ID NO: 5873 - DNA, 430 bp, Glycine max
  Clone ID: PAT_MRT3847_105310C.1
ttttttttttttttttttttttttttttttttttttttttattttgattttttttttttttttattttttgtttttatatttttattattttttataattattaattttttgttacaaataaagcataaaaaataaatttacaattttgttttaaaaaaaaaaaaaaggatattttaagtgagaggaggagaattagtagcctaggatgaagacttaggaaacttgagaaacctatacatctttttagtaaagaaaacaggggtaatgttgggaaacatactaacatttgcaaaggagaaacaccaagtaatttgaacatctactaattgtttcacagagccaataccatatgacttgaaataataatacaattcttgttatcacgtgcaaaatacctaggcaaaataagaacctaaataactagatact

SEQ ID NO: 5874 - DNA, 316 bp, Glycine max
  Clone ID: PAT_MRT3847_105311C.1
aagagcttcaatggcggtttctctctctgttactcctcttggggtctccaattcttcgtcttctctatcttccaagccaaagtttccatctttgggctttctctctggcaccaacaccttgggggttaatggcccaaaacctttgacctcaacacctgtggttcattttgctccaaaaccgtgggatttttaacctgatcccttaaacccacctccaaaaacctttgttgatgactctgaccccaccacctttgaggttggtgacctggggactcctagcccttcggcaattaccattgtgtggcaattcaaatcc

SEQ ID NO: 5875 - DNA, 739 bp, Glycine max
  unsure (1)..(739): unsure at all n locations
  Clone ID: PAT_MRT3847_105312C.1
cgagacaaagcaccatgtcatttggcagcatcaaaagactgcaagtcctggcatggatccaaagttgcaaccacaaaaatgtggaaattgcatcacgccttaccatatctggctactaatcaaagtaatcagatgatacaaacgtgcttacattaatgccaaattacaaattatgtcggtactaatcagagagcagcgaaatcctttttcaattccaccaccacatattctaattttcaaaaattttctctcaaataaaatgcaattgacacatcgtttacatgacaagtgtaacttcctattttattatatatctattgaaaaaagagaggggtatataaagaagagacgggaaaaagatgatggagtagtgggcgaaaatgatgatgttgtgtaaactatcttccctgaacaaggccactgaatacctggctgttcccagcaagagtggcttcccactcaacagaagacaacagggtttgtgagagggaaatcacaacttgtttcatatcagggcgtaatacaggatcctgatccacacattgctttgccagcatggccatcttatatacacaatcatggggatacatatcnnncataataggatcaacgaggtttctcgtgcttgacatgctcacggtatcagntgagttcctaagaactgccaacataatagntgccaatgatcgtttttcanngccttgtgtttgaataatggcttccttccctgatataatct

SEQ ID NO: 5876 - DNA, 630 bp, Glycine max
  Clone ID: PAT_MRT3847_105314C.1
tatatatatatttcacatgtccaataaagtggtaaaaagaaaaacaaagatccttgatgtgccatgaccatttttgtccaaataaactactaggagcatgcttggataatcgccgcacccttcccaaaagtacattccaaataaaagataatttttcttcaaaaatatgtttagcactcaaaagtacgttcagaacgattatccaaacatgcaccaaatttacttactgtatgtttttttctccacatctaattatttcacatcacattttgtttacaccaacctctacattctacattggaaaagaacctcctctttagttctttccccctctttctctctctcttttgtcatctccaaccaaacatttttctattttcccctacaccagtcccttgaaagaaagttgtctttcccatcttttgggactataaggaataaaagtgactattttagtaccctcaggcaagggtaactcatatattgaagggattttctcatgccaaacaaaatcattctcatgtacaaactttctaagcacttcagaagcatcttgaatttgcttttggtaaatagatttccaaggatcttcccctggtatcttctttttcaccttattcaacacagaac

SEQ ID NO: 5877 - DNA, 180 bp, Glycine max
  unsure (1)..(180): unsure at all n locations
  Clone ID: PAT_MRT3847_105315C.1
tcacacgcccgcgggtacttaacccggacccatggaccgacccgngggcggtcttaagggctccggtgtgttcttatccctcaaattaaatataagcggaatgtgagtcatcttcagatttcccgcttattttactactgcacatacaaattctggactaaacaccagaaaaatctttct

SEQ ID NO: 5878 - DNA, 256 bp, Glycine max
  Clone ID: PAT_MRT3847_105316C.1
tacggctgcgagaagcgacagaagggcacttacagtggtaaacttcctgactttttcctttaatttgtatatattcgatggacatctgttcttgaatctcactttctgatctgctctcttggtctgcatgatctgattgattttatatataggcttcgagggttgggacatgagtggatacgaacatacccaccacatccaatttgtattctgtcaatggatgtgggggggggggatgcttaggaaccattttctt

SEQ ID NO: 5879 - DNA, 1755 bp, Glycine max
  Clone ID: PAT_MRT3847_105317C.1
gactgccgacagagggaaaacggctgcgagacagacgacagaaggggacagaacaaaactgcaatagagaaagaggcagatagaaaaaaagagcgacttttgagttcaaaagatgactaacttcccattgatcaacttggagaagctcagtggtgaggaaagaaacgataccatggaaaaaattaaagatgcttgtgaaaactggggattctttgagctggtgaatcatggcattcctcatgacatattggacactgtggagaggttgaccaaagagcactacaggaaatgcatggaagagaggttcaaggaattagtggcaagcaaaggtctagatgctgtccaaactgaggtcaaggatatggactgggagagcaccttccacttgcgtcacctccctgaatcaaacatctcagagatccctgatctcattgatgagtacaggaaggtgatgaaggattttgctttgaggttagagaaactagcagagcagctgctggacttgttgtgtgagaatcttggcctagagaaagggtacctcaagaaggctttctatggatcaagaggaccaacttttggcaccaaggttgccaactaccctccatgccccaacccagagctggtgaagggtcttcgtccccacactgatgccggtggaattatccttctcttccaggatgacaaggtcagtggactgcagcttctcaaagatggccagtgggttgatgtgcctcctatgcgccactccattgttgttaacattggtgatcagcttgaggttatcaccaatggtaagtacaagagtgtggagcaccgtgtgatagcacaaacagatgggaccagaatgtccattgcctcattctataaccctggcagtgatgctgtcatctaccctgctccagaattgttggagaaagaggcagaagagaaaaaccagctctacccaaaatttgtgtttgaagactacatgaagctatatgctaagttgaagttccaggccaaggagccaagatttgaagcctttaaagcatcaaattttggtccaattgcaactgtttaaatatttttactatagtctaccacatgcttgacttgggaagagtgtaacaaagtacctgatgcatgtgtttactaaaagaatatatgtatgtgtgtttttgttttcaactttggttttatgtaataaattgattttgagtttgtaattgatcattgaagtaattttatgtaatttttactttagataaaaaaaaaaacttacaataaattttattattttagaataattataaaaaaaaaaaaaaagaaaaaaaagccccgtgcctcagcccatacccctgggagggatgctgtcatctaccctgctccagaattgttggagaaagaggcagaggagaaaagccagctctaccctaaatttgtgtttgaagactacatgaagctctatgctaagttgaagttccaggccaaggagccaagatttgaagcctttaaagcatcaaattttggtccaattgcaactgcttaaatatttttactatacaccatgtttgctttgggaggagtgtaacaagtacctgatgcgcatgtgtttagtaaaagaatataatagcattactactattatatttgttatgtgtctatttgatttcacatccattctattaagaaattaattttgagtttagaatgaaaaaaaaaaaaaaaactgcaaaaaaaaaaaaaaaaaaaaaaaaaaaaaaaggggggggcccc

SEQ ID NO: 5880 - DNA, 402 bp, Glycine max
  unsure (1)..(402): unsure at all n locations
  Clone ID: PAT_MRT3847_105318C.1
ggttttaaaagtaaataaaggtatacagatacaactaaaaaaatccaacatcacattgttttcagtggtatacatatttttagaaaagaatgatggttcaattatcatgtatgaagaaaactaagcacatatgtgagtaaggccagatattatgcatttgtagaaaacttaccaacagataaaaacaatgggaaataacacgtccatatgttacaatgctccaacatcaacaaccaaaaaatttcactaagaattgcttctagtacagtgtaaaaactatcaccctacaaaagccaattgatggtaatgttgccacaccctgtgaaccattgggaactgaacccaaagcaataaagagcatngagatagtggtgtctgctagagtcataactcctgaccttt

SEQ ID NO: 5881 - DNA, 227 bp, Glycine max
  Clone ID: PAT_MRT3847_105319C.1
ccgctcatactttcccccgcaaggcctttcccataggggaggattaatataaacctggggcttttcctactaccactccaatttgatcctacttcctcaattccccaaaaacaatttcaaaacccaaacataacttaaccatttccatttccctaaacctcttttttaccattcaaaactccaacacccaaaactatccctctttccaaacatctattcttccttcc

SEQ ID NO: 5882 - DNA, 426 bp, Glycine max
  Clone ID: PAT_MRT3847_10531C.1
atatgacactggagtcatgtgtgattttgcaaattaaattacacaatcacagccgtacatcacacatgagttgggactcttgcatcttacaagcagaggataacatgaggccatgacgcgacacatgcaccatgtaataattattattcaacatctttacatacaacatacaaagactttagattttaaattgaagaaaggagataagcggatcatcttactgaaatgagacctgaacccacaaccctcggcttgagtcttgatgttggtggtggtcccaactcgattaagcatgaaccgtgagattgaatcactaggacttgaaaggaatgggcatgattactacctgctggcagagtgctgaaagatctgcaacgatgaatggtcccacccacaagatccagtgttcatcccaaccaaggtcct

SEQ ID NO: 5883 - DNA, 1412 bp, Glycine max
  Clone ID: PAT_MRT3847_105320C.1
cattctaaactcaaaattaatttcttaatagaatggatgtgaaatcaaatagacacataacaaatataatagtagtaatgctattatattcttttactaaacacatgcgcatcaggtacttgttacactcctcccaaagcaaacatggtgtatagtaaaaatatttaagcagttgcaattggaccaaaatttgatgctttaaaggcttcaaatcttggctccttggcctggaacttcaacttagcatagagcttcatgtagtcttcaaacacaaatttagggtagagctggcttttctcctctgcctctttctccaacaattctggagcagggtagatgacagcatcactgccagggttatagaatgaggctatggacattctggtcccatcagtttgtgctatcacacggtgctccacactcctgtacttaccattggtgataacctcaagctgatcaccaatgttaacaacaatggagtggcgcattgggggcacatcaacccactggccatctttgagaagctgtaggccactgaccttgtcatcctggaagagaaggacaatcccaccggcatcggtgtggggacgaagacccttcactaggtctgggttggggcatggagggtagttggcaaccttggggccaaaagttggtctcttgatccatagaaagccttcttgaggtaccctttctctaggccaagattctcacacaacaagtccagcagctgctctgctagtttctctaacctcaaagcaaaatccttcatcactttcctgcaccattacctcatcttagaatcttgtaaaagagatatatacagctgcttgtaagaaataatgttcaatcttaaggacttgttcttgtatccattatgtcaagtcaaaatcaaggtgcaaattctgtatctgttttttgggactttgtgctaacttgtatttgtaaaatacttcatgtcatccacatgcaatactgtgtaatgttattataaatgttttgttttattgtaacctgtactcatcaatgagatcagggatctctgagatgtttgattcagggaggtgacgcaagtggaaggtgctctcccagtccatatccttgacctcagtttggacagcatctagacctttgcttgccactaattccttgaacctctcttccatgcatttcctgtagtgctctttggtcaacctctccacagtgtccaatatgtcatgaggaatgccatgattcaccagctcaaagaatccccagttttcacaagcatctttaattttttccatggtatcgtttctttcctcaccactgagcttctccaagttgatcaatgggaagttagtcatcttttgaactcaaaagtcgctctttttttctatctgcctctttctctattgcagcccacgcgtccg

SEQ ID NO: 5884 - DNA, 846 bp, Glycine max
  Clone ID: PAT_MRT3847_105321C.1
tttcggatttcccgtttcgttccacgcgcccggataattgcagttctgagaatccatttcctgggggtccttgtggctagccatgccaccttgattgcgctttaaaacatgatggttcgggaattgccaaggatggtgagcatcccaagcttgatggagggttctactgtgtctcttgcgggaaagtaaatgatttacttggatgctggagaaaacaactgatggtagcaaaggatactagacgcgtagatatactctgttatcgtgtctccttaagccaaagacttttacaaggaactgaagtgtatgaagaactttataaaattgttgatgaagcagtgaagaaacttgaacctgaagtgggtccactcattggctcaccggtgaagattggaaggggaattgtgaacaggctttcttctggacctgaggttcagaaactctgtggttttgctctggaatcacttgattcactactttcgaaaagaattttgccttcgtcacccaagccaacaactcaagatgcacatttgctggctccaaatatggtgaggtttgaagacgtcactgccacaaccctcactattattttgggttctgaagaaccctctggtgaaattattgctggttacaccttgtggcatcgcaaagttgatgatgtggactaccccaccgacccaacttgcacctcgctcctaccaaatagagggttccgtgtctcgggtctaattccaggcacagaatacagtttcaaagttgtttccaatgatttgagggagtcaggtatgtggcgaagttcaattttaacagagcatggcgaggaaagagtccctaattgctctgcac

SEQ ID NO: 5885 - DNA, 494 bp, Glycine max
  Clone ID: PAT_MRT3847_105322C.1
tacggctgcgagaagacgacagaagggggaataaaaaatggctctgaatccaagatcacttcggttcttaaacgctgtccacagtttaaattgttgaaacatgctggatctttaaactacaagagattgcttccatttatattggataccatgaaagatgattcttgcaattcttgtcctcagcaacaatcagggttgcaggcttgtgatttaaacaatggtagttcaagcccaaaatctcaaattcctgaatttcagtcatctcatgattcatgcaaagtgattcaactgcaagatgaacaggttgtattaaatggactctgcaagccagaaagctccactgatccatcaatttctgttcatggaatagacttaccaatcacaaccttggcacctatgattaatgaagttaccaccagagaggctacacctgactcgtccaagtcattatcagttttctctgaagtaaaaggaaacaattctttcctgatgtc

SEQ ID NO: 5886 - DNA, 3462 bp, Glycine max
  Clone ID: PAT_MRT3847_105323C.1
atgatcgagattggtgacgaattcagagccgcgacgcttcaactcggaggcgtagagggcgtagtcggtggaggtgtaaccctcgtcgtaaccgtcgaagaaggggagaaaggagaggctagggaggatctagcattagcgcgctcagaggccatggacaccgtcccaagttcccgtcagcggagccactcctctggtacactcactcgcgccagatcacagctctatcatcatcggaaccgctccggtcaactccgcttcgatcccgttccctcactggacgaaccctgcgcggaacttcttggctttcgccgaaccaattgcaagaaagcgaagcgcgacgacggcgaccttcctcgccgcctgaccaaggatcttcgcgccaggcgagtctattcgcctccgcaatccactaattccggtttgatcgaaagcgcgtttcccaagggaaacgccgaagcaatcgggagtcccgatttggggctttttttcgaggctcggggtttcgataggggaaatgctgatttgtttgaagagagcggtggagattgttcggagaaatttgatggtttggacggagcaacaactctacctgatgctgagatttgcggtggttcaaattccaaggttaacaaagatgtagagaaactggacgcagaggttcctgtcaaagatacaccttccactgggaatggttcttctctcaagagcaaatctgtaggggttctcagaccatgtttccaggggaagttgttcaaggccccgggttcagtcaattacagaaggttgtttccatttcaaaaggataccgtgagagatgattctgatacaccaaaattgggattttgccagaaagaccaggagggtagacagggattccaactgcctttgtcacctcaaagtgaagaagagtctaaacaagaacttaagacggatgccactgcagattatggtgttaaagatgctacaagtgatttgcccgatgatggcttgaagcaattgtctagccacatgaataatcttgattgtgttgaggctagtacctcacaggagtttggtgttttgaatgaagaatgtatacagacaactcctcctgatgctgatatatatgttaattcagaggtcaatgtcaaacccatggattttaccagaagcactcatgaaaatgcgggtcaagggttttgtctgaaagctgacaaggtgaaagattctcttaagagtaaatccgtgccgagacaacttttgcacaggaaactttttaaaaccccaggttctgtcagctataaaaggttgcttccatttctaatggatcttaccaaagatgactctgatagatccaaatttgatcatcagacacatcatcaagaagatgaggcaaagaggttccaacttcctttgtcatctgaaagtgaagaagcttctatagatgagcataagacaaacagcagtcccatgcatggcacagttgagtctaatggtttggaaaactatgtattagttaatccttctaatgagctatctcatggcaaccagccaaaattgacaccttcccaagactttcctgaatttccaatgcaattggacgcaaaagaagtggttcgcggtgatttatctgcaccctctgtcaatgaacatacagagaactttgcaattgcttctaaggatgaatgcttgagtgcatcagagcttaatccatgttcagtaatggtggatggttttcactctgctaagaatgttgcgcataatgatggcgtcaaggaagtacaaaatacgatatccagacaacacgatagtgactcaccacccaaagatcagtatatgctttatctcaaaggtgatgtctctgggcttacatctgtgcatcgttcaagtaaagaaaaaggattcactattgcttatgatgaaagcaaacagtttgtgaatctgaaggagcgtgaatctgttagcagatttccccctgaatgtcagactctaagtcaattggatcttaatgtgctagatgctgaggagaatgtaacaagtttaaatcatgtccaggtttcaaatgatatacttggagctccatctgagaatattacctcagaaaaatctgacatggcagggcatagcggtgacaaagcaggaagtgtgcagaatgggatagttttatgttcaagaatgccttcaaaaggtagtgataacaaaaatgctagtggaataaaaaatggctctgaatccaagatcacttcggttcttaaacgctgtccacagtttaaattgttgaaacatgctggatctttaaactacaagagattgcttccatttatattggataccatgaaagatgattcttgtgcttcagtaaatgatcatcacccaaaacttgcgaaatccatggatcaaacacctctgccaatttcaacttcaaatttacatctaactcctgtaaatgattcaaatggttgtgttcccgtggaacattttgcaggcaattcttgtcctcagcaacaatcagggttgcaggcttgtgatttaaacaatgatagttcaagcccaaaatctcaaattcctgaatttcagtcatctcatgattcatgcaaagtgattcaactgcaagatgaacaggttgtattaaatggactctgcaagccagaaagctccactgatccatcaatttctgttcatggaatagacttaccaatcacaaccttggcacctatgattaatgaagttaccaccagagaggctacacctgactcgtccaagtcattatcagttttctctgaagtaaaaggaaacaattctttcctgatgtcttctaatgagaagctacctgaaacacacgaatgttctcagagcttgtctcaactgcaagttgtagaacaacttagagttcccgctgttgaaagagcatttgagttttctaaaaatcaattgttagatgcggaagaggttgctcataatcttatgaaggaactatctcatctaagaaatatgttagaaagttctgctgatagtgtcaacaataatcccgtttttggtggaagccaggtgaaagaagcttgcaggaaagcatgtgcagctgaagaacttgcaaagaaccgtcttagtcagatgcacgatgatcttaatattcattgcagaataacgagcttgcagccaccaacggttacgtttgcggttcatgttgaaaaagaagtcattcaacctggcggataatcctgcaattgcggtttcaaagcagatatcctctcgtcttggaattgtttttaggagtgatataaaatatatttcagcttagccttggaaaactgaatatcagagaaatatgtttggccctttgaaacaggaagaaagtgagtagaagcggacaagaataaccttacagattttttttggaatttgttattgtaaatatttgctcagttatgaattttttaatttgctctatttttttaagattaatatgtttttgtttttttt

SEQ ID NO: 5887 - DNA, 495 bp, Glycine max
  Clone ID: PAT_MRT3847_105324C.1
tacggctgcgagaagacgacagaagggctttctcagactagtttggaagatctttgccgctctcacctgaatgctctcttagcaagcattgctgaaactgagaagcaaactgaaatggctacaagggtttcagcgtggaaataaaaaattgaggacaacttggaagaacaggacttgcatccaccatttgatatccaagactatggtgagaggattcttgacaagttctccctgctttcccttgaagcaagcagtagtggtgtcctatccttttctgatttagtgaagggtcaaaacaagtatgatgtggctcagaagtttttcttcccttcttcaactggtaaacaatggagatgtagctctagagagaaatggagttgatgggtctgtctgctactcatccgttaatccctttcatgttaagctccttaagcaaaagagtaaggaacgggagggtgtgcagcttcgtttgccaaaaaaagagagcaaagtctc

SEQ ID NO: 5888 - DNA, 197 bp, Glycine max
  Clone ID: PAT_MRT3847_105325C.1
tcggcgatagccacacagaagaggcaaaggcaacatggtggttaagtagactgatagggcgaactaagaaggtgactatagattggccatacccttttgtagaggggagattatttgttctcaccgtgagtgctggcatggaaggttaccatgttagcgtggatggaaggcatgtgacgtcttttccctatcgccga

SEQ ID NO: 5889 - DNA, 557 bp, Glycine max
  Clone ID: PAT_MRT3847_105326C.1
gaaaaagtacaaggcgttcaagccgctgaacctgccagacaggcaatggcccaacaagaccatcgagaaacccccgagatggctgtcaaccgatctgcgagacggcaaccaatctctggttgatcctatggacggcgagcaaaaatggatgtacttccagatgctcacaagacttggctacaaggagatcgaagtttccttcccctccgcatcgcaaaccgacttcgacttcacacagcgcctcgtccagacacccggcatagtgcccgacgatgtctggctgcaggtcctgtcgccgtgccgcaaagagctcatccgccgcactgtcgactccctgaagggcgcaaagaaggccatcctgcatctctaccttgcgaccagcccgtgcttccagcaaatcgtcttcaacatgaacgacgaggagacaattgccctggcggtcgagtgcacaaaatacgcgagatcaatcacaaaggacgaccccgagcaggcagggacacagtggcactacgagttttcgcccgagacgttctccgattcgaacctgaattcgcgct

SEQ ID NO: 5890 - DNA, 525 bp, Glycine max
  Clone ID: PAT_MRT3847_105327C.1
gaaagccaccacttcacagttcactctctttctctctctctccctctctgaagcatcaccgtcaccatgaatacgcaaaccacaagcccggtgatcaaagaagaagaagaaaaggaggaaggaacaaaggaagtggttcaagaagaagaagaagcgtctcacccttacgcatttcatgtttctggtcctcgtaatttggccaaccttaattggagagaccttataagttcgagctggaaggatgcaaattacaaaagaactgtcattgcttgctttatacaggcagtttacctgcttgaactcgatagacaggagaaccgaacgcaagaaaatgctctagccccaaattggtggattcccttcaagtacaagctcacacaaacattgattgatgaaagagatggatccatttttggggcaatacttgaatgggacagatctgcagcaatggcagacttagtactacttagaccaagtggtgcccccaaagctgttttagcgctaagaggaacgttactcataagc

SEQ ID NO: 5891 - DNA, 311 bp, Glycine max
  Clone ID: PAT_MRT3847_105328C.1
attatgaactaaccatcgctatgaacacaaatctatctataacccccctgcgtatggggttaccaattcaacactctgcaaacaccttcttaaattcatagtttttgaaccaactacattacagactaaataaccattttatatcttcaatccatcctttcaaatttttatagctaccatttttgtggaatcttattccacaatatcagctagctcttgggaacctctcttttatgacgttaaaattgaactcttctatttgtagttttacaatccctcccatcggcgattcctattcttagtataatcat

SEQ ID NO: 5892 - DNA, 142 bp, Glycine max
  Clone ID: PAT_MRT3847_105329C.1
cccacacacccacccacacgtacactgactcatcttctaccaccacctcaaacccgtggtggtgaaaataacgggggatgacgacaacgctcgaatcacttatcttttccaaactacacgtgaatggcgtcattcttgtttt

SEQ ID NO: 5893 - DNA, 1284 bp, Glycine max
  unsure (1)..(1284): unsure at all n locations
  Clone ID: PAT_MRT3847_10532C.1
cccccccccccccccccccgcctcctccccccctgctcccccccccacctcctcgccaccaccaccgccgctcaccaccacctccgcaacactctccgccgccacctccaccacattcgcccccaccaccaccaccttcaccgccgccacctgtttatccctatttatcaccaccaccacctcctccagttccccctcctcccccgccagtctattctccaccaccaccacccccatctccaccaccttgtatagagccacctccaccgccaccaccttgtatagaaccaccacctccaccaccatccccaccaccatgtgaagagcattcaccaccaccaccatcaccacaccctgcaccttaccatccaccaccatctccatcgccaccacctcccccggttcaatataattcaccaccaccaccatcaccgccacctccaacacctgtttatcattacaattcaccgccgccaccgtcatttccaccacctacacctgtatatgaagggcctttgccacctgtcatcggagtctcatatgcatctcctcctccaccacccttttattgattcttttgagaacttttctcctctaacccttcccctctaccctagcaaagacgaaaaaacaaaaacacccattcaagttcagttcatacttttattattattggtggccatttcttctgtgccctcttcttcctgtgccagccaggtcatgtacgcgactctcgtcgcgaaaaataaaacctgagaaatcgagaagggtttgtgtaaggctgcatacatgtttgttgtaatatgggaaaacagagaagaggttgttacagtggattgaggtaagaggagaaagtctctccatattgatttgaattgttatggatattcagagttgtgaaataaaaatggctgagaaagagtaggttgcagagaaatgtgtatgtatagggatgaatttggagaccataattcagggttgcatagacagtagtgacactttctgttgctgctgctgctgcatgtttgtggagtttattgttattgtgtctcttatatcatacttttttttttgttgctttaattttgtttctttatagtataatttatgaacattttacatgtattgattttctgaattgaggtaattcctttctcgtaaaagtgtccctcaaaaatgttactccgctatgagaatgttgtgtgtgcttttgcttcccttcccaaatctatccgcatttaagtgatgtgaccacatgntaatcccatgcacttttttttttat

SEQ ID NO: 5894 - DNA, 1896 bp, Glycine max
  Clone ID: PAT_MRT3847_105330C.1
caggcaaagaacaatgtctcctcaacctctccaaagtccattacacttctaccactaccactctccaattcaaacgcaaacactgccagattctgtttatataatacttgaagttgaagcctttaacgctactctttcttttggctaactaccccacatggctctcctccacaagctcgcacctttcacctctctctacaccaataccccccattccccaccaccccgccgccacgtcatcatctccttctccgtctcacccttcaccgagaagcactccacagagcgctaccagagggaccaatgggtctaccagagcaccactcaagagggtcaacctcaaacgacgccgtttcctcctctcccgtgcgattcagcgtccttaagagacgacgacatagcgttgcagctgccagagctgaagaagctgcttcaggttctgagggagaagagggagtgtatcaatggagagggttgtgagccggggaatgtgttcttggtgggaacgggacctggggaccctgagcttctcactctcaaggctgtgagagtcatcaagagtgctgatcttttgctctatgacaggttggtgtccaatgatgtgctggatttggttggccccggtgctaggcttctctatgtgggcaagactgctgggtatcatagcagaacacaggaggaaatacatgagcttcttttgagttttgcagaagctggggcaactgttgtgagacttaaagggggtgatccattggtgtttggcaggggtggggaggaaatggattttttgcaacagcaaggtatccaagtgaaagttattccaggtataactgctgcatctccacgcgtcggagagcttggaattccattaactcaccgtggcattgcaaatagtgtgagattcctcacagggcattcaaggaaaggaggatccgatcctctctttgtatcggaaaatgctgctgatccggattctaccttggtggtttacatgggcttggcgaccttcccttcacttgcacagaagctaatgcatcatggtctgtcccctcagaccccagctgcagccattgagcgaggaaccacacttcatcagcgcacggtgtttgctgaactaaaggaccttcacgagaaaattacatctgctcagctggtgtcaccaacgctgattattataggaaaagttgttgaactatcaccattttggccaattcctacaaaagaagaatcatgtttaatgcaggcatgatggatgttgtcaagaaatattattgtgaagcttggtggcaatgaagggttaccttggtaatgaaagcttgcacagaacaaggggtaatgataaatgtaatttggatctattcaggacgggggaaagtaagcacgctatctgatgtttatggaaatgtagaacttctgccctgcttttgggctatctattggagtgtttggcatgggcagagctgtttcagaaccaattttgattttccatgttccagattgggaataaaacaaagtaatacacagatttactcatttttataaagaaaaacacaggtttcgactgccgcagttatctaagtcaggtaacttgttccttagccattggagaaaatttgttccatatgctatttagcatctttctttcaggaagaaatatggagatgagtgtcatgtctgtgatttcacgtgttcaatttatcaatgttgctattcagagccattgattctatttttcattcatgttttcttgtaacttgatgttagagatactgccttcgtcatgtaaacttggtggttattagcattcagttttggtttgcatgtgatgtattataatgtcacagtagttatgaaataaaaatcatgtaactgatgatatctcttgaacacccgtgt

SEQ ID NO: 5895 - DNA, 306 bp, Glycine max
  Clone ID: PAT_MRT3847_105331C.1
ttttattttttttttatttttttattttattatttttatggattttaaattattgtttaagagccaaaaagtggattcccgtgcaataaatgccagtcaaatgcaaaaaatcaaagagacggcgtatgaacccaatatatgcaacccatcaacgggaacaacaaaaatggcttcatgacaacagaatatagacaagtaaaaatgagaattatacgataaaacaatgtgaaggacacatacttggaatcaaattgcaaaagaggatcactcaggaaagtggatactggcactcaagaaaccaaaaga

SEQ ID NO: 5896 - DNA, 131 bp, Glycine max
  Clone ID: PAT_MRT3847_105332C.1
aatcaaattaaactcctacaacattggctcttacattaattgccaatccaaatccactgaatcttctgtcacttctgttaatccttctaacaatcataacatatctcaagttactgaaaccactttccaac

SEQ ID NO: 5897 - DNA, 340 bp, Glycine max
  unsure (1)..(340): unsure at all n locations
  Clone ID: PAT_MRT3847_105333C.1
ggagcggccanttcttatatggcacgagggcctataaatggggaaacccccttgtagggggcccctccatgtctagggccccttcctgacgatcttattttattgaagatctggtgccacttaaaggctggagctgcgagctggcttgttttgcgagggttttcgcagttcaagggacctggccccttagtagctctcgaggatgtgtcgctttcggggaggacccttcctagggattctgcgttcccactgattcaggttctctccctcagcagagttgtcttctaaggttgtctgacctcaaaactcaactggcccccgtgcaaataaggttcccctg

SEQ ID NO: 5898 - DNA, 239 bp, Glycine max
  Clone ID: PAT_MRT3847_105334C.1
cagagaaattctgactctaataccaatgtgtccagtaccatgtctgatagtcgaggcagtgagaaccaagggagtttgggggatgcaagtgaaagtgaaactgattatggtacttggtcacatgatcagattggatcaaggaatgcacatggggatcataatgggtctagcagggaacaatctcctgatcttggcgaagttgagagggagagagttagacagattgttcagggatggat

SEQ ID NO: 5899 - DNA, 485 bp, Glycine max
  unsure (1)..(485): unsure at all n locations
  Clone ID: PAT_MRT3847_105335C.1
ccgggccggaatttcggggggccggggagcccgccacgcgncacgcccgcgcccgaccacgcggccgttacgccgcaggcgcggcacgccccgaaacccaaagggcagagctgcggaggcggcgaacgtggcggcgaccgaggcggngacggacgcgtttacgatcccgtgggctgcggaggtggcaggccccccgaacaaangagaggnccaaaccgccccgcggaggagggggggggcccgccccctaattctgggacgcctggggaaggaaggaagaagccgcagccagcagcagagcgacctccactcgctgcccatcaaagagcaccagaccagcgacacgccggcgggccccaccctgaaggacgaggtgacgaagatcacgccgggacagaagcggacccgggcccgagcagagaacccggtacaaggcctgcggggacggcggcgaccacaacggccaccgaggggccaggcgagaa

SEQ ID NO: 5900 - DNA, 107 bp, Glycine max
  unsure (1)..(107): unsure at all n locations
  Clone ID: PAT_MRT3847_105336C.1
ctcactctttctaagtnttttctatctctntctcncctctctgtctgcnatggttnctctccaaaaccaccttccgaatccgaacgtctcctgtccagcncaacata

SEQ ID NO: 5901 - DNA, 1450 bp, Glycine max
  Clone ID: PAT_MRT3847_105337C.1
aattcttttaaacagcctgctataatgggaaaaccttatatttgcgagttgatacggcaaggagatgataaaagacatggacgttccagtggacattatgcgcttgttacacaacaaccacttagaggaagggccaagcagggaggacaacgggtaggcgaaatggaggtttgggccttggaaggatttggtgttgctcatattttacaagagatgcttacttataaatctgatcatattaaaactcgccaagaagtactcgggactacgatcattggaggaacaatacctaaacctacagatgctccagaatcttttagattgctagttcgagaattacgatctttagctatggaactgaatcatttccttgtatccgagaagaacttccggattcataggaaggaagcttaattggactgaatcagaatttttattctatgattgatcagtataaacatcaacaactccgaattggattagtttctcctcaacaaataagtgcttgggcaaaaaaaatcctacctaatggagagatagtgggggaggtaacaaaaccctatacttttcattacaaaaccaataaacccgaaaaagatggattattttgtgaaagaatttttgggcctataaaaagtgggatttgtgcttgtggaaattatcgagtaatcagagataaaaaggacgacccaaaattttgtgaacaatgcggagtagaatttattgattctcggatacgtagatatcaaatgggctatataaaactggcatgcctagtaactcatgtgtggtatttgaaacgtcttcctagttatatcgcaaatcttttagataaatctctaaaggaattagaaagtctagtatactgcgatgtgtgatttgataaaaatttttattgtacagattccgaatgagaaactgtcattccatttaatttaattgggatgccctgaatctgacatgtctcttggaatgagtaacatgaaactcagaattatggatgtattgaatactccctaataaaaagggaattggtctatggtcaattcagtaacaaaaaatatgaaattataaatataaatttctaactgtacgtacctcgtgaaaaaaaaaaatattttttcttgtagaattagcgattccatcttttttagaaagaactgaaattatgttcaaataagcaaatatatcgtggttgcagaagtctatacatcgcatataggcttaaggacatcctgacagaaccatcgaggcgacgtttggacctaaaggatcgaatggaatgatacatagacaaataaatctcttatgaatttcgggatactcttttatttaattaatttaattaatccatttttgaagattccgcattcgaaggggagtagactactcaagaactttacttttcatttcttttctgccttaattgagaattggataaataattaag

SEQ ID NO: 5902 - DNA, 243 bp, Glycine max
  unsure (1)..(243): unsure at all n locations
  Clone ID: PAT_MRT3847_105338C.1
aaggaacaaagggccttataattcacaacaaacatgctcttctctacatatgcaacaaccaagntcttatgaaaaatctgaagaatgatctagtgaaaaagagtcccctccctatttctccatatgctatattctatgctggaacaagcaacttgctatgcaagtcagaggataaggcttttatatttgatctactgcagaagcattgttctcggtgatcttcatacccctttcataaagtat

SEQ ID NO: 5903 - DNA, 736 bp, Glycine max
  Clone ID: PAT_MRT3847_105339C.1
ggctcgagaaaataatagaatttctagggctttagaactctccattttctcttccgatcatccagaatcctcgagaattctttttgttgaactcacttctctcttgttcgccacgcactcttgtctctgcaagtgtaaggattcagtgtctgggttgctcgtagaccaccaggatatgcatttattgagtttgatgatcggagggatgcacttgatgcaattcaggccttggatggaaaaaatggttggcgtgtagagctttctcataattccaagggtggtggccgaggagggcgtgggcgtggaggtgaaggcacaaaatgctatgaatgtggtgaacctggacactttgctcgggagtgtcgattgcgcattggatcacgtggccttggaagtggaaggaggcgaagtccaagtccttatcggcgtcgtagaagtccaagttatgggtatgatcgcaggagttacagccctcgtgggagaagatctccaagacgacgtagcatatcgcttccccggggtcgcagctatagcagaatgtgaacggagcacgggctgattgctgaacaattattaggaagttctctctgctataagtgtagttcctctgggattggttgagcataccacagacatgttagttcttgtgatgtcatgacaatgggtattggtaagaacttggcttttgacaaaactacatagtgttgtagctgccaaaagggtgcgttggacactg

SEQ ID NO: 5904 - DNA, 507 bp, Glycine max
  Clone ID: PAT_MRT3847_10533C.1
ttaatttgtaacacttaattttcattgattgagtgtgtgttgctacaacaatggcctcaagccagggttggactccgaagcagaacaagagatttgagaatgcccttgccatcttcgacaaggacaccccagataggtggcacacggtggccagggccgtcggaggaaaaacggtggaggaagtgaaaaggcattatgagaagctcgtggaagatgtgaagaagatagaggaaggtcacgtgcccctccccaattaccgaagtgctgcaagaggctacggttacatggatgaagaaaccaggatgaaggctctgagtctgcagtgaagtgtgatttaccaataaataatatatgttggatgcttggcttcgtaccataagatattttattcacttttttgttttttctttccatataatatataggcaaagcatcgttgccttgtgtttctgtttctataaatgtaaagatgaaattgtcccaaagacgggcccactagttaatagt

SEQ ID NO: 5905 - DNA, 803 bp, Glycine max
  Clone ID: PAT_MRT3847_105340C.1
gaaaccccgcggcgacccacgcgtccgcttcaatttcccttccgatcatttttattcctcgagatttctttcgattgaacggatggctctcttcttcgccacgcactcttgtctctgtaagcggtgattttggttctggacaatgtctcgtgtttatgttgggaatttagaccctcgagtcagtgagagggacctcgaagatgaatttcgtatatatggtgttcttaggagtgtctgggttgctcgaagaccaccgggatatgcatttattgagtttgatgataggagggatgcacttgatgcaattcagcccgtggatggaaaaaatggttggcgtgtagagctttctcataattccaagggtggtggccgaggagggcgtgggcgtggaggtgaagacacaaaatgctatgaatgtggtgaacctggacactttgctcgggagtgtcgattgcgcattggatcacgtggccttggaagtggaaggaggcgaagtccaagtccttatcggcgtcgtagaagtccaagttatgggtatgatcgcaggagttacagccctcgtgggagaagatctccaagacgacgtagcatatcgcttccccggggtcgcagctatagcaggtcccctccatatcgtccttctcgccatgattcaccttatgccaatgcaatgtgaacggagcacgggctgattgctgaacaattattaggaagttctctctgctataagtgtagttcctctgggattggttgagcataccacagacatgttagttctgttgatgtcatgacaatgggtattg

SEQ ID NO: 5906 - DNA, 398 bp, Glycine max
  Clone ID: PAT_MRT3847_105341C.1
cgaagcaagtaaggtagagaagtcgtggtggggcccagggattatggagcccaccgtgacttggatcgagccttcgttggaaaaaaaagagtttttttagtaccagatatcacgggaacattaattctgcttgccgtatatatggtgttgttagggcatggattggagcatctgggagtacggaatagaaggagattacaaggatgtcaggttacaacttacaagccacactccgtgtatattgtccgcaggttgctactaaagattatggtaggatttagttcagttgtaaatcaagtcatgtgagtcaattctgtatattcgagtatgattcttacaaataaaataaattaataataaatatgtatcttaccattgatgtattggatttgggttgt

SEQ ID NO: 5907 - DNA, 2058 bp, Glycine max
  Clone ID: PAT_MRT3847_105342C.1
gggggtttttatagaaaaaacaaaaatcatttccacattttagttttctcatttagtcaatcccaagtcaatacttcttttgcacaaaaaaaaacagtacttaattcttaaaacataattaaccagatcaaaatcaactaatcttagtggagctaaatgccagtggcaacacttaactcacattctaaaacaagggcaagaagcaatgaattcctcaaattcaaatatctaatgcaaccaatgctgccaatcaaccagagttaatacacttgattaggagcggacgatatttagcaaaacaaaacttcagattggagacaaagtgacacggattccagtagctgaagatgacacacaattccatacagaagcatgcaaaagttaatcagccacatgaggaaactgtggacacagaccaaagagcagcaagtggagaatgaaaaacatttggcgagtactcaattggttaaatggaatcactctttctagtcccagtcctcagagatcatagatcaacaggtgattttgccgaaggaggatacacaatacagtgtcctacacaaccaagatgatgaccattgctcccaaacggcaagcatataccagagaccacggatgaaacaagtagcattttaatcaaatgcagacaattagaagcagcaaccatcaatataactatatagaatggtgtgaagcagacactacacgcagttactcgctaaaggaaccccaatttaacttaatttcacaaagatgcagcaagccaatgactacatttatccatccacctttagactcctccaaatcataagtaggatgcatatgtagcattctttcctgaacagtaagcaaaaaggtcatatgcaaccaacttgttgacatcgaacctttagtcaacttatatgcagaagcaacaagatgagacgattgtgggggcatgaagcagagaagcagacaagatgtagtaagtggtgaaacgatgctgttttggccgataatcacacctcaaaacaaagaaacatgaacattttaggcacctttaatgcaaatatatcaaaattaccctagtggattagaaatatttttttttataacaaacaattaacataacatgctatataaagtagggaagactgaagcaaccttcaggtttcagtaagctgaagagagacagccaatgcaaaacagtgtccaacgcacccttttgccagctacaaccctatgtagttccatcaaaagccaagttcttaacaatacccattgtcatgacatcaacataactaacatgtctgtggtatgctcaaccaatcctagaggaactacactatagcagagagaacatcctaacaactattcagcacttgctccgttcacattctgattttaatctgcattggcataagggaaatcacggagaggacgatatgaaggggacctgctgtagttgcgaccccagggaggtgaaatgctacgtcgtcttggagatcttctcccacgaggactgtagcttacccataacttggacttgtacgacgccgataaggacttggacttcgcctccttccacttccaaggccacgtgatccaatgcgcaatcggcactcccgagcaaagtgtccaggttcaccacattcatagcattttgtgtcttcacctccacgcccacgccctcctcggccaccacccttggaattatgagaaagctctacacgccaaccattttttccatccaaggcctgaattgcatcaagtgcatccctcctatcatcaaactcaataaatgcatatcccggtggtcttcgagcaacccagacactcctaagaacaccatatatacgaaattcatcttcgaggtccctctcactgactcgagggtctaaattcccaacataaacacgagacattgtccagaaccaaaatcaccgcttacagagacaagagtgcgtggcgaagaagagagaaatgagttcaatcgaaagatcgagccgaattccgggctgatcggaagagacaatggagagttataaagccctagaaattctattattttctcgagcc

SEQ ID NO: 5908 - DNA, 274 bp, Glycine max
  Clone ID: PAT_MRT3847_105343C.1
gctgaggactacaaataatgctggtcggggctgtttggtgctcaagtgaggatgaacttaatagtgttatgtatacttcacagtagcgcagacacatgagacctcacctttgactgaggaaaaacaaatcgtctgcgaaatcaaacagcttcgaagggacaagggagaacgttatcgctaatgctgcaatggctgtccaagttaaaggaatctatagggcagaaagataccattaagatcaggttaagcttattggtgggggattggatggagt

SEQ ID NO: 5909 - DNA, 180 bp, Glycine max
  Clone ID: PAT_MRT3847_105344C.1
accagaaagatcggaacttcttttgaagccaaagagttttaggaaaacagttagattggtggttatgatctgaatcaagcattgatggatcaagatgtgcacagattgtatccctcttctttagagagatccacttcagcacttgatgttctgttagtctcttgaaatgacctattcaaa

SEQ ID NO: 5910 - DNA, 830 bp, Glycine max
  Clone ID: PAT_MRT3847_105345C.1
caatttgatcgatggtagaggttgaaggaaggacatggcatctaggcttagagcctctgaatgtacggattgggttcggctagaaaaggcacctgttctgtgtcttcgtcactcttcttcgtgtgactttctggttccccatcaccatgttccagtgattcctcatccatcgttgccccacaggtatttgaaaaaattcaaagctgttttcattatcgtgatgatatgcttaaacacttggctgcaaatgtatgcggggatagtagtccaagccatggtcttgttttttctgtctgtacgcaaatagtagtaccaggtgtgacccccttactggggattaccacacttcactgcgttcttgtctttcgctaggaagaacagctttaaaaggatttaggaggaaccggttcaagtacctcttgattaggtcctcggataatgagcttgatttcagtccaaccattgctggaactacttcttatatactagttgttgagggcactactcatcctcctcagccctttcttgcacgagagagaagaagctgttaatgaaaatagaaagaagcaaatccctcttaatgagtgttgcattgactcaaactcaaaccattgaaacacattcattaattatttgtgaatggcactattgatccatctcagtccatcagtgttcaaggcagagtcctccacagagagaacgcatgcagggcatcaggatacgacaacacgcatggtttgactcacttgcagaaatatgtttgtaattgtattattatttttatgcacaagattctcgtggttaactaaagacttgctgcggataaaaaa

SEQ ID NO: 5911 - DNA, 474 bp, Glycine max
  Clone ID: PAT_MRT3847_105346C.1
tgcacatgcacgcgtctagattcagtcaggttaaattcttggttgatcttttcatttttagactagactcctttatgatgacaatttaaattgtacagattaatcgatgaaatgttgctgggtttttggtatcacttccatttcctaacttccctttagattttttatacggaatttttgaatttcctttctttttctatatcagggctaaaatcaccttttgagaccccggctcccccacaaatggtacttctgtattattaatctggacccaaatattttccttacttcactttctttgtactgattattttcttcttcgatgtggatctcttgtaattttcttaatttaacatttttttttgaatccatattcaagtgcttttatgatttacagtcaaaaacagatctttcatgttactgctgaagatttcctttcttggaaatggagtaaggttaaaataaaaacatctc

SEQ ID NO: 5912 - DNA, 504 bp, Glycine max
  Clone ID: PAT_MRT3847_105347C.1
aaatatggaagggtgccttgtcacagctgcatgcttggattctcttgcagagcttcctgcactgtcaaacttgaatcttaatagatgcaatctctctgacaatggatgcaaaaaaatttcacgactggaaaatttgaaagtattaaacttgggatttaatgtcataacagatgcatgtttagttcacttgaaaggattgacaaagttggagagcttgaaccttgattcgtgtaagattggtgatgaaggattggtcaatttggctggccttgagcaattgaactgcttggaattgtccgatacagaagttggaagcaatgggctacaccatttatcaggtttgtctagtctgcagaaaataaatctgtcttttaccatgattagtgatagcagcttaaggaaattgagtggactctcgtctttgaagtcacttaatttggatgcttaccaaattactgatgctgggctggcaaaccttacaagtttaactggcctcactgacct

SEQ ID NO: 5913 - DNA, 183 bp, Glycine max
  Clone ID: PAT_MRT3847_105348C.1
acccacacgtacgcgcgattcacatggtccaccacttccattgcctttcacgacacacagcactttgattttagggtctgacaaacatcgagaagctcaatcgactgcagaaaatgagcttccatctatctatatgtcagactactatcattccctgaacctagagattatatgatcgcaatc

SEQ ID NO: 5914 - DNA, 401 bp, Glycine max
  Clone ID: PAT_MRT3847_105349C.1
ctccagtaagactgtgtgagctccataatctttctttgagagctcgccctaccagttagagggaaccaaacttcggacagcttttttgggtaacaggcaaaatgcatattcgcctataacgtgctttgaccacctaccccagaaaacgccactgctcttccttatctacgcggggggtggatgaccccacaatccgactccggttatgatccataccaaatgttttgttttcaaagcaattattttctgcagcaccaccagcctggtacttctctaggctctgtcctgaaataataccttaccccacatcaatcatgacctgacttgccgcccttaggcttcatgggccatcctttctgcgtggcatccgaacctcgatcacaacttataccccaatcaac

SEQ ID NO: 5915 - DNA, 562 bp, Glycine max
  unsure (1)..(562): unsure at all n locations
  Clone ID: PAT_MRT3847_10534C.1
ttaaatggnnagagtgnnanattcaaaatgagaaanngaaagattaaatttacaaccatagccgctattgccttttccgtcatttcatcccttttacttctccggtgctctctcccaccggtggcaaacatcatcctgcccagtttgcaactacagtgcggatacggtttcagtgacaagcatctttacctcggttgtgaacgcctgaacgacgacattcgcacaagggagaaaacgaccacgggtacctttcataaatatgaaaaacgaaaatgaccacgggacattgctttgatgatgttttattctttactgttcttcactacaacattccaagtgggtcattctgcattttcttactctaacaggccatggcttcttcttcatctcaacatttgtcccatgcacccaactctgttcaacttcattaattggtcatttaaaggtgtttgattaccactttctttggattgaccgcgaatcaagccaagatcttaggaaaaaataagctcaaggccaagagtttacgtggagttgtgtgctgctgaagcggacgcgtggg

SEQ ID NO: 5916 - DNA, 642 bp, Glycine max
  Clone ID: PAT_MRT3847_105350C.1
tcggtgaggcttctcttcttctttatcaaggatcatctctctgtgtcaggggtgaagttggttgcgtatgttcgtatttggttattgattggatcacactaatgttccactgcaagttttttgacatatattgttgacgggatatttcctagatggggggagcgtgttctaggaagcaagagcgggacaacaaagatagtcctaccagaggactatcacgaagatattgcaaaagcgggactttgaaatggtggacatcctctttttcttatccatctgtagattttcacctacgaaaaggagaatgtccaccactgttggacttgtgcatacagaaaataaatgaggatattgataaatataacacattttctatgctaccacgagatataagtcagctaattttcaataatttggtttactcccgacgtctaaccagtgcttcccttgaagcttttcgagattgtgctctccaggatctttacttgggagagtatgatggtgttaatgataattggatgggtgtcatctcatcccagggttcatctttgctttctgtagatctttctgggtctgaagccactgattttgggctgacataccctaaagattggaaagtctcatttccttaaatctaaatta

SEQ ID NO: 5917 - DNA, 298 bp, Glycine max
  unsure (1)..(298): unsure at all n locations
  Clone ID: PAT_MRT3847_105351C.1
gatctttgtaagangataattngttgtttatactttttatcacatttacttatttatttgcttatttacttagagtgtatgtgtgctcacacgtgccaaggatttagaacacagaagctgtaaattacaatttagcaatatatatctaaaggttagaaagttactgaagtatgttgcacacagaatatgtannttaggttctttttgtttgttcagaggacaacttgtggaagtcttttttctccttctactatgtggatccagggctcaaactcatgttgttagggttggcagcaag

SEQ ID NO: 5918 - DNA, 2325 bp, Glycine max
  Clone ID: PAT_MRT3847_105352C.1
cgagtcgcgcggcggcgcctcgtcccttctttatcaaggatcatctctctgtgtccggggtgaagttgtctgcggaaacacgagagccactcagtgatcgcttctcttcttcttcatcttacagtgtcaggggtgaagttggttgcatatgttcgtatttggctattgaatgaattgcactagtgttctgctgcaaattttttgacatatattggtgacgggatattttctagatggggggagcatgttctaggaagcaagagtgggataacgaagatagtcttatcagaggactaccacgaagatattgcaaatgcggaagtttgaaatggtggacatcctctttttcttatccatctgtagattttcacctacgaaaaggagaatgtccatcactgttggacttatgcatacagaaaataagcgaggatattgataaatataacacattttctatgctaccacgagatataagtcagctaattttcaataatttggtttactcccgatgtctaaccagtgcttcccttgaagcttttcgagattgtgctctccaggatctttacttgggagaatatgatggtgttaatgataattggatgggcgtcatctcatcccagggttcatctttactttctgtggatctttctgggtctgatgtcactgattttgggctgacataccttaaagattgtgaaagtctcatttccttaaatctaaattactgtgaccaaatttcagatcgttgactgaatgtgtatcaatggtctgtcaaacttgacaggtttgagttttagaagaaatgattcaatttctgctcaaggaatgagtaccttttcgggtcttgttaacttggtcaagttggatttggagagatgtcccgggaattttggaggctttcggcctgttcgaggtttgaggtatttggaatctctcatatttaagtattgttattgcataatatgtcatgatatgaaacgtcgtttattacatgcaagccggaaaagtctccagatttcttccagtgacgtcactgattttggcatcagttttctaaaagtgttacagaagcttgcccttttaaatttggaagggtgccttgtaacagctgcatgcttggattctcttgcagagcttcctgcactgtcaaacttgaatcttaatagatgcaatctctctgacaatggatgcaaaaaaatttcacgactggaaaatttgaaagtattaaacttgggatttaatgtcataacagatgcatgtttagttcacttgaaaggattgacaaagttggagagcttgaaccttgattcgtgtaagattggtgatgaaggattggtcaatttggctggtttattccttttcctgttttttcctaattgatggaaatccttgagcaattgaactgcttggaattgtccgatacagaagttggaagcaatgggctacaccatttatcaggtttgtctagtctgcagaaaataaatctgtcttttaccatgattagtgatagcagtttaaggaaattgagtggactctcgtctttgaagtcacttaatttggatgcttaccaaattactgatgctgggctggcaaaccttacaagtttaactggcctcactgacctagatttgtttggtgcacgaatcacagattttgggacaaactatttgaaaaaatttaagaacctgaggtccttggaaatatgcggtggagtattgactgatgctggtgtgaaaaatatcaaagagctttcttctctagtgtgcttaaatttatctcaaaacagcaaccttacagacaaaaccctggagttaatttctgggcttactgggttggtttctttgaatgtttcaaattctcgtatcactaatgctggactgcagcatttgaaaacactgaagaacttgagatctctgacattggagtcctgtaaggtgacagcaaatgacatcaagaaactgaaatcgatatacctccctaatttggtaagctttcggccagggtagttattgcggtattctgatatgtgtatatgtatatattatatgtcagtggtactgaagtatcttacagaagaatggaaagacaacctcaaattgtacataggctataataatatgactttatggaaggggtaattctgcttgtgctgcgaagttttgttgttttattgtaaatgtatatgtatatgatatgacgaaaaagaatgatgcagggacgtgttttctacgcctttagtatttaaggtgaaaaatgggcgaataaaccttttatcagcagatgttaatagattaatatttcacttatctttaaaaatctttgttt

SEQ ID NO: 5919 - DNA, 534 bp, Glycine max
  Clone ID: PAT_MRT3847_105353C.1
atagaaactacaaactaactattctaatatagtaaccatatacatctctccggcacttgtttctgtcttagaacttgagatcctacacctgactaatcggatccaagagtaacatgtggcacgttagtttcatgaaccactcggattgtagactatgcaaagacaaccacagacgacgatctgcctaaaacattctatgaaaccccactgaaccggggaaaagagtccagaatatctggaaatccaaggaaaagtaaatacaaagctagagatccactatatatatgtagccctctcccttatgtgcgtccttcttttttgggaaagattgacttatccaaaagaaaagtggcttgattgtttgacagcaaggagaacctttcttacaactgagctgcaccaacacctcgtgttatggaaccaacaggggaagatggacttgctctcaagctccaagcccttgaatacctagacgaggctcctacacccgtttatgtgcaaaacgcaccgtttactaacaagtccccttctgac

SEQ ID NO: 5920 - DNA, 1397 bp, Glycine max
  Clone ID: PAT_MRT3847_105354C.1
cgaggccttcgtttcaacctctctgattttgtaattgagttcgatcaaatagctcccagtactttaattgatttctgaatatcatcacttaatttgaaggaaagatggtgagcgtagctgagatccgccaggcacaaagggcagaaggcccagcaaccatccttgccattggaactgcaaacccaccaaactgtgttgatcagagcacctatcctgactactacttcagaatcaccaacagtgagcacatgaccgagctcaaagagaaattccagcgcatgtgtgacaagtctatgatcaagaggagatatatgtacctaaacgaagagatcttgaaagagaatccaaacatgtgtgcttacatggcaccttctttggatgctaggcaagacatggtggtggtagaggtaccaaagctagggaaagaggctgcagtaaaggccataaaggagtggggccagccaaagtcaaagattacccacttgatcttctgcaccaccagtggtgttgacatgcctggtgctgattaccaactgaccaaacaattgggccttcgcccctatgtgaagaggtatatgatgtaccaacaaggttgctttgcaggtggcacggttcttcgtttggccaaggatttggctgagaacaacaagggtgcacgtgtgcttgttgtctgttctgagatcactgcagtcacattccgtggaccaagtgacactcaccttgatagtcttgtgggccaagcattgtttggagatggagctgctgctgtcattgttggttctgacccaattccacaagttgagaagcctttgtatgagcttgtttggactgcacaaacaattgctccagacagtgaaggtgctattgatggacaccttcgtgaagttggactcacatttcacctcctcaaggatgttcccgggattgtctcaaagaacattgataaggcactttttgaggctttcaacccattgaacatctctgattacaactccatcttttggattgcacaccctggtgggcctgcgattttagaccaagttgagcaaaagttgggtctcaaacctgagaagatgaaggccactagagatgtgcttagtgaatatgggaacatgtcaagtgcttgtgttcttttcatcttggatgagatgaggaggaaatctgctgaaaatggacataaaaccacaggtgaaggacttgaatggggtgtgttgttcggttttggacctggacttacacttttcaaacttgcttggggtttgtaacaacaacaaccaccaaaaaaaaaaaaactcgtttagagtttgtttgtgtacgtttatattaaaataataatacgtgtttggtggccttttagcctaattatcaataacaggcatttgttttagaaaaaaaag

SEQ ID NO: 5921 - DNA, 1920 bp, Glycine max
  Clone ID: PAT_MRT3847_105355C.1
ccacgcgtccgggcagaaggcccagcaaccatccttgccattggaactgcaaacccaccaaaccgtgttgatcagagcacctatcctgattactacttcagaatcaccaacagtgaccacatgaccgagctcaaagagaaatttcagcgcatgtgtatgtactgccatactctcatcttaatttttccatatttctcacttctacaaaattgtttttctacatccgttttaatttatacaaataacacttgttaatttggcacatcttaattctgtcttctcgttacattatattatctatcacgtcgatctgcgaatcattcttgaaataaataaataaataaatctaattgggtgcaaatattaaaatggcatcaaggtttttataagttacttagtctaaatagttaaaaattaaattgataggtttttgcatttcaatagtagctagtcattatgtatagttagagattattagtcttttaactctccctttcaaaaaaaaaaaaaaaagaggtgataattcgttatggtgtttgttgtcttgattatacaatatagatcgttgacattattatttctttatgactaattttcaggtgacaagtctatgatcaagatctcttcgtttaggtacatatatctcgtcttgatcttgaaagagaatccaaacatgtgtgcttacatggcaccttctttggatgctaggcaagacatggtggtggtagaggtaccaaagctagggaaagaggctgcagtaaaggccataaaggagtggggccagccaaagtcaaagattacccacttgatcttctgcaccactagcggtgtggacatgcctggtgctgattaccaactcaccaaacaattgggccttcgcccttatgtgaagaggtacatgatgtaccaacaaggttgctttgcaggtggcacggttcttcgtttggccaaggatttggctgagaacaacaagggtgcacgtgtgcttgttgtctgctctgagataattgtagtcacattccgtgggcccaagtgacacttaccttggatagtcttgtgggccaagcattgtttggagatggagctgctgcagtcattgttggttctgacccaattccacaagttgagaagcctttgtatgagcttgtttggactgcacaaacaattgctccagacagtgaaggtgctattgatggacaccttcgtgaagttggactcacatttcacctcctcaaggatgttcccgggattgtctcaaagaacattgataaggcactttttgaggctttcaacccattgaacatctctgattacaactccatcttttggattgcacaccctggtgggcctgcgattttagaccaagttgagcaaaagttgggtctcaaacctgagaagatgaaggccactagagatgtgcttagtgaatatgggaacatgtcaagtgcttgtgttcttttcatcttggatgagatgaggaggaaatctgctgaaaatggacataaaaccacaggtgaaggacttgaatggggtgtgttgttcggttttggacctggacttaccattgaaactgttgttttgcatagtgtggccatctgagatgcctcatatattatttcattattgtgtaccacttttcaaacttgcttggggtttgtaacaacaacaaccaccaaaaaaaaaaaaactcgtttagagtttgtaattgtgtacgtttatattcaaataataatacatgttcgatggccttttagcctaattatcaataacaggcatttgttttaaaagtttgtaattgtgtacgtttatattcaaataataatacatgttcgatggccttttagcctaatttcatgataacaaacatttgtctgaaaaaaaataattctttcatgatttatattataaattttatcttag

SEQ ID NO: 5922 - DNA, 357 bp, Glycine max
  Clone ID: PAT_MRT3847_105356C.1
ttgcagtccccctacaatggtctgttttttgaggcatggattctacagaggtggggggctcattgccggtggtggctctttcactcgctacaacacaaccgttgctgacaccactagcatgatgcagattgctgtttacttctttaaaacttctcataacaccacaggtggttgggcccgtgcaccaaatgagacatttacttgcggggatggtggtatcaccaaacaagtcctggccacttattgagctggtgatgatgcaccctgtgcttatagctacaaatattagggtcgtgctccaatcccactcacacacaactacatctccttgcacgctaaaatagctcttggtcccaa

SEQ ID NO: 5923 - DNA, 174 bp, Glycine max
  Clone ID: PAT_MRT3847_105357C.1
tctaacaagaagtaaagcatcaccccatcgcaggaataaatgataagtgatattcccggacatctatatatcaacatcactgacttctattcctcaagacagcgttcaccccatcacactagcccaactgaatcgctttttttcacggccttgataaataccaactcttcccct

SEQ ID NO: 5924 - DNA, 797 bp, Glycine max
  Clone ID: PAT_MRT3847_105358C.1
acgcctgcagtaccggtgccgaattcccggggcgacccacgcgtcaacaaacccttcccttctctccccacagttattcatcattaacctccaaaacgaccaaccaaacgcaaaacgcagaaccatgaagaagcagaagctctccgagcctcaaaacgacaccaccaaccccttcgaggttctctccgaggagctaatgttcgtcatcctcgacttcctccaaacgacgtcgttggacaaaaaatctttctcgctcacgtgtaagttgttttactccgtcgaggccaagcaccgtcgtttgcttcgcccgctacgtgcggaacacctgcccgcgctcgctgcccgctacccgaacgtaacggaattggatctttccttgtgtccccgcgtgggcgacggcgcgctggggctcgtcgctggcgcgtacgcggcgacgctgcggcgaatgggacctgtcgcggtcgcggcggttcacggcgaccgggctgctaagcctcggcgcacggtgcgagcacctgggggggctggccttgtcgaacgcgacggagctgagggacgccggcgtcgccgcggtggcgcgtgcgcggaacttgcggaagctgtggctggcgaggtgcaagatggtgacggatatggggattgggtgtattgcggtggggtgcaggaagctgaagctgctttgcttgaagtggtgtctgggaattggggatttgggtgtggatttggttgcgattaagtgtaaggagctcacaacattggatctctcttatttgcctatcacggagaatgtctaccgt

SEQ ID NO: 5925 - DNA, 1431 bp, Glycine max
  Clone ID: PAT_MRT3847_105359C.1
cagcgaatgaagtggacagacaatgtggttaggcttctgataacagtggtgagttgtgtgggtgatgatggcacaattggtggcatggattgtcataaaaggaaatctggggttttacaaaagaagggcaagtggaatacggtctccaagataatgataggcaagggttgccatgtgtcgccgcagcagtgtgaggacaagttcaatgacttaaataagagatacaagaggttaaatgacatacttggaaggggaacttgttgtcaggtggttgagaatcctgtgctgatggattcaatgcctaacctgtcagctaagatgaaggatgacgttaggaagatattgagctcaaagcacttgttttataaggagatgtgtgcttaccataatgggcaaaggataccaaactctcatgaacttgatttacagggttattctctagagcatgggagggactccagagataataatggatctgaggatgaagatgaggataacaatgatagtgaggatgatgagtcagatgatgaaatcaatattaatgcacatgaggatggggggaggatgcagcagctatgtgatagaaataagttaagtgaggaggatgtccattttggtccacaaacttctcggatggataaatttgaggttgaaatggcaagggtttttcaagaccccacaaagtcattgcatgaacaaagagagtggattaagatccagatgctacagcttcaagagcaaaatatcagctaccaagcccaagctcttgaacttgagaaacaacggcttaagtggttaagatattgcagcaagaaggacagggagctggagaagctgaggttggagaacaaaagaatgaaattagaaaatgagcgcaggatcttgaaactcgagccgattcggctcgaggcagatttcagtacatctgagatgtctttagaccctgcctctcttggaatcaaccggccacaagggagggaacatatcagcttaggcagacaacaatagctccttctctgaaagaatttgtcattattgcttaaatgagtgttgggcgttagcgactgtgctgtgaagcgtaaattcatttggaatgtgaagaaataaatgttttgctcaactagttgctcgctttacctcatttaatcgttgtatattggcatgtgggattttgccagtgacacagaaatagaagaatgttgctctaaaggcacttgagctctcattggttctcaattcatcattgacgtggtttgaacttgtcttttgtcaacataattgtaactgtgttacatacttacatttgtatccacataccacgtgcgttatttaatttttggctttgcagctgtatattataccacaagtgtatgtctccaactttgttgtaactttgttacattaagtaggttcatgaagtatgcttgtttc

SEQ ID NO: 5926 - DNA, 150 bp, Glycine max
  Clone ID: PAT_MRT3847_10535C.1
acgatgggtggtgaaagctctatttgtgtcttttttgaatgaaggagttgctgaggaagcagttggtgccttagcctagattgagccgcagcctgctagctccatggcggtggtgaaggaggaaacattatttcccgaaattgataagaa

SEQ ID NO: 5927 - DNA, 383 bp, Glycine max
  Clone ID: PAT_MRT3847_105360C.1
cacacgcgtcacatcatggcagctgcttatcctatggcaagctaactcgagtcgggcttcactaaaactcttgtagctcccaacggcctctctgtctattcactactcaacctcctgccttctaagaagcagtttagcttgactgttagggccatgcaatctgtaaggccaacctatcaagcgattcaaccaatcaacggtgatcccttcattggaagccttgaaaccccagttacattcagccccttgattgcatggtacttatcgaacctgcccgcatacaggaccgcactgagcctactactaagagggatcgaggtgagcctgtcccatggctaccttttagagggcccattcgttaagggctagtctcttaggaacac

SEQ ID NO: 5928 - DNA, 204 bp, Glycine max
  Clone ID: PAT_MRT3847_105361C.1
cgctctcttatttcatggctaaactccattatgtaaaggctgaaacactctggcttagggcataacaatagctgataacgaacggcatgaaagttactgaaagcttggttatcatggtttattttcagtttcctctgacatgattcttttcattctataattatttttgctttaccttttttttattcgtgggtttccatcaag

SEQ ID NO: 5929 - DNA, 170 bp, Glycine max
  Clone ID: PAT_MRT3847_105362C.1
caccccgcatgcacgcgtacgcatgcttgctccggtgagcggccccttgtgctggggcggtcctgctgtgccctgcgccgttgtcccgggctcctcctgaggccggcctgccgctgttctggggtggtgctcgcgccgttctgctctgggtgctggtggacggtgcccgc

SEQ ID NO: 5930 - DNA, 254 bp, Glycine max
  unsure (1)..(254): unsure at all n locations
  Clone ID: PAT_MRT3847_105363C.1
aaaaagcccgtcatgtccgaaatcaacgtcgcccgtctcgtcaagctagacgaaccccttcgaactcggcaaggtcgccaagcctactccgggcccgaccgacgtcctggtcaaggtcgaggcctgttgctcgtcccaaactcttataatctcgtcactggcaaggccaaactgcctattcctgagctgcttgnatcttnggactggacgtggcnggcanaatcgagagnntcggggacccacgtccctnattt

SEQ ID NO: 5931 - DNA, 439 bp, Glycine max
  Clone ID: PAT_MRT3847_105364C.1
gggtcgagcacgcgtccggaacaatgccctttttctttctaatacagaaatgaaagagtaaaagaaataggaggagaagagattatgtccaagcagtctaaggaaaggagtagcaaattcaaactcttcacaagctttgatgttgatgatgtttattctctaagcaagataatacgtgttaaagtctttcccagtgctggcttatactgagcgctgaaaaacaacctgtttgaatttaaatctcttaacaattctttgtcttgcaccagtattaataaataaatatttctgaagaggcaaatatttctgtttaaaacaactgacatacacttaaaagtgtgtctcccttctgaaaaaaatgtttgtttaaaaagaaaatatgtcaatgcctgtttctactaaattaaagaaaataaatagtaggaaaaaaatgtttcag

SEQ ID NO: 5932 - DNA, 307 bp, Glycine max
  Clone ID: PAT_MRT3847_105365C.1
gggagaacaaatttccttgattggggtttttaattaaattgcgttctcatcggccaaaaaaaaaaaattttaaaaaaaaaaacactttaacctaaatcccccccgggggggcgccaaacaaattaatccccccccccccaacccacctgatataccccaccttttatgggggccccaacaaattataaccccccctcacataattaactaagaacccctttttcttaccgtgtgaaagaggtatctttaacccccccataaacccaccctacactttcaaagccccattggaggcatttttttcccc

SEQ ID NO: 5933 - DNA, 320 bp, Glycine max
  Clone ID: PAT_MRT3847_105366C.1
tgttggaatggtctaacagtgtgaaaaagttttaaacttgtatccaacaactatgaatggtcgtgggttgactttttggtaacttcaagtggtgttttgattattggttatttgttggctttggttgtgttgggttatgtttttctaccactatggctgtgattattcagaacaaaagaataaagaaagaaaggaaatgtttatacggatgcttcaatttctgaatgatttcacttattctttgttagagatcttattaaccagtcatatagacaaaatagtgtatatatggggggacatctttgtatgtatcctagtgg

SEQ ID NO: 5934 - DNA, 452 bp, Glycine max
  Clone ID: PAT_MRT3847_105367C.1
acgagttaaactgtggctacattgtattaaaatttaaaccaatgtcttttgactcgtgcaatcatccatcggacttaattaaatatcaatgctttttgttcctatattccatattgacatgtattaaatcctattaaccataaattctatcaaattaaacttgagaaatattgttcatgggaaagatcaatatcaagtcactagcattgtttgtttatataataacttatcatctgtctaaaatgatcacattgatacttagtggtaataataatgataatgaaagtattaattattttttttaatcttgattcaaagattacagtgtgttaaatatttggataattttattatccttagtaatcttattcggcaagaaaagatattgactcgagtaaaagatatttatgatctagaaaaaaaatattataattattctcatatttttacca

SEQ ID NO: 5935 - DNA, 239 bp, Glycine max
  Clone ID: PAT_MRT3847_105368C.1
gcatggtgttttttttttgggcatattacaattccccactctgtttaatagacaccgtattttttatttcaacaaaaaagaaaaattttccctaccgaaaacccagaaggacaggggggtaaaccaattgggcctgggttatgacccaaggcaaaagccaatcaaataaaggaccaaaccccaccctgggtccaacatcaaaaattctttgaaacccccagaccaaatattaaattctt

SEQ ID NO: 5936 - DNA, 154 bp, Glycine max
  Clone ID: PAT_MRT3847_105369C.1
ctcatttctcatgtctcacattatgattcacatctccatctagatctctcgctctctctctcccaagaaatgcatcaacagacgtgtgattaatttgcgattgttcaagtgatcgagcagagattgagagttcagggggaaagtgcgaaaaaga

SEQ ID NO: 5937 - DNA, 406 bp, Glycine max
  Clone ID: PAT_MRT3847_10536C.1
ggccaaaggccaggttttaagaacagaggatcatatgggcccaaatggaaatcattaaccgagacaattccttgacatacacagggggttggatacatagcgggtcctaacgattcataactcgcataaggacttttttttattgaacagctaacattacaaataaaacaaaccacttaaaacgaaggaatagcgaaccgaaagtaatcccccccatgcacgtacaagtagaaccacactctgatcaacagaattagaagaagagcaaagggaaagccccaactagagcaaacccggatcaaaagaaaagtatagatgagatgttatacttacagtataagcctaatgggaacattggaaattacgtggggctgtccttgagcaaacactgagaaacaagctgaac

SEQ ID NO: 5938 - DNA, 468 bp, Glycine max
  unsure (1)..(468): unsure at all n locations
  Clone ID: PAT_MRT3847_105370C.1
cgtacgcgtgggtagcgccacattcctgctatttatatctttatctttcatctcaaacttcagattggtagacctgtggtgttctcattggctgctgatggtgaggctggtgtaagaaaggtacttcaaatgcttcgtgatgagcttgaattaactatggcactaagtggttgtcgttcactcaaggagataactcgtgaccatgttgtcacagagtgggatcgtccaaaattttctcccaagttataagatggcgggactcaaccttgttcttctataacctttgttcttattccatgcttcagtagaaaactttgttgttacagtgagtcaaacattagtcatccattagtaattgttacttctttattagctgtacagaataggnttctacctaaactcatttcattgcacttggtgctaagattttggtaactctagaaacatgattgtcaacaaaatgtacat

SEQ ID NO: 5939 - DNA, 2406 bp, Glycine max
  Clone ID: PAT_MRT3847_105371C.1
gtgcttgcgtgtgagaagacgacagacgggagttcccttctgtatatgagtgcttaggaaccacacaccacctcgaagcatttaagtaccgtaaattccgttagcatcttctcaaatttcttatgtatgggcctagttcccgttttcgaacgcacaaaagcatgggaggaccaaggcccattgctgtaatctacgccgaaacgtactacgctcctactcgtactccatctaatcttcgtccaacgtaacatccgaaatcgaatcgcgccaagaccatcatgcggaagcggaagaaggttccctcgttgctgcaaaacctaaagagctacgaggagaagcaagcgcacatcgaaaccctcgagaaggagctcgacgcgctgttccgctactaccaagaagccatggctcagaaagtgcgtgtcgagctgagccagtgcggtggttcgcgaaatgttgtcgtcgcggcgctgatggaggagagcgaccttccactgtcgaagctcgtggacgagattcacgacaagttgaacgaagaagtaagtaacggcgcaatcgtgctggcggagcctgtgacctacgcgacggtgaagagtagcgcgttgtttgtgggacagagagtgtcgtacggcgtgccaaacgctgatgctgatgtattggaggaccatgccgagtcgtgtctctggtgttgggagactagggatttgaaattgatgccaaaatccgttcgaggagagctcagtgttcgacgcacttgccggagaaggatccatgagaggattatggctatctctgaaatgatagcagctctgaaaaagctagagagtgaacctgattacaatcaaggcttaattaaggcatcggcaaagctcaataaagcttttcccgaagcagatatccgcttgttagtggatggcttgttgcagaagaacagtgaagacatggactaagaaagagcaagccaagaaaataaattgctaattaagcagttggagagaaatagaaaagaggctgagaaagagaaagagaaagaaagcatgcacaatgaactgcaaagagaaacactgctcaatgaatcaaatttaaaattgtcacaagatgaggcaagaaatgatgagaaagcttctgaaaagaagaaacagcaaaaggaacaggtagatgaggcagaaaaggatcaacggcgtaaagagaaagcagaagctgaattaaaaaagaagcgtagtttacaaaagcaagcttcaattatggagcgctttctgaaaagaagtaaaaacagtccctctccatctgagaaggacaaagtttcaactaaatcaactgcatctgatttgttaagatgcaagaataaaagtttgtttgagtcagctacactttcaatggattgtactcttgcatcaagtagtgatgttatgctagaagatattcgcaagacacacttttcttcatggcgctctttaggacaattaattcgcttgaacagaaaacagagatggggcttacgtcagaaacctcggactaaagtttttaaggaacttaagctgagtgctattaaaactgcagttcatgatgttgagttggacatggagaaacatgtcaacagattgggagaatgtagttctgatatcagttcatgcccaatgaatgaagatagttctcctcctgataccaaaatgtacagtcggggtagacaattattgcagtttgataaatctcatagacctgccttttatggtgtttggcccgcaaaaagtcatgttgttggagcacgccatcctttaaggaaggatccaagtctggattatgaagtcagcagtgatgaggaatgggaagaggaggaacctggtgaaagtctttctgattgtgataaagatgaagaggaatgtcaagaggaatgtacaaagtctgatgaagaaagtgaagatgggttctttgtaccagatggatatctttctgaggatgagggtgcacaagtggacagaatggaaatagatgatgacattgacggggctgatagctcccctagctgtaagaatgacatagagagcgaggaattttgtgctttacttcggcagcagaaatatctaaataatttgacagagcatgctctccggaaaaatcaacccttgattatatcaaatttgattaatgacaaggacctttcatctgatcacaatattagtggtactcctaagctggagcagatgtgcttgcaagccttgagtatgtatgtaattcctggcatctcatgtatagaaatatatgtggataaaatgcaagacgaggaccaagaagtctgcctctctactggtaaaagtggtgctagtccaatatctggtgtagctgtcatacctgactcagacctaaccataattgtgactactattcaaaggtgttctcaaggtatgaata

SEQ ID NO: 5940 - DNA, 433 bp, Glycine max
  Clone ID: PAT_MRT3847_105372C.1
aattcggctcgagcggctcgagctcgagccgttttcagaaatgatagcagctctgaaaaagctagagagtgaacctgattacaatcaaggcttaattaaggcatcggcaaagctcaataaagcttttcccgaagcagatatccgcttgttagtggatggcttgttgcagaagaacagtgaagacatgtagttagacacagtattcctgacattctgattgttgtctcaaatatataatttgtgtgttgatttgttttcctaaaatataattgtagggacaagaaaagaacaagccaagaaaataaattgctaattaagcagttggagagaaatagaaaagaagctgaaaaagagaaagagaaagaaagcatgcacaatgaactgcaaagagaaacactgctcaatgaatcagatttaaaattgtcacaagatg

SEQ ID NO: 5941 - DNA, 409 bp, Glycine max
  Clone ID: PAT_MRT3847_105373C.1
aaaaaaaaaaagaccctactccattcccggggttttactacaaaaggcccactttaaaaatttcttaaaaagaacaaacccttacaaaacatttttttttggaaacccggaaaaaaaaaaaaaaaaaggggggcttaaaaagaaaacccattggcattggggggagccccttttcaatttccattacccaaggggggcgcaaaccaactttagtttcctaaaaaaaacaacaatagtcccgggcaagtctttttcaaaaacccaatggcccactttgatcccacccggaccccaacccaaccccataaatgcccccgggggggggctcccccccggggtatcccagggacaaatagcacccccgggggtaaatttggccttaaaatccgggtttaaaaaacccccttgg

SEQ ID NO: 5942 - DNA, 198 bp, Glycine max
  unsure (1)..(198): unsure at all n locations
  Clone ID: PAT_MRT3847_105374C.1
nacggctcgagctgctcgagcggctcgagtacggcgcgagaagacgacagaaggggatacgaacaaactagaacttagggtacgatatctcatttctctgatttcatctcagattcgccttcgtcggatcaagaagagaagatggggaacagatgtgccggtgaatcaatgatctgcgtctccctttccaccgagata

SEQ ID NO: 5943 - DNA, 556 bp, Glycine max
  Clone ID: PAT_MRT3847_105375C.1
ccaaagctcaaccatcttttatgcttattcattcttatcctcgcctccggccacgctcaagctactagcttcagatactgcgctgatgtaaactatgctgtgaaggtatctggaattcaaattactccagaccctgttgtgcgttctaggcctgccacctttaagatttcagctgccactggtgaaactatttatggaggaaagtggctaactacagttgcatacttcggctttgttgtccacacagaaatccatgatttttgtgaggaaatatcatgtcctgttgctactggcagctttgtggcttctcacacccaaaaattgcctgcatttgccccaccgggcacctacaccgtggagatgacactaaaaaatgagaaagaacgagccattaacttgcatctcctttaaattcaaaaatcggttttgggtctcttgtgcctgatatctgaagatggccatcgctccaacggtagaggttgctactttgacattgttgtaaacaatatctagtaaaaaaaagaaaaacacaatgacttcaagaagcatggtcatt

SEQ ID NO: 5944 - DNA, 375 bp, Glycine max
  Clone ID: PAT_MRT3847_105376C.1
ctttaatttataaggaatttccaagcatctaccccagctgagacaagcagtactattccacaagttgatcatccatgcctccaatacaaaacaaagccatcattgaatagcaccaaggtatcaaattcaagttccaaagtattctcaaatcatccatgtgatttatccttgtcaagtctccacccaaatgagaaacattcctcccagagcttatctcacacaagaattgctgaaccaagcaacttgaccttaacaaagcaaccaaatcatatgaaggcagacataggtgcttcaagagataataatatggttgatggtgcttccctagtgtttgataaacttgtttgtgggaaacccttgcctcaaattggtaga

SEQ ID NO: 5945 - DNA, 785 bp, Glycine max
  Clone ID: PAT_MRT3847_105377C.1
aattcggctcgagatatcttccaagtgcaacaccgggtccattagttaagtatagagaagaagagttgaagattttaagaggagatggaacgggagagcgcaaggaacatgaaaggatctatgattatgatgtctacaatgatttgggtaatccagatgaagatgtaaagcttgctcgtccagttcttggaggctccagcacctatccttatcctcgtagggttagaactggtagaaaagccaccaagaaagatcctaaaagcgagagaccagcaagcgagctttacatgccaagagatgaaaaattcggtcacttgaagtcatcagatttcctcacatatggaataaaatcattatctcaaaagctcttaccttcgctcgaaaacgtttttgattcagacctcacatggaatgagtttgatagctttgaagaagtaagagacctgtatgaaggtggaattaaggttccaacaggtgttcttagcgacattagccccataccaatcttcaaggaaatctttcgcactgatggtgaaagtgtccttcaatttccaccacctcatgtagtccaagttactaaatctgcatggatgaccgatgacgaatttgcaagagagatgattgcaggtgtaaacccaaatgtaattcgtcttcttaaagagttccccccacaaagcaagctggatccctctctctatggtgatcaatctagtacaataacaaaagaacatttggagattaacatggatggggtaacagtagaagaggcacttaatggtcagaga

SEQ ID NO: 5946 - DNA, 247 bp, Glycine max
  Clone ID: PAT_MRT3847_105378C.1
tagatttcttgcaatcttgcttttactttaattttttgaggcttgtggataccagaaaacttgtaactaagccacaaacttataattatatttggagagaaagttttatatgtatatgacatccaaataattccttgtcatgactagtgacttctatctatcttacaacaacaacaacaaagtcttaccccaccaattgaggtcagtttcatagatcacataacaccattcgacttggttaaagcaa

SEQ ID NO: 5947 - DNA, 867 bp, Glycine max
  Clone ID: PAT_MRT3847_105379C.1
gaaatatgggatgctattaagtcatgggtccaagagtatgtttccttgtattacccaacagatttggcaattcaacaagatactgaactccaagcatggtggaaggaagttgttgagaagggtcatggtgacttaaaagacaagccttggtggcctaaaatgcagactcgtcaagagcttattcaatcatgttctactatcatatggattgcttcagctctccatgcagctgttaattttggacaatacccttatggtggttttatcctaaaccgtccaactcttagcagaagatggattccagaaccaggaaccaaagaatatgatgagatggtggagagtccccaaacggcttatttgagaaccattacaccgaagcgccaaaccattattgatcttacggtgatagagatattgtcaaggcatgcttctgatgagatctaccttggggagagagacaatcctaattggacatctgattcaaaggcattagaagcattcaaaaagtttggaagcaagctggcagaaattgagggaaaaatcacagcgagaaacaaggattcaaataagaaaaatcgctatggaccagttcagctgccatacacattgctccttcctacaagtgaggaagggttgactttcagaggaattcccaacagtatctctatctaaggagtgtgtggttaccttttggatcaatctactttctagtaacacaaataatgcttgtcagtgtatgtgtggttattttgtgtatatttgtaccagtgtatatttggaaatatgtgctcttgatttgaatctttaactcactttatttgtatttagttcgtgctaggcttcatatatagattttttttttttttt

SEQ ID NO: 5948 - DNA, 298 bp, Glycine max
  unsure (1)..(298): unsure at all n locations
  Clone ID: PAT_MRT3847_10537C.1
ngtcncangcacgcgtacgtaagctcggaattnggctcgagctcgaccgggcngtngtncntgtatntgncttcaacaactctacccnttgncgggggctnnnnnanttcagacanatgggatnnncntgntgaacaacttgtgattnacnggaatgtgancgantattttcatattatatctnggtaacttcttttattttnanatganaaannnnaatnaganaggcatntgctagatattcattctatgnaaatacatgnntatntatanntcttanatgtggtttgnnnggttn

SEQ ID NO: 5949 - DNA, 1813 bp, Glycine max
  Clone ID: PAT_MRT3847_105380C.1
ggctcgagagatgttcttagcgacattagccccatacctgtcttcaaggaaatcttccgcagtgatggggaaagtgtccttcaatttccaccacctcatgtagtccaagttagtaaatctgcatggatgactgatgatgaatttgcaagagagatgattgctggtgtaaacccaaatgtaatccgccttcttaaagagatcccaccacaaagcaagctggaccccactctctatggtgatcaatctagtacaatatccaaagaacatttggagattaacatgggtggggttacagtagaagaggcacttaatggtcagagattattcatattagattatcacgacgcattcatgccatatttgacaaggataaacgccctacccactgcaaaggcttatgcaacaaggacaatcctgttcttgaaagatgatgggactttgaagccacttgctatcgaattgagcaagccacatccaagtggagataatttgggtgccgagagcaaagtggtcttgcctgcagaccaaggtgttgaaagcacaatttggctattggccaaggctcatgttattgtaaatgactcgggctatcatcaactcatgagccactggttaaatactcatgcagtgacagagcccttcatcatagcaacaaacaggcgtctcagtgtgcttcaccccatttataaacttctttatcctcactatcgtgacaccataaatatcaatggacttgctaggaatgccctaattaatgctggtggcattatagaggaatcatttttgcctggacgatactctcttgagatgtcttcagctgtttacaagaactgggttttcactgaccaagcattaccagccgatctcatcaagagaggattggcagttgaggatccctctgcaccccatggccttcgccttgtgatagaggactacccttatgctgttgatggacttgaaatatgggatgctattaagacatgggtccatgagtatgtctccttgtattacccaacagatgatgcaattaagaaagactctgaactccaagagtggtggaaggaagctgttgagaagggtcatggtgacttgaaagacaagccttggtggcctaaaatgcagactcgtcaagagcttattcaatcatgttctactatcatatggattgcttcagctctccatgcagctgttaattttggacaatatccctatggtggttttatcctgaaccgtccaactcttagcagaagatggataccagaaccaggaaccaaagagtatgatgagatggtgaagagtccccaaacggcttatttgagaactatcacgccgaagcgccagaccattattgatctcacagtcatagagatattgtcaaggcatgcttctgatgagatctaccttggggagagagacaatccaaattggacatctgattcaaaggcattagaatccttcaaaaagtttggaagcaagctggcagaaattgagggaaaaatcacagcgagaaacaatgattccaacaagaaaaaccgatatggacctgttcagctaccatacacattgctccttcctacaagtgaggaagggttgactttcagaggaattcccaacagtatctctatctaaggagtatgtggttaccttttggatcaatctacgtactttctaataacacaaatgatgcttgtcaatttatgtgtcattatgttttgtgtgtttttgtaccaatgcatatttggaatttggtggtgctcttaatttggagataataataataataatgctttcaatatcactttatttgtaaaaa

SEQ ID NO: 5950 - DNA, 468 bp, Glycine max
  Clone ID: PAT_MRT3847_105381C.1
attaatgcatttgatccctttgccaataaggataggaaagacattaaggcccctggtcttttacaaacccaaaatgttggcccccccctaaactctcttacgcagggtaccaaaaatggttctgacggacttaaacaaaaactgtgggacgaattcttggctgatctttaaggggatgaggatcaaaaaaaaaacaccataacgacgggagctgctaatgaacaaaggccccaagacctgccgggggtccccggaccggatttcacaacagaggggctgatgccttgggccccaaaatggtggagtatactcgaagcccccccggatgtgaccaaaaaaaaaaactaggggctgaagaggttttgattttaaaaaccaaccactttggggggggggaaaaaataaagggcccccctcaaacctttcttacaaaacagaaagggaaaaagatgggggccatcctctcca

SEQ ID NO: 5951 - DNA, 379 bp, Glycine max
  Clone ID: PAT_MRT3847_105382C.1
cgcacaaggaaacgcttgggaggagataaagagagagagagaagtgcagaaaaaatgagactgttcgatccatgggctgaattcttcaagatagaatgtacgcggaattggtccttcttggttggattctccatcaccgtaactctcatgaccaaactttcccttgggctctctgacgaggaagccaaaacgtcgaaattcgtccaggcacacattatgtgactttacaatggaacacttgcagtggctttgcacattgcattatatgtgtgaagagagctcatggttgtaatacatgaatagagatgtagtatacactacatgtccctatttacattgtggctgattactacaatgtgattgagaaattcatactcat

SEQ ID NO: 5952 - DNA, 395 bp, Glycine max
  unsure (1)..(395): unsure at all n locations
  Clone ID: PAT_MRT3847_105383C.1
aatgctagccagccctgnggccacgtacatggaataggattgaaaaatctagtactaccattaaatgatgccactagctagctagctagggagggacaaagattggtcatttcattggtgtcacggttgcacggtgcttgaaatggggtagggtggacccgtggagtgttgttttttttctccaacaccagcttgcaaggacttgactactactactactgctactactagaaccatcgtgattcccttgtggatttccttttggtactaccgcactagctagtaaaccacgcaaattccgtggctgcttgtgctttatttccttttcttttcatgtgggagagtggttgttattattaagtggcaatgaatgatggcaacttaatggttcccaa

SEQ ID NO: 5953 - DNA, 1164 bp, Glycine max
  Clone ID: PAT_MRT3847_105384C.1
tggtacgcctcagtccgtgcgattcccggggcacccacctccgttaatcccttctacaaaccatacatataagtatttatatactactaggggattaaggggtaaaaccttcaagcgtgcggggtgttgttgaggataagaaactagtggtgaaggagatcaaaactttggctggctcttggcagaaagtcttgttttctcgcatctttcgggaagcccatggcggatgttttatagccaaggaagcgtatgggatgtgtgaagatttttctctcttctctgttattcccaattgtgtttacctgttcgcaggggttcttagttggggtttcagcccttttgctcaccaaaaaaaaataagaaactactgggtgtggcttttggtgtgtttgaagttgcgctgaaatagagacaatcggttggggttggtagtgttgcgttgcgttgcgtatttgtgaaattgatgcagcgcggtgctcgctgaagtgaagtaatcccttttggttgtgttgtgggtaatgcttctcagtaattctagtccaccattttcatttgtctcaggaatcactatgagtatgactaagggaataactccaagagattctcttttgctgaagcccaaccctttatcttctcttagttcactccattctctccagcatggtaacaatacgattagagttcctgtgactataagaattcaaccagagaggttttgtcatggtgcgccaaccgtcacgaatgaagtgccgcaaaatgctgattttcctcagcactattccagaaaagagaagaaaccttttccagttcccattgtagaactgcgacgagcagctagggagaggatgaagaagatgaaagatgagccgagaaaatcaatgtcagcacctaagaatgggttgctggtgaagagccttgtattgactgcgtataatgtgtataacactaggatcactttgatcaacaatctgaagaagctgctcaaagtagtgcctgtgcatgcttgtgggtgcaatgaaatccatgtaacctgttggacatccattcgagttatgtaaaggcacacatgaattatagtattccccttttctagcatattttagctaatgtggggcttgtgtgaaatgcgggttaagcccataaaaattacttgtttttgttttt

SEQ ID NO: 5954 - DNA, 595 bp, Glycine max
  Clone ID: PAT_MRT3847_105385C.1
cccacgcgtccgatcaaaactttggctggctccaggcaggaagtcttcttttctcacatctttcgggaagccaattggggatgttttatagccaaggaagcgtatgggatgtctgaagatttttctctcttctctgttattcccaatgtatttacctgattctgttagcagactctggggagtctcgttttgtaggggttcttagttggggctttcggcccttttgctcacaaaaaaaaaaaaaaaaaagaaactactgggtggggcttttggtgtttctgaagttgcgctgaaatagagacaatcggttggggttggtagtgttgcgttgcgtatttgttaaattgatgcagcacggtgcacgctgcagtgaagtaatcccttttggtggtgttgtgggtaatgcttctcagcaattctagtccaccattttcatttgtctcaggaatcactatgagtacgactacgggaataactccaagagattctcttttgcttaagcccaaccctttatcttctattagttcactccattgtctccagcatggtaacaatacgattagagttcctgtgactataagaattcaaccagaga

SEQ ID NO: 5955 - DNA, 648 bp, Glycine max
  Clone ID: PAT_MRT3847_105386C.1
cttaaatccacattctaacagaaaccaataacaataataaagtatttatatatataggaaattcaagggttaaaacctctcagagcgtaaggcatggtaacagtaggattagagttcctgtgactattagaattcaaccagagaggttttgtcatcgtgcgccaaccgtcacgaatgaagtgccgcaaaatgctgattttcctcagcactattcgagaaaagagaagaaaccttttccagtgcccattgtagaactgcgacgagcagctagggagaggatgaagaagatgaaagatgagccgagaaaatcaatgtcagcacctaagaatgggttgctggtgaagagccttgtattgactgcgtataatgtgtatacccccgcgatcactttgatcaacaatctgaagaagctgctcaaagtagtgcctgtgcatgcttgtgggtaattatagtattcacattctctagcatattttagctaatgtggagcttgtgtgaaatgctggttaagcacataaaaattacttgtttttgttctagttgagtaattgtgctaatacagagatcaattgcttctgacctcggaaaaaaaaaaaaaaaaaatgatttgaaaaaaataaaaaatttgcaaggggggaaacgtgttaa

SEQ ID NO: 5956 - DNA, 764 bp, Glycine max
  unsure (1)..(764): unsure at all n locations
  Clone ID: PAT_MRT3847_105387C.1
attgattaagcgttcaaactcgaatttcgaagtcaaaacaccaaatacctatgtcctcaaaatagtattccagaaaatgaagcaaaaataagatgataacagcagaaattagcggtaacggcggagagaaagggtgttgtttctcttccaggttgccctgcgagatggacgtgctttgtggtacagatgtcctctgccacgtaaacccctgttgcttttcccagtacctcacccgctgcaagaagcgcatgacatcagactgcttcttgcgccatagctctgaaacatacttgtaggcacctattgccaatcacaacaacaaaaaaacaacacattttatcaattacacttccaacacaggtaacacaaataattccaccagaacgaccaaaagccatatatatcaaattgcacaacctaatgactaatcatttgatattaattgacatcaatgagttgttagacctaatttgatgataaacaccaagaggctaagactgtacaatatttaatttaattaatatcttgctgatgcaagtgagagaacacaattggattacactaaaaaaaccaattatgaaatcaaatgcacgcagcttgccaaaacaagtcactttctttcaaaaagaccaactatatttaaatcacttggatctgaccatcaacttcaaaaatcatatgggatcaaagtaagaatgctctcagatcctacaaaactaactaaacannnnaannatatatagnnnaaaacatttacgggcagc

SEQ ID NO: 5957 - DNA, 407 bp, Glycine max
  Clone ID: PAT_MRT3847_105388C.1
gtattacgcaggcacaacagttagtccaccacaagaacgcagatccgaggggaaaaccggccgaaaccgcaggcgcgagcgcaacagaccccggaatgggaacaagaagcagcgagtccacgcgcgctcgacacggggtgccaagcaagggggccgtaaaggtagcaggaagaagcgaaacaatagaccggaaaataggtggaagaaagacgagaccggaagagaatcggccgacaaagacgcggccagacggaacacggttaaagaggcccgagagaacgcgaaggcgacctgaggaagacaagggctcacgcaaggccgcccaaaagaggtgacacaaaaaagctgtataggaagggggagagatcggacgagggaaggcctgggccgattccaaaagggaggag

SEQ ID NO: 5958 - DNA, 932 bp, Glycine max
  Clone ID: PAT_MRT3847_105389C.1
tacggctgcgagaagacgacagaaggggagttttctgttggcgcgggtgaggtagaacccttccacggtggtgactgcgcgatgggtgcctacaagtatgtttcagagctatggcgcaagaagcagtctgatgtcatgcgcttcttgcagcgggtgaggtgctgggagtataggcagcaaccttccattgttcgcttgacaaggtcgacccgccctgacaaggctcgtcgcttgggcttcaaggctaagcagggctatgtgatataccgtgttcgtgttaggaggggtggccgaaagaggccagttcccaaaggtattgtttatgggaagcccacaaaccagggtgttacccaactgaaatttcagcgtagcaagaggtcagttgctgaggagcgagctggacggaagctgggtggacttagggtcctcaattcttactgggtgaatgaggactctacttataaatactttgaggtgattctggtggatgtggctcatgctgctattagaaatgatcccagaatcaattggctcgccaatccagtgcacaagcacagagagctgcgtgggctcacctctgctgggaaaagcaacaggggtttacgtggcagaggacatctgtaccacaaagcacgtccatctcgcagggcaacctggaagagaaacaacaccctgtctctccgccgttaccgctaatttctgctgttatcatcttatttttgcttcattttctggaatactattttgaggacataggtatttggtgttttgacttcgaaattcgagttttgaacgctttaatcatatctttttctatataatttgagttttgttattgttaaattgaaagtttatacttgatatttgttatctaccccatggaatttaatagctgggcctgccattttatttcactggtcgaaaactttgtt

SEQ ID NO: 5959 - DNA, 372 bp, Glycine max
  Clone ID: PAT_MRT3847_10538C.1
ctaacaatattttttttgtttgttatgtctttgaatttacaaaggttttcattatgctatatcaaaaaccaaaaaaaaaatttttttttttgaaattaacaaaaaaggtacaaaaaacttagggaagaagaaaccaaaaaaaaacccaaaaattagcaaaagacaaaaccaaaaaaaaagaaaattttaaaaacaactaaccaaaaaaaaataaataaacagaaacaaaggaggagcaaaaagagaaaaaaaaggaaaaggcatcataagagcttgaaaagaacagggtcggtcggtggccccactttgggcttggcctttttctcttttgctggtccaacggagactatttcagggagacaccactttgga

SEQ ID NO: 5960 - DNA, 143 bp, Glycine max
  Clone ID: PAT_MRT3847_105390C.1
cctaactctgttattagatcactactaacacactacgggtcggggttattaacaaccatgcgctctcccatttactccagatgcactttaccatttcatctcattacactttacatgttacataattagtatagcactaccaa

SEQ ID NO: 5961 - DNA, 899 bp, Glycine max
  Clone ID: PAT_MRT3847_105391C.1
cccacgcgtccgtacggctgcgagaagacgacagaaggggagctttcagttggcgcgggtgaggtagaacccttccactgtggtgactctgcgatgggtgcctacaagtatgtttcagagctatggcgcaagaagcagtctgatgtcatgcgcttcttgcagcgggtgaggtgctgggagtataggcagcaaccttccattgttcgtttgacaaggtctacccgccctgacaaggctcgtcgcttgggcttcaaggctaagcagggctatgtgatttaccgtgttcgtgttaggaggggtggccgaaagagaccagttcccaaaggtattgtttatgggaagcccacaaaccagggagttacccaactgaaatttcagcgaagcaagaggtcagttgccgaggagcgagctggacggaagctgggtggacttagggtcctcaattcttactgggtgaatgaggactctacttataaatactttgaggtgattctggtggatgttgctcatgctgctattagaaatgatcccagaatcaattggctcgccaatccagtgcacaagcacagagagctgcgtgggcttacctctgccgggaaaagcaacaggggtttacgtggcagaggacatctatatcacaaagcacgtccatcccgcagggcaacctggaagagaaacaacaccctgtctctccgccgctaccgttaatttcgctgtcatcttatttttgcttcattttctgaaatactattttgagaacacacagcatttgatgttttgactttgaaattcgagttttgaatgatttaatcatctttttctataaattgacgagtttttctattgtcaaaaaaaaaaaaaaaaaaaaaaaaaaaaaagcggccgctctacaggatcca

SEQ ID NO: 5962 - DNA, 398 bp, Glycine max
  unsure (1)..(398): unsure at all n locations
  Clone ID: PAT_MRT3847_105392C.1
gnagatattagggttgtttgggaatgcgctggggnagaattcaatcggtcggggtggatggcagggccctgcgaatgaggctcaaatgttacatgccatgggctttaccttgactaagacgggggggaaattttgctcngttttgtgatagatgctcgtttgtggccacgtgatgctcttgccgccgagcaggaatganccccgggtaaggggaatggttctggctccacttaaaacgctggtggcgtggcctcttgtattcctgcctcctgtgttgtttttagcctgctccgggtttggatatttgacctgaccctttgttggcctgctgcggtgtgtgattgcgcgtgggctactgttgttgatgcaaaatggtctcttcgtgtggggactctcgg

SEQ ID NO: 5963 - DNA, 563 bp, Glycine max
  Clone ID: PAT_MRT3847_105393C.1
gggggggatcttgatctggtatttctgtatacgaggagtgcttggcgatttcatgtagccgtgccctgcacggatgggtattcaaaaaattcatagaattaaattactcataagttcattcacccaaaaaaatcataagaaaatacttatgagttctgtttgggctggaacagattcggctttatttaaatcgatacatgatatgaaattaaattttgaaaaggtccttttttatgtactccaaaaatctcagcttacactttcttttattatggaatcttcgatgcggaaggaaagttttacgttccagattaattaatccggaatttacaagaaaagattaatctagaattgtctctcattaggggtgagaataggtcaggtcgacctacaggggcctacgacctggcctgaactggcctatttaattaaaaagttaggttcaggctttttcaaaaacctattaaattaaatagaccaaacttagatttattaaaaaacctgataagccgacatatatatatatatatatattattttttggatataattattttttttga

SEQ ID NO: 5964 - DNA, 494 bp, Glycine max
  Clone ID: PAT_MRT3847_105394C.1
tttataaaccggaattaaatccggtttgaacccattcattaccgtctccatcatagtcgccgtcgcattctttggcactgcttgcctcccggcattttgggcaaagccttgcatggtcggtggcaatttctttgccgttgaggcttcgctccaaggctctccgaagatttgctcgtaaatgtcttggatcgagtgacctgggtccgggtcaacatagaccgactggtccgagaattgaaccagattcgagttgggattggatgtggaaatcgggttagactctgaaccggtgataccgttgattttcggatcgagggacttcatccaaccgagcatgtggtcaaaggaacggttttcttgaaccaaaacgacgatggttttgatggggtagccagcgttgttggtgctggaatttgaagccattttattgagtttggatttacttctcccccttctgcgtcttctcgcagccgctcgagccgaatcggctcgag

SEQ ID NO: 5965 - DNA, 654 bp, Glycine max
  Clone ID: PAT_MRT3847_105395C.1
gggctatgtgatttaccgtgttcgtgttaagaggggtggccgaaagagaccagttcccaaaggtattgtttatgggaagcccacaaaccagggagttacccaactgaaatttcagcgaagcaagatgtcagttgccgaggagcgagctggacggaagctgggtggacttaaggtcctcaattcttactgggtgaatgaggtttgttattgtattacttctgttgaaattgaaatttggttgtgaatcatgtgttgatttggtaaaagcttgtcatggtgtttcaagactctacttataaatactttgaggtgattctggtggatgttgctcatgctgctattagaaatgatcccagaatcaattggctcgccaatccagtgcacaagcacagatagctgcgtgggcttacctctgccgggaaaagcaacaggggtttacgtggcagatgacatctatatcacaaagcacgtgcatcccgcatggcaacctggaagataaacaacaccctgtctctccgccgctaccgttaatttcgctggcatcttatttttgcttcattttctgaaatactattttgagaacacacagcatttgatgttttgactttgaaattcgagttttgaatgatttaatcatctctttctataaattga

SEQ ID NO: 5966 - DNA, 626 bp, Glycine max
  Clone ID: PAT_MRT3847_105396C.1
tggtgaccctgcaatgggtgcctacaagtatgtttcagagctatggcgcaagaaacagtctgatgtcatgcgcttcttgcagcgggtgaggtgctgggagtataggcagcaaccttccattgttcgtttgacaaggtctacccgccctgacaaggctcgtcgcttgggcttcaaggctaagcagggctatgtgattaccgtgttcgtgttaggaggggtggccgaaaaagaccactttcccaaaggtattgtttatgggaagcccacaaaccagggagttacccaactgaaatttcagcgaagcaagaggtcagttgccgaggagcgagctggacggaagctgggtggacttagggtcctcaattcttactgggtgaatgagcttgtcatggtgtttcaggactctacttataaatactttgaggtgattctggtggatgttgctcatgctgctattagaaatgatcccagaatcaattggctcgccaatccagtgcacaagcacagagagctgcgtgggcttacctctgccgggaaaagcaacaggggtttacgtggcagaggacatctatatcacaaagcacgtccatcccgcagggcaacctggaagagaaacaacaccctgt

SEQ ID NO: 5967 - DNA, 212 bp, Glycine max
  Clone ID: PAT_MRT3847_105397C.1
attacagaaaataaattcgggctggcgctttatcctgggaaatactacatttaacaaaatctcttgaaactaattgaaaaagcatgagttcacatgcttttgccctctaaggggcgaaccctattgtctctctttttgaacgaacaattcttgccaaaaaaattcataacctaaagactttgcccaaaacacaattaatcttatccccttaa

SEQ ID NO: 5968 - DNA, 814 bp, Glycine max
  Clone ID: PAT_MRT3847_105398C.1
gggactggttttggcaagctgcttccatttgatttcataattgggttttgtggtgtaatccaattgtcttatctcacatgcaccaaccagatgttaattaaattaaatactgtacagtcttgggctcttagtgttatcatcaatttaggtctaacaactcattggtgtcaagtaatatcaaacgattagtcgttaggttggacaatttggtatatatagcttttggttattctgatggaattatgtgtggtacctgtgttggaagtgtaattgataaaacgtgttgtttatgttggtgtgattggcaataggtgcctacaagtatgtttcagagctatggcgcaagaagcagtctgatgtcatgcgcttcttgcagcgggtgaggtgctgggagtataggcagcaaccttccattgttcgtttgacaaggtctacccgccctgacaaggctcgtcgcttgggcttcaaggctaagcagggctatgtgatttaccgtgttcgtgttaggaggggtggccgaaagagaccagttcccaaaggtattgtttatgggaagcccacaaaccaaggagtaacccaactgaaatttcagcgaagcaagaggtcaattgccgaggagcgagctggacggaagctgggtggacttagggtcctcaattcttactgggtgaatgaggactctacttataaatactttgaagtgattctggtggatggtgctcatgctgctattaaaaatgatcccagaatcaattggctcgccaatccactgcaccagcacagagagcttgcttggccttcctctggcggcaaa

SEQ ID NO: 5969 - DNA, 259 bp, Glycine max
  unsure (1)..(259): unsure at all n locations
  Clone ID: PAT_MRT3847_105399C.1
aaaaaacgggggggggaaaaaacaacttctttatggattgactgccatttttttagaatggggcacctaaattgtggagttaaaaacactcctgcccatatatgaattcttaagtttgcctatatcaaaacaaaacccccggagataagcctttacctgattgggttggatgggncaaccaccaaaatcacaatcttctcaatataaaccccttttgtgctgctcaaagttaagttctgacagcaaccctatcttattc

SEQ ID NO: 5970 - DNA, 167 bp, Glycine max
  unsure (1)..(167): unsure at all n locations
  Clone ID: PAT_MRT3847_10539C.1
ttctcaaatccacgacactgattctganaagtctgaatagtattacttcgagtgaaaacgcnaaaccgagaatgagaatgagaaaactgattctcattctcatcatcttccggaggagtatactgaaactgagagggaagaagttcagcgtattgaatggggggttc

SEQ ID NO: 5971 - DNA, 598 bp, Glycine max
  Clone ID: PAT_MRT3847_1053C.1
tcgcgatctagaactttttttttttttttttttttttttttggaaaaacaacaatttcgcactccagagtgaagcagtactgaaacattgaaaatgcgagcaatgatcaagctcgcagacttgctgacaaggtatgagaagattttgaataaagtaaaaacatgagtaaatctaaagacaaactgctcttgaatttcacagatattgaactgctgatgctaatcaacctgcgccaactgtcacatttaacaggaaaaaggaagggatcatcactgattataggatcaagtacaaaaacatgacagcgttcccatggattagaccaactccagtaaatttcaatttctcagatgctccaaactacgcatagtttgattctggtgtaatgttctcaaccttgtccatctcctgaattttaacgggcagtttgtcttgctggcccgaggcattagcagttggtagatctttttgttgtttgggagcagcatataatggaacagcttgtcgaatagtgactggaggagcaactcgtactggaggagcccgtataacaggatggggcaccgaggcaggtggtgcagcgaatgcaggtacaact

SEQ ID NO: 5972 - DNA, 415 bp, Glycine max
  Clone ID: PAT_MRT3847_105400C.1
aattaattttaaaaaaaaaaaaaaaaaaaaaaaaaaaaaaaaaaaaaaaaaaaataaaaacaaaaaaaaaaaaaaaaaaaaaaaaaaaaaaaaaaaaaaaaaataactttgaatttaaatggggcgctcttttttaagtttccatttttacttccccgtccttgcgatgtattactttttttttagtgtcacttaattttatttcattggccgtttttttccaactttttgattggaaaacccctggttttccccaatttatttgctttgcagcacttccccttttctccattttgattattacaaaaaaggccctcaccgttcccctttcccaacatattcccatcttgattgtcaaatggccccccccctttaccggttcatttatcgcggtggttgtgttgttttcccccat

SEQ ID NO: 5973 - DNA, 126 bp, Glycine max
  Clone ID: PAT_MRT3847_105401C.1
ggctttcttctccaccatcatcgtgatcatgtcacatcacaaccaatccaccgactaggcttatttggtccaagacatcgctcatatcctgcatgctaccaacacacacagataatgccttccaca

SEQ ID NO: 5974 - DNA, 575 bp, Glycine max
  Clone ID: PAT_MRT3847_105402C.1
tcgcctttcgcgtccgcccacgcgtccgcccacgcgtccggagggaccaaaagtgctttcatttaaaaatccagggaccaaaacaaaacaaaaaaaattgtagggacaaaaggcaaaaataggtgtatttgtagggattagaaacatatttaagcctttgcacaaagactctagtgttgctatcctaaatctttttttcaatggtacttaataatccttttaactttcatacttgaagaggtaatttgtgttgcttgtaatttgtgtggttaaaacttaaaaactgttcatgcactcatttcaaatcatatatggagtagtaattttctagtcagtgttttaaattctggatagcagtgtgtagcggccttccccaaaaacgtaatagtggttgctagctgatattttgaaaatttttatatatagtctatgtaatgtatattatactatatacatttaaattctcaaaaatgatagaaattgctcaaaataatgatatccatagttattaataaaaagtcatggtgtcttaaaaaaaatacaagtaaatactgacataagtcaaataggggttt

SEQ ID NO: 5975 - DNA, 295 bp, Glycine max
  Clone ID: PAT_MRT3847_105403C.1
cgtacgggctcggaatcacgtgactcgagcgtatcggctcaggcaattgaaccaactgattaccgtttccgttttgagtactactaccaatggtgatcttgttcacgggaaagatctcgccatggttaaagtcaatgtagcatctgctgctgctggcttgacatcaagctatcctccgactccatcgttggaatctggtttgcaaacagacagagcggttaattgtggagtattttggaaggatgtcttacgttgctcataacgttaatcagccccaagagaaagatttgttgga

SEQ ID NO: 5976 - DNA, 345 bp, Glycine max
  Clone ID: PAT_MRT3847_105404C.1
tatattagtggcacggagacagaaccagttagcggcatcgctgtgcaggatgacactgctgtaggggatcgtgttgcagtggtcgtggcgataatgttggtggacagtgcgaaacacccccagcaaaatcacttgcgccgcagcgtgtttcgttaccagagggggcagcttggacgggaagtgcaatgtctatattggccgcgacgaccacaaaactgcttgtgtcgcaacctgtgtcatcgacagagggggcacctcctctccttttccggccatggggagcagatccaacagagtcggcatggtttttgtgcattgtcgcaccatcggtgtcgttggtgttgc

SEQ ID NO: 5977 - DNA, 575 bp, Glycine max
  Clone ID: PAT_MRT3847_105405C.1
ggaacaaaaaaccttttcgggattattttggaaggaaaaaagtcctttgaaaattctaggaaaacccaggggggaccaccggaggcggtttataaacaagtaaaacaacttttttttagggataaaaaaccaagaatccttccctcaaaggcattctttcccctttaaaccggttccccttagggcggaaaaaattggaaggggcaaaaaaggaaaaaacgggggggggcggaacccggcatcccccccttttttttgggggggtccccaaaaaacccacccaaccctttaaggcctaaggctggcccaattcaggggcttttttaaggcccatccccaccatttaaacgggatggaaaccttcctcgccatgggctaggggggacggaaaaaaaccccggaccccgccggaatctccttgaacatggccatcactggaataatggggggacccctccacgggcgatcatccaaacgggaaaccgcattcttaaagggcggaaaaagccccatctccaaatgggggtcttccttcatgagctccgggccaaaaatatcacggattttcagctggg

SEQ ID NO: 5978 - DNA, 1045 bp, Glycine max
  Clone ID: PAT_MRT3847_105407C.1
cggctcgagcaaagttaggtctataaacaacaacagcttgggttcagtagaaaattgaaaattccaattcttgggtttgaaaacagaacagctaaactaaatcgaagcaaacaatagtgagtgagatcgtgaagaaattagtttggaaatggcagtggcaggttgtcagaagcttctggaactgagcaccaagatcgtcgctgttggcagaaactacgctgctcacgccaaggaattaggcaacgccgttcccaaggagccggtgttgtttctgaaaccgacgtcgtcttacttgaaaaacggcggaaccatccaaatcccacacaacgagggctctctgcatcacgaggttgagctcgctgtggtcatcgccaagaaagcacgtgacgtctccgaatcctctgcgatggattatgtcgccggttatgcactggctctggatatgactgctagggaccttcagctgctgctaagtctgcaggtcttccatggagtttggcaaaaggccaggacactttcaccccaattagttctattttgccaaagactgcagtgccaaatcctgatgatctagaattatggttaaaggtagatgaggaaatacggcaaaagggctcaaccaaggacatgatctttaagatcccatttctaattagctacattagctctgtcatgacattgtttgaaggggatgtcatactaactggtactcccccgggtgttggccctgtcaaagagggtcaaacaattactgctggcgttacaggccttgtggacgtacagtttaatgttgaaaaaagagctaggcctgttctttcttgataaaaccctcctcgaaggtactacagttctacagaaaatatcttgccaaaaggaaaccaggggacacaataaaaattcagttatatggacttgagagtctacgatatttaacagtttatttttttgtaatggtcgtcgaatccgtactatagatcttttggagtgctattttagacttttgtcatgaaaatgattatgatgatgggcgactttctattaaaaa

SEQ ID NO: 5979 - DNA, 115 bp, Glycine max
  Clone ID: PAT_MRT3847_105408C.1
acgaacttcctttttggaggaatttactattgtgtttgccgcccttttttatttctgagaattctaattggttccaggggactgaagaagcagacaagaaatatttgtgggtttt

SEQ ID NO: 5980 - DNA, 340 bp, Glycine max
  Clone ID: PAT_MRT3847_105409C.1
ggatggcaaaaactcccattggaaaaccaaaattccttacaatcctcatttcgaaatacaaagccccttccttttaaatggaattaaaacgaccgaaagaaaatgggttccaaagaggttggcccccacacagataccttaacttctataattcactggcccagcaaaaattggtggcattcattcaaaggttaaggagagggcgcagcttctttttttctgggggccggttcgggaccctttttgaagccggttttggatttgggagggacggtacccaagtgccttattctttcaggtccggggggctttcttctaatgggccttacgccggaccccg

SEQ ID NO: 5981 - DNA, 123 bp, Glycine max
  Clone ID: PAT_MRT3847_10540C.1
cacacgcatactcctcaatcattcatatacatattcacctacactaatccatcagtttctataaactgaatcagtctccttaacacatgcgcaggggcctttcattactccacaactaaagtc

SEQ ID NO: 5982 - DNA, 478 bp, Glycine max
  Clone ID: PAT_MRT3847_105410C.1
gaatgccttaacgtcattggacctgctggttcttcctttcaagtcattcttttggatcttcacatgcctgagcttgatgggttcgaagttgcaacgaggattcccaagttcagaagccggaattggcctgtgattgttgccttgactgcaagcacagatgatttgtgggaaagatgcatgcaaattggcatgaatggagtcataagaaagccagttttgttgcatggaatcgctagtgaactcagaagaataatattgcagggaaatagtgtcatgtgaggattcatgctgcaagttaaagcacttgcaacatatcaagaaattaagttataaaaaaaattccagtcacatattccatagaatttggtagctcaaagaactctttggctcctattttccagcaatattccagcttagagatgttgtgttatagccctactttcataagaaaattaaatggtatacaaaatagttcctt

SEQ ID NO: 5983 - DNA, 217 bp, Glycine max
  unsure (1)..(217): unsure at all n locations
  Clone ID: PAT_MRT3847_105411C.1
ggcacaagaaacctttctattcagatctgaatctggaaacgagggttaccccgacaagctgtgcgagcagatctctgaggcagnaaaagattttttttttgaaaaggagcctgacagaaaggttgcgtgtgatatatgcaccaagagcaacagggggatgggcttcggagaggtcacnaccaagggcaagggagactatgaaaagattgtccgcgac

SEQ ID NO: 5984 - DNA, 692 bp, Glycine max
  unsure (1)..(692): unsure at all n locations
  Clone ID: PAT_MRT3847_105412C.1
ctctaattcagctttggagtaacctagttgaagatgccatgggaaacctctttggcaaaaataaaaagcgtgacactgaaagtgccaacaataataaaggaagaggtggaagaatctacactgccgtgaccacaagaggcttaccacctcatttcccaacacaattacctcattcacagcctccaccgctattatatccaactctagaacctccgccaccgccaccgccgccgccgccgccaccggcactaccacaatccatgtccaagaaaccaagttttgcgagagttttcgctaaacaaagctcttcagtcatgaacaacaatcaatctgctgccaagaagtatgctttgattcgtgataacttctctacccttgaacaggtgactacagccctgaggaaagaaggattagaatcatcaaatctcatccttggaattgattttacaaagagcaatgaatggactggcagaatctcattcaataaaagaagcctgcatgcntattggaagtacacctaacccttacgagaaggccatctctattattggcaagacattggctccctttgatgatgataacttgattccatgttttggatttggtgatgctactacccatgatcaagaagtgtttagctttcacagtgatcattcaccttgccatggctttgnaggaaagtttggcctgct

SEQ ID NO: 5985 - DNA, 630 bp, Glycine max
  Clone ID: PAT_MRT3847_105413C.1
cggacgcgtgggctgacgcgtgggctgccaggcttgaaggggagttacgaagccctgacctttctgtgaattcatgtctaaggtcattgctagctgaaaaggagttgaaaattaggcagatggagagggatatggaagatcttaggcgacagagggaataaagttcaaaaggggtcaaaccattgtgggccctctagtcaagttgtcaggtgtctttcttttcctgaagagaatgagtcagctaatggtaaacgtactccagagcgaagagaggcagtaggcagaagagaggcggtaggcaggcaggcaatgctgaagagtttattggcttctcctgacccatccatactagttggtgaaattcgaaagcttgagaatcggcaactgcaactctgtgaggatgcaaatcgagcacttgaagttctgcacaaggattttgcgactcacaaacttgggtgggaatcaagaaactgctgaaaccatgtcaaaagtactatctgaaattaaagacttggtagctgccatctctactccagaagaaattatggcagcaaataaagacgatctaatagcaaagatcacacagttgaaaaatcaagggatcaccattgcatctttagaaaggaagct

SEQ ID NO: 5986 - DNA, 553 bp, Glycine max
  unsure (1)..(553): unsure at all n locations
  Clone ID: PAT_MRT3847_105414C.1
atgaattccacaaccaaaagataaggcgcatggatgataatttagaaatttgacctaattttatccccaactcngattaagaatgattacaattttttactttattgttgtttttaatgaaataatgaagaaattaatatttttgtaattttttatcagcagaagtcaaaagaagaatatttcaaatgctttagaagaaaattaatgcaaaaattgaaagaaaaaactctgaaaaaaattgaaagaattggaccgctcccttagcgcacaagaccaactcagcatgcatgctcgcttagtggctaactcacgcttagcgtgaagaagacccacaagacagcacaaggtcgtacttagcgcgaacatcgcgctaaacacatgattaaaccgttattctcactaagccccagagtgcgtgctcaacgcaaggtcagcatgaaaagctaactatcttaggcctatacatgagtcggacagcagagggaaaaacacacccagtctcaaagagctctatattgaagatatccaaagcctgagcatctctataggggaa

SEQ ID NO: 5987 - DNA, 695 bp, Glycine max
  Clone ID: PAT_MRT3847_105415C.1
gaaaaacctagatgctgtcatacctgtcaagtaatcctccaccaattttattgtgtgtgataggtatgacctgattagtaatgtggcatatagagttttatctgtaattcttaaagcaaatgcagaatgcggttcacttataaattcaaattttaaagtgatactacagaaaatagtaagtttgtcacctctttggcctcacaacaacttgaaattcatgtagtttgagaaattcttaatggtttaacctcatggaagacgaaattaacttagcttttgttcatgacagtttgcccatatttggtattggttcatcactgaatagatggacgcatgagatagccagcattggcactaatgcattgtgtcgccgggcaagacaggaacaggaacaggttattgattttgttccccaagtttcttgcacaaaaatatttgcaagggaaaattttgtctgttgtaaagtatgctgccttatttctttgagagaattagatcctccgagaagaacaaaaaattgttttaatcgacttgtttgattttcaacattatatacagctatgtatataggtggattcatctgggggctaagttgatgttgaacaatattgtttctgatttaggccatacatcaatatttgctgagggaaatttctcaaatgtactccactgttaatatttcttattattctttc

SEQ ID NO: 5988 - DNA, 395 bp, Glycine max
  Clone ID: PAT_MRT3847_105416C.1
agtaagttagcatattgagatcttctcaagagagactttaaacaaatgtctactggaacgcgggtggctcctgaggacaaggcctgtgtatgggcacaacttcattctgtaccatggaataatctggaaacccaaaaagcttatcttgccaatgtcgaaaatgagtaacaagaattgaatttgcacagtccagaggaagctcgccaattgagaaggaaagctctctctcgtattgaatggctgcaaaaagcagatgagactaccatagcacagatagaagagttccactcaatgcataggatgatgaatgctcctaattcaaatgataatatcgatctactgttgagcacatgatttgatggatatacaaatgagcaggtaaagctattccaaac

SEQ ID NO: 5989 - DNA, 453 bp, Glycine max
  Clone ID: PAT_MRT3847_105417C.1
cgaggaccgcgctttcatatgtgctgggtcttatgagtcgatcctctctcctgtacaagatacaaagccgagaagcagagcaacctcgggtgccagtgctaatatggaaacccctgtcaaaagctagaagtggcagtatgggttcccacccagctgtcgtaaattgagcccagttgggacctactaaacgtgatggatagccacggggctgtattcatgattacgcttaacagaaagcgttttactcattgcccctaaggccttgtccgaccagttttcggcagttcatcctgtttaatcgaggaggccagggccccacttgttttatgtttctggtgaagatgcttcgaacgtgcctctacctatcttccgggtgcaatcgacctaaagctgctgtctcactgcttatacagccatgctcgggcaaacaattgtataagcaatgaacatatg

SEQ ID NO: 5990 - DNA, 1891 bp, Glycine max
  Clone ID: PAT_MRT3847_105418C.1
aacagaagccagagtattctatagccactggtttagaaaagaagccattgccactttgtacaaccaaagcattaaaggtgagcataggaaaaagaagaagtggaaataagactttttattttttttcccccactatgtatgtacaagtcaaaatatcattaacgaataatgacactttaaccagacttgtacatatcatgagctaatgaagatggtttaactataataaggaagaccttgaataagttctggtttaaaactgtattaaaacttgaaaagtttatcctaaccaaacattagaataaagttcatatttatatgagccgttcaaaaaagcctttgtttgagaacataactcagcaatgacaatgaagtttcgggccaatgaggttctcaatgggaagtacacaagagccacagccaaaagtgttttcctggtacccttcactcttcttctcatcatgctccctctttctctcatgagaagctctcatgaatcaactccagagatatcttctgtaagtgtaagcagcagtttgaacaacaacacagaagtaaaacaatgtaacatcttttctggaagatgggtgcataatcctgaagcaccttactacagcaatgaaacatgccattggataatagaccaacaaaactgcttgaagtttgggaggcctgatagagagtacctccattggaggtggaaacctgatgaatgtgagcttccattcttcaatgcaactcaattcttaaatcttgtgagaggaaagaaaatggcatttgttggagactcagtggggagaaaccagatgcagtctttgttgtgcctcctaagtcatgtgtctgaacctgaggatgtttctcataaatattcttctgatgtggtatacttcaaacgttatttctaccatgattacaatttcacccttggaaatctatggtctccatattttgtgagatccagtgatgctgaccccagaggccacacctacaacagcatcatgaagttgtatgtggatgaggcagatgaagcatggacaagccaggttgaaaactttgacatagttataatctcatcagggcaatggttcttcaggccactattgttctatgaaaagggtaagcttgttggatgcaacaagtgtgggatggacaatgtgacagacctcacacacctctatggatacaagaaggcattcaggacagcatttagggcactcaatagccttgaaaataattcggctcgagcatttttaaggacattctcaccagcacactttgagaatggtgattggaacaagggtgggaagtgtgtgaggactatgccattcaccaagcaagaaatgaggcttgaggatggggcagttgagtacattctagagatgtatgtgacacaagtggaggagtttagagaggcacaaagggtggccacaaagagagggttggagtttctaatgatgaacactactgaaattatgttgcttaggcctgatggacaccctaacaactatggacatgccaaggacaaaaatgtgacattgaatgactgtgttcattggtgcttgccagggcctgttgacacatggaatgagtttttgctctatatgttggatattatgggaagtgatgcattttttagttctaagctagagaaagttttttaagagcatcggatttaattaccatgctaaccatgtggagtatattgttaaccatgtgggggagattgtttattgcttttttttttttttgggttcacaacaaagaatatttgtatattttaacatgtatttgcacaaaggggagggaatgtggaaatggcactctgaaatatgaatgtatttatctgctcatatagaatgtatatccaaaggtatttttgtggatacaaaaa

SEQ ID NO: 5991 - DNA, 483 bp, Glycine max
  Clone ID: PAT_MRT3847_105419C.1
gtaaaagggatcacaatctttaaattaaatatagaacataaacttcaagcagaactttgacaattggtttgatgttcctcaaatgttcagaacaggcagtatatataagacatcaatgctttcataatttcattggtttgggaaatcttacccagtctgaggtagctgcctccaattcagcatttggtgagactgaggatgcctttgcaagaaagatgaactgtttgttataccattttcctctcctacaaattgttctgagtaactagaagctgggggagaccatactggaactacacctccatccctttctctcctggtaccacttgaagattctactgctgaatcttcagctacatttctcagctccattgtagtattgtattgtgtttgtgcattcctattagtggtctgcagcatccgttcattcaatgtaactcctacattttgttgtgcatttgcagttactggcacttcagctct

SEQ ID NO: 5992 - DNA, 1030 bp, Glycine max
  Clone ID: PAT_MRT3847_10541C.1
attcccggtcgaccccgcgtccgagcaaatgcagtgagcagaaaatgcagatagaggcactgcccccggctctccaacgcccgtttcagcctccactttctcttggattccctttcaaaccttcttttttaactccagccacacacgccccttcgcactctactaataattcattcgtcctatattcacgttttcagcattcagttaagtttcgtcgctcttttgcaacggttacagcgaccaccgagaaggttgttattgacgacagcgacaccaccaacgacgaaccgggcttcgttaacattggctacatatcgagtgttcatggaattcagggcgagattcgcgtcaagccagccaccgattttcctcaactgcgcttttccactcctggaagaagatggttgaagagcaaggttttgggtagagaaagtgttcaagaagttgagctggaggaaggtagagagcaccctgcacttaagagttggatactcaaattcagaggaattgacacagtggaccaggctaagaagcttattggtgctaccttgctcgtggtggatgaagacaggccggaattagaggagggtgaattttacacacatgatctgatagggatgaaagtttttatgaaggaaaatggaaaacttgtgggaactgtcatgaatgttttcaatagtggagccaatgacctactacaaattgtacttgattcatcttttgatatgcttgacaaaagtggcaagtcaaggtcagcagaaatagatgcatctgatcagcttgttttggtaccttttgttgaagccattgttccagatgttgatatgaaaagaagacaaatgcatattactccgcccaagggactcctggaattaaatttacgatttgatgataggtccaaaaaagaaaggcgccaacttgaatggaaagaaaagaaaaagtttcaaaagcgtctcatagcagcaaaaaagaaactcattgaaatggagcaaaaacacatatttcatggatttcaatatggtgagaaaga

SEQ ID NO: 5993 - DNA, 842 bp, Glycine max
  Clone ID: PAT_MRT3847_105420C.1
ttaggaacaatccccttcccattgctcggcgctaccaagatcagatggttccaagcatcacttcttccttgttgagagtggaagaggaagaaacgtcttctgatcttcgaaactcagcagaagagagcagcagagctgaagtgccagtaactgcaaatgcacaacaaaatgtaggagttgcattgaatgaacggatgctgcagaccactaataggaatgcacaaacccaatacaatactacaatggagctgagaaatgtagctgaagattcagcagtagaatcttcaagtggtaccaggagagaaagggatggaggtgtagttccagtatggtctcccccagcttctagttactcagaacaatttgtaggagaggaaaatggtataacaaacagttcatctttcttgcaaaggcatcctcagtctcaccaaatgctgaattggaggcagctacctcagactgggtaattcatatctaaagcaattagactagaagcaaggaggtggaaattacactaccacttttctgttgagagagaaagtgaggtgttgaagccccattgaacatacatgtgttaatttccttctcctttaccaccacctgacctccaatgtgtatggaaatttcaattcatacggcagttcatctgcagtcccttctgctttcttgtacaatatttgcaacttgctgtatagtatagtttgtgtagtgagggagaaagagccaccataggatctttggtctactaataaactcagatttaaaatgttacatctaaaaaatactatttatttttatcaaagtatatttatataattttatttatattctaaacaaaccat

SEQ ID NO: 5994 - DNA, 565 bp, Glycine max
  Clone ID: PAT_MRT3847_105421C.1
ttctgatcttcgaaactcagcagaagagagcagcagagctgaagtgccagtaactgcaaatgcacaacaaaatgcaggagttgcattgaacgaacggatgttgcagaccactaataggaatacacaaacccaatacaatactacgatggacctgagaaatgtagctgatgattctgcagtagaatcttcaagtggtaccaggagagaaagggatggaggtttagttccagtatggtctccaccagcttccagttactcagaacaatttgtaggagatgaaaatggtataacaagcagttcatcttacttgcaaaggcatcctcaatctcaccaaatgctgaattggaagcagctacctcaaactgggtaagatttcccaaacaaatgaaagcattgatgactttttatatatactattactgcctgttctgaacatttcagtaacatcgaattagttgtcaatgctttgcttgaagattatgttctatattatttaagagtaaatgatcattttgctccttgaatgtgtataccaatgagggaatgacaatttaatccttgaaat

SEQ ID NO: 5995 - DNA, 788 bp, Glycine max
  Clone ID: PAT_MRT3847_105422C.1
agagcgaataaaagaagacaaaaaatagtaacttgaatgtaaaagagcatgggatctgagactgagacaacaactaagggttattaagagagagaaagagatacatagttagagagagagcagagacaccgttcggtgctccgctgaattcggttgtggcccctgcgctccgctgcaattttacactcaaaaggacctcatgtctaacatagaggagaacaaagatctgggacagatggacgtggatgcatctgatgagtcagctaacatgccatcaccccaaaagcaggaggagtctgtaaagaaaaagtatggaggaatgctgcccaaaaagccaccactcatatctaaggaccatgaacgtgcttacttcgattctgcggattgggcacttggaaagcaaggcggagagaagcctaagggaccacttgaggctcttcggcctaaattacagccaacgcagcagcaaacacgttaccggaaatctccttatgctccttcaggagaagaagggggaagtgttccagccgaggatgcaccttccaaccagtaagcagcaatcagtcttttgatgatgtgctgactattgttctaatacctgagtgagtaggtatcacttctttgttttcaacaataaaggaagcttgtcatgtattcatattagcacaagacaaatgatttgatctgcacctacgcaatagacatttacttgggattttgatttttgtaataaaaaaaaaaaaaaaaaaaaaaaaaaaaaaaaaaaaaaaaaaaaaaaaaaaaaaaat

SEQ ID NO: 5996 - DNA, 239 bp, Glycine max
  Clone ID: PAT_MRT3847_105423C.1
gcacaaggagtatttgtgtacctggtcatgacgtgtgtgggatcctgaagctagctcagaaccatattggttggagactctcaacgctggcaagccggcactaactatcagccaatgggccatccaaaatagccgctaccacatcaatgacacacttctgttcaagtatcgacggaattccacgacgctggatcagagtgtgtactgtactacacaccagtagagctacataacgtgcg

SEQ ID NO: 5997 - DNA, 609 bp, Glycine max
  Clone ID: PAT_MRT3847_105424C.1
tggggggtagttccagtatggtctcccccagtttctatcttctacaaattgttctgagaaaatggtataggaaccggttcatcttacttgcaaaggcagcatcctcagtctcatcaattgatgaactggacacggctacctcagactgggtaaattacgtctagaacatgccgattaatatcagggagatggaaaatgcactctcccctcttcttttgggaaacatgggatgggcattagacatacatgtgatcatttcctacatccttaaacctgtcttgacacatgattaacggctgacctccaatgtgcatgaaaatttcagttcatgcaggcggtagtttcatctgcggtgccttttgctctcttgtacaaaatttgtaggcctactgtatagtataaatttgtattgtggtggagaaagagccactattcgatttggacctttggtcctgtcttaaaactcagggttgtgcttatcattcaaggtagttatttacatttcctgtcccgttatcctgtacatttattttgactactgtaaagtgcactcatctcagtgctcacatctccgaaacttctctatgtggcaaactaaaagacagtgcc

SEQ ID NO: 5998 - DNA, 745 bp, Glycine max
  Clone ID: PAT_MRT3847_105425C.1
ccgttcggagctcagctgaatacggttgtggccccagcgctccgctgcagttttacactcaaaaagacctcatgtctaacatagaggagaacaaatatctaggacagatggacgtgaatgcatctgataagtcagctaacatgccatcatcccaaaagcaggaggaggctgtaaagaaaaagtatggaggaatgctgcccaaaaagccgccactcatatctaaggaccatgagcgtgcttactttgattctgcggattgggcacttggaaagcaaggcggagacaagcctaaggggccacttgaagctcttcggcctaaattacagccgacgcagcagcaaacacgttaccggaaatctccatatgctccttcaggagaagaagggggaagggttccagccgaggatgtgccttcgaacgagtaagcagtagtcagtcttttgatgatgtgctgacaattgttctcattcctgccctgagtgagtaggtatcactttttgttgttttcaacaataaaggaagcttatcatgtattcattaactaactaaattgccatgtgttgttgtccttttcaacaataaaggaagcttatcatgtattcatattagcacaagacaagtgatttgatctgcacctacgcaatagacatttacttgggattttgctttttgtgttactctcttttctcccaaacaaggtctttctttttttgatttttttagaaaggcagtacaagattatatt

SEQ ID NO: 5999 - DNA, 2559 bp, Glycine max
  Clone ID: PAT_MRT3847_105426C.1
ccacgcgtccgcatttcttggtggttgtggtgttcttgaggtgaaagggaaaggaaggaaagaaagagatctatctggtggttaacagagaggttgtatgtgtttgtgtgtttgaataataataataacaacaagatcaacaacaatagactagttcttgaggttgtggtgttggtgaaatttttgtgtggagatgtcaggtggtggatgcagcatagtgtggttcaggagagatctgagggtggaggataaccctgcactggctgcaggagtgagagcaggtgctgtggtttgtgtcttcatttgggctcctgaggaagagggtcaatactaccctggaagggtctctaggtggtggctcaaacaaagcttggctcaccttgattcctatctgagaaaccttggctcccctctaatcaccaaacgttccactaatagtatttcttctctcttggaggttgttaagtccaccggggctacccaactctttttcaaccatttatatgatccgttgtcacttgtgagggattaatactaaaaggccctaagataaggctaggacgcttataggaatccgtacgttttatccttcgttaggacatgaagggggtgtaaaggcctggagatatgaggaatctgggaactctttgttgtcggcttggataaggtcattgtgggccactgattggttgcatgatcggatacgtgttgtgatttctagtttctttgtgaaggttctgcagcttccttggagatggggaatgaagtatttctgggatacccttttggatgcagatcttgagagtgatgctcttggttggcagtacatatctggtagtctccctgatggtcgtgaaattgaccgaatagataatccacagtttgagggctacaaattcgacccaaatggagaataagtgcgacgatggcttccagaacttgctagattacccactgagtggatacatcattcttggaatgcaccagagtcagtgctacaagctgctggaattgaactaggttcgaattatcctcttccaattgtgggaatagatgcagcaaaaaacagattactagaagcactatcaaaaatgtggcaacaagaggcagcttcaagagctgcaatggaaaatggaacggaggaaggacttggagactcttctgaatcagttcctgctgcttttcctcaagacacgcgaatggaggaaactcatgaacctgttaggaacaatccccttcccattgctcggcgctaccaagatcagatggttccaagcatcacttcttccttgttgagagtggaagaggaagaaacgtcttctgatcttcgaaactcagcagaagagagcagcagagctgaagtgccagtaactgcaaatgcacaacaaaatgcaggagttgcattgaacgaacggatgttgcagaccactaataggaatacacaaacccaatacaatactacgatggacctgagaaatgtagctgatgattctgcagtagaatcttcaagtggtaccaggagagaaagggatggaggtttagttccagtatggtctccaccagcttccagttactcagaacaatttgtaggagatgaaaatggtataataagcagttcatcttacttgcaaaggcatcctcaatctcaccaaatggtgaattggaagcagctacctcaaaccgtggaatggagaaacaaattggacatacatgtgatcatttcctacatccttaaacctgtcttgacacatgattaacggctgacctccaatgtgtatgaaattttcagttcaagcgggtagtagtttcatctgcggtgccttttgctctcttgtacaaaatttgtaggcctactgtatagtataaatttgtattgtggaggagaaatagccactatttaatttggacctttggtcctctcttaaaactcagggttgtgcttatcatttaaggtagttatttacatttcctgtcccgtaatcctgtacatttattttgactactgtaaagtgcactcatctcagtgctcacatctccaaaacttctctatatggcaaactaaaaagacagtgccaaaaactttgtttttgtttgccctgtctttgtaatgcttatgcctgaaatttcctatggttgagtaaagatatgcaaataattgcaactgcaaacatgagtacaatgctactactcagctgtagatgagatttcccaaagccctgaaaagattaatatgtactttgtgctcatgctagtcaatttcattacaaatttactaggtcattctccaaccatttgaagatttttgaaacatagtatggctagcctgcttctgttcattaggcttctttaagacctataaaacactttccgtgggcctgcttttttggtttttttcactcttctgggactcttcccaataattagataagttgtagaattttgttacatctacaaccactcatggtcatttgtaaaacatcaatcctgtcttttgatttaagaattatgttttaacttcatattaattttatataatgtaatgtcatgctatgttctatg

SEQ ID NO: 6000 - DNA, 820 bp, Glycine max
  Clone ID: PAT_MRT3847_105427C.1
cagtaactgcaaatgcccaaccaaaatgcaggagttgcattgaacgaacggatgttgcagacccctaataggaatacacaaacccaatacaatactacgatggacctgagaaatgtagctgatgattctgcagtagaatcttcaagtggtaccaggagagaaagggatggaggtttagttccagtatggtctccaccagcttccagttactcagaacaatttgtaggagatgaaaatggtataacaagcagttcatcttacttgcaaaggcatcctcaatctcaccaaatgctgaattggaagcagctacctcaaactgggtaattcatatataaagcaattagactagatggagggaggtggaagttacgataccactcttctgttgagacttgagagaaagtggggtgttgaagccacattggacacacatgttttaatttcctactcttttatcagtagctgacctccaatgtgtatggaaatttcaattcatacggaagttcatctgcagtccctattgctttcttgtacaatatttgcaacttgctgtatagtatagtttgtgtagtgagggagaaagagccaccataggatctttggtctgctaataaactcagatttgtgctttcacttaaggcggatatattaattatgatccgagctttatttacatttcctgtgctctacatctctgttgatcactgtaaaatgcacctcatcttgttgctctcatttctgaaactcctgcagcatattgatctacactgctaaaaaacctcatcttgttgattttttttcagctatgataactgctgtt

SEQ ID NO: 6001 - DNA, 189 bp, Glycine max
  Clone ID: PAT_MRT3847_105428C.1
aaattccaaccccaggacataatattccatggttgcctccgcttccactgtcggagctgtaaacaaagcttttttgaacctgaatgggtctggacctggggtttaagctcccagttaatccttttttggagcaactttgaaaaaggtttttggttaaagggtccccacaccaaaaatttcttttggaac

SEQ ID NO: 6002 - DNA, 444 bp, Glycine max
  Clone ID: PAT_MRT3847_105429C.1
tgcacgcgtcggaatctggctatagcggctggagagataccattgggctacctaccttggatcttctctgttctgcaattacagggcatcagcagaaaatgaccatgcttattgagcaacctgcccttgagttacatgttgaatgcaacaatgtgcatgctgaagagaccaagggtcttgtattgaatggtggatggccattggcaaaggatggctatatggacctagatatcaattcattaggtccctccttgagagactatgatgctgaccgtgagaggccaaaaggtgcagaggaagtacatctgatgctacacataaaccgggacatatgactctgtgaagagaatgcagcaggaatatgggactatggaaccagctgacatgggcattagtgaatgatgtgaactgctgaatgaattgatacatgaaagcgatcctgag

SEQ ID NO: 6003 - DNA, 197 bp, Glycine max
  Clone ID: PAT_MRT3847_10542C.1
gcgggccgttttttttttttttttttttttttttttttggcattaaccctggacttttagcttaaaagtctggcaaagaaacccatgaaaacattatacctctggataaaaaataggggatttcggaatttttaaggcaacaatgaattaaaaactttaaaaaatctttccatggttttccttaaggaaaagaaaaa

SEQ ID NO: 6004 - DNA, 238 bp, Glycine max
  Clone ID: PAT_MRT3847_105430C.1
ttttaatcaactacggtttttagcttacaaaacagaattcatggtaatgccgatcgggctgtgggacaatgaaccgttttttgccaagggtgtgttacagcacacataatcacaagattaccgggcataactaattgagataaacatcagaaactgactaagccaccctagcaaaattgaccatcaaaggaaagcacatcatttattctgctagccacctatcaaaccacaggctttc

SEQ ID NO: 6005 - DNA, 399 bp, Glycine max
  Clone ID: PAT_MRT3847_105431C.1
ccttggttccgcaacatgtatatgtagggcaatgttaaacaacatttacattttacttaagaatctagctgcttaagtaacaaaataatacttatctcacatttgaaaagttaacatgtattgggaaggccaaagggggatgcacctttgatgtgaccttttcctgcctgaaacaggtttttttacataaccaacggacaccaaaaactggtcaagggatgatagggacctcatgttatccgggggaaaatagctgggtgactttcccatgatcgacgagaagagaagggaaagtgaaggccattcagctttactttcccccaaaaacttatccaaaaatgcaaatgccaccctgaaatcagacctacttgcacttattggtgcaactaagggagcagg

SEQ ID NO: 6006 - DNA, 483 bp, Glycine max
  Clone ID: PAT_MRT3847_105432C.1
caagcccggaactcggatcgaggaaacagccaaaatggcatcctgaaactttactatgcttgcctgaacatgcccgcaactagaagaggggaaactataccaaacagcgctctgcaatccccatcagagcctgggaccccgaaaaacccccgctatccaggtgtgtcggagacctactcggagcccagcatgcttccaaaccacacaatccccggcaactgcggcttccaagtgatcacacccttcaaggaccgccaagactatttctacaagcaagggcccgaccaattctcaaagtcccgcattcaaaagtaccagccaacggtcttgcgcaccaacatgccccctgatcccttgctcgcccccgacccaaacgacatcgatatcctcgatgccaaaagtttccccgtcctctgcgacaactctaatgtcgagagaaaagacgaataaactggaacgctcatgccttgcaccgaactcacc

SEQ ID NO: 6007 - DNA, 748 bp, Glycine max
  unsure (1)..(748): unsure at all n locations
  Clone ID: PAT_MRT3847_105433C.1
ccacgggctcgagggattctataaatctttcatcgatgttggcagtttgagattttagtccaattaacttgatgctttagaattattgttcactgctgtagccccatgtgggttttgaagtttgaactattagagaaatgacatttagtgtatgtttgataaaagtgaaagtttaggcagtgaaaatttagtgatgtattttcatttttgaaaatttaagcatcaaatgtgtaatttgcacaaagatttttatttctattgccaaaaatatgaaaaaattgaagtcctcaatgtttattaaatggtactatgggcatttaagaaaatagtgagactgtataaaaggaatgtattatcatataataatacattactagtacactaaaatacaataaatgctgttcagtcttttttttttaatttaaaaataaaaaataaatagtttcagaaaacaacttattagttgtacatgtgttttatttaggatagatttgttttttggagacaccaaagagaccaaactaatgcttgtcctattagataggatatatatatagtgagttgctgctagaaactttcattgacctttgatcttgagctgtttcccactcaaatatatttgtaactgggtattaaccaccatctaaatcatttcgacagcagaaatattttattttcagcactggattgangtataaactgggtgtcgtcttgagaagcataaatgctggattatgataaatttcac

SEQ ID NO: 6008 - DNA, 352 bp, Glycine max
  Clone ID: PAT_MRT3847_105434C.1
agctcagtttgctcaaatgcgacctgttggaatgccaccatctgtcagtcctcatatgccaatgtatcccccgaatggtccagatattaatcaacaaatattttatacccagaaccctcctactatcattccttcccagcctagatttaaatatcaacaacaacttattcctaatataaaacgcaatacagctcccatgccaaatttctttaggccaatagttcagcagaaacaacagaaacagcgtcctggtggagaacatacagatgcagtccagcagtgccagcaacccgtgccaataatgccacagcagatactgacctaaaaacatatctatcgttatcctcctagt

SEQ ID NO: 6009 - DNA, 556 bp, Glycine max
  unsure (1)..(556): unsure at all n locations
  Clone ID: PAT_MRT3847_105435C.1
ccacgtatattgatatatctaggtgtgggtggtacgtaattaattagccatggacaaggcacgatttgggtttttcttcatgttgctcattctcctttcttctcagatggtggtacaaacagagggaaggcactgtgagtcaaagagccatcggtttaaagggatgtgcctcagtaagcacaactgcgcttcggtttgccatcttgaaggcttcacgggtggcaagtgtcgtggatttcgtagacgctgtttctgcaccaggcactgttagttggtccatgaaattttatccttgttggttgctcttttcacctttctgtttctgggattaagaaataaatactccttagtgagtcgtgtttttctaggttcatttgggttggctttatatcttatgctttgatctacctcgcttctgtttcaatttgtttggccagtgttgcaattttaatttctagtgttgtatgtttctcttttgtggtgtacttgccataaaaaataacagtgaaaccacacctttttcatttcttcatcgtttctttaaaaanaacccaac

SEQ ID NO: 6010 - DNA, 941 bp, Glycine max
  unsure (1)..(941): unsure at all n locations
  Clone ID: PAT_MRT3847_105436C.1
tacggtgcgagaagacgacagaaggggatcatcgtgatcatcacaattctaattcattcaccaaaaagttcttcgccccttctttgtccccattctttctctttaatatactttgtccatattttcctctttctcttcctatcaaacatccatggcttccttgtcttctagtacaaaacagagcaataataaccaagaggttgatgagaaaccaataccacacgatcaaaacgttctgcaaaagcacgttgcgttcttcgacaggaaccacgatggcatcatatacccgtgggagactttccaaggatttcgagcaataggttgtgggtacttattatcgtccgttgctgctattttcatcaatggaggtctcagtcagaaaacccgcccgggaaagtttccttcaatactgctaccaattgaagttcaaaacatccatagaagcaagcatggaagtgactctggtgtctacgatagtgaaggaaggtttgttctttcaaaatttgaagaaattttcagcaagcatgctcgaacacacccaaattctttaacatctgatgaattgatggggatgcttgtggcaaatagagttcctaaggattacgctggatggcttgctagctacacggagtggaagatcctatatgttcttggcaaagacaaggatggtttactgcacaaagagactattcgagctgtttatgatggagtcctctttgaaaaaatggaaaaggaacactcagacaagaaagcgaaataaataaagattgacatgaattatataagttgggacatgcgtctttgtgaatttcttgttgagtgccttgaaagtgttatttatggtgtatattcctattggtgtatgaacttaagttacgtattaattgtttaatgcaaatgattttatatctatttgttannnnnnnnnnnnnnnnnnnnaa

SEQ ID NO: 6011 - DNA, 302 bp, Glycine max
  Clone ID: PAT_MRT3847_105437C.1
gttacacatgactattcagaagtacgtccgagcccatggatcgtacctaatgcataatcggatattaattggccatatctttatggtatggacgcaacttctataaatcattgtggttgcactggtaggacctggtatacatattttgacgcatttaaactacgatgtagactaattgtatatagactatgatcgtgtgcatgtacaatgctatgctcaattcatttctaacagatttaggatgatcgttaggagattctacttgttgtgagatcattcttatactcgctacatgacatcac

SEQ ID NO: 6012 - DNA, 352 bp, Glycine max
  Clone ID: PAT_MRT3847_105438C.1
ggccgcccttttttttttgttgtaaaaaaaccttcataactggcgttcgataaggccaataaattagaaacttgactcactgagaactccacacctccaatcagaaactatttacatatagggtaagagactcgcattaacacgaaaccatacacgcatgttagaaaaagcagcggagcatactaattaccattcaccatacaacttatgagcaaactttaacaaaaccggcattgatgcaaacattacttgggtaaagggagccagagaaagaaggcaaaacatcaattattgccatgcaccagactgaccatgatttaggcggcggactcacaaagagtgccaaattttg

SEQ ID NO: 6013 - DNA, 259 bp, Glycine max
  Clone ID: PAT_MRT3847_105439C.1
cacaaagcaactaggcatagtgtgcatgatagggacaacggcaagagctgtgtacagagatgaatggcctaagcgagagcatggatctacggaaggttactctgctcttgccattggatgcaagtgccagatacatgcccaatgacgcttgttgggacgaccagaaaaactaccttggctatggggtctcgggagttggcaacaatggccttccctttgcctgagtgagttctggattcaaatgatataagggtggccc

SEQ ID NO: 6014 - DNA, 147 bp, Glycine max
  Clone ID: PAT_MRT3847_10543C.1
ggagaggaaaaggaatacttgaattatttcccccgcctggatttccaaaagggacatagctcaaaacgtaacaaatattgggaaacatgaaaaaaaagcttttatggccaacccgaataaaaacctcctcatgaatagttttttctc

SEQ ID NO: 6015 - DNA, 417 bp, Glycine max
  Clone ID: PAT_MRT3847_105440C.1
ggcttataaaggatggaaacaggttaatactccaaaggaaaagccaaactaaaaaatttacttctagggctaaccctacccggaggaggaaggagggaaccccagctagtttatgcgaagttttacccaaaaccacccgtttgtggtatgaaatgcccaaagccaaataggaaaaaaactatttctattcaaaaacagcctttggctatgactaaacactacccgggaaaaaaacccgtctaaaagccccaaaatcggcacctttccgggactttccaaaacatttcaggggaaaaacaaaaaactgggctttaaaaaaaagccatgggcggacattggattcacaggggctcaccagcttaatcggaacatctttaaattttgcaggggcctatagcgctgggccaaagtttccct

SEQ ID NO: 6016 - DNA, 413 bp, Glycine max
  Clone ID: PAT_MRT3847_105441C.1
tcttcctcaccgatgctacatccctttcgatgctcagtccctcttttaccattctcttctctcctgctcttgcaggccagcgccctgcccatgcatcgctacctgaggaagatattgagaagctgtttggccaaacactcccattcccactgcactgcgagagcttctaaagcctctccctgcaggtgctgaaatcgatgaactccctaagcaaattgatgatacacagtaaccaaaaacattcccctataaagaagaccttcatccaggcacccccctgcaagtacaatccaccaaatgccccctatgcacaaccttatgctgtatatacctgcttaacggatattaacgacacctctaaagacggatatagtctttgaagagatattgcatcaagaaacaagcgtctgagg

SEQ ID NO: 6017 - DNA, 476 bp, Glycine max
  unsure (1)..(476): unsure at all n locations
  Clone ID: PAT_MRT3847_105442C.1
acggctgcgagaagacgacagaaggggtatgacaaaaatacatgggatttgatgaaaaaaaaaggcccactagttcaagggtggtagttgtaaatggattttcaaaaagaaagaaggtataaaaggtgtgaacatgacagatttaaagcgagaattgtttcccgaggctttactcaaaaggagggaattgacttcaatgaggtattctcacttattgtcaaactaaatttgatgttcaacttgaagaaatggatgtaaatacaatattcttgtatggagagttagatgaaactattatgatgaaacaacctaagggatttgaaattggaggcaaggaggaatatgtttgaaagcttaaaaggtccctctatggcttgaaatagtctcctagacaatggaatagaaggtttgatgaattcatgactcatacagttccaaaggagtcaatatacaattaattntagtcagtatgtgca

SEQ ID NO: 6018 - DNA, 235 bp, Glycine max
  Clone ID: PAT_MRT3847_105443C.1
gtgcagaagaaggcaaagatagtggcagagctccaagctgtgaagcacaacagtggcaaggcctacaatcagttaacggaggagactggactcaccaacggctaaggtgctcaacttctcaagggacaggtcaactccattcccaaaatggccctccaattcggggaacggtggccggacttgcccaagaacctggttccgagattgttaagaccccctttgaggcctaatgacc

SEQ ID NO: 6019 - DNA, 354 bp, Glycine max
  Clone ID: PAT_MRT3847_105444C.1
cgttcacgcactctacaccgcacgcatctggacgcttcccctctccaccgagaccctaagcctaagttctcgcgatgaagggagtcaagccgaggaatcgcaccgtcaagcctgatgacaagctgggggctaagcggaagggcgccgacaaggtgagcaggcaggtgaagcgtgccaaggctggcaaggaccccaacgcgccgaagcgtcctccgaccgcgttcttcatcttcatggatgatttccgcaaggagttcaaggagaagaacccgaacaacaaatctgtggacactgtgagcaaagctgggcgtgacaagtggaaatcgatgtctgatgctgagaaagcaccctacc

SEQ ID NO: 6020 - DNA, 230 bp, Glycine max
  unsure (1)..(230): unsure at all n locations
  Clone ID: PAT_MRT3847_105445C.1
ttgggttgcttagangagatggaagcccggcgctgagagtgggttctgctatgtagattgtggggcagatttagaacaccaaggaaaaaaatgatctggctggtttggtgagggcagcccatttgtgagcttttactgtaggtataggtgtgattgtgcattgcaccgacgtgtgtgggtctttgtttttttttgtttggggttgacggatttgggcaagtgcacattgt

SEQ ID NO: 6021 - DNA, 586 bp, Glycine max
  Clone ID: PAT_MRT3847_105446C.1
cactcgagccgattcggctcgagggctgattgtgtgtcacagcaactgttgagggattatgttcgcctaaatgcatgccttgataataagctcaataccccaaatcctgattgcattaatggcttgtgatctgcatgtcagcgatcatatggtaacaccaggcattaaagttttgaaggttaagtgtatttggaaagtgtaagtttacatgatcatggaatatggctacattagagtactaggcaaaatgctatttttgtttggagtttcagaaggttttctgaagtctgcgttttctttggagacgcaacattcagtctcaccatgctttaaggaaatgtgtacattataaactttattgctgtcatttcgtggtttatcatcatcctagctgaaaatggtggtggcgccacagcctatagaaattagaaacaaatgtatattgcagaaacccagtcatagttgattcaatcaagagtttcctcctgtaactgtcgcctttgggggttcttcaactcttttcatgttatctatactctgaatttatcagcatctgggggctcaactgctcaaaatgttgcagcaa

SEQ ID NO: 6022 - DNA, 485 bp, Glycine max
  Clone ID: PAT_MRT3847_105447C.1
actctccaaactgcttttgttcatgggcctgtttgaagccgtgaaaatctaaagctacaggcaagcccagttgcataagactggttatccgccgcagaaccgtagccatcatcatcgctcatgatttcataacaaaggaaaaggtggtcgttcgctcttgttgttgcagcgcatcacctcaacgaccaaggacaatgctgctgatgccgaagtagtggtactcagaccgggtatctgggatcgagaagggaagaaaagcccgctccatctctgcagcgagagaaggaaggactcaaacaacacaatccaaatcaacacccgcttgtgaatgtgagaacagaagttccagtcaagagaccgtttacttcttggaagccttctgggcggccttggtgaccttgcctgcaccacccttgtcggacttggcaacagacttgatgacaccgacggcgacggtctgtctcatgtcacggacagcgaaacga

SEQ ID NO: 6023 - DNA, 528 bp, Glycine max
  unsure (1)..(528): unsure at all n locations
  Clone ID: PAT_MRT3847_105448C.1
agactgctcctatcttctaagttcaaacctcaagaaatcgatccattaaccgtcataactacgttgcgtttatgcgtaggctcaagacaccaaagaaactgactattctaaggcctgagcccatactcaaggtgggcagcggtctgatcctagtcacgatcagccgcgcgctttggtgcggggaatgaccgccattgaaagaaagagaattcagaaatatgaaccacctcatcactcatctttgtctgtccatctcttgtgaggcatttttggggttgacttgccgatggcagcgtcatgaagccatgtgctagtttttatgctgctgctgctcagtcgatcagactacctaccgtatcattagactcgttcgtatctgatactgcagtgctgttattcaacggttctagctactttcagaatgtaagagggaattcagattctaacaagcatcgnctaataatcacaggtcagttgagcaacgtctcaccggaccagccgctgggccccttgataactcgcacccat

SEQ ID NO: 6024 - DNA, 346 bp, Glycine max
  unsure (1)..(346): unsure at all n locations
  Clone ID: PAT_MRT3847_105449C.1
gattgttgatcacttacacttgacttctatctgccttcacataagacatggacagattcattggtggacacatgtganatgaatatagctgcctcactacaccaatcaggtatgattcggtgactccaacacagatggcacatcatcacgtacacacacttctacagcatgctctacatcagcattggtcttatcacctgatgtcgctatcctcacatactccctacattctgatctcaaatgatctgcacatccatatgtcaaagctatcatcattgtaggatctcttcgatgctagctcttgctccattcttgtccggacaatcttacaatgtatgccacaaac

SEQ ID NO: 6025 - DNA, 423 bp, Glycine max
  Clone ID: PAT_MRT3847_10544C.1
ggtgttgacttgcataagttatggaattttgtgccttagggtttggaatctaaggtggattctgaggatttctgtgaatcatcaaggctcatggtatatacttactttttcttattttctatggatttgttttagtcggggggggggctatgaattgagatcctaatatccagtggttttttcttttatgatctaatttgtttgttgccgggatttttttcttttatgatccaatatgtaaaattcgtttttcttttatccttttttttatattagccgcatgagcatgatattcctttctgcgagatgttctactcccactaataaaaatacgtatttacttccaggaggttcctttcaagaatataaaatgcgcttactttcttgagcatgcagcttaacattcttttcttttctatctaa

SEQ ID NO: 6026 - DNA, 235 bp, Glycine max
  Clone ID: PAT_MRT3847_105450C.1
tttgcggccaagcccgcgagcaagacggagaaggcatcgcccctgaaggtcgccaaggacgccgtctgatcctgccatcgcgcaccgcttgcgtgcccagagccccgttccgatgatgtcggagcggggctctttgtgagaaaaaaaataagaaaaaaaagataatgaaaatagacgggataaacgaaaataaaatgcacgaaaagaaaaaaaaggaaagagcgaaggactaata

SEQ ID NO: 6027 - DNA, 758 bp, Glycine max
  unsure (1)..(758): unsure at all n locations
  Clone ID: PAT_MRT3847_105451C.1
agaaatctttagtaatgttgtgaggttcactatatgagataacgttcactactggaaaaaagacaatctacatcggttatatgggaccatctacatcggtttacgaccgtcatcgtagaggaagttgtcaaaagtggtcgcatattctacgacggttgccaatggccgtcttagaatgctcagcatgctacattgatgagttgtgaccgctatagaaaatgcaacattctatgacggtcacaactacaggaccgatgtagaatgctgagcattttaagacagtctttcacatgcgaccgtcttagaatggttagcatttctataatagtcatgtcagaatcgatgtagaaatgctattttttttttgtatttggagcctttacatccccaaaaatgtaaaagatgcatttcatttgtctagtgagtaccttctcaaaatctgtcctcctaataggggcaaaaggatcttctttgcttcatttcccaaccagtaatgtatgtcatactgagggccaatttttggaaagattacatgtttccacaaacatgtaaaaaggtattnnngactaagtatgcacttccagtatacaattttccatggcttgaatttgacactgaaaccagccgctggttctcaatacaccaaacttcnnngcctgggtttgctcctgcagtttggaatgcagaatccatatcttcagtgacaataggcatcnnntctatgnnnnnannnaagtctgaagttgcaacccnaccca

SEQ ID NO: 6028 - DNA, 345 bp, Glycine max
  Clone ID: PAT_MRT3847_105452C.1
ccacgcgtccggatgaacataggcatcgcccccatcatcaccatggcaagcactttgattggtgacaccaacctaaacgggatttagaaggatgaataaatggttctcagttttcactttggttcttttatatttcctctgatgatatagtaataatactagtagatagctttacatcattctttacattatggataaaaaacttggaattttggaagaattgttctaaggtgttattgttctccaatttccaattcagccatttcttttggttatagaacattgtaaacaaagtattcatggatattggatgtaaacgcaatgattctgcattttggcaacggg

SEQ ID NO: 6029 - DNA, 1755 bp, Glycine max
  Clone ID: PAT_MRT3847_105453C.1
aaatccggacgaatgacccattatatatttcttattatttcaccaagtcacaagggtcagacgaaggaagtaattaagctagtctatatattttaaatttgtgatcatcttcattaatatttcattccatggcttcttgtcactcgtctcccactctagtgtttacagtacgaaggaggcaagcggagctaatagcgccggctaagccgacgcctcgtgaagttaagaaactatcggacattgatgaccaagaagggcttcgtttccaaatccccttcatacaattctatggtaataataaagagtcctccatgaaagaccctgttgaagtgataagaaaggcacttacaaaaactctagtattttactacccctttgcgggtaggcttagggaaggtcctggccgcaaactcatggtggattgcaatggtgaaggcgttcttttcatcgaggcagacgctgacgtcacgctgcaccaattcggtcccagttatcttcttcatccaccgtttccttgcttggaggagcttctgcacgatgttcccggttcacgtggagttaccaactgtcccctcctcctaatccaggtaacgcggctcaagtgtggcggtttcattttcgccctccgattgaatcacagcatgagcgacggattcggcatagcgaaattcatgaaagccttagccgaaatcgcctgtggcgcaacggaaccttccctcactccagtgtggtgcagggagctcttgaatgcaagaaacccacctcgaatttcacgcacccatcacgaatacgaggtggaaaacaaagccaaaggaactatgatgatcccattaaacgacgtggtgcaacgttgtttcttcttcggacctagagaggtagcttctctccgtagtttggttcccaaacatcttggtagatgcacaacatttgaggtcatcactgcatgcatgtggagatgccgcataagagcattgcaacttgacccagaggatgatgttcgcttcatttacactattaacattaatgccaaggtgaatcctccattacctaagggttattacggtaatggatttgtgctctcggcagcggtaaccacatcacgaaggttatgcgagaatccatttgggtatgctttggaattggtaaaaaatgcaaaatccaacgtggatgaggagtatgtgcgctctacctcagatttaattgtggtgaaaggaagaccccatcaagcaactacgaggtcctaccttgtttcgaatactacacgtattgggcttgatgaggttgattttgggtggggcaagcccatttatggtgggcctgccacgggtggaatgacaagttttcctcaaatgacaagcgtgtacgtgtcatgtaagaaccacaaaggagagcatgtgatagtggtaccaattagcttgccagccaaagccatggagaggtttgctacagagttggaggggatgctaagacacgccagccaaccaataatgggagctcatcaaggattaatgtcttttctgtgagaaattattgtagctatatgtttggtgtagacatatatatgtcctaggtgttaattaagaaatatataatataatgtgatgagaagagaggaataaaataaaatattagagtgataatcaggagtatgtattgtatgggtgtttatataccattatactcaagcaatgatatatatagagtcagtttaaaatatacataattaaatatccctgctgaaaaaaattatgattg

SEQ ID NO: 6030 - DNA, 246 bp, Glycine max
  Clone ID: PAT_MRT3847_105454C.1
gtgcttacttatactaattcgttttgcttggcgccgtttttattctctcaacaaagacgcgacaacggttacgaggatctagaaacaaaaaagaccggataacgagagcggcggctggaggcaccgtgcgacgccgttatctccgtcgagcatcagcacctgttttccatcaaccgctgaattctcgtctgcgttcaccttcacttctcaattccgcttctctgctcagcactcatttgattttcg

SEQ ID NO: 6031 - DNA, 329 bp, Glycine max
  Clone ID: PAT_MRT3847_105455C.1
gggaaagaacctaaaaaaaagggaaaagaattttttttttaaatcccccccgttaaattcaccccaatttttatgggaatttttatggaaaaaaaaaggggttttttacttaatgggacctcagggctaaataaaaaggggtcctggggccaaattccgggtttacgtccccgggcttgcaacgtaatagtttttttttgggggccccaaaattaaattcacgggccggggtttaacaacggggggaggggaaaaacccgggggtaacccaatttaatcgcttggcagaaaatccccttttcgccaggtggggtaaaagcaaaaaggcc

SEQ ID NO: 6032 - DNA, 207 bp, Glycine max
  unsure (1)..(207): unsure at all n locations
  Clone ID: PAT_MRT3847_105456C.1
caactttgaaaacaattgaacaacatatgataaagagacaacactgtagtattnntatatatgtgggagggttcaaaatanagaacagtgtaagtatctaacaaccaaacatgtcttcttcatcattgagctctcttcaaacgttccctccaatatctcacgcgttgtttaacctgcccctcaaaccggcgcacgatagcaccgcct

SEQ ID NO: 6033 - DNA, 243 bp, Glycine max
  Clone ID: PAT_MRT3847_105457C.1
caagattgtagtgattcagaatctcagagaactgctccaagggcatcatcatcttcaggcaaaagagattgttgtgactctgcttcttccgtgtcaagagaaggttggcatggaaaacactctaaaggaagtgcggattcacttcgtgctctccgcttgacaaccaagctccgtgacttacataaacttgccaaggttgattcagaatcccataaagaatttgaacactggaatgaaatgctt

SEQ ID NO: 6034 - DNA, 232 bp, Glycine max
  Clone ID: PAT_MRT3847_105458C.1
tacggctgcgagaagacgacagaagggtacggctgcgagaagacgacagaaggggatatatatagcatttggtagttggtagcggtgttcagctaattaatctcactatttttgttttctttaaatcattgtgttgtaatttctatgataaatgaatgtgtaattttctatatattatacctatttaatacatccttttatcctggttgtctataatcaaagtccaatttac

SEQ ID NO: 6035 - DNA, 448 bp, Glycine max
  Clone ID: PAT_MRT3847_105459C.1
agatgaactttgccttaatattgaggtagaagccaccaggcatggaaaaattacagcatcacaaaatcacaaaaaaaaaaaaaaaaaaaaaaaaaaaaaaaaaaaaaaaaaaaaaaaaaaaaaaaagggcggaaaacaaaaaataaagatggggcgcccgggaattattttcttctcgaacccctaaagctactaatgttagtggagaaaaaccagcatcaaatccagatcactctgcaaaagatggctctggccaagggaaagagtctcgggagtggaggagataagggtcaaaaaagtgatgctggagaaatccgttcgaggagggcctgtttctcggttgagctttctcttgctggtgctcactggaactgaattgttgttctactatgacagggaaaagaaacgacatatagaatgtagattactatgggatacgttctaatac

SEQ ID NO: 6036 - DNA, 583 bp, Glycine max
  Clone ID: PAT_MRT3847_10545C.1
aggatggaggacctttaagaggccaggagcggatgcttttcttgaacatctcgggaggttttatgaaatggttgagcattctgatcagctcactatgcatgtgcagtatgttgatcctgttgctgataggctggatccaaagggcaatattctacatatgctatcaagagttgcaactaagtatgaaaatggaaaacattatcggaaatgtctccaggctgtggagacagagattgatttgtcgaagctgaacagaaatcctgctcaagttctttatatcagcgctcatgctaaagagtcaagtctgcagcctgaaaattctgtggaaattaaaccttggaagcttgaaaatgatgacactcaactgcttgatcttattccatttctagaatatgttgctatggcaagaccttctgacatcagggctgttcttgcatcctatcaaagtggtgatattgctgccgagtttattgagcgctctaaggagcaccagaggtctgtggatattttcctatgttctatcacctttttatacttaattgatggaaatctgaatgttgatgtaccaactccacttctgtga

SEQ ID NO: 6037 - DNA, 788 bp, Glycine max
  Clone ID: PAT_MRT3847_105460C.1
aaatgatatattttaatgatatctttaaataatatatacaattggttgtcgtaaatttgagggactataaacatatttaagccttaatattataaccattacacaaaacaaggactaaagaaatattaacaagttttacaagcctacaatgaccggttagcccttgggtaccctataaatcttccttcaaggaattcaaaatttccttgcaggctatctttttggctgggtccctaaaagcagggccggtatactcatactcgggaatgaccccatcagcttctaccttcattctataattagtcacaccatttttgcgggacacgtcctctagtacaatcttataacttcttttctggcatagctcattcaactctcggatgggatggagctttaatgtttctggtgtcacaaggggttccaaaagtggccttatgctttgccacacaacctccttgttgtatcctgaatcaacaagaattgctccagccagagactctacaatgtctccaagtaccttagggagtgatgtctctgcctcgtaaccaaaagtggacaatgaagatagcttatcaaatttgttgagtgtagcagaaacatgcatatgcagttcttgtgaggcatggagtacatgtttgtgcaacccatgcttaatggcggaccatgcataacaatcattattcaccgaagctcacctcatgtcagttaactgcccaggtgtcatgccagggtatttattgtacaaatgccaagtaatcagataatccaatactgaatctcctagaaat

SEQ ID NO: 6038 - DNA, 395 bp, Glycine max
  Clone ID: PAT_MRT3847_105461C.1
gaaaaactttaagtgtgactaaactgtggaccacagattaatccaacagttgacccaaagggatgaaacttgtgagaataccttgagatcccactgaagaatgaaaggtcctaattacaatggttacaaaaaaaagtaattttacttgatgttgttaaagtgaatatacaaatcaaaagtacttttactttaaaacatatgttgcttttgatctaaacccaagtttgccataaacaggttacaaaattaattttggggaactgcaaacatgatacaaaactgagtttgggttccaaaagtatgtctgagatctcataacagatccaaacattttatcaatattacccttactgtaatgggtatttgtttcgcagcatttgaccccacacacatac

SEQ ID NO: 6039 - DNA, 182 bp, Glycine max
  unsure (1)..(182): unsure at all n locations
  Clone ID: PAT_MRT3847_105462C.1
gncgcgnattagcanantcgctgacgcntatgcgaacatcgcaggagaacgcnatgctttgttcctctattgttctncgccttgccganccnncaactctaggggtccttgaatctcgnnagtcctcgtcactcccaagctccnctcactccaanaacactccgatttagaaatggatggac

SEQ ID NO: 6040 - DNA, 265 bp, Glycine max
  unsure (1)..(265): unsure at all n locations
  Clone ID: PAT_MRT3847_105463C.1
cattactaacanttatacaaaacaccactctcactctcattcattcattaaactcccctcttcggtgccaccatcaattaattaacttttgtcttctaacaacaatagttgcatttnccttcccttcattaactcctcctttaccactctgcactcagtaaaaaatgtcaggggtggtggaagaagggggtgttgaattggtggagaattcggaagaggnganaagaaggtcgagaattggaagcttgaaaaagaaggccataag

SEQ ID NO: 6041 - DNA, 112 bp, Glycine max
  Clone ID: PAT_MRT3847_105464C.1
ggatccggaagtccaccttggtcagcatgatacgttctcatttcgtgtcctgttcgcagtctcagatacttcacagtaccagatcatccatggatggggccgctatgatgag

SEQ ID NO: 6042 - DNA, 303 bp, Glycine max
  Clone ID: PAT_MRT3847_105465C.1
aaaaaaaccccataaccattttttttaaaggggaaatttacttgaatttaggtcgggctttctaatcccaacagatgaggaaattaatggctcatagcatgattacaatccttggaaaaatttatccaaagcttaaaaatagcgagctaaaaccctaaaaatgatctactttttttcaaaaaacaattgctctaattcgggtggaaaccctctctcattaccacaacattttttataaactgatttggacttgggcctatcgggacacccttacttaagcagggctcattctttcaacttttg

SEQ ID NO: 6043 - DNA, 193 bp, Glycine max
  Clone ID: PAT_MRT3847_105466C.1
agtaactcccgcgaaaatgcgtgagattcttcagatacatttggggcaatgctagaactttttcagagcgaagttctgggagggggtgtgcgcggagcactggatcgattccacggggaggtgccagggggacaacgaggggcaactcgagcgagtcaacgtctattacaattaaacgagttgcggtagggtc

SEQ ID NO: 6044 - DNA, 285 bp, Glycine max
  Clone ID: PAT_MRT3847_105467C.1
gtgctactgtggcgtttggactatgggacataagtgatatagagggaatgtctatgtgctctttcgaaagaagacataagtgcaatcaaacttttttctagagacaaagaacaaccttcacgttattgcacatttaccactactgttagcttgcctctaaggaacaaaaaagataatggctgtctgcgacttttgggctgaggagacccatgtactaattgcagaccggttcctgtatgcgtacctatttatcctatttagggtcgaattaaaacttggcgggct

SEQ ID NO: 6045 - DNA, 257 bp, Glycine max
  Clone ID: PAT_MRT3847_105468C.1
agctgcaatcatgcaggagctttaacaagttggggctcctccagtacctcacagtgcagggggcaagagtccctgagccttcagcccctcccagaatgtccctgacaccttttgtaaattgcactgtaacctggcctgccccagaccttgcttcctgcagcctgttcagtgggggctgctttatccctcaggccctccctctgctgtgtgtagaggtcgcaggtcctctggttcctgaggccattacaggacatgtc

SEQ ID NO: 6046 - DNA, 294 bp, Glycine max
  Clone ID: PAT_MRT3847_105469C.1
actccttgaaccaggctgttgccctgcgcacaccggtcgctggcctgggcgccgctgcgatggtcaataaggcggacatctctccgatggagcttagggaaaccctggtcaacggtcggtttcaatcgcctgactggtacaccatgatttctggcttctctaccgaaaacctgctgcgcgagcagaacaagatgcaggccttcaagctgtggatggatcttcagtctttccagcagatggagcgtgttgaggcaatgctcgcgaccaatcttgccatggacgtgaagtccgatt

SEQ ID NO: 6047 - DNA, 322 bp, Glycine max
  Clone ID: PAT_MRT3847_10546C.1
tcacgggtggagactcagacgaggtcttatcaccaacaccgcggtcttgcccagaagaatgaatgatggtacaacgggcctgaacaagggcctacaaggtcgtacactgtatcacgtggggtacgagacacaggacctactgcacttcttgcatatctcgcttgcctaacaggtgagcctccaggccagactggctgtgactatagccgtactggcgcctcgtgtggccccactgaaagaggagatggtttacactacacctattgttgggactgtacgtcgggatacaacgtcgggactgggaaagccctggcgtcaccca

SEQ ID NO: 6048 - DNA, 1529 bp, Glycine max
  Clone ID: PAT_MRT3847_105470C.1
caagaaagccatttaatgttccagatagcatacttaggagtgttgattttgatgctttagaaggtgctttaaatatgaagtttaaagacaggggactgctggtagaatccataactcatgcctccaggccatcttcaggagtatcctgttatcagcggttggagtttgttggtgatgctgtcttggatcatcttattaccaggcacttgtttttcacttacacaaatctgccaccgggacgtctgactgaccttcgggctgctgctgtaaacaatgaaaattttgcgcgtgttgcagttaaacacaaccttcatgtgcatctcaggcatggatccagtgccctagaaaaacagattaaagaatttgttaaggaagttcaagatgaattgtcaaagccaggttttaattcctttggtctgggagactgtaaagcccccactcttcttggttacatttttaaatctatttcaattaacaattttcttgagatgttaagggacactactgttgtttggaaggtttttcagcctcttttgcatcctatggttacccagaagactctgcccatgcatcctgtgcgtgagctgcaagagcggtgccagcagcaagctgaaggcttagagtataaagccagtcgtattggcgatttggccactggggaaatattcattgaaggggtgcgggtcggggctgctcaaaatccacagaaaaaaatggcgcagaaattagctgcaagaaatgcccttgctgctttgaaagagaaggaggtgggaaaaactcaggaaaagaatgatgacaatgggaagaagaatggaaaccaaacatttactaggcaaacattaaatgatatctgtttacgaagaaattggcctatgccattttacaggtgtgtgaatgagggtggtccagcacatgcaaagaggtttacatttgcagtgcgtgtcaatactactgataaaggatggacagatgaatgtgttggagagccaatgccaagtgtcaagaaggccaaagactcagctgctgttcttctcttagaactactgaacaaattatactcgtgaaagatggagtgattgtcatgcacattctatattgccaaagtatttaaaccattcctgtgcatcaggtaatgaacccagcattatcaactcgttcaaaccatgtctcagtcaatggttgaataaacaaaaaacgagatgttacaatttacaaaaatattaaatatggatccaattatgtgattcccctgagaaaatcataaaagatataacttccctttttacctactggcataggaacctgagaccttaatttaatgtttacgaacaccccccatggccagtatttgtgacgggggatagtggtacataaaagtcgcggaccagaatttcaaaggccagcataaggtgtcttgttgacgctgctattggaggttaaagtattctattttgtagtttgtatgtattctaaaaacagctcatgcagattatttaatccccctacaattttcgttataaccttttccg

SEQ ID NO: 6049 - DNA, 384 bp, Glycine max
  Clone ID: PAT_MRT3847_105471C.1
gggtactgtgcttggaaatatgatgggagattcttggttaagagcacacgagcaatataaggactattatgcagcactttatttgaggaccagctggggaaagcttctatctattcttgtagttccaagggacatactttcaccctccagtgcaagtgtgacaagccaagacttggcaaagagactaaatgctttcaatctagcttttgatgaaaggtacaagaagcaatctaattgggtaatatccgatgagatcttgacggaaaatgtatgcaagcatttggtggaaggtattataccaatttacagggcctatgtcaagaattattgtttgtcaatagaaaatgatgctaacgttgacaagcatatgaaatatacggcgca

SEQ ID NO: 6050 - DNA, 302 bp, Glycine max
  Clone ID: PAT_MRT3847_105472C.1
gctcctgataataaatgatgaatcctactgtacaagaactcagaaccgaattcgaaaatgcaaagattgtagatttccgtgatccacaaaacccaaataacgcaattgttatcactgcggagcacgcttcaaatgcgcttccagatgaatacagttggactgaaaatgacaggacttacttcgctaatgaacattggggattgtactatgatcattagatgttgccatttatttggcaaaagaactcaagtgcgtcttggtccacagtctctacagtcgtttgctaatcgatgtgaacagaa

SEQ ID NO: 6051 - DNA, 259 bp, Glycine max
  unsure (1)..(259): unsure at all n locations
  Clone ID: PAT_MRT3847_105473C.1
ggcactctacaaagaaaagaaacatgatgaactttgacagctttcataaagctctggcggagtttcaagnccgaggcatccacgctaataggcagaggagacccgtctccatcccaacctctcgatgccaccatgggctctgataacccatccctgtgtaagcatgcccatggccatgacagttatatcattctatgagcgcttagataaaattcccatttacgccctcatcaacactttcaaagagattctcttaatc

SEQ ID NO: 6052 - DNA, 1061 bp, Glycine max
  unsure (1)..(1061): unsure at all n locations
  Clone ID: PAT_MRT3847_105474C.1
ctcgccttttacaaatatggcatcacgcgccantatgggcaatctcacttgctccgcnccatatattaattcccctcattttcgctcacaacttaataattcttgatgctcccatttgcacaagtcgctcatgcgcagtgggtcagtgctggtagccgccggtgctggtaacatacccacccacaataggcttcatcgttctctttgaagtcattggctgcccacggatgccaatctcttcaattctcaatcttcagcaactgtatttgggtggcccaaggaggtcccatgtaccgaaaagttccctttgtcagcaacaaacccatatggaccaaccaagcttttcattcgaagaaatttgtcgcgatatccaccgtgcagattcagattggacagttatactattgagatacttcaacccagttggtgcaatcccagtggttatattggtgaggatcctcttggaattccaaacaatctcatgccctttgttcaacaagtggcagttggcagacgccctgcattgacagtttttggaagcgattataaaacaactgacggcactggagttcgtgattacattcatgttcttgatttagcagatgggcatattgctgcgttgcgtaaactggatgatcctaaaataggttgtgaggtttataacttgggaacaggaaagggaacatcagttttggagatggtaaacgcttttgaacaggcctctggaaagaaaattccacttgcaatggcgggtcggagacctggtgatgctgaaattgtttatgcatcaacagaaaaagcggaaagagaacttaaatggaagactaaatattgcatcgatgatatgtgccgagatcaatggaattgggcaaggaaaaacccttatggctatggtggatctgaagattcctccaattgatgtcgattattgttggataatatagccatacatgttctcttttggggtctttttaaccctgtcaaccaataggtccctaaagtttttgtttagctattctaaggtggaaaatcgtttcctaatttattatgaattctaatat

SEQ ID NO: 6053 - DNA, 449 bp, Glycine max
  unsure (1)..(449): unsure at all n locations
  Clone ID: PAT_MRT3847_105475C.1
ttttcatttgtttccaaatcataatcaataatcattaagtgaaaaatacaattttattcctaaaagtaggaaactatgatgatttagatcttaaccatttgcttgtatacaatttagtttctcaaatttgtcaatttcataaaaaaattaatcctcccaacacaaaatttgagactaaattatagaactggcaaaatcgacccaatagtcaatcaggcggagctgtaaaactcgagacctaaccaggccaatttgacctggacaaacaggtcagaccgagacaagacggtttattcttagtccaaacatcaccaaacctatttgacctgactntatttttttattttgtatcttttgtttacaaaaatactataaatttaagtaaaaaaaataatagattgaccaatttggcacanagggccgggctgcctgaccaagaaaaacatggc

SEQ ID NO: 6054 - DNA, 458 bp, Glycine max
  Clone ID: PAT_MRT3847_105476C.1
gcgatctcctatagatattcgatcgtctaagacactgaggaggcccgccggggcccctaaccaagaaagcaagccgcgtgccggtgaccgctcacatgctctgacccctacacgggggggattgaccggaaaatcacatccaccgatgagtccatgactatccacgctgcatacatgtacgtgtatcggatccagacatgcgcgccaactacgagcagatgctcttcacgctacaacggccagatgtcgactggctggaggttctccagatatacgcacagaaactgataaaccgatcagcgcacgtagtgagacactgaatcgactcaatcgaacgaatgataaaagacgctgatgttgaagcgaccttccctgcatatagagaaatgaatcacgtactagtgaggacgtagagtttgcataatactacgacatgtatagcttcgaacatacatatg

SEQ ID NO: 6055 - DNA, 278 bp, Glycine max
  Clone ID: PAT_MRT3847_105477C.1
ggctcgaggatttctcatattttcatccagcacacaagcacacactcaccgcccgggcaaatttcaaagaacttggggtatcagcaaaactgaaataccctctcttcatgctacgcgaatccaaaacctcatactacaaatcactcctcctcttaccccaggagaattctcccatgcatcggtacggagctaattggataatgcatgttaccatggacttatatcttaacaggatataatgttgaggccattactcatcaacacacggagacaccttt

SEQ ID NO: 6056 - DNA, 1382 bp, Glycine max
  Clone ID: PAT_MRT3847_105478C.1
ctcgagccgaatcgctcgaggggattggagtcattggttgatgttgggggaggcacagggaccatggcaaaagccattgctaaatcattccctcgggtggaatgcattgtgtttgatctaccacatgttgtttctggcttgaaaggaagtgagaaccttaaatatgtttcaggggacatgtttgaggcaattcctccagctgatgccattctgttaaagtggatattgcatgactggaatgatgaggagtgtgtggacatattgaagaaatgcaaagaggcgataacgaggaaaggcaaagaagggaaggtgatcatcatagacatggtggtggagaatgagaagagagatgatgaatcagttgaaacacagctcttctttgatatgctgatgatggtgttggtcactggaaaagagagaagcaagaaagaatgggctaagttgatttcctctgctggttataacaactacaagataactccagtcttgggcttaaggtctctcattgagatctatccatagtaagttaatgagatgtgccagcactctatcattcatatatgtaagggctataatttttctgtttcgattcatgagtgaatgttggataagtaacaatagcaatagactgaactctcttcatcatagttgtgttgttggaacagtactgtcaagaaaggaaaaaaaaaaaatctgaggataagtatagtttgcgtggtatatatagcaggtgaagaagaaaaggaacacgtggttaaagagcacagtgagagtttagcaattactctttttttggtaactgaatttgccttgtattagatttgtgaagaactaagtttgtgagagttgtattaaataaaataagattaattgaaatttatttgtaattcatgtccctagcagcgtgctttgttcccagaaaaggaccaaccaagttcacacttatcactctctcataatcaaacttgctgttgtcaagtatgcttgtttttatctcatcaatcatgccagcattattaaacatgatatctagattgccatacttggaaatcgctgtgttaacggcgttttgaacgtcgttttcgtttgtgacatcgcaatggacataggaagcggattccaagtgtttgcaaagagagagacccaaatcgtcttgaatatcagctatcacaacgtgtgctccatgcttagagaagagtcttgcagtggcctcacctataccgctagcaccaccactgataagagccactttcccttcaagccttctatcaagaaccgagacagtagaaatacttgccatgagtgagcttttcaggatatataatatagccaacgagagatgttttagagtgttaaacgtaattgcttaacccacgcgtccg

SEQ ID NO: 6057 - DNA, 2085 bp, Glycine max
  unsure (1)..(2085): unsure at all n locations
  Clone ID: PAT_MRT3847_105479C.1
gggtttacccacgcgtccgtacggctgcgagaagacgacagaaggggatacttcaaaatccaaatctagcgattaattatagtttaggcagcaaattatggaatcccatgatgaggagcatgctgccaaactacttagagctcaaacccacatatggaatcacatatttagcttcataaactccatgtcccttaaatgtgtggttgacttaggcataccagatatcatacacaactatggccaacccatgccactctcaaacctcattgcttcactaccaatccacccatccaaaacttgcttcgtccattgcttgatgcgaatcatgatccattctggcttcttctctcaacaaaaccatgacttggagaatgagctagaagccaagtatgtgctaaccgatgcatctgtactattgcttaagaaccatccgctgagtgtgacacctttcttgcatgccatgcttgatccagttttgacaaatccatggaatcaattttctacttggttcaaaaatggtgaccctacaccatttgaaacggcacatgggaagatgttttgggattatgctggcgctgatccgaaacttaatcacttgttcaatgatgccatggcaagtgatgctcgatttgtcactagtttggtgattgagaaatgtaagggagtgttcatgggattggagtcattggttgatgttgggggaggcacagggaccatggcaaaagccattgcttaatcattccctcgggtggaatgcattgtgtttgatctaccacatgttgtttctggcttgaaaggaagtgagaaccttaaatatgtttcaggggacatgtttgaggcaattcctccagctgatgccattctgttaaaggtaaatcgctattcacattcagaatacaattttacattcataccattaacacccagtttttatacttgagtgatgtcaaattttaaagaattaaagcaaataattgatcgattggaaaaaaaaatgaacgattttatcatcattgatcacttgaaataacttcaaatttttatatgtatattgttcactaagctagtaagctagcactagctagtagtccaactacatatctgccactgtcataccaaatcagaccaactaagtggtctatatggcttgtaataatcagtactagtttactacaagataactccagtcttgggcttaaggtctctcattaagatctatccatagtaagttaatgagatgtgccagcactctatcattcatatatgtaagggctataatttttctgtttcgattcatgagtgaatgttgaataagtaacaatagcaatagactgaactctcttcatcatagttgtgttgttggaacagtgctgtaaaaaaaaaaaaaaaaaaaaaaaaaaaaaagcggccactggagagatgaggagtgtgtggacatattgaagaaatgcaaagaggcgataccgaggaaagccaaagaagggaaggtgatcatcatagacatggtggtggagaatgagaagagagatgatgaatcagttgaaacacagctcttctttgatatgctgatgatggtgttggtcactggaaaagagagaagcaagaaagaatgggctaagttgatttcctctgctggttataacaactacaagataactccagtctttggcttaaggtctctcattgagatctatccatagtaagttaatgagatgtgccagcactctatcattcatatatgtaagggctataatttttctgtttcgattcatgagtgaatggtgaataagtaacaatagcaatagactgaactctcttcatcatagttgtgttgttggaacagtactgtcaagaaaggaaaaaaaaaagatctgaggataagtatagtttgcgtggtatatatagcaggtgaagaagaaaaggaacacgtggttaaagagcacagcgagagtttagcaattacttttttttttttttggtaactgaatttgccttgtattagatttgtgaagaactaagtttgtgagagttgttattgaataagattgtttctaaagggtttgatcaannnacaatgctttatct

SEQ ID NO: 6058 - DNA, 376 bp, Glycine max
  Clone ID: PAT_MRT3847_10547C.1
cagctacgaaggaggctaatattaaggcagggtccctatcctatgactgggacgggggatcatctctgcttgaggcactagaccagattcgtgagcccatgaggccctatgacaagcccctcaagctatcccttcaggatgtgtgcatgattggaggtattggaactgtgccagtgggacgtgtcgcgaccgcagtgtggaatcctgtaatggaggtgactgtctgcaccaactggactgacaactgaaggcaaatatgtggcgatgcaccatgaatgtattacagaggcacatcctgctgacaatgtgggattcactgttgagaatgttgctgccattgatctgagcgtggctattgttggcttaaactcaaaga

SEQ ID NO: 6059 - DNA, 360 bp, Glycine max
  Clone ID: PAT_MRT3847_105480C.1
tcgccacgcgtttatatattctcagcaacacaacatcgtgccaaaagctggtattgtgtaacaagcattcactatgctgcctattctacagctgacctttgcgtcgatcttgataatcggcagcaccggaagaagattcactaacttgaggtgaatcgtgatgcagactagtcagaagatgaggaactgccttgacctgacgaagaagatgtgaacgttcatgaggctgataaggtatgaggatgaacgcagagtttcctgctgagtgcggctcgcacagtattggattagtaactcacctgggacaactaaggcatgaaccgagcgtttactgagattcatggcccaaggtcactgctt

SEQ ID NO: 6060 - DNA, 356 bp, Glycine max
  unsure (1)..(356): unsure at all n locations
  Clone ID: PAT_MRT3847_105481C.1
ggaccgggccttaacttaacctggacttggaatagagtttggttccctggcttaattaccaacccggtccttttccggtttacctattagctattttttttgggccgggaatggaaataatttgggattgcttaacatgggccttggttcttgggatcatgataagaaccccaagggtttggcggtcattgggggttttacccaaaacacttgaaggggtccagaaagggtccctggttggaatcttaagccaaacctccaaaaccgataccttgaacgggttgagcttgatggagcccagaccgcgacacttntaagtcaaaggtccctgtcgttcctattgatgattgagcatg

SEQ ID NO: 6061 - DNA, 2237 bp, Glycine max
  Clone ID: PAT_MRT3847_105482C.1
gtccggattcccgggtcgacccacgcgtccgcgtccgattaattatagtttaggcagcaaattatggattcccatgatgaggagcatgctgccaaactacttagagctcaaacccacatatggaatcacatatttagcttcataaactccatgtcccttaaatgtgtggttgacttaggcataccagatatcatacacaactatggccaacccatgccactctcaaacctcattgcttcactaccaatccacccatccaaaacttgctttgtccatcgcttgatgcgaatcatgatccattctggcttcttctctcaacaaaatcatgacatggagaatcagctagatgccaagtatgtgcttaccgatgcatctgtactattgcttaagaaccatccgatgagtgtgacacctttcttgcatgccatgcttgatccaattttgacaaatccatggaatcaattttctacttggttcaaaaatggtgacactacaccatttgaaacggcacatgggatgatgctttgggattacgctggcgctgatccaaaacataataacttgttcaatgatgccatggcaagtgatgctcgatttgtcactagtttggtgattgagaaatgtaagggaatgttcatgggattggagtcattggttgatgttgggggaggcacagggaccatggcaaaagccattgctaaatcattccctcgggtggaatgcattgtgtttgatctaccacatttgtttctggcttgcaaggaagtgagaaccttaaatttgttggaggggacatgtttgaggcaattcctccagctgatgccattttgttgaaggtaaaacaatttcacaattcatagtacaattttacatttataccattaacacctatttcataattgactgatgtcaaaatttagagaattaaagcaaagaattgatcaattggaaaaaaagtgaacgattttatcagcattgatcacatgaaataacttattataatttttatatgtataggtcactaagctagcactagctagtagtccaactacatatctgccactgtcataccaaatcagaccaactaagtggtctatatggcttttaataattagtactagtttattaagtgggtacgtaaagtagctagcatatgattatttgacaagtaaatctctgctcatattctagaaaaaatagttatagatctcttcaaatttgacttttcttttttctgaagtattgagtatatgttgcggttaaaaacgttacatgatgtgccaattcattctaccaagcttaatatgaatgcaagtcaatatttatttcttttttatgattcttatcggtgtgttactttgaatgacaaagcagtggatattgcatgactggaatgatgaggagtgtgtggacatattgaagaaatgcaaagaggcgataacgaggaaaggcaaagaagggaaggtgatcatcatagacatggtggtggagaatgagaagagagatgatgaatcagttgaaacacagctcttctttgatatgctgatgatggtgttggtcactggaaaagagagaagcaagaaagaatgggctaagttgatttcctctgctggttataacaactacaagataactccagtcttgggcttaaggtctctcattgggatctatccatagtaagttaatgagatgtgccagcactctatcattcatatatgtaagggctataatttttctgtttcgattcatgagtgaatgttggataagtaacaatagcaatagactgaactctcttcatcatagttgtgttgttggaacagtactgtcaagtacaaagcagcttcggctacatcattaggcacaagatcagtacccttaaggtttgaataaatcccctgaactccgtcatcatcaagcttaaaaaaattcttagccaagggcgtggcaaccacgtagggtgacacgcaattaaccctaacaccaaatgctccaagctccaccgcagtgttctttgtgagccccaccacggcgtgtttggaacttgtgtatgcatgtgatgctacaccacctatgcttccacaaacacttgcagtgttaactatgcttcctcttctagcagggatcattacccttgcggcgtgctttgttcccagaaagacaccaactaggttaacgttgatcactccctcaaactctgactttgtgttgtccccttctgtcgtcttctcgcagccgta

SEQ ID NO: 6062 - DNA, 804 bp, Glycine max
  Clone ID: PAT_MRT3847_105483C.1
aacaaactggcaacataataacattagaaggaaaaaacatacaggcactaaatagcatgtacaactaagatttgcaaacttcaactttaaaatacagttaaattgtaacgtctgatgacactccaactttactgaaatcactaaaacaaatactagttctgcactaaactagatgatttaatatcataagagccattctcttccaaattgtatgccttctggtggcatcaaagtaattgtatatagtattgcatatttcagggcctgtttcactgtcaacattcaagaatgacccagctccgaattccaggccgagatgcttatatggaacattaatattgtatctgctccttaaattggttttgaatgagaaaacttggatttcaggtttgcattcatcaagagaatcagagaacagttgaaataataacaagcaagtagactaatcatctgttaactcatcatacactaaaccatattgaaactttttggttaacataactttaaaatctgataatcatttgtagacacgtataattggattcaatatagttaaagttatcataataatttgatctgagaatgagtcgatgggtgggtgaggcagctaggtcaaaatgggtaaattggggatctgaaattagggaaagccatgacttacaaacacacttgaaacgaagaacggatctcaccggcgatcgcagaagaatttctctgatcaattccagaggcagagtcacagacaaagtgtgcttctccatgctgcttctctgctacgagacggagagacagagagaacccgat

SEQ ID NO: 6063 - DNA, 506 bp, Glycine max
  Clone ID: PAT_MRT3847_105484C.1
tcgttagaattcactttggttccctcgaagtttagcttgcgttacatcggtggatcacataggttttgtttaagtatgagtcaggagctgaaaaaagctgcctctaagggtcatgagaaaatggtaacatcacaagaagagcaggcaaagatcactgaggttagagggttgatagggccactatcagataaggaatctgtgtactgttctgatgcttccatctcaaggtatttaaggtcgcgaaattggaatgtcaagaaggcagctcaaatgttgaaacagagcctaaaatggagaaaagaatacaaacctgaagagattcgctgggaagaggttgctgaggaagcacagacagggatgatgtataaaccaaattatcatgacaagtatgggagatcagtgcttgtaatgagaccttgtgtccagaagtcatcgtcaacacaaggacaaattaagtattttgtatacagcattgagcatgccattttaaaccttccaccacacca

SEQ ID NO: 6064 - DNA, 255 bp, Glycine max
  Clone ID: PAT_MRT3847_105485C.1
gttgtacctaaatagaatcttttcggttagactagaatgtcatgaaaggagagagggagtaattggtattttaagactatatttgatttttattttcaaaaaatatttttaatttttaaaatacaattaaagaggttgctcaaacatagttggtaggggtataaggcataaatgagagtttaaacaagaaaatggaaaaaacatctcttttgaattggttgttgagtaatataaaattattttttaaacaaaatt

SEQ ID NO: 6065 - DNA, 338 bp, Glycine max
  Clone ID: PAT_MRT3847_105486C.1
ttgactcgatgccgcgtcgtagctcgaatccggctcgaggtttagtagaagatctgccaattgcgaccctggatgctaggaagcttatcagcaccctcttgcattggtacaagcccataggaaatcgtctgggtctctccaaagtagttcaacagttgggtatgatcaagttaatgattctgatctctgacatggactggcctatgtatatgctagtctctgtcattgggaggactctgaaatctggttgcttaaggccagggcgctgaaggactgctctggaacaatgatgcacactgaaggtgttatgttagactgacgtgggcaatatgaagaag

SEQ ID NO: 6066 - DNA, 220 bp, Glycine max
  Clone ID: PAT_MRT3847_105487C.1
ttcgtgttttatgaagaaaatctactgctatactagcaagaacaactagtcgaagtattctagcactgctagattctggcttatacattatgaaatatgagcagctaagagagtagcccctattatcttgatcttgagattaggaaatgattgaattatgaaaagaaaaaataaacatagaaaatttgataaataggatccatcactgactatcgccttt

SEQ ID NO: 6067 - DNA, 602 bp, Glycine max
  Clone ID: PAT_MRT3847_105488C.1
gaggaatcaaaggacagatagaatcaactatctctcttttccttcctcgtccttcttttttctcatttccttctaaacataaaatgcatttgtgattctgccacaataattataagttcagaaatcttaattactgccctctggtcctcttcaagcaggtctagtaattttgaacatatttgatcaggtcattatattgaaccaagttgagaacatttaggtcctctaaatcctgaggaaaataaaaacaaaaatctaggagctaaaataaaagcatgcctccaagctctaaattcagaagagcccttggggcagtgaaggatcaaacaagcataagcctagccaaggtgggaagcagcacctcacttgctgaccttgatgtggccattgtgaaggcaacaaggcatgatgaataccctgcagaagagaagcacataagggaaatcttgagcctaacatgttactctcgagcattcatcagtgcatgtgttaataccctggcaatgcgtctcatcaagacaaagagctggacagtggcattgaaaacactcattttgatgcagaggctgctatcagaatgtgatcctgcctacgagcatgaa

SEQ ID NO: 6068 - DNA, 518 bp, Glycine max
  Clone ID: PAT_MRT3847_105489C.1
tcgcgcagatagattccgaagcagtgtttttttttatggatttttggagattctgaaggattgttatggggtggaggttggacaattctggttggaggataagggtttctcatgtacatcgagaagcaaatgcttgtgcggatgctttggccaatttgtcttatggcttgcagttgggttttatgatgtatgagcaacctcctgctatcagtcaactgttgcttgctgacagtagaggagttgtttctcctcgcattatttctttgtagtttcctttgggcttttgctctgtttaataccaaaacaaaaaaagctttgctgcttttattctagtggtgcattgtgtagatcaattgataccatggcaagggcaattgcttccttcacccgtttacattccagattagccattctggaatgtaaaaatttatattccggattactttctggatttaggctgttcggatggaggttctcaaatttgaacgctataaactgagttaaaacattttttttta

SEQ ID NO: 6069 - DNA, 399 bp, Glycine max
  Clone ID: PAT_MRT3847_10548C.1
cggccggcccagcatgtgccgtttgactttgccctacctcctcaattctaaggctggaacaatggcgctgatccttctctacaaatccgatttgggctacagcctgtcctaggttcacggagtccatgaaatcgggctgaacaccgtaacggttcagaactccgcctcggaccttgacaggttcggctaagtcgtaaagcttccctccttcaacccttccacttccgctctagatgctctcaaacagtgcatcgccgactccgactgcttgttaactgagagctgaggactgcttggagaccacttgcctaaagtgctggaaggtcagaagcccaagcccagtttaggtgtgtccgatcctaagagtggttcccacctccccgaagtgactaatattcc

SEQ ID NO: 6070 - DNA, 920 bp, Glycine max
  Clone ID: PAT_MRT3847_105490C.1
cgacgtagagggcagtgggggcagtgctgctgtggctgatcggtgttaacttcatcaaaccccaaactcaaccatatttccctcctcttcctcacttcgctccctcacccctcaaaacgcatcccaattttgagtctcttcatcataacgaacaacccttttcttctcccacgcgtccggcgatggcgtcggaggatatacgtcgatgccctcggcacaccgatcagccacagcagcactgcccccactgccctctacgtcgtcactgctcccactgccctctccgccgtcactgccaccactgccctctccacaaccctcactttcacgctgttaacttcatcaaaccccaaactcaaccatatttccctcctcttcctcacttcgctccctcacccctcaaaacgcatcccaattttgagtctcttcatcataacgaacaacccttttcttctgatgctcggatttcacttgagctggagcatatagtgctggatggtgaggaagaggaagatgagccggtttttgttctaactgacgaatggagggaattctttgcacaatctgaagctaggagaaaactagaaaagaagcagggcaagaagggaaagaagtgaatatagtgagaaacgtttgctaacaatacttttgggtggtcaagaggttgctcaagggtggttgatgaccatcctgctctttaggatgtaattaatttctgttgaactagatgaggatcaatcgtatgacgaaaagggatcgtgtctgcagttattaaaaggatgaattactaatatttgtagttcatttattgtttgtaagatgttgttatttttaatttccaattactaaagtccaatccgtaaagaatgtgtttaaaattgtcaaagtatccttgtgtctgtgtatttgtataagaaaaa

SEQ ID NO: 6071 - DNA, 456 bp, Glycine max
  Clone ID: PAT_MRT3847_105491C.1
atctatcgtaatagctaagtgctaaagggtaaagggacagcccctggcacgcccgtataaataaaaagaaggataggcccacaccacacaataaagaccaagaataagaactgcgcgcctctgatcaagacctggtgaagaggaacaaatcagtgtctcttgcaaagcacagagtataccacttagataaaaaacatgctacctgaacgcgagagaaaacgcttaagttgagctcagaatcactgaccctacacgcgagcattacgaaagcctagccaacacaaaagaaaacatgaagcaaaaaaaattatcattccggtggattgcaacaaccactcttccattacagatctgatggcaacaacaatgttgacggactgattgaacaaaacattgtgactgtgattacctcaagaaatgcatccggtgaatatagaaagatacaacaacgagatc

SEQ ID NO: 6072 - DNA, 164 bp, Glycine max
  unsure (1)..(164): unsure at all n locations
  Clone ID: PAT_MRT3847_105492C.1
tntttgttannttgntgcnngcgtacgtnagctcggaattcggctcgntgtganaganncnnattgnctgctgaatttgngtnanagtatnacgaccgatcnnatttctccggcggtnaanatnaatcnaggatagtcntgctncaaagtaccttctggatcgn

SEQ ID NO: 6073 - DNA, 462 bp, Glycine max
  Clone ID: PAT_MRT3847_105493C.1
gaaaaactctgaccgagtccgagaggcatcatggcgacactggattccgacgtgaccgtgtttccggccggcgaagcctccagcagcgccggtccttcttcgtccaccaagaagccgaagcgtttcgagatcaagaagtggaatgcggtttccctctgggcttgggatattgtcgtggataattgcgctatttgtcggaaccatatcatggatctctgtattgagtgccaggccaaccaggctagcgccactagcgaggaatgcactgtagcttgggccgatggctcaagacccgtcaagtatgtcctctagataatagcgagtgggaatttcagaaatacggtcactagaactttgatgcggctgagctacttccaacttggaccattggattgtagcatttctatcaaatttatagctctacattactgctgataaaaaaaaaaatagctctacattact

SEQ ID NO: 6074 - DNA, 824 bp, Glycine max
  Clone ID: PAT_MRT3847_105494C.1
tgactactttcccaaggctgaaaaactctgaccgattccgagaggcatcatggcgacactggattccgacgtgaccgtgtttccggccggcgaagcctccagcagcgccggtccttcttcgtccaccaagaagccgaagcgtttcgagatcaagaagtggaatgcggtttccctctgggcttgggatattgtcgtggataattgcgctatttgtcggaaccatatcatggatctctgtattgagtgccaggccaaccaggctagcgccactagcgaggaatgcactgtagcttggggagtttgtaaccatgcttttcacttccattgcataagccgatggctcaagacccgtcaagtatgtcctctagataatagcgagtgggaatttcagaaatacggtcactagaactttgatgcggctgagctacttccaacttggacatttggattgtagcatttctatcaaatttatagctctacatgttgtctttgcttgcctattggagttttattcaaaagagtcacttctaaatgctttcgcatatagttacgcccccagttcctaattcgatcatatccttctctaacaatgtggcaaaacggtggtgttaattcactcaatgacaagatttatggaatattatagcatgcaaataaaaaaaaaaaacatctacctccccccctccgtcccccctgcccccctgctccccccttttcctccccgcgccccccccattaccctcctcccccctcactcccacccaccctcgcccactcttggccccccctcccctcctttctctcttttatacctctcccccacc

SEQ ID NO: 6075 - DNA, 204 bp, Glycine max
  Clone ID: PAT_MRT3847_105495C.1
gacccacgagtcagcccacgcgtccgaaaaaaaaaaaaaaaaaaaaaaaaaaagaaaaaaaaaaaataaaaaaaaaaaaaaaaaaaaagggcagccgctcgacggcgttcccagcttaattaggcgtgacgtccacgtgattactcttcgatagctgcttcgaaagatgcacttcaaggtgccgtcgttggccagtctctttac

SEQ ID NO: 6076 - DNA, 875 bp, Glycine max
  Clone ID: PAT_MRT3847_105496C.1
tttttttttttttttttttttttttttttttttttttttttttttttttttttttttttttttttttaaatgtctaacttttcgacagaaactcttgtgttattatcactgaatttgctttcaaatgacaaagtctatacttatggtagatgaaattaacttcaccgatgaagaccggcattgttcatataaagaatcaaataataatacaaattaattgaatgtcctttctagttgtgtaacctttgatgatgcttatgaagaattggagctctttaaggccccagcactcaagtacaaataattcttctggtcagaaaagtttgatgacgtagatacaggagaaaatccagaatattgtccacccatctttgccaaacatgtatcatttatgtacttcaaaagctcactcttttggatgaatggctgagctgcatattcctcaaatggcatccactgtgcattcagtatctctaatctctgtgcttggatgtcagaagaaagaggccgcaacatgcacatgaagaataagtctgacttctcaaagaatgaattatgactttgtctgttgatcagatattcaaataaaagaaaaaaaattctcagtcatctatattgtagattcacaagaatccaataaaattcaaaacaaagaagtccctaatttattgacaggtaacaaaatttgcaatatataaatatttcaagcacatattgtctcagacaatgatattggtaaaagtgaatatgttaacataggctagctttactactcttgcttgacactgaaagacctaaaatggatcctgcacctggaatatgaatggttaagaattcccaaattcctgtaggattttggactacatgatgttggc

SEQ ID NO: 6077 - DNA, 200 bp, Glycine max
  Clone ID: PAT_MRT3847_105497C.1
gcgttgttgctttgcttcttcttggctattgctcttgttttctcgtctgtatcgtgttcgtcttcgtttctcagttgtcgctccgttttctgagctcccatgccgcggcgattctgtctcggataattgaacccgttccccgcgcgatgacccctaatggcggggggactgcgctcattgccccgcagcgtggaatgagc

SEQ ID NO: 6078 - DNA, 221 bp, Glycine max
  Clone ID: PAT_MRT3847_105498C.1
aaaacacctgggcgtcggcgcaaatgttggcttttttaataagctctggagacaacatgctcactgtgaaaacaatttttacttgcacagattcggacatcttggctgtttatgatacaatagcatctcaactaaagaaatttctaccgcatacattaggtggcatctgtatacctcgatgaattacattcttccatcttttattacttgctgaaattaaa

SEQ ID NO: 6079 - DNA, 340 bp, Glycine max
  unsure (1)..(340): unsure at all n locations
  Clone ID: PAT_MRT3847_105499C.1
gatattatacatttacggttctatatgtttttctatgcttgaaaaaatttgcatcagtgtcgtaggctggcagtatgtctgcttatctagttacagtcaatttgaatctcaggctttggcccttgggtaacttttatttgtccacgatcttgtataggttcaccatgtcatttgaacttttctcccttgtttaaacgtatgtcaattcagtttaactcttaactactacctaaattaaagttataaagattgatagtatgcatggtcagtgtacaaagccaatcagaaatcattcttgctatgaantttaaagcantattataaaagtcaaggtttatga

SEQ ID NO: 6080 - DNA, 424 bp, Glycine max
  unsure (1)..(424): unsure at all n locations
  Clone ID: PAT_MRT3847_10549C.1
acggctgcgagaagacgacagaaggggttccttgagatggcgaagaagggaatcaaggctgatgttgtggcatataatgccttgattggtgcattttgtaaagtaaataagtttaaaaatgtgcatagggtcttgaaggagatggagagcaatggtgtcgctcctaattcaaggacctgcaatgttattataagcagtatgattggccaaggacagactgatagagctttccgagtcttctgccggatgatcaagttgtgtgaaccggatgctgacacatatacaatgatgattaaaatgttctgtgagaaaaatgaactggagatggctctgaaaatatggaagtatatgaaatcaaaacagtttgttccaagcatgcacaccttttctgnccttattaaaggggtgtgtgaaaagacaatgc

SEQ ID NO: 6081 - DNA, 349 bp, Glycine max
  Clone ID: PAT_MRT3847_1054C.1
tcttcctaaaaaaaaaaaaaaaaaaaaaaaaaaaaaattataaaaaaaaaaaaaaaaaaaaaaaaaaagaaaaaaaaaaaaaaaaaaaaaaaaaaaaaaaacaaacaaaaaaaaaaaaaaaaaaaacaccaccctaactaaaaaactcctacattacaaaccactccatccaatcttaaaaccctattatctttcccccaaaataaaatccactaatccccttttatacaaccctcaaaatcaaaaaaaccctgcctttccccaacttaaaccctttgaaacaactccccttttcccaactttttcatatcacaaaaaacccccttccaaacacccttcccaacatttt

SEQ ID NO: 6082 - DNA, 410 bp, Glycine max
  Clone ID: PAT_MRT3847_105500C.1
ttttattggcaacgaattctttaacgttatcaaacgaaaacatcatcatagtggggaacgaactcaagtatagcggctgtgtcgtcacatactctatagaaccttgaaaactaacagacgacaaatatgacgcccattaggaattcgaatacaactccagggcatagatgatataaccctatgaacagagcctatggatgactggaattgggtacaaaacattatgtattatggatcataatcaaacggaaaagatcgttatgctgcgagcaatattataccacaaatggggaagggaatccacctacagctttagaccgtaccggttccttgtacttaataactgggtactcatggacgtgtacatttgcacaaacagctaaaccactgctgagcttggaattacctcc

SEQ ID NO: 6083 - DNA, 367 bp, Glycine max
  unsure (1)..(367): unsure at all n locations
  Clone ID: PAT_MRT3847_105501C.1
tatttttttttttattctaancgtgtaagatcatcactcaccaaataaggataaatatcaagctgcagcccgtcattaacaaggctcatggaacatatttcacgtgttatacatattgcacacttattttctctcgaacttaaagattcatcatgcacaaatttaattgtgcccccacaagcttattcattgccatgattttatgaacatgcaatttcattatcatcagcttttgagaggcgagctgatacccacgcccccacggttcaatcagataatgtaccttggatcaccttgctttcacaacttataatatgttcttcgaggtcccccatatctgcctagtttgcacgaccacaataccact

SEQ ID NO: 6084 - DNA, 159 bp, Glycine max
  unsure (1)..(159): unsure at all n locations
  Clone ID: PAT_MRT3847_105502C.1
accattcgtccgaacattttacacaattctagagcaccaaaaaggcgggcgaaccccagagcacaaaagggagcaaaggacgaaccgcccgagaacncagnggccacccccagcacaaaggaccaaaggaccaacagccagacaacccagacacaacac

SEQ ID NO: 6085 - DNA, 217 bp, Glycine max
  Clone ID: PAT_MRT3847_105503C.1
gtttcccccttccccattgaaaacgggggtcttctttcccaaagtgtccttttccaaagtttttaaaaacccccccttttcccccccttttgaaaccaaggtggagggaaatctccccggccctgaatacaaaaccctccttcacaatgcggcggttttccttgaaggggttctccccgacgccataatggtctaccaaccccgccaagggcttagg

SEQ ID NO: 6086 - DNA, 862 bp, Glycine max
  unsure (1)..(862): unsure at all n locations
  Clone ID: PAT_MRT3847_105504C.1
ggtaaggaagctattgttgctggattttatcatgaaggttacgaagagccattgttaatgctcatgaaaagaaggggagtgcattcaggtttggtagtgaagggagaggaagggggcctctcattgactacaagattgcgatcagctaacacaaccaggggacttcctgtgaactactgttcaggtttccgtgcacttgacatttcatccacatctgaagtgggtggagtggcacgtcatggttttagtcttgaagtcaatgccaaggattacggtttccaacccacagacacaccaagaactgatagatctgtctcgaagaacattgaattgggtttagctgctctctatggagaaaaaggaccagcatatgaccgaattgtcttgaatgccggagttgtggatcacttgcttggagttggtggtgcagaagatatatctgcagccctggatagagccagagaggccattgacagtggtaatgctctgaaacgactcctaaactacattaaggtctcccacaaaataggttgaattatttgagcattgcaaaatacctttcttatacaatgtgttggacataaagggaagaaaaaacctaagatgggtccccccttctttttcccaagtaatgaaagaaaaaaaatggagatacttgagagttttttttttctttatacacatcagttttgaggatttgactacgtctgtataacaatctccaactcgcttagaaaccgcagatagctgctgcttttgtaattaaggtggcatactgatagtcaatgttaaaaaagtttgtgcattgcttttttggacgtaaaaaaaaaaaaaaaaaaaaaaaaaaaaaaaaaaaaganng

SEQ ID NO: 6087 - DNA, 388 bp, Glycine max
  Clone ID: PAT_MRT3847_105505C.1
cccacaatggcctgcacacgcacctttgctcgtctggctaccaggcagacagccctgcgcccggctgtcttctcgcgcggttttgcctccgttaccgacacgatcgcccgcgagcccatctccaaggtcgccgagagcatcgtacctgacccggcccgcaagcctgttcccgagagcaagacatcgacgaccaaggagcctgagcccagccaggatgcgaagacaaagaccttccacatctaccgatggaaccctgacgagccgtcatcgaagcccaagatgcagtcgtacacgctcgacttgaacaagaccggacccatgatgttggatgcgctcatccgcatcaagaacgaggtcgaccctaccctcaccttcaggagaagttgcc

SEQ ID NO: 6088 - DNA, 248 bp, Glycine max
  Clone ID: PAT_MRT3847_105506C.1
actgctcacacgtgagggctgaccatgaatgtcaactgttatatgtacatggctaccatgctcttgagacggaagtcacctgggattatagaggaggattggaatcttgttgctattgccaatgattcactgtaaatgaaaactgacttatgatggatcattgcataggactgccccacttgagactagaacgtgaggggatgtattccattaaagttattatgatcgcaatgagtgttagagatgct

SEQ ID NO: 6089 - DNA, 157 bp, Glycine max
  Clone ID: PAT_MRT3847_105507C.1
atggcttgtttgcattatcaagcacccaactattcaccacttctgcttctagtgcctgtggtgtctttaagcagcactcagcgagccctccatctcaacctaccaacatcaaatcattccagcaccctaccatacctcccttggaagctgagcactg

SEQ ID NO: 6090 - DNA, 321 bp, Glycine max
  unsure (1)..(321): unsure at all n locations
  Clone ID: PAT_MRT3847_105508C.1
agtcgcngnacgcgtacgtaannacgnaattcngctcgagagagtntatanaaacctcangnaggngggagaaagantgtntntctnggctcatagnatagcancactatggcncntcngantngatcctcttcacgntaccnanaactggttcccctcaaagagtggnngcccnnaagacnacanacgacanaaangngnagannaaaangnannnaaancagannacaagangganaanagnaaacggngaaagcagnagganangagagngangaaagnaagggnagnnaannggngnannanaangnngaangnngg

SEQ ID NO: 6091 - DNA, 337 bp, Glycine max
  Clone ID: PAT_MRT3847_105509C.1
taatgcaggtcgagctcttttgctggatcataggagaggtaaattaggagcctggctgcgcgagctcttgcctcatcatattatcttacctcatgagcggaggctgcaagagcgaatattggaccaagatcactccaatctcgcatttggcttttacagacaagcctacgttctcgctaaggcagttgctaccccacttgtcaagccaggatcagacagaccttagcggattgcatcagagcaaagtcttttcttacttggatggcagccttccgggcgactatggattggaccctctgggacttacagacgctgtatgaacaggagggaccattga

SEQ ID NO: 6092 - DNA, 612 bp, Glycine max
  Clone ID: PAT_MRT3847_10550C.1
atgaaaactgtaagtagagatttcatcaaggtcaattaccaatgtaaatgtttgacctatttccttcggaactacagatgtatgcattggataaatgctcaacaagaataagggaaacgacatgcaaaattgctaatgcgcatagatctacaacacaataaatcgatgacacacaggggaatgcaactttaagcagctgagaacggcatgacacttgggcccagcaaatgcttgaagaagttttttataaccacttctataatgctcaattgaaaagcatagttgcaggattgcctacctcttctgctcagccctgtctgagatcataacattcttgagaatcacctctttttcgagcccatcggctttgagttgcaactcctttacacgtctcagagtgactgcctatcctgtgctcacctctgcctattgtccacgtagcaagattatatctctctacagattagcaatgtaattgtgacggtctcttgactcatgcgtagggttatgaatcttagcatgggcactatctttttcagacatgagcacatcacacttatggtagagcctgacaaatgccttattcacacatgtcacataatgtcttctctg

SEQ ID NO: 6093 - DNA, 314 bp, Glycine max
  unsure (1)..(314): unsure at all n locations
  Clone ID: PAT_MRT3847_105510C.1
anatattaatcttctttttcacattataaccttatcatttaatgggggattttatatacccgccggttacaaaaaaaaataatttcatttttacataaatagttttgacacatcttttactacacaggggataataatacacaaccttacttccaaccatcctaagaaaaacaccaaaactttgtcacttccctccttttccctttttttccccatcaaacccatgagacttgagcttctttttcccaattatttttgcttttccacttacatatattaagggcctatttataataaccaacaattttttttct

SEQ ID NO: 6094 - DNA, 291 bp, Glycine max
  Clone ID: PAT_MRT3847_105511C.1
tgcttatgcattcctcctattatcattatcgctcgattcttttggacactttcttttccatctatctccttcaccgaacatctttcaaggttctctcacccactacatccccccattcaagccatacggatggcttctgtatttcttatcggaatttcaggatctatatttctggggagagatacagcatcagtactagagatcatcatgaggactagcaagtttgaaggatcgtgtgggagaagccatgttttgagtgtagaggtctgtgagtctcgttcagttacaagt

SEQ ID NO: 6095 - DNA, 309 bp, Glycine max
  Clone ID: PAT_MRT3847_105512C.1
agcattgatttttcaataatgtatcattctaattacgcactgggaaacatatatctcaattaaaacatgccctacataagcctacttataaactaaatgagaacatggaagtttattccccaaaaaagtaaaaacatgcatattagaagccttattcggacataacaatacaaacgggaggggtggctaaactaaattcagttctttcttttctttgggggcatgaatgctcgctacttctaggcttactcattctctttatactgctcggcctcagaaccatccgcatcctctggtatacctgcctca

SEQ ID NO: 6096 - DNA, 178 bp, Glycine max
  Clone ID: PAT_MRT3847_105513C.1
aggactttcaatccgtttgatcagcagcaaaagatcattcaatctccattcctctgcgagagagagacgaagaagaaggaatcaattccaatatgtctcgtagcatttcatacataactggcactcaacttctctccttcaaacgcccgccaaatgttggcatcatcgacgttaggga

SEQ ID NO: 6097 - DNA, 233 bp, Glycine max
  unsure (1)..(233): unsure at all n locations
  Clone ID: PAT_MRT3847_105514C.1
ccggaaaacccgggacgtcccaagcgaacgcctccgctcgggaaaagnnaaccnnacaaaagggcaaggtgaaaggggaaaaaccgncaaacccgananaagnggngcnggnacacaaaanccagaagaccgnccngaaaaggaagaccaagaaaaacccaaaaagagggacgccagacngagacaaagaaaagacccncaanagaaagaggggcaggcccagaaggaaacaa

SEQ ID NO: 6098 - DNA, 256 bp, Glycine max
  Clone ID: PAT_MRT3847_105515C.1
ctgactctgagcatgcaattggccttggtctcattgcattctctgggaaaatgacgaacaagggcaaaggaaaaggcaaggaggtcgccggaaaaggttctgccggcaagcgcaagggcgtcttccaggatgacaagaccggtagtggctgcaagagaaacaaccgaagtgtccttcagttcttcgaagacgccgctgacgttgaagagagcgatttcagtgatttcagcgacgacgacgacagcgatttcgattt

SEQ ID NO: 6099 - DNA, 529 bp, Glycine max
  Clone ID: PAT_MRT3847_105516C.1
ttccgatcttatttccttaggctcaatgataggcctactgagaaaacaaataattccaattcatatatgaacttttttgactgcttatctcttgaaaatgtggaactggaattccccgaggaattccgaactcatttactttggattcagcgagaggcctaattactaaaacaaataatttcaatgcatatctcaacattactgcctccttatttcttgcaaatgtggaattggaaatgcaagaggaattccgatcttaacaacttcggctctaggatcggccttatcagaaatcaaattatccccattcatgtatgaacagcattgcctacttatctgttgccaatgaaagcatcggaaatccctcgaagggagcactgtagggtatacctgccggcatgcttactagtatctaactcctgtgaggggtagatgggcactgcatcctctgtttacaactcttgtgacagaaagaaccctgtcatactccacattatttgacccgtaggacatcctccttatattcagc

SEQ ID NO: 6100 - DNA, 434 bp, Glycine max
  Clone ID: PAT_MRT3847_105517C.1
cttttttttttttttttttttttttttttttttttttttttttttttttttttttttttttttttttttttttttttttttttttttttttttttttggggcccccaacaaaggggttttttaaaaccccttcggtggcaaaaaggggttaggaaaaaaaaaaaaggggcaaacgccctaacaaggggccaacctaaagggggaaaaaccccaaaaaaaaacaatcactggttggaaaaccgggctttttttcgcaggggcttaataaagacccttaaaaaaacgactttttttcattttcccttttccagagctttaaagggggtctaagggaaccacactcaaaagtgttggaaaatttttgggaaaaaaaaaaacccccctttccaagccctttgggggtgcctttttggcaagaggctcccttaacatac

SEQ ID NO: 6101 - DNA, 305 bp, Glycine max
  Clone ID: PAT_MRT3847_105518C.1
cccacgcgtacgagttgatggtgtatcataaacctttttatttttgtttccctggttgtaatatagtctgaattaatttcttgtcaaaaaaaaacaaaaaaaaaacaacaacaaatacaaaaaatgaaacaaccaaaagaaaacaaaaaccaaaaaacaaccaaaaaaaacaaaaccaaacaaaaaaggcccccccatttaaacaatccaaatttaaagacccttcctagcaacaacaaaactcttctatagggtcccctaaaataattaaccagcccagcacttaaaaacgacaccaccggaaa

SEQ ID NO: 6102 - DNA, 220 bp, Glycine max
  Clone ID: PAT_MRT3847_105519C.1
tcgagggaaaggaagagttagagaaggtgaactgccagggaatgcagtgttcgcacgggagcaaaggaggggacaatcgctagtggtgccgaataactctgaggcgcctgagcaagggcgagaacaaggatagtaatacgtagtgatcaagacacaccacaccgtcgtgagcagctacactaacggagggtgtacggcaaactcttcggaggcacttgca

SEQ ID NO: 6103 - DNA, 213 bp, Glycine max
  Clone ID: PAT_MRT3847_10551C.1
aaaaaaccccacaaactatatcatccttaaaacctgggtatattaaattaatggggcttttttcccagggggacgggtaatttttttccttccccccaattctaaaaggagctcaaaagtgcattgttcccccgttttacatttcccaagttggcaggaccataatgcatgccaaggtgcttcctttgcgggggcttgggacggcaaaaatta

SEQ ID NO: 6104 - DNA, 1864 bp, Glycine max
  Clone ID: PAT_MRT3847_105520C.1
gggagagagtgcccggacagaaggtgaaattttttcagcagaggatgctgacagtgcagagactgaaggagctgcaagaaaaaaggaaggagccttttacatatggacaggcaaagaggttgcagacatacttggagagcatgctgctcttttcgaggagcactattacatcaagcaatcaggtaactgtaacctatctggaatgagtgatcctcacgatgaattcaagggaaagaatgtcctgattgagagaaaggaaccttcagaactggcatcaaaatatggcatgtcaattgagacatatcaagaaattcttggagagtgcaggcataagttgtttgaagtaaggtcaaggcgtccaaagccacatttggatgataaggttattgtatcatggaatggactggcaatctcatcttttgctagggcttctaagattctcaagggtgaagctgaagggaccaaattctactttcctgtcattggcactgaagcaaaggcgtacatgggaattgcagaaaaagcagcattctttattaggaagcaactttacaatgtggaaactcacaggctacaccatagtttcagacattcgccgtctaaagctcctgctttcttggatgattatgcttttctgatttctggattgctggatctctatgagtttggtggtggaattagctggcttctatgggccattgaatttgtcgttagcactgaagcaaaggtgttcttgagaacaggaggaggatatttcaataatacaggagaagatgcttccgttctcctccgtgtaaaggaagaccatgatggggcagaaccctcaggaaactcagtttctgctataaatcttataagattggcttccatggttgctggaagtaaggctgagcattataagcgaaatgcagaacatctattggcagtttttgagaaaaggttgaaagatatggctatggcagtgcctctaatgtgttgtgcagcagatatgttgcgtgtactttctcggaagcaagtggtcgtggttggtgaaaggacttctgaggactttgaaaacatgcttgctgcagctcatgcagtatatgatcccaacagaacagttattcatatagatcccaacaacaaagacgagatggaattttgggaagtaaataacagtaatgttgctctcatggcaaaaaataactttgcagttaacaaggttgtagctcttgtatgccaaaacttcacttgtagcccccctgtgactgaccattcgtcacttaaagctttgctctccaaaaaaccttcctcttcgttcacgtaagctattggttctgatgagtaggaaaatagttaacgtcggcgaaagctccctcttagagatccccctttcaatctacagaactagttggttctgacttctctgtcaaaataaagataggtaacattctctgttgacttgaggaattgatgcatgtccttttcgtatgcctgtgctcaacaagccatgatttttcttcaaatgtgatacagaatgatggaatcatggaagtatgtataattgtatatgcaatgtaagctatcgttgaaataattatcttttccagttggagtctgttctcatgtttatacttcatttttttctcgatgaacttgcacaagaaagtctcgatggcatggctaagaaatccttcatgtctgttcgtgcaatatgttgtagaaagctcaaaaggtttgccaatctgagacattcttctgttttcgagacattttattagaatattataaagtatatgttgcacatggttgaaataattatcttctccagttggggtctgttctcatatgtttgtacttcatttttttctcgttgaactggcac

SEQ ID NO: 6105 - DNA, 372 bp, Glycine max
  Clone ID: PAT_MRT3847_105521C.1
gttaataagactctggggtgatttttgatttggcaaattaaattacacaatgaccggcggacatcacacatgagttgggcctcttccaacttaaaagcacgaggataacattttcccatgtcgcgacacatgcaccacctaataataataattttacatgtttacctacaaaatacaaggactttaaattttaaaaggaagaaagggaataaaccgatcctcttaatgaaatgaaaccaaaacccacaaacattgggttgatttttggtggagttgatggccccaacttgattaagcatgaaccgtttgattgaatcacttggacttgaagggaatggccctgattaccacctggtggcaaagtgctgcaag

SEQ ID NO: 6106 - DNA, 553 bp, Glycine max
  unsure (1)..(553): unsure at all n locations
  Clone ID: PAT_MRT3847_105523C.1
catggcaaaaaataactttgcagttgacaaggttgtagctcttgtatgccaaaacttcacttgtagcccccctgtcactgatcattcgtcacttgaatctttgctctccaaaaaaccttcctcttcattaacataagctattggttctgattagtaggaaaaatagtagctccctcttagagatcctccttttcgtctacagaactagttggttctgacttctctgtcaaaataaagataggtaacattctccgttgagttgagggattgatgcatgtccttttcgtatgcctgtgctcaacaagccatgatttttctttaaatgtgatacagaatgatggaatcatggaagtatgtataattgtatatgtattatgtaggctatcgttgaaataaaaaaaaaaaaaaaaaaaaaaaaaaaaaaaaaaaaaaaaaaaaaaaaaaaaaaaaaaaaaaaaaaaaaaaaaaaaaaaaaaaaaaaaaaaaaaaaaaaaaaaaaaaaaaaaaaaaaaaaataaaaaaaaaaannnnaaagggggggcccccattttgg

SEQ ID NO: 6107 - DNA, 682 bp, Glycine max
  Clone ID: PAT_MRT3847_105524C.1
cccacgcgtccgtgggtgagtagaatgttataatatactttatttgctgcacccctgtgcttgcggttatcaaagaagaaaggtatagcttgagtgaagcatgctaattggcatggtattttgaagtgcaagatggggggtccctctcaaatgatttgggggggtggggcatgttgttatgttgatgatgccgtacgtggaaaaagcaagcaaactggagtaggtcacggccaacgaagatagagatgatttggattcctcaattttggatgggaaatcgaccagaccaagaacattgatgtgcctgaattgtgtttagttatttgtttgtaccctggtgtttataaatctgacaaggttgatcctgaagtctaatcaaaattcgattggttttttcagaaggatgtggtggggaaaaaaagatggaggaaaggaagggaaagaaccatcttttcttcttttggggatgtaatggagtttacctacatgttctttctcctcatcttttctttttagttattttattttgtcttctagggctactagagcagcagtaagcatctttttgacaaagtctatgtgggagaaggatgaagtatgtacgtgtctgcctgatcatatattatagtaaccctcaattttattttatttttaatttaaacatcagaagatgatttccctc

SEQ ID NO: 6108 - DNA, 281 bp, Glycine max
  Clone ID: PAT_MRT3847_105525C.1
ttccccatcgacccgcgcgtccgataaaccataaccaggggtattatgaatctttagttttggatcgagcctctgaggaacaaatcgggtccaattccaatatgcctaagcaaattcacaagattaatgacttcctactaactgctaggacgaatgatgcacgctctgcgaaaatcaagcggatcaacgacgtcgtgaagctcaaggtcctctgcttcaagtaccttaacaccctctgtgagaacaaatctcagaatgcataataacatcatgcatcactt

SEQ ID NO: 6109 - DNA, 372 bp, Glycine max
  unsure (1)..(372): unsure at all n locations
  Clone ID: PAT_MRT3847_105526C.1
acgtaagacttggaatcctctagagcaggccgcttgttntttttttttttntttttttnttttttggggctatataaacatcnaaacataccccacanttcaaagtggtggcaggtctgaaatttccacaaaataaaacaagactacccatcttgcttctaagttccaacaccaaactagtaatgtctgaaaagtaccacaaagaaacaaggctacctaccttgcttataagttcaaacaagccaaaataaggatgtttcaattttcaatgttccacaaacaagggaaggatatacccaccttacttctaagttcaaagaaaccaaaatgctagtagttaggtgatcaaataagcacagattcccctcatac

SEQ ID NO: 6110 - DNA, 255 bp, Glycine max
  Clone ID: PAT_MRT3847_105527C.1
tagcaaggcgatgatgacattggttgacgagctggagacattggttgacgagctggatgcattggacttggggtcgtcggtggtgccggtgaagaaggtcccatacggcgacgtgttcgaggcgtcccgcgctggcgacgtcgagcggctccggtaccttctggaggcaggcgtgaacgtgaacgctcgtgaccagtgggactccgttgccctctactacgcctgcctcgccggccacctcgacgccgcccgcac

SEQ ID NO: 6111 - DNA, 466 bp, Glycine max
  Clone ID: PAT_MRT3847_105528C.1
aatatttttgttacaaatactgaaatactttgatattttgatcaagataaaatattttattattttttaaattttcatatgctgtacctttttttatggatcataatatggtaatgtttactttaggtaaaataatggttggatcatctttattctgcattgttatgttgttttctatccatttgaccctattgattcattgcttactttaggaagatctgcccgtcctgctcctcgtgcagcacctcgtcctgctccaggtatgcatgaatacaatactggaattgtatattatacttgaagctttgagaagatgcacttttaggctttcaacaagaaattgtgggatgcaaatttctttttcctctaatgaacattgtcattgatgtcttgatgcagttcaccatgctcctcctccagcccctgctcagagcggtggcggatctatgcttggtggcattggttc

SEQ ID NO: 6112 - DNA, 349 bp, Glycine max
  Clone ID: PAT_MRT3847_105529C.1
aattcccggctcgacccacgcatcaggccacgagtcagtaaaggagtgaggggaaaacatagcgggacacataagtccatttgcaacatgacacattggcaatccgcatagctgatccatgcgtcgttgctgtgcagtaccgtccacaaaggctctctgaacatcatccttggtcggcaaagccgtaaagctgcacttaacatctccatatctcgcaagggagagcgtgccgaatatggtcatcaatcaggactcctcaggagaacaatagtggtaccgatactcaatcaagtacatgtgcacattctctgcacagcaaatctcctaaataattcgagaattacaaggc

SEQ ID NO: 6113 - DNA, 226 bp, Glycine max
  Clone ID: PAT_MRT3847_10552C.1
tgggatgtctcagagagtgacccgtatgcatcatgtccgatgacgagcatgacttcaattctcacgcggatgcgggggcgtccaacacgtatcctcagcaagctggtaccattcgcacgaatggctacatcctcatctaatccagtccttgcaaggttgtagaggtctctacctcaacgacaggctagcatggacgtgcacagtgtcactctgtttcacttgatat

SEQ ID NO: 6114 - DNA, 461 bp, Glycine max
  Clone ID: PAT_MRT3847_105530C.1
ggcattcaactcttcacctttcatcacttgcaagaaagacttgggtttctgtgcttttccttcaccatcctccataattgggaagagacagaaatgcaagaaaacatcatcaaataagattgtttctgttgtgtcatcccccaagaacaaacgcagcccttctgcaactggctcaaccaaaattccgatgactgcgacagagaagattctggcaagagctgccgagaaatgtgaggtgaggccaggggagaacgcttgggcaaatgttgatgttttgatgatcaatgatatcacttgtccaggtatttctggaatcttcaagaaagagtttggcaacactgcataggtttgggaccgtgaaaagattgtggttatccctgatcattacatattcacaaatgatgaacgcgcacaccgcaatgtggatattgctagagatttttgtgttgagcaagatatca

SEQ ID NO: 6115 - DNA, 428 bp, Glycine max
  Clone ID: PAT_MRT3847_105531C.1
ccatttaaccactctctaaaacccccttctacgatttaagctctttccggtcccaattttgcaaattcgaccgatctcgcatcagagtttaaggttctagataaggtttcggaccaaagcatagaggttctaggtttttatagcgccagatcttttcactcgaggcattagggtttttgcgatcgctggttgaagactttctgtctccatggatcttctctaccttaattgctgtgaaatggagaagttctactctcaggtaaacaagttcacactccatattccgtttggaatcttcaccagcttgaacgctcgagactttctttctgtctctctctgtgtctctctgtctgtcaatcattcactgatatgcgagattgaagacaatacagtgtgttttgagcgcaatgccactctatatgacattt

SEQ ID NO: 6116 - DNA, 204 bp, Glycine max
  Clone ID: PAT_MRT3847_105532C.1
cagaacttgactgtgtgtggctctgtaccagatcttggttccggtggtgtgaagaagggggtgttgctcagcccggttcatacaaggggctgatctcatatggcgtggaagtatcactgtgcctaaagggttccaatgccattacaggtattatgtcgtagatactgacaaagacgtacttatatgggagatgaggaacacgcg

SEQ ID NO: 6117 - DNA, 320 bp, Glycine max
  Clone ID: PAT_MRT3847_105533C.1
aaaataaaaaaaattacaggggtaacggtaaatcattaatccaaggaagccaaaaactcattcaaattcataatgcaaacaaaaaattttaatactatttctaaaacaaaaaaaaactggagtctcacaaatacttcccaaaataaaaataatgtataatgttcaatttaacacacacacactttcttaaaatgttaacatcatgattttatttcccaacaacgaatccttaaacttatcattcactaaatcaaactgaatattgggcaacgtcactatataatacagattggaacatataaataccatatttatcacac

SEQ ID NO: 6118 - DNA, 458 bp, Glycine max
  Clone ID: PAT_MRT3847_105534C.1
acgaggttgtaatttagcaaacagcttcaatattttttttttaaaaaaaagagactaaagtcatgatttaaaaaatgacttcaatattttaaaaaaagaaagaaaagattaaagtggtcattgtaatcacgacttcaataatttttaaaaaaagttactaaaatcgtgattgtaatcatgacttcatatttttcttttaaaaaaaagaaaataatacttaaaattatgttttaaaacacaactttaatgttattattttttaacctaactttcttaagtcgtattttaaaccacgacttattcatatccgaaatatttttaaaatttacctattcttgtaatttttcagaaaaattatccatttgtgtaaaaaagctctttgttgtcgttgttagtgttggtaagtcacaaattgacaaattatcaaatagatggagggcatgcgaggaaaagagaaa

SEQ ID NO: 6119 - DNA, 364 bp, Glycine max
  Clone ID: PAT_MRT3847_105535C.1
ataaagattataaattttgcattcagggaggtatgcaaaagacacttcacataagcactcttacagcttgtattgtatgcaacatgtatctagatgtcttccaccggtcatgatgaagttaaggaggcatctcctataatggctccataagaaaatcacaagccaaggtaacatccaagttaaggaggcatctagttctttagccaagaactagattccattaaataaatagaaaatcgtaacaaggaaagcctactctgagaactcttggtttctgttctatcttaacaaaatatatacacttctcaagaccaagtaatttgttccctggcaaataacattggatagggcaaaaggagaaaaa

SEQ ID NO: 6120 - DNA, 368 bp, Glycine max
  Clone ID: PAT_MRT3847_105536C.1
aaaccagaaattaaaaaaacggcaattttctttatctaaggggggtaaaaggaaggaaaaaacccatgcctccccgcctttcaaattatcagtaacataaacaagcggggggaaattgggttttctctttcaaaaaccaaaaaaacgtccaccctaaaggggggccaattccctaaagggggcccccccacagccataaaaaacgcccatttgaatggggccccacctccaagaaccaaagccaaatagaagtttaaaaaaccctaaaattaagcagccccctttccctttttcctcgggagttccttcagggaaaaccccagctccttaccttcaagaagggacccataagccctgccacattggcc

SEQ ID NO: 6121 - DNA, 876 bp, Glycine max
  unsure (1)..(876): unsure at all n locations
  Clone ID: PAT_MRT3847_105537C.1
gggacgcgtccgtgcgataagacgacagaaggggatgtatcagcaattgagcatataatataactgttgcgagctttgagtttgactaactataaacaaaaaacttcactatattcaaatacccttttgttttgtgtacaaaatgtgtccactaacaccgagtgacttgctgcggattttcgagaaggtggacgtgaatggcgatgggtttttgagccttgaggagttgaagatgctgctagagaagacagggttcggttatagcattgaggaattggagtctttggtgggaaagaaaagcctcgacttcagtgagttcttgttcttttatgaatctaggttgaagcagaacaataatggggagaaggaattaggggctagtgggggggatgatagtgatgaggttgaggaagtggagagggaccttgtcaaggctttcaaggtgtttgatttggatgatgatgggttcatcacaagccaagagcttgagtgtgtgttgaagaggcttggcatgtgggatgatgaaaggtgtggcaaggattgtgcatccatgatttgctcctatgacactaactttgatggcaagcttgattttcaggagtttaagggcatgatgcttcttacaacttcatgattgtttaattttgtgccaagttttacagtttgcaagtttcactaccaagtcattattaagatatgtatggtagtggacattcttcctggcctttactttttgtggtttattgtaattagtgacaataatcaatcgctacacgtgctatggcatacaaaagtgtgttattgctactgtttatnnnnnaaaataaaaaaaaaaaagcggccgctgtccgctatacaggcttacgtatgagtgca

SEQ ID NO: 6122 - DNA, 484 bp, Glycine max
  Clone ID: PAT_MRT3847_105538C.1
ccacgcgtccggcaaaataaataggtgtgaggactagtggatcatcattaggcttagttagttagatgccatagttgttttttggctaagtgttaattgaagaagccatgatagttaagttagttatttctgttataactaactttaggcttgtgtattccttatatataaagtgttagctaggtgactcatgtgagtgaatcacaaacaatttggtgagatactttttgagtgtgtgagatatcaaagtgtgagcaatcttgctcttgtaaagttcttccaatctctcaataaaagtccatggagtatcttgaagagtggatgtaggattcaaatccgagccactataatccttgtgctcttcttctttctatcttttcttttctttctgcattcttctgctaccattgagcaaaactcttttcagttttgttgctgcaaatcatacaataggaaaactagaaatttcattatgcattatggt

SEQ ID NO: 6123 - DNA, 339 bp, Glycine max
  Clone ID: PAT_MRT3847_105539C.1
aaagattaattttttttgatttattaatatccattttatgggagataggattttcatgtttttttatttacacccatttgaaatttgtacaccctaaaaaaaaaaaatttttttttttttaaggcccaaccaaaaaatccaaatagggccattattctttgtaagagaaattttttcttcatagcgcataaaacttatcattttctccagcccatgacacagaaaaaatcaattgggtccttttggcctccaaagggggcaaaaaaacggtttttaggggccttttttttttttaaagaaaactctcttgcttcttctagaagagttcacatgagaagc

SEQ ID NO: 6124 - DNA, 465 bp, Glycine max
  Clone ID: PAT_MRT3847_10553C.1
tacctaggtccctgttctgcttgccgggttgacggtaagtcatacattagggtcaccagagaggaagggagcgatggaatatggaatatacgatatagctagagagacactaatatagggtaaccaaataggtgttaaattagatgcagtgtttaaaagaaatgccaacagcaggaatggaaacatatatagagagagagaacttaaaactagagagagagagaacataacgtcaaccaagagctgtagaaggccggctggagctggtacttaaacacagccgcctgctggtgggttagcactggttgtagtggctgatgggctggttgggggtgtagcagcggtagccaacctaaatttattccagtttatgctactgctgctgctaattgatgtggtgagtggcgcttgcgcactagctgtgcccgtaaatggcttggctctggtgtagctgagagagtatat

SEQ ID NO: 6125 - DNA, 383 bp, Glycine max
  Clone ID: PAT_MRT3847_105540C.1
gcggtttcgaacattcggaggaatttctctctcgctctctctcttcaattcaacacttcgagaatcgaaggcacagtaggtaaagagatttttcatcacacaccctactcaatcaaaaacttaagatttctgtatggtgggatcttaaaaaatatagtgattccaaatattaaatggggtgtctttgaactgatgatgaggtatgtataaactggaacagtaaatgtcaatttggatattgctgaggacctctggagagctgcagatcaatatcttctggaccaccttaagagatatttctgaggaaaatgttgcactaatgtatgtcgaaggaaggattgggatgttacttcatcaaaacatgcatgtatacggtttatgct

SEQ ID NO: 6126 - DNA, 370 bp, Glycine max
  Clone ID: PAT_MRT3847_105541C.1
gtgatcttatcagctatggcggagaaacataaccttaagaatccagctgtgaagcggattctccaagagctcaaggagatgcaatcaaacccatccgatgactacctgagcctccctcttgaggttcttttcattgctttcctttcctctattattattcttaggcttttcattcttcaatttcactaactggtttcgtttagccacgggtaccttctcttattttgcttctgttgcaattaaaacgttgtattcctctttaactgttagcaattacgcctgttgtcttggatttctagctaatcgtgtttctttggagataaaaaaaataacatacaaaattgaagggtctattttttgagaaagaaaa

SEQ ID NO: 6127 - DNA, 434 bp, Glycine max
  Clone ID: PAT_MRT3847_105542C.1
cttatacaatgctttgttcaaggttcaaaaacaaaacaaaaaagaatcgtagttgagaagttacccccaaagactttttgcatcaaatacgagaaatggggctaacatattggaatgaatatctccacgtcttaatgagttaaacgaaacaaagcaaagcaaaccccattacccacaagagaaagcgaaagatatgtgggtcttccttgagaatatattactggcatgacacgatcataacaaatataaaacccacacaatgtgggaagactttaacccttggtctcatttgcacaagtaccgcccaagatggttcatgtgggtggccaacacgtgggtccattcccacaccttaatattcaattattcatctctatgaataaagatcattcggttcattgtccgtgctttctccatctgtctcgctttacacc

SEQ ID NO: 6128 - DNA, 232 bp, Glycine max
  Clone ID: PAT_MRT3847_105543C.1
catgcagcgatgctgctcataaccgcaatatggaatcctcggggatcgaagacaggaagccggagattctgataagcgcaggaggttgattatggtcgtatgtgccggtgcctgcaaagtcgtatgcgactgcgaatactgacacatatccttccgcccgcctaattcgataagcatgctgcgcacaatctgtgacttaactgacattaattgctctgcgctaactgccagc

SEQ ID NO: 6129 - DNA, 340 bp, Glycine max
  Clone ID: PAT_MRT3847_105544C.1
agaaaaccacttttttccttttttgaaaacaaagtgggatttcaaacttatttggacacaaggtttattcttttacctaagggaagctgatctaaatacaacgggggggatgcaaaaaattgaaactcacactgtttagcccaaaaagggtaaaaggtcacaacacaaacaacgtgcattttcaataagggctcggtatcattccaatggcgccatgcacccaaggtctgcccggttaaaaattatggtgggaaaggatttgaccacccatacccagggcgcccgtccatgtaatttgtaatcagggcaaagccaaacattttttgttccacggtcaaaa

SEQ ID NO: 6130 - DNA, 872 bp, Glycine max
  Clone ID: PAT_MRT3847_105545C.1
cccgcgtccgtccctatcacgccagaaacatttcatccccgcgtccgcaaatcgaaacggctcgcgttgttcacagtcacactctcactctcacactctctcactcacactcacactcacaccattgtatagaagattagagagagagaaccctaaactaaaaccctaaaattccattgcagcaagcaaaggcattgatcgatctgcatgggtcacgtaggttccagcaaggacggcaccgaggctgggccttccgccgccgcgatgggcatcgacgacgacgaagacatcgacctcggcgacgtcgatctcgacccgaccaacgccgaaatcctcgaagagctcggtgaagacattgtgaaatactggtgcaagaaagcgtcgatgctcttcttcaacgagtacggtctgatcagccaccagatcaactcctttaaccacttcatccacacaggcctccaaaaaaccttcgaatccttcggagacctagtcgtaacgcccgggttcgacccttccaagaagggagaaaacgaacacttccgttacgcctccgttaagttcggcaatgtgaagctcgataaacctatgttctggggcggtgaagggaacgcgcaggagtttaagatgcttcccagacacgcgagaatccagaggatgacctacgcttccaaagtcaaaatccaagttaaagttcaggtgtatgttccgaagaaggttcggagtgataagttcaagactgggaaagcggagttccttgatagagagattatgaaggaagacgagagggaaatcatcattgggagattgccagtcatggtcaagtctgatttgtgctggatgaaagacgcggaaaaagatgatgatgaatttga

SEQ ID NO: 6131 - DNA, 669 bp, Glycine max
  Clone ID: PAT_MRT3847_105546C.1
cattcattcaagttaaagataaaaataaatgtataatgtgcaccaaagcaaccagattgcagatattaaatggatgaagaaagatcatgctaagatgtgggctaccccacagcataaataataaagatgcgaggcctaattggaaggtccatggcatttaaggcaaagaggtgaatccacgttgcaggcattgtctccattaggcgctggtgcaacttcaaaagttattaaatagtataagcggacaaagtaatggggtaaagctttgccaacaatgtctgaaaaggaaagaaggatatatatacaagggagggcaattcacttgtgttttagataaatacttgtcctttgattacttgagaaagtggaacaagcaggctctacagttactgtgtgtgtgtgacactgaaaatctcactcatatgagggtacttaacaaagtgtcacaataactaatcatgtgggttggactttagaaattcattgaatagcaaattgagaaagaaaagaaaaagaattattaaccaccgggagggggaatgggtagaaaatggtggtgggatcctcccttcaattaattaaaatagttgggtccatattggcttttaataaataataataattgtaactgagaacagattcttgacaagatttgatagtatggcataa

SEQ ID NO: 6132 - DNA, 1348 bp, Glycine max
  Clone ID: PAT_MRT3847_105547C.1
tacggctgcgagaagacgacagaagggtacggctgcgagaatacgacaaaaggggatgccacaatggttgtccctcttaggcactttcttgttttctctctcaccctcatatccatcatcttccacacccatggagcgttctctgagcaatcaataatcaagttacccacagaccaaccaagggtagagaaactgacccacttgcattttttctaccacgacatcttagagggcaagaacatcacggtggtgaaaatcatcgagccatcagcgagcgaggttcgtgaagcaactgggtttggaaccactttcatgatggacaatgttttgaccgagggtccagagctgagctcgaagcacgttgggagggctcaggggctgtttggcttggcctctttggaggaccgtggaatggtgatgctcattaacttggctttcagtgagggtgagtatgctggcagcactctcagcatgcttgggaggaaccctgttcaggacactgttagggaaatgcccattgttggaggcacgggcgtgttcaggtttgccaagggctatgccattgccaagagtctttgggaaatttctgacaatgagcattttgtggtggagtatcatgtcactgtttctcatccttagatcttatatgtcttttgttaagagtaataaattttaggcttaaatatcttcaagatggtatgataaatgaataaattttattgagttttaagtaaaaaaataataaaaaagaatgatatattacctaacagagtcatccagccaattgcagaacactcagagtatcctgttgagtgtcttgcattctcccatgataaaaagttccttggaagcattgcccatgatcaaatgttaaagctatgggacttggataatattctacaaggctcaggaaacacacaaagaaatgaagctggaggagctgttgacagtgacgatgatgagatggatctagatgatgatccttcaaagattaataaagggaacaagagaaagaatgcaaataatgggaacgccctaggtggttcgaacaacttctttgcagatttgtaggaggtttgaatgcatctctgctcaaatgtgttgatcacccaattagaacacttgcgtgattttctaatcaatattaagttgaaggcgcccccttccaaaaattgatatatacattgaaccgtgtccagatgatggcttttttgtgcgttatattggtacaaggatgcaattttttttcttcaatatatgaagtaattcattatgttaaattatgaaataccgtgaccattttattgtggtttcctattatatatttttgtgttgtttaattgaagtt

SEQ ID NO: 6133 - DNA, 580 bp, Glycine max
  Clone ID: PAT_MRT3847_105548C.1
aggcttgggctctggaaatgcaaggcaaacaggttgatgctatggtggaactgtcaaaaatatgccttcttctacgaatatttcctcctgaggagtcttcgcctgaaatggagatggttagtcggggcctagaaaaacacttgaaactggaacaaagagaacaccttatgtttctctttggtaaagtttgtggcgaggacagtcacaggattgcaagagaagcccttgggttgacgcattctccaaatggttgctctgaccaattcgaagacaacatcgctccgtgaaaattaatctctgccttcagcctcgtttgggataaacaactgactgaagatgcattcttttagagtatatacctgtttaattgtttagattatatctgtttactcaataatatttagattttagatagtttcttttagtaatgtatattattttcaatgtcaaaagacgattcttttattcagtgttagctttttaataattttaatgtaggagttcctccaaccaagaatgaattgacatatctttacaaattattaattgttataattatattaaaagttatttctagagt

SEQ ID NO: 6134 - DNA, 782 bp, Glycine max
  Clone ID: PAT_MRT3847_105549C.1
cccacgcgtccgtggtcttagaaatggttggaagaagaaaaaacattaaggctgaagtagacaactcgagtgaaatatattttcctcattggatttacaatcgtcttgaatcaaatcaagagcttggtttacaaaatataaaaaatgaaggtgatgaccaaatggtgggaaagatgacaatagttggcttgtggtgcatacaaacccacccttcagctcgaccagccattagtaaagtgatggaaatgttagaaagtaaaatggagttattgcaaattcctcctaaaccttttctgtcttctccttcaacctctccggttcatttatcatgtgagacactatagtttagaagaatatatactaagatgtagcctttgttgtagtacattgcacttattactatttttcttcttcttttagtttggctttataaattgatgagtaagtgcagcgttaatcactttgaaagatttcatactctacatctatttcttgtcttaatattcacttttgatagctatgtagacttaatttttaggttttgtcttcgctttatctgcttgctttaaaatccccttcctacccatttatgatgtggacgcacaccacgaaccgctccttctcgtcgccgacatagatcgtggtttgggtttggatttcatcgcctttcccatgcgccgctctgcacagtgaccaccccagatatggggtatgaggctaccatcttctcaatggtttttctgccaccgcgaaagtacggaataagaaggaaaaagaaaaat

SEQ ID NO: 6135 - DNA, 413 bp, Glycine max
  Clone ID: PAT_MRT3847_10554C.1
gttactcatgtgattccatcataccttgttctcatagtaactggttgtcttgcattaatattattcttttttaaaactttcactgcaggtataacctacctttctgctttgatttaaatcaatgcagaaaggtaaattattattaaggcaaggtaagttgttgatgaagacgtttggggtgaagaagaccttcttctaaataaactcaccattaatttgcacacttcttaagaattcaaaggtttccatggattattattattattatcatctgaggtggttgatttcccagatgcattatccatcatccatatcaaatttgtagttgcagtaattaagaacagtagaaggagtaaaactgggccgaatatttgatgaaagataacttgattgtgacacacttgctgaaaaat

SEQ ID NO: 6136 - DNA, 398 bp, Glycine max
  Clone ID: PAT_MRT3847_105550C.1
ttgttctcgtgggctattccatgccttgaggggggcattgctgagtttgacgagggggtgaaagcacaagctgatgaggcccatgagatcgctcttcgctcctacgaacctgaccctataaacgttacagccgagttcaatatccatgttcatagggcattaatggaggaatcaaacgacacaaggagggaactaaagcaaaaataccgtggaccatgctttggccacgaacccaatcgatcgttgttggaggggttggaaaaattgggcccaaaaccgtatttggtagccagttgtggcaagggtttttgaagaagggccttgggaggacttcaccgcaaaatctacctcgtcaccgatttcttcgatgacgaacccattaaccctagaccccggac

SEQ ID NO: 6137 - DNA, 496 bp, Glycine max
  Clone ID: PAT_MRT3847_105551C.1
tttccgtacttattcatcgccaccattcttgaatctttcccatacctcggcaaaaatcaaaatccccctgagcctaaacaaaacaaacaagatttgctgacagacacagtggcgcggagattgtcccatcccaattcaaattcacaaaaaaatgccatctcagatccttccgacacccaactaccgtgccttagattcggcggtttcgagtcctccatcgatgttgctcagagccaaagtagacgatatggacgatgacccttccgcgagtctcttgcagcactctcccccttccttccaagaaatgtccctcaacaagcctcccctgcccagggccttcagcttcaccaccaccaccgctaccacaacgcgcagcaaaggctcccacactcgccattgtttctatcagaaacggcgcaagcgtgccgccagccaagattcccttccctccgtctcccgtgacactgtcttcaccaccaccaccaccacaaccacc

SEQ ID NO: 6138 - DNA, 696 bp, Glycine max
  Clone ID: PAT_MRT3847_105552C.1
gtaactattacattgttttagtcactcccatttttcactctatcttcactctcacctcactcactctacagtcccgcccaattcgtcatatcgaaggccctgtcgtgcccagttcaccgtctaggagtcctccgtcaccggctcgtcgtcgcaagctttctccatcactaagtcatcgtgccttgttccccgtgtaggagtcctctgtcaccagctcgccatcaaagttgtgctgccatcattgtaaatgccaccaccgtcacgtaagccttcgtgaagttgctgtcgtggctgggcaaacactagaagcaataaggacatgacaaagatatcattagctttggtatttgcattggtggtggttgtaccatttcattaagttttgtgtcaggaagatccatggaaaagtgtaatagaccaagcaaaagacgaagcaagcaaagcaggtctctctgaagatacaatatttggggctgagaaggctataacagatggttctgccgaaaaggttgctgaggatgccttgggtggaggatctttggatgattgggttcaagaagcctgtaatattgccaatggtggaagttcaccatttggggcactgaaagatttacctgattacaacgaagaggataatcttccggaggcactagaaatggcaccaaaagttcaccgtcagtaacacccgtataggag

SEQ ID NO: 6139 - DNA, 247 bp, Glycine max
  Clone ID: PAT_MRT3847_105553C.1
aaaaatgatactgttctatccatggtctgtttttctttcaagcgagtaatggaagcttaactggcccttttttggttggattcgccgtcaccggaactcttatcaccaaacttactctagggctctctgataacgtccttctcctcctacttcttcgccaacctacaaaattggatttttgttctgagcctgatttcccttttcgcagaagaggaagccacacagtcaaattttttccaggcacaca

SEQ ID NO: 6140 - DNA, 138 bp, Glycine max
  Clone ID: PAT_MRT3847_105554C.1
attcggctcgagatacaatagagtatggaaagaagaaaagaaagtgatgtccccatgcaatgtgatcgtatgcatttgtgttcgtggtgtgtagaagaacaccagtagtgtccctagcccagaacacccgtcaagagt

SEQ ID NO: 6141 - DNA, 433 bp, Glycine max
  unsure (1)..(433): unsure at all n locations
  Clone ID: PAT_MRT3847_105555C.1
aagattatgtttaattgtttaatgttggtacttattttaactggaaccactgcagttatggcatttggagaattatttaatattagcaatttttatgttgttgaatttcctacatgtttcctgaattcagtaactccactcttttctggattgagacttgagagttatttcagtgcatttaatattgtcagttattgaattccatagagtcatcagaacagaatgtccttgaaatattttgtgaatactgaaaaattacaattttttggtggatggttccactttaagaaacagtttgtagatgttctgctatctgggtcataaagagataccggccaaggtgaaatgttggtaaacaaaacgcacattagggtgataattagaaatcatttttctgagtgtagtttgttattagtctanattcaagcccttg

SEQ ID NO: 6142 - DNA, 264 bp, Glycine max
  Clone ID: PAT_MRT3847_105556C.1
cttataacgtgtgtgtgtggtatagcaaagggcgcatccccaataatgaacatgaaaaggaacaaattccctaaaaaacgtggttgtcgcccctaccaaatcaagttggatgacccgtcttacaaaaatggtaaccacaatcatcaacgcgcttcatgttttttgtaagaccaaaactgtcacggtcctgggaacggatacgcacccataaatgggagcaagacctcctcctgtaaatgctaattggggcccttatttttacct

SEQ ID NO: 6143 - DNA, 511 bp, Glycine max
  Clone ID: PAT_MRT3847_105557C.1
tcacggggattaatgtggctacatcttctgcttgatcgtttcctcatgaatcacgagtagcagtagtagtaactattaccagtggttttcatcaatttgctttatgtttttgaaaggttggtcttttgattctgagatttctcaggaaagtacacagttcaacatgctgggcgatactgtttaaaagctttttttttcctttactttttctaattggtaaattgtgtaactttttattgactttcctctaatgggaacgaatttgggattccttggcacgtaatgttgtaattagtaaagcattttggtctcttgaattttttttttgtgctgaaggcccatggatttgatgtgaagcattctaacttcaattgtggttctctcatgggatatgagcattggctgctgatcccacattgtctttattctgttggaaagcgaatgcttcctatgctagctgtataatattgcttgcctgcgacgagcatttcgtcaatatcaagagtatcac

SEQ ID NO: 6144 - DNA, 109 bp, Glycine max
  Clone ID: PAT_MRT3847_105558C.1
gtgtctctttttctctcacaaacgagattccaagagacacggagattactaaacttgggtttccgcctaagagtcatcatgatatggtgatattctccctgaggtggga

SEQ ID NO: 6145 - DNA, 391 bp, Glycine max
  Clone ID: PAT_MRT3847_105559C.1
aaaagaacaattaaaaaaaaaaaatgtaaagaaagaaaaaaaaagaaagacaacaatgatttgaggattactttagtttgaccattttataaaatatttgttgaaatgggtgctgttgagttataaatcaaattttagtttctatggctttacaggaaataatgctgttatagtgccacctaaattaaatacaggggcctcctgaagaaaacgttaggaaggggaaaaccgggggtacatggaattaaatggctttgaaaaaaaacccctttttgcaagttggggtaaaaacaaaaaggcccgaaccgatggcctttccaaaaaatgggcaaacctgaaggggaaaggggaccccccttgaaagggggcattaaggggggagggggggggg

SEQ ID NO: 6146 - DNA, 612 bp, Glycine max
  unsure (1)..(612): unsure at all n locations
  Clone ID: PAT_MRT3847_10555C.1
ccacgcgtccgatgttggactcctcttggttctgacaaattggacatgttgcagcaatagcaatgcccattctccaccttttgtaattagtcatgagacaattcttccctatgttccaaagtaagccccttatcctctccggacctttccaacgccgtattgaattgaacaggggaatcttcagtggctccattgtgaatacctggtaactataagcaaaatgcatcgagaatataccatcattcgtgcttttccaagatattttctcttccttgctcaaaattagggggagtcaaactgcaaatactcgcacacatagaactgggaaggaattggagcctgagattaatatcccatctaccatcttcccccacaaaatcacttacgttcatagtcaaatcttgattacccaaggtgcttatttgcttacncagcaaggacccgacaccaagaacccaactatcaatccaaaaaagcacatcatgaccatcccctaccctccatctaantattgtctgcaccgagctccagcccanacattntaaccaaccttgttcctatttataaggggaacaatatccttttccacaaccatactttatctaactacct

SEQ ID NO: 6147 - DNA, 245 bp, Glycine max
  Clone ID: PAT_MRT3847_105560C.1
gggaaaccaggccaggtaattaaaggggcctttaatcaatcttagccctaatacctccctttaccagaatttttttgttggccaaaaagtttttttcctaaaattggcaattttttttacttaaaaatttacctttaacaaccaccattattacggttaattaaaaagggggtaaacagacttcctaatttccatgactttttgggggaaatgggagggcaggtagctaacaaaagtaggacttt

SEQ ID NO: 6148 - DNA, 390 bp, Glycine max
  Clone ID: PAT_MRT3847_105561C.1
gactccagtgagctgtcccctcacgcatgtgtcttattatcaatccaatttgccaccgactttacagatcatactttcgtcagctgtacatagctggggcctctaaagagccaactgtacataattgacctttatcacatgccatcctcacgagttgccatgatagcacagcaaggctacaacgcgatgatgataataaatctatcccaagaatgcatggaacataattcactgcttgtgggtggagctatatgttcaacgcaacaacaatggacggtggagcccttaaccatgacatgcaccacgacgagaacaactatgctattgtaaacgaaggggctgacctactaaatgtgacgtgagcgagctgtcaccaagtctgggcggccg

SEQ ID NO: 6149 - DNA, 215 bp, Glycine max
  Clone ID: PAT_MRT3847_105562C.1
gaaaaaaaaaacacacttttacttaattaacagaaaatagtgaagcaatagaaagaactggtcttgagtgtacgtataaagccataaacacatataacacaaactgcggatactaggaagacacaagatctaaacatgaatcgtaaaaacatacacgctttaaatgggcccggtacactaccggctgtctggatactcctggatataacctaagc

SEQ ID NO: 6150 - DNA, 335 bp, Glycine max
  unsure (1)..(335): unsure at all n locations
  Clone ID: PAT_MRT3847_105563C.1
naaangcacgngtagtnantcggaattcggatcgaggntnnacnggaaatcangaatctatcagnccntcaaacangnagcagacgtcgtcntnnatctcctancanaggacgnngttcggngnacnagtagggccagaaannagntgnctccangctannnctaaagncagtaaaggnnngtgaccacaaaaccnnnnaggantcantttctcnggagnnagccacttccnatacgttnntcaaaacgncaatggnccctgcnccctcntagctatctgtaaacgtcctgctgtngagcnacnattaaatttgantccagatattgntnaagcn

SEQ ID NO: 6151 - DNA, 320 bp, Glycine max
  Clone ID: PAT_MRT3847_105564C.1
cgccaacggagggggaataccggacgatcatctcatgactatgctgatgggtacactacgtacggtaccgctggacactacactactcttgcaacgacttatttggatatggatgctacacatatgtcacataaggcgaagcattcactgatgctctccggtctacagtgacaagcatcccatgttcctatcattgcagcttgaaaacacgtcattactactatagcgggcccatgaatgcacttgactctgcactcgtcagatatatcgctaccagctgcgatcgagctgttaatgccaactagacgttttatgatgaa

SEQ ID NO: 6152 - DNA, 396 bp, Glycine max
  Clone ID: PAT_MRT3847_105565C.1
ctcactcgtaggttatagcaacgctttctttatcattaacatacattatgcaactcggtgtttatcctatatcaaccgctctcatacaaacctcacactcgtactttgactatatcatttcatttcttaaacaaaaccatttgtcaacaacacatttcgtactccctttatagcaatagacttgtacctatgatttatctaactctacctacgattgagaaacaagaacaatatctacgacaactattttaatatactattttatttcatcttttaataattgtcatgatgtatcacctatggaaaactcacattttattacgatcatgagataattctgcttcctgagttgattgcttgatatgatgaaaggctcactttaagactcatgttctt

SEQ ID NO: 6153 - DNA, 506 bp, Glycine max
  Clone ID: PAT_MRT3847_105566C.1
aaaaaaaaaaaaaaaaaaaaaaaaaaaaaaaaaaaaaaaaaaaaaaaaaaaaaaaaaaatgataaaaaaaaaaaaaataaaaaaaaaaaagcatgcaaataaataagatttggtgttgggttacttaaatttattttatttagccgttgttttataaagtcttaactttaataaccttggcgttacctaactaattcgcctttgggaaaatccacttttaaccaagtgaaaatattttaaaaagcattttttttttcgtatttgccaatttttttttaggctgattggtgaatgggatgccccttgtatcggttctttatttgcaaagggtgtcctgctttatcgcattttaacccctccctttgttagagtctttacgcccggtgttttcggttttttccctaactttatcgcccctttttgcttaatttctcctgacattcttttaatttggggctccctttagtttcccgaataagtgttttttggcccctttttcttaaaaa

SEQ ID NO: 6154 - DNA, 830 bp, Glycine max
  unsure (1)..(830): unsure at all n locations
  Clone ID: PAT_MRT3847_105567C.1
aattttttttttttttttttttttttttttttttttttttttttttttttttttttttttttttttttttttttagagaaaaacataccccgtcattgaggctcgctcataaaacattaattccttaagtcacagacacatttgttttctgtttataaacaaaatcttcggtacatgttatattgattgattcgtccagtttcatattcttctatcaatggtacaaacattagacgacaaattaataaagaatgattacaattataaataatgactatcgacctaaatgaaagaatgaaataatctgtttgcccaaggtttcaataaattcattcagcctgacagtgtgcaaggcttgaggaaccaaaacatgtccaaggcttttgtttctcttccatcaactattgaagtgcttctgcttttctctgcaggagactccttcacaatttccttgttttgttcaatttctccaagtattcctctctccattagccgggatttgggagcctttgaaggggtaggtttgttgaatccacgtgcaacagagaagcactgaggagagggaggatttgttctaatttgttgtaagctcccctccctcttgtgctttagattctccaggtcaagagttactggcatgttctctgcctcatcaggtcttttttttctctgttgcttccctttaacacacatcccttcaattctttcagccttactcacttcaagnannngtttcntttctttctcttttnnatctganctcagctaaagcttgaatnnnacangnnnncttnnncaccacctcttcacncnnntttgggatcaaattt

SEQ ID NO: 6155 - DNA, 220 bp, Glycine max
  Clone ID: PAT_MRT3847_105568C.1
aatataagaatcgagtttaactaatttttatagacattttagatttgaattgaagatttattttaaaacttaccttttagttaataaatttatcttgaaataaattaacaactcttagattttatgtaagtcaaaaaatttatgtctttaaataaactgacaaatatataaaatttaaatgttgtgatgaaaatttacccacgcgtccgcggacgcgtgg

SEQ ID NO: 6156 - DNA, 250 bp, Glycine max
  Clone ID: PAT_MRT3847_105569C.1
gccgtcggccaagccttccgttcaaaacggccggcgactgaccccgattggaggtccagggaagccaccgttgccgcaggttccagcattattatttttaataacaccagcgccgggggtggcagtacagtatagtaatgtaactggacatctcatccagcccatgtgatagggtctgcctgaaatgagtatgattattatatagtttcttttttttaacttgacctttattttagtgaaaggatcgaat

SEQ ID NO: 6157 - DNA, 649 bp, Glycine max
  Clone ID: PAT_MRT3847_10556C.1
ccatcatctttcttgtgactccaaaagctcactggaactgttcaaagatcacattcgcagattcaactcaacaacaacataaaaaaccaaactctgatttttctcattttttctgcaaacccaaaacagtttcagctttcaatctcagttccaatgcaaaacccaaacccatcatcatcttctcccccttcccctccttggttggactcagccccgttcatccaccggagccgccacctcctccgccgcgcgccgccgcccctacacacggcggcgaccttcttccggcgcgcgagcgggcggcgcatgatgctgcgggagccgtcggtgcgcatgcgggaggcggcggcagcggaggtggagggccggcagagcgagtgggcctactcgcggccggtggtggcgctcgacgtcgcgtggaatgccgtgttcctcgcgatcggcgcgtcggtgctagcgctgagcaccgacgaggacccctgcgtgccgctcagggcgtggattgtggggtacctgctgcagggcgcgttgcactctctctgcgttgttgctgagttcacaagaagaagaagaagaagagtgagtgggacccaccccggttctaacgtggtgggccacgttcaatggagcttcagttccgagagtgacg

SEQ ID NO: 6158 - DNA, 737 bp, Glycine max
  Clone ID: PAT_MRT3847_105570C.1
ccacgcgtccgcatttatgaacaaacgagggtgttgaatggtagatttgaggtgaagaggttccacattggtaagatggcagacagaggtagatgtggtggtcgcaaaacattcaatcgtgatagaagatgtggtgttagtttaggagttctaattaccaccaacccttccacctcttccattcacatatcaacctcagagttgatgattcatgtcattgcgccgacaccaaacacacttcctacaactcaagaccaaccaaatccaacctttgtaagggagttaattcccactaccgccattggagatgtttcacctttagcactagatgattctcttacacctgagtatccacctgatccaaattgtgaacatattgttgattagaggcctttcattcgtgcatataaaggagagtaagctcattttatttaacaattaatttttcttaaaatttttttaaatgggatattcacaatgtctttgtacataggtttcaaacaacatatggatgttctaatatcatatcaaatatcattagagcaaagtttgatgaaccgactccaagttggttgaaggtattagttgaccttatgataggtggtttggacagtttaagaaacatacaggtggcactaagcagaaacaatacgcatgggccttttttgtgtaaaatcatcaccaactccatgctactccttgctttgcactatttcctttcttcatgcagctctact

SEQ ID NO: 6159 - DNA, 1329 bp, Glycine max
  Clone ID: PAT_MRT3847_105571C.1
acgcctgcaggtccggagaattcccgatcacaacccacccgtacgaccaatgaatacagtacgagcgtcagcatacctgcctctctcacactcttttctttaatgccctacatgagaaccgaaaaaacgttgaagctgcagtaactagatctcccatgcagatgaagatgggggatcatgaattagaaggcaacactaccagtgccctactcactgccgaaacgtttctacgtttcgttcccataagaagaaagaggttgtagggtattgacaacacacaaaaactacaaagttaaagggatgatggagaaaggaagtgtggttgaagttgcagcaactagatctcccatgcagatgaagatgggggatgaattagaaggcaacaccagtgccctacgcactgctgagacgtttctgcgtttagttcctgttggtctatgtgtttcagcacttgttctcatgcttaagagctctcagcagaatgaatatggatctgttgattacagcgatcttggagctttcaggtacttggtgcatgccaatggcatttgtgcaggctactctctattttcagcggtgattgctgctatgccacgcccttccactatgcctcgtgcttggactttctttttgcttgatcaggtgctgacatacataattctagcggctggagcagtgtcaacggaggtgctgtacctggctgagaaaggagacgctgcaacaacgtggagctcagcttgtggctcttttggtcgattttgccataaggtcacagcatcagtagctatcacatttgtggcagtgttttgctatgtcttgctttccctcatttcctcatacaagctcttcaccaactatgatgcaccagcaagcaggcccactgcagccattgaggttgctgctttccctggctagctagctagctgactcatatatataaataacaacttcatgcttcatatctatgtgtttcctacaattaatatattaatgtaatagcatactgttgtggaccttaattaggacttaggacagacatgcattgccattgattaagtatgactttataatttattagttataataactcctgacctccttcttctttgtattataacactggtgttcatgcatggatcaattcatggaaggcttaagctttttctactagtgcttgttactttatataaactttgccatcaccttcctttttccttttattagagacaggaaattagttgttacagttggctatgtaatagcccctttattctcattgtaaattcaacttctaccactctaatatacttttactgtgatcaagttgtt

SEQ ID NO: 6160 - DNA, 467 bp, Glycine max
  Clone ID: PAT_MRT3847_105572C.1
gagagaactagtctcaagtcctcttcttgctttgctgtttttcacaatggtgtttcaaggcttatttttggaatgactcattttagagaataagcttcttgattgtaccttttggttttatttattggtcttgggaatgacatagtaatagcgtaggcaactggatatccttttgaacaatcttcataagtaattttgatgttgcaatcttagttggacagtcttttgacaaataatttggcagtaaaatccagtgatcatatccaatatttttgaattatatatggtgaatgtgcacccatgccctatttactcctctaaaagagtagaaaatttattcaacttgaagttttttggtcttgtaagagagaatgcagagagaaacgaaaaggaagcgtaagtagattttaatggtgtaaatcatggttgtattgtagctgaatggactttatttagcacaaatccta

SEQ ID NO: 6161 - DNA, 642 bp, Glycine max
  unsure (1)..(642): unsure at all n locations
  Clone ID: PAT_MRT3847_105573C.1
cacctactttgtgactatgaggagtatcagcaacaaccaacaatagagggtggctagcagtagcatgtgagtgaaggagcctgcctgcagtttttttaatcgtactgtactatgtttgttatgtaatggtatcatggtaagctgactaaagtgacagatttgttccatcactgccttctgagaaagaagttaactcttagcaggtccacacaaacatgatgactccaaacttgaacttggaaatcgaaaatcattcagaaggcagcagccaagtggcttcaaatgtatccttgcatgaagcatctcatgatcttacaaagggcagcaccaccacttcctcctgtctcacaaaggatgaaactgatccaggtttcattacccttgacttgacactcaacttcaataattcccggtgatggcgagttgaaagtctcgagtgatgctagcagtgaagttggagcttgagcttctgcttcagcatcagcaactccaagggtttcttctcgtaactactgcaggaagaaggtcctatagctctcaggcattanggggtcatcaaaatgcacacaaaagggagaggacgatggctaagcgcgcattgcgaatggggatgttcactgataggtttacaagcttggcatc

SEQ ID NO: 6162 - DNA, 259 bp, Glycine max
  Clone ID: PAT_MRT3847_105574C.1
tttattactccttcaggatcgctgacaacgttgctttccatttttacccttcatcctcgagaaaaaaagggcgaacgcaacatatggtatggccgaccatgatgagtgcaagctaaagttgctggcgctcaagggaaagaggacgtaccggtatatcggttttaagattgaggagaaatctgaagcaagttattgtggacaagctgggagaccctgcaaatggctatgatgaatctgctgtcagtctatctgatgatga

SEQ ID NO: 6163 - DNA, 203 bp, Glycine max
  Clone ID: PAT_MRT3847_105575C.1
caacaaccaaatggatctggtgggtcagttggctgggcaaaccctgtaaaaaggctaagaacagattctgggaagagaagaccaagccatacatagggtttcccttcctgagactagtagcaatatgtccattatttaccatccttatatcccgaggaagggaaaccctatgcatggcatggactttactcccttggtgttta

SEQ ID NO: 6164 - DNA, 458 bp, Glycine max
  Clone ID: PAT_MRT3847_105576C.1
cctcgtgccgaattcggcacgaggcccaagtgcaccaggaagtgcagcgctgcgtctggcctgacctacaagaagagcctgtactacgccaagagcgcgtactccgtcagctccgaccccaaggccatccagaaggagatcatgactaacggacccgtcgaggttgccttcagcgtctacgacgacttccccacttacgttgacggtgtgtacaccaagaccagcaacaccttcctgggtggtcatgcagtcagggctattggctggggcgaggagaatggcacaccctactggctcatcgccaactcctggaacaccgactggggtaaaggtggtctgttcaagatcaggaggggcaccaacgagtgcggcattgagggccaagtcgtcgctggcatccccaaggtctaagctcagcatcttgcaccagaagcgaccaacgattattgtaaattgtt

SEQ ID NO: 6165 - DNA, 259 bp, Glycine max
  unsure (1)..(259): unsure at all n locations
  Clone ID: PAT_MRT3847_105577C.1
gggtaccacactatgtaagaatactgtagtctacagaactttgatacnngtataatctgactacgaccgggtcccctcggaagacctcgatgacttttacacgcatttattgcaagaaattaatgatgattatcgacaagaacctgcnnnnccacattcgtgaagggacaggcattatcaaaacccggaggcaagaccagaagaaaaagttattattacccttaacacagtacacgcctctttgctgatgctgcatgga

SEQ ID NO: 6166 - DNA, 263 bp, Glycine max
  Clone ID: PAT_MRT3847_105578C.1
gaaacggcaagcataggaatagatctcattcgatttctaactatatataaggatatatacacacaaggaggaaacgaggagaaaagaaatagcggatcataacagaccctccatttattattccaagcgattgtgcagcgcaagtgcctagcctatctataaaattcaaacccaaggggcctcatctgttctttcttcaccattggctccctttccgcgattgaggctcaaaacccgcttgaactccgggaagaatgacattg

SEQ ID NO: 6167 - DNA, 311 bp, Glycine max
  Clone ID: PAT_MRT3847_105579C.1
aagaaaaccattcctttcaaattagtcgtatatactcaaaagatataaagatagtttataagagaagaaaataaaatttgtgtgagaaaaccattcctttcaaatttgaactttagcatatactatttgatgtcatcaacttttatatcaaaaaactatatttatgtgcacaaacattgctaaaaggaattcgtacttgctgtgaaaaaaaaataaaaaagcatggtcttaattaactatgtgttgtataactgtaaaaaaaaaaaaaaaaaattaaatttaaaagggggcggccgttctagaggatccaa

SEQ ID NO: 6168 - DNA, 255 bp, Glycine max
  unsure (1)..(255): unsure at all n locations
  Clone ID: PAT_MRT3847_10557C.1
atgatattgtagaaattatggaggnagaacnatnaattccntcagattcgctccggagtgcagattnccaaatnttctaccatggctcactaaagcatacaaaagnaagtcaatccattattggattcttctngctctcagcatcttggcaatgcttgtggcatttcctgcttccagcannctgtctcgggtnnattatgataacggtggccagagcaantgnatcatttcatgggtanctgttgctngatggcc

SEQ ID NO: 6169 - DNA, 139 bp, Glycine max
  Clone ID: PAT_MRT3847_105580C.1
ccggcgcgggagacgggggggttttttaaggacgcccccggttctctgctgccctgatgagggtgtgttcttatcccttttgtttcgcaacaatggttgccggttagaaaactaagaagacccatgagagcattatcga

SEQ ID NO: 6170 - DNA, 241 bp, Glycine max
  unsure (1)..(241): unsure at all n locations
  Clone ID: PAT_MRT3847_105581C.1
cacncaggggggcactgataacacgggagggtgtgctgatacgacaggagtgacaaacgtgaaaatacggaagatacccataaccccatgctgcaggatcattcagggtcttgcagatcacgaagctgccttgcgcatccgcacagcactccaggctaacgtgttgggcaccaaccccactgctccagtgaactttatttttctccacaactaccgtggaaagggtgttcccaacgttttt

SEQ ID NO: 6171 - DNA, 843 bp, Glycine max
  Clone ID: PAT_MRT3847_105582C.1
tcggctcgagacttttatagtatatggaatgagtataggtacttgattttatgaaataaatatcagtacgtgagaggtattaattcataaccttttacatataaaagtgttgcaacaactccttggtaaaaatccattccattaatgtcaattttcttagcctagtcagtaccctgccttacatctgcgcaaatcgaacttgtaaacctttgcttcactattttcaacccatctcttaagtttcactgccagcaatctctccggttctttaccttcacgaattcaaccactaatttcgatgactgaactcgtaaagaacaccgaacagtttcaaaccatgggcgaggacgccaacttgaagagatggagggaaacaacgaaatcactgttagatgctgtagacaatttatactgtcaaccctacagcatttgcgtggttccggaggaactccggaaacagaacgagagtgcttacgagccaaaggtggtgtcaattggaccccggttcaagggcaaaagggagctacaacaaatggaagagatcaagtggcgttgcatgttgtgtctcctttcgcgaaccaaaggagacggaacgaaaatcctcgaaacctgcatgcgcgaaatgttggagctagacgcaacagttcgcgcatgctacggggaggaaatcaagctcaacaggtatgatctggccacaattatggtgtatgacggctgttttctcttgaagtcgccatttcaaaagaaaaagactggagcgcggtgttcccgcaacagtctgtttctgtctcagtgagcgatctagggactaaagtcggggaaatggaagcagtattgactgac

SEQ ID NO: 6172 - DNA, 471 bp, Glycine max
  Clone ID: PAT_MRT3847_105583C.1
ctcctttatttccttcttgactcattatcctactcatacgttatctaacccacactctaattactctacattgctcccactgaagcattccttctctctatcctccacaccactctactcttacccctactgccgtgattgacttcaactaagaccttacaaggactcatgcaaagaccgatacagctgtggacgctaatacaacacttgaagattgagatccttcgaagctgcacgccctggacaggatgacttctgcttgtgctcagctggcctgcatgcactctgcatcttgcattggctactagatcgatgcgagcagcgcaccaatcttgaccatagcgagggcccctggtagctgcttgtgtggaatgaacgatgctgtttgctatctttgacctgttctctatgatgagcttatgcctcttcagatgaagcctgccctgtaccatgacgcgatacacgagagtg

SEQ ID NO: 6173 - DNA, 459 bp, Glycine max
  Clone ID: PAT_MRT3847_105584C.1
tcctagtacaccgtattaaagaatttaagatatactatgatgagagcgcggttcccattactgttgctgggagttgttttcctggcatcagtttctgtctcatttggcattgcgtattgggaaaagcagaaccccagtcacaacaagtgcctccgaagttgcaatagcgagaaagactcctacaggaaccaagcatgccacgctcgttgcaacctccttaaggtggaagaaaaaaaagaatgcgaagaaagtcaaattccacaaccacgaccacaacaccgcaaaagagaacctcaacaacacaattaaaaaaaaaaaaaacgaagagaagcagccaccttgatttccatttccacacccacaccaaccttatcaagaagaagaccaggatcagaaggagtacacgaatagcatcgcaaagaataaaagaccgagagaaaaagaatgaaagaaaacaaa

SEQ ID NO: 6174 - DNA, 419 bp, Glycine max
  Clone ID: PAT_MRT3847_105585C.1
gttcaatatcctaatacaccgcattaaacaatttaagatatactatgatgagagcgcggctcccattactgtggctgggagttgttttcctggcatcaattcctgtctaatttggcattgcgtattgccaaaagcagaaccccagtcacaacatgtgcctccgaagttgcaataccgagaaagactcctacaggaaccaagcatgccacgctcgttgcatcctccttaaggtggacgaagatgacgaatgcgaataatgtcaaattccacgaccacgaccacaacacccggagagggaacattagcaacaccgtgagaaggaggaagacaaaggtgagcagtcacttccattcccattcccacgctcacgccaaccttatcaagatgtagagcacgtgcagaaagaggaacacgaatgg

SEQ ID NO: 6175 - DNA, 541 bp, Glycine max
  Clone ID: PAT_MRT3847_105586C.1
gatgagagcgcggttcccattactgatgctgggagttgttttcctggcatcagtttctgtctcatttggcattgcgtatggggaaaatcacaacccctgtcacatcaagtgcctgcgaagttgcattagcgagaaatactcctacaggaaccaagcatgccacgctcgttgcaacctccttaaggtggaggaagaagaataatgcgaagaatgtcagattccacgaccacgaccacatcagccagagagggaacgtcagctgcacggtgagaaggaggaagacgaaggtgagcagccacgtgcattcccattaccacgcgcacgccaacctaatcaagaggaagagcacgagcagaaggagcaacacgaatggcatcgccaggagggaaaacacggacgaaatggaagtgaagaggaacaagatgaacgtgaacgctcacgcccacaccaacctcgtcaaaaggaagaggaagagcacgaatggcggcacgagcatgagaagcaccatggaatggagagtgaataggagaataaggaccag

SEQ ID NO: 6176 - DNA, 395 bp, Glycine max
  Clone ID: PAT_MRT3847_105587C.1
caatatcctagtacaccgtattaaagaatttaagatatactgtgatgagagcgcggttcccattactggtgctgggagttgttttcctggcatcagtttctgtctcatttggcattgcctattgggaaaagccgaaccccagtcaccacaagtgccttccaagttgcgattgccagaaagacttctaccggaaccaagcatgccacgcttgttgcaaccttcttaaggtggaggaagaagaagaatgcgaagaaagtgaaatttcacgagcacgaccacaacacccggagagggaacgttagcaacaccgtgagaaggaggaagaccaaggtgagcagacacgttcattcccatttcacgcccacgccaacctcatcaagaggaagagcacgagc

SEQ ID NO: 6177 - DNA, 538 bp, Glycine max
  Clone ID: PAT_MRT3847_105588C.1
catcgtctagctatctcgatcgaactgtccaaggtcctgtcaccgagccgttaaagcaaagcacgcgagaaacaggggcggctggataggaaggaagctgcacacccgcacaccaaagatacaactacagatgcgcacttcctcagaaaaccaatacggaagcgcggcaaccatcctcaaccaacctcgcccgccactctcgccagcctcatggtcgtcagtgtagttaggagcttaactttgaatgccttactggagaacaggaacgtacaacagcggccatacattgggaagatgcgtaaatacaaccccggcgatgagtttagcgtaaacatgtgagtacacaacgtccggcccaagggctaaccacataccggggcagcggcgtagcagaaatttgccgatagtgggccctttgtgctggttattaacaagtaaggtacgtagccaaacgtggcggacgcggtgtaacccccgtaacacatcgatcacatggtgggagccaacctgtatggaaacatagctagcctatagaggg

SEQ ID NO: 6178 - DNA, 269 bp, Glycine max
  Clone ID: PAT_MRT3847_105589C.1
tttttttttttttttttttttttttttttagggagagaacaaatagggttttttttttaactcaacaaaaacaaattttctgagatagattataaaaattttatacacccaaaaccgttgggttccttaattaatggacaaaagctaaacttaacttaattttttttattccaagcattttgaatttcaaggaccggcaaattttcatcttatgaagtttattttgcccacattttatccgagaatatactatctttttttaacataag

SEQ ID NO: 6179 - DNA, 422 bp, Glycine max
  Clone ID: PAT_MRT3847_10558C.1
actacacggacttttttcgctatagatgcaatctaggaacatccacgcatacgtgacgccggcatacaacatacaaaagtgtcactctaaagtgggctgactgtctcgtcgttccacgccttcttacccgggcgggccccgggctttccctgacttaatctcacttaagcgcattgcaatgtccgccgctttccaaagatcgcacaggaacaacccggtcggcccccatctaaattgcccagactgacataccctttttgcccgctggtgtactccccattaggcccgacccaattggccttcccacccattagcccacatgcccggcccagggcgcgctccctaaaaggggccattatgattggggaatggggcgccccctttcacggtgccttaaacccgggggggggtgcgggtccccc

SEQ ID NO: 6180 - DNA, 517 bp, Glycine max
  Clone ID: PAT_MRT3847_105590C.1
gaagatagcacggttgccattactgatgatgggagggggagatctggcatcagtttctgtgtcattcggcgttgcgtcttgagagaagcagaagcccaggtacaacaagtgcctacgatgttgctgtagcgagaaagactcctacaggaaccaagcatgccacgctcgttgcgacctccttaaggtggacgaagaagaagaatgcgagaaaggtgcgtttcctcgaccgcgaccacaacacccggagagggaacgtgagcaacacggtgagaaggaggaagacgaaggtgagcagccacgtccattcccattcccacgcccacgccaacctcatcaagaggaagagcacgagcagaaggaggaacacgaatggcatctcatggaggaaaaacacggatgaaagggaagtgaagaggaacaagatgaacgtgaacacccacgcgcacaccaacctcatcgaaaggaagaggagaagcactaatggcaacacaagcaggaatagcaccaagggaaggaa

SEQ ID NO: 6181 - DNA, 580 bp, Glycine max
  Clone ID: PAT_MRT3847_105591C.1
ttcaatatcctagtacaccgtattaaagaatttaagatatactatgatgagagcgcggttcccattactgttgctgggagttgttttcctggcatcagtttctgtctcatttggcattgcgtattgggaaaagcagaaccccagtcacaacaagtgcctccgaagttgcaatagcgagaaagactcctacaggaaccaagcatgccacgctcgttgcaacctccttaaggtggaggaagaagaagaatgcgaagaaggtcaaattccacgaccacgaccacaacacccggagagggaacgtcagcaacacggtgagaaggaggaagacgaaggtgagcagccacgtccattcccattcccacgcccacgccaacctcatcaagaggaagagcacgagcagaatgaggaacacgaatggcatcgcaaggaggaaaaacacggacgaaacggacgtgaagaggaacaagatgaacgtggacacccacgctcacaccagcctggtcgaaaggaagattggaagcacgaatggctacacagcccgggatagccgccaagatgggaacgtgaagaagaagaacaa

SEQ ID NO: 6182 - DNA, 749 bp, Glycine max
  unsure (1)..(749): unsure at all n locations
  Clone ID: PAT_MRT3847_105592C.1
cgagagaatttaagatatactatgatgagagcgcggttcccattacngntgctgggagttgttttcctggcatcagtttctgtctcatttggcattgcgtattgggaaaagcagaaccccagtcacaacaagtgcctccgaagttgcaatagcgagaaagactcctacaggaaccaancatgccacnctcgntgcaacctccttaaggtggangaagaagaanaatgcgaagaatgtcaaattncacgaccncnaccacaacacccnnagagggaacgtcagcaacacggtgagaaggangaagactgaaggtgagcaagtcacgttcattcccattccacgcccacgccaacctcatcaagaggaagagcacnagcagaaggaggaacacgaatggcatngnnaaggaggaaaaacaccggaggaaagggaagtgnntgaggaacatnatgaaccgtgnacacccnctcccacaccaacctcnttaaaatggaagaggaaatgcacnnaatnggcaacacaaggcnngaaaaangnacctnngaaagngaangttnantgaagtaanaatgaattacncaatcncctatggnatnnnntgnnnccncgacaacacgagagccangnaaaagtggaagnggttctttnagttctntanaagaagaacccncccganagacnttttttaaattatggaaccccttttcnacctttnaaacttttaaaaaggtttccaaaattcttttttt

SEQ ID NO: 6183 - DNA, 238 bp, Glycine max
  unsure (1)..(238): unsure at all n locations
  Clone ID: PAT_MRT3847_105593C.1
ttacttcgcgtccgaaggaaacaaagccgcggaaggggcctcttgaggaagacggaaccccgaaaggcgccaagccgcaacagaaaacangtcaaaccaaaaaagcaccccccaaaaacacagccggaggaaccacacagcggagggaaccattggcagatgttgtgccagagggcaattccagagcaaggggcgatttgcaacgcactcatgcgatgaaaggaacgaataaaacgga

SEQ ID NO: 6184 - DNA, 371 bp, Glycine max
  Clone ID: PAT_MRT3847_105594C.1
atatcctagtacaccgtattaaagtttttttgatatactatgatgagagcgcggttgccattactgttgctgggagttgttttcctggcatcagtttctgtctcatttggcattgcgtattgggaaaagcagaaccccagtcacaacaagtgcctccgaagttgcaatagcgagaaagactcctacaggaaccaagcatgccacgctcgttgcaacctccttaaggtggaggaagaagaagaatgcgaagaaggtcaaattccacgaccacgaccacatcacccggagagggaacgtctgcttcacggtgagaatgaggaagacgaaagtgagcatccacgtccatttccatgtccacgcccacgccaacc

SEQ ID NO: 6185 - DNA, 685 bp, Glycine max
  unsure (1)..(685): unsure at all n locations
  Clone ID: PAT_MRT3847_105595C.1
gcgaggttcaatatcctagtacaccgtattaaagaatttaagatatactatgatgagagcgcggttcccattactgttgctgggagttgttttcctggcatcagtttctgtctcatttggcattgcgtattgggaaaagcagaaccccagtcacaacaagtgcctccgaagttgcaatagcgagaaagactcctacaggaaccaagcatgccacgctcgttgcaaccttcttaaggtggaggaagaagaagaatgcgaagaaggtcaaattccacgaccacgaccacaacacccggagagggaacgtcagcaacacggtgagaaggaggaagacgaatgtgagcagccacgttcattcccattcccacgcccacgccaacctcatcaagaggaagagcacgagcagaaggaggaacacgaatggcatcgcaaggaggaaatacacggaggatagggaagtgaagaggaacaagatgaacgtgaacacccacgctcacaccaacctcatcaataggaagaggaaaagcacgaatggcaacacaagcatgactagcaccaatgaaaggaaagtgacgatgatgaagaagaccaagacgatgatgaggagcaagtacaagagagccaagatagtgatggntctgagtctcaaagagaacctacgagacatangaagtagaaccctttt

SEQ ID NO: 6186 - DNA, 175 bp, Glycine max
  Clone ID: PAT_MRT3847_105596C.1
ggctcgagaaactctgtgcagtgaaggcactttgaatctgaaaaaagactttatgcctaaaaatatatagctcctgttagattggacatagacacagcgcacctcgacatggaagctgaggacagtcatcgcgatctgaatcacgctattttaagagaaaagatctaagggcagt

SEQ ID NO: 6187 - DNA, 157 bp, Glycine max
  Clone ID: PAT_MRT3847_105597C.1
ctcgagcccatggcgactcgagggtcagtggaaactgggacactttcattgctcctgtctcggtctttatcttgcactcaatgtgcacgctgtttgcgtactcccctcactatggagaaacgcttggcacgcggggtaccctttaccacataaggag

SEQ ID NO: 6188 - DNA, 417 bp, Glycine max
  Clone ID: PAT_MRT3847_105598C.1
ggccattacacaaggctggccagttttaattaattaatggctccatcattcactagtaccctttaataattaatttccaaaggctcccttatttaggacaaattaaggtggcacctacaccaaaaggtggacaccccttatatttctttaacgttctccaacaacggggggtttaacgaaaacaccccatgcacatttcctcttttcataataaaggagaaaatattcttagaaaaaaaataataaaaggctggaaatcaataagaactagcttctaactagctggaagctacttctaactttaacacatgtaaccatatccaaattttaagggttctagtaggtacataatcacgagcttaatttattatacagtaagctaaacgacgtggtacgtactcaattcatatacacata

SEQ ID NO: 6189 - DNA, 327 bp, Glycine max
  Clone ID: PAT_MRT3847_105599C.1
ggattttggtctttctttgatttggatttctcactttttgtggttattcccttccgagctatgcgtgttaattatgattctaagcacacgcaagctacgcatgtttattaattttgaatttggtagaccattttattaatattcatgtgaatgggattatacaccgtgaatataagatattttaaaaaaggagatggaattataatatgctttagcaattttgactagttagtaccttttgataaggaagatgggatgccattatgatgtgctcactatctgtttgataaaatgctccagttgaatccttttgtataagatgtggtt

SEQ ID NO: 6190 - DNA, 408 bp, Glycine max
  Clone ID: PAT_MRT3847_10559C.1
ctctgaacctccaaagcacattgttttcttcacttgtttcatacctcagaaaccactttgttacacttggtttttgcgtttgttcacaagaacagcatgcatgttctttttaatgtgaagagagtagcgttctctgagtcctttctgtcacacagaagaaggcttttcacttggttcagtttaagtgtttcagcttctcttgttctggtgtccctctttcttctcagtaactccctcagggttcctaaagtttcagtctttgttccaaaacttgacgctgttggtgcaaactcttctattggtccttgccccttgttgcctttcaacactagccacactttttcctctgagagtaacacttttgacacttcaaagtcaaatgggtcagagagttctgtgcagagaatt

SEQ ID NO: 6191 - DNA, 203 bp, Glycine max
  Clone ID: PAT_MRT3847_1055C.1
ggaagcgcaggacaattttttaaacaatggtgatgaatccaagaaatacgggaattaattaataaccctctacaaaaaaggatcgactttaggagccttgtttccgaaacaacaacttaagtcattttccaaagggggaaaattcagggccaattccaagcacatgagcccttttgttattcgatcgtttcaaaacgggaact

SEQ ID NO: 6192 - DNA, 259 bp, Glycine max
  Clone ID: PAT_MRT3847_105600C.1
acaaaattcagcacaaacaatgtgaatctaatatttacaatactgaaaatgtacacagttgttggacaaagccaaaaactatattacgaagaaagtacacaaacatgcccaagacccaaggcgagtgtcaccgacgtggatttcaaacgcataaccacaacagcgtcaaatacttggctaaggtctctgaatccaacccataaaccactacccattcccatttatagatacagatatccctacaaaagtgactggcagg

SEQ ID NO: 6193 - DNA, 275 bp, Glycine max
  Clone ID: PAT_MRT3847_105601C.1
ccaacaaaaagggaaacacttcccaattaaaaaaacttaacaccttaaaattcaaaacccaaaaataccaacttttttggtcaacaaaaacccccaaaaaaaacctaaaaaaaggaaaccaggttgcacccccccaaaattacaaggcaaatttaccaaaaaaaacaaatacagttactcaaaattattaaaaaacaggtaccccacctcaaaaaaacctttaaagtaaattttacccccaatttaaaaccaaaaagttttaaccaaaccccttt

SEQ ID NO: 6194 - DNA, 418 bp, Glycine max
  Clone ID: PAT_MRT3847_105602C.1
catggactttgaccctattgcacatggcgactctgaaaatgtcactcctcctcgcatcctagcactacacagctctcatgttagacaaccgcgtcaaagataggaccgacaatcaagatcccaagatgaaaggctaccgttacatgatacctgcggactctacaaagcttaactggtacaacaaacacctaagactctgcatagataaactactgtaaaggaacacgcctttttcaaaccacctggatgatcacatgcgctaccaaaatagccaaaatgcaaccacttctttttggccgcagactttgcgaccttggctccagtggggactttcctaccaacactcttgatgactccaacagctacggactgacacatgtgcctgccagcacaacgagcaatgggaggatgctcaaag

SEQ ID NO: 6195 - DNA, 244 bp, Glycine max
  Clone ID: PAT_MRT3847_105603C.1
agaagggcatctgatgtgggatcagtcgttgtgagagagcgtgactgctgaattctccaaggaacagattcgggcactgagcaaacgtgccaaatctagttcaaggaaaaccatttcttctgaagataaaccttttaacttgagaagccgcgaggccgtctactccaacaagcttggcaagttgtttgagatcaccccagagaaaaacccgcagcttcaggacttggatatgttactcagtatg

SEQ ID NO: 6196 - DNA, 489 bp, Glycine max
  Clone ID: PAT_MRT3847_105604C.1
ggtaagtgctgcagttgatcctttattttgaaaatgggagaaattttgaactgaggccccacttatacttagaaaaatatgctctcgattaccgattatttgtttggacgtttctacctccagcattaagggtatgatattttgctcttgatgtttttacctgaagcactatttttgaagttatggcaaggcattaatgctgtgcatcatcgtttgatgggagtacatgtaggttatcttgggttggggcgttttgcacccaaagattaggtattcaaaacctttaactcgttctcctctctttccttgatgtgtttgatgagtgtcacatgctcgtgtcattcattcaaatttgtattaatagtatggtacatcttggatagtaggaagtcgttgcctttgtggccgagggtatgacggaaggaagtgggaattcttcacccacaattgaatcagcataaaaataaccctacgatcttatatgattgt

SEQ ID NO: 6197 - DNA, 210 bp, Glycine max
  unsure (1)..(210): unsure at all n locations
  Clone ID: PAT_MRT3847_105605C.1
nagtcnntgcagcgtagtagtcggattnccctcantcggccgatcggtcagtcggccgaattttctataangccaagacgtganntgtacgagcaggtanntnctcggaggttnctgaccactcgcgcgtgtgaccagtgactctangtcttcaggcgctgtggtntacactcttcctnntncggtgcatatgtnagncgggncanccgt

SEQ ID NO: 6198 - DNA, 426 bp, Glycine max
  Clone ID: PAT_MRT3847_105606C.1
cccactcgttcgtggacgcgtgggcggacgcgtgggggggagcttttgacaatattctatggaccttctcggcggaggaattatagtggacaaaactggagattggatcacacttatacaaaattctccaattagtaacttgctgagagtagctgcttggaagaaaggctgattaatggttaagattgtgatgtctgggaatgcagtagtcaaaaggagagattgggcctcattggtacaagtgtctttaacaaaaatcaacagtacagagcattttgatgcatgaaagtggacaaaatcggaaccacattactgggaattgaaattcccaatagagggatagagaccttataatggttatgaaatgtggagatttgagtgggcaaaaaaaacttcatggcatttgagtttccttaatgacaattc

SEQ ID NO: 6199 - DNA, 457 bp, Glycine max
  Clone ID: PAT_MRT3847_105607C.1
cccacccggctcgagttttgttaatgtgattaatttactttggcacaacatgcttgttgactggggtgcgaccgtgagtgtgacatgaaaggtacaagattaaaaggtacactgctattttcttacaacaatgtgattgagcgacaccattgtggaatttcctaaagatctggtcttctatcttgacaataaagttccacaaggttttatgtattcctaatctcttatcttatcgagaattgattttgttatactatggaacatagacacattatgaattagttgacaagagtactagttgacaagagtactcaactttcaaacattatctattgaaaagcaatatcttaattgaaatgacttaaggaaagtcctttatacaattaatgtgatgcctcatatgtgtgctgttttaaggaaaaaaaaaatttctttccttttcactaacacttttttt

SEQ ID NO: 6200 - DNA, 241 bp, Glycine max
  Clone ID: PAT_MRT3847_105608C.1
ggaaaccttcattttccccattctcaccttttttgttggaggcattgtttttgcagttgggtttttgggttttcaggtgccataaaaatgtgaatgcttaacataattgtaatactgcttgggattaaactaaacatgtaaccgcccaaatagggggcaccggccaaatagtaatatggaaccgggtaatcaaagggattttcgtgtaagtggtaatgtcagggttttggatgattttagt

SEQ ID NO: 6201 - DNA, 4073 bp, Glycine max
  Clone ID: PAT_MRT3847_105609C.1
gtagcgatctgaggtgaggaatttaaaaggagaaggcttctgaggggagtcgagtaaaaaagcaaatgctagcacagggaaacgaaggggaacagaaacgacgcatcgtaggggccgcgggcattggccaataccaattccggataccttctcaaatttttccgctaaaagttttcgcagttaggtacttcagggctttcaacttacagatgcgacaaattttcaatgagagccttcaaaaagctccggggattggagtttttctttaaaaacaaaagctgacacggcgtttccatagttgatctctaagctttttctgagaacgctggaaatatattgcctagactgtatctcctttgcacggtaggatctgtttatctcagattctaggatgctccagtaaaggatgttcttaaagatctagtggagatgtgtcgtgcttttcaacattccattcgtggactatttttgaggagttacctgtctcaagtcagaaaagataagttgcttgatattggctatgaatatgaagagggggaatctaatagtgtgatggacgcagttgaattcgttctacagaatttcacagaaatgaataagctgtgggttcggttgcagttgttgcatctggaacctgctcagataagggagatgagggaaaaagaaaggaacgagcttcgtgatcttgtggggaaaaatctacatgttctgagtcaaatagagggcatggaccttgagatgtacaaagacaccgtccttcctagtgtcttagagcaggttgttcaagatcactaggtcttctatcaatggtcttataggatttgcaaagtcccgatatgtcgagtgactcagctttagcactcccttcttacgatgccatttttttccagccaattgcagtacatcaaattcgataagcagaagggtacgtatactgggttaaagatatgaacccatcaatgactcattcccggcctaccatatccaggacgcccaaatgggaagttgtatgaaaagccaaaatatttttttgttagtaatcatcttcatcttgaacaatgttaactactagggcttatcaatgtgttctcattggcctctattttattttgaagtggatattttgaaatcttactactgattcatctacttacaaattgaagaacttattaaatgtagtataaacggaatgaaattaatactactaacaacttgatgtaattcttatatagttaagatgtattaaaggaaaaagaatataggagtaaatgtaatttacaatactaataaaaaaaaaaatcaaaattggataaagaaaaggtgaattataaaatcagtaagcattttgattgagtgtaataaaacagagattttggaattctgcctattgaagtggattttcaaaaattcgtcaagaactgactgcactgtcttctttctttcatactcctttaagcttcattgtacatcgtttattttgtacttatctcaactatcatagtttatggcttcaagctattattaattcacatggtcaacgaatcatcagacatttgctatgcccaccaatcatttgacaacattcctagtccagatatggaagctgtaaaattatttacttataatcattgtctttgtcatttttgataattatttggttgactttgttattaaccaatcattgttttgttatggatgttgatgtaaattgtttgatgagatgcttgagagagatgagcgtcatggacaacaatattggatgggtatacaaggaatgataattttggtgcagcttctatctaatcttcttcatggagggaatttcaatttcacttcttgttacccagatacatcatttttcaaatgaagaaaattaaattgacaaaatttgattttctgtattttaatttctgaaaatttaaaattctccatccaaacgcaacccagttttattttttgtttcttaattgtatctagctggtggtaggtttccttgcagatgaccaagaaatttactggatggcagtggttcacccatgtgactttcttttagaatatatgtggggattctattataagtgaagagtgaagcaacagaaaaacttctcatagatcaattctgttctatttttctctgattttcttaaagctgaaagccatttttatctcccctatgactgacttgatttatttgcagcccacagtagacatcaagacagtgttatctcagttaatggacaggtattgcccgaatttctgcaagtggaagcatttaccaaattaagcacagcaattggcagggtgatagaagcacaagttgacatgcctattgtgggagcaatagctttgcatgtttctcttcttacatttactctccgtgttcatccagatcgacttgattatgtggaccaagtactgggatcatgtgtcaagaagctttatggaaaaccaaagcttgatgacaatagagcaacaaagcaagttgttgcacttttaagtgctccacttgataaatacaatgatattgtgactgccctgacactttccaattatcctcgtgtaatggatcatcttgatcatgaaacaaataaagttatggccatggttattatccaaagcattatgaagaataacacttgcatctgtactgccgataaggttgaagttttatttgaactaatcaaagggcttataatggacttggatggaacaactgtggatgaggttgatgaagaagatttcaatgaggagcaaaactctgttgctcgcctcatacacatgtttcataatgatgaatcagaggaaatgtttaagataatatgtaccgtaacgaagcatattatgagcggaggaccaaggcgcttaccttttacagttccctccttgatattttctgcactaaggttgatcaggcaattgcaagggcaggatggagatatagtgggagaagaagttcctacaacaccaaaaaaaatatttcagcttttaaatgaggtaattgaagctctttcttctgtgtcatctcctgaactggccctgaaactgtatctgcaatgtgctgaggctgctaatgactgtgaccttgagcctgttgcttatgaatttttcactcaggcatttgtattatatgaagaagaaattgcggactccaaagcccaggtaactgcaatacatttaattattgggtctcttcagagaatgaacatctttggcgttgagaacagggatacattaacacacaaggccacagggtattcagcaaagcttttgaagaaacctgatcagtgccgagcagtttatgcatgctctcatctcttttgggttgatgatcaagatggtattaaagatggagaaagggtattgctttgccttaagcgtgctttgaggattgcaaatgctgctcaacaaatggccaatgcagcaaggggtagcagtggtccagtgacgctctttgttgaaatactgaacaagtacatttactattttgagaaaggaaacccgcagatcactagttctactatccaagggcttatagaattgatcatgaccgagatgcagagtgactctgcatcagctcttccagcttcagatgccttttttaccggcacattgaggtacatccaattccaaaaacagaagggcggtatactgggtgaaaaatatgatcccatcaatgtctcaatccctgcctaacatatccaagacacccaaatgggaagttgtatgaaaagccaagcatgttgttgtgagtgttcatcttcatcttgaaaaacataaaaaaaggtttatcagtgttcactactcgtgcattataaaatgtttgcagtggcatcaagtttattttgaagtgaataattcttcctacaaattcttctacttgctaaatgaagaagtaattgaatgtattttatactgcaagatattaaatgtacttacattttcatttaatacttctgttgggaagattagtaggaggataaagtatatagcatcactcttaatgcacaattagcatgtgcagtttaattaaaactgcatgaattgaatgtccattactcttgcatttacatgtt

SEQ ID NO: 6202 - DNA, 252 bp, Glycine max
  Clone ID: PAT_MRT3847_10560C.1
aaaaagcgaaaggatatacagggggcggttgatgttaacggaaaacaaaacttaacgttcattatccatgctcccaatcaaaacgtgcatcgctttatcaggaaagaaccaaagacgtaggaaaagacacacacctaaaaattccgtgtaaataagaactaaaaatttgtttttgattttaagtacttagcctccaaaagaagataatgctctaataggtgataatcctcgaccatgataatgacaccctct

SEQ ID NO: 6203 - DNA, 440 bp, Glycine max
  Clone ID: PAT_MRT3847_105610C.1
ttggagtggggctgttgactgtttgattacagggtattgctttgccttaagcgtgctttaaggattgcaaatgctgctcaacaaatggccaatgcagcaaggggtagcagtggtccagtgacgctctttgttgaaatactgaacaagttggtcaccttttgctataaaactacttgttatactatcttcatgattttcttacttacggatgagagtgagtttcaggtacatttactattttgagaaaggaaaccctcagatcactagttctactatccaagggcttatagaattgatcacgaccgagatgcagagtgactctgcttcagctcttccagcttcggatgccttttttaccagcacattgaggtacatccaatttcaaaaacagaaaggtggtatactgggtgaaaaatatgatcccatcaatgtctcaatcc

SEQ ID NO: 6204 - DNA, 519 bp, Glycine max
  Clone ID: PAT_MRT3847_105611C.1
actcgagccgaatcggctcgagcttttcagctttttagtcattttattttgagggcttcaatcctatctgccaaaccaactcatgttgtttaatgacgaattttgtaagagtgtacataaatcaaattgcctaaatcacgtcaaattttcggggtaccgaaatttcgatctgtaagaatttttctaaaccccggaaaagaattatttattatatgccatggccagaaaagctcttttgaaacctacaagtgcctgttacaattacggcaaacagaaacaatccatgttttattttatttttatgcatttccttccatattttatttaattaatcatgagtagtccttagaatccttaaaaaatatatgtccaaaatataaccgatattatagaatacatgggccttttttttttaaagagagaatacatgggtctttaactataattaaggaccagacaaataaccaaaaggcccaaaaccaaacacccaactcgatagagaaaaagcactgttctcaa

SEQ ID NO: 6205 - DNA, 718 bp, Glycine max
  Clone ID: PAT_MRT3847_105612C.1
attttagaatatatgtggggattctattataagtgaagagtgaagcaacagaaaaacttctcatagatcaattctgttctatttttctctgattttcttaaagctgaaagccatttttatctcccctatgactgacttgatttatttgcagcccacagtagacatcaagacagtgttatctcagttaatggacaggttgtcaaattatgctgcctctagtactgaagtattgcccgaatttctgcaagtggaagcatttaccaaattaagcacagcaattggcagggtgatagaagcacaagttgacatgcctattgtgggagcaatagctttgcatgtttctcttcttacatttactctccgtgttcatccagatcgacttgattatgtggaccaagtactgggatcatgtgtcaagaagctttatggaaaaccaaagcttgatgacaatagagcaacaaagcaagttgttgcacttttaagtgctccacttgataaatacaatgatattgtgactgccctgacactttccaattatcctcgtgtaatggatcatcttgatcatgaaacaaataaagttatggccatggttattatccaaagcattatgaagaataacacttgcatctgtactgccgataagggttgaagttttatttgaactaatcaaagggcttataatggacttggatggaacaactgtggatgaggttgatga

SEQ ID NO: 6206 - DNA, 192 bp, Glycine max
  Clone ID: PAT_MRT3847_105613C.1
aagggcgcgcactgctattattcatataattcaggtttaaaggtgcttggagaagactttttgctttgataacttagatcaacaacttgacgccggtgcggaactttcgcccacgtgcatgcattttgactgctcatttattgtgggagctgaagaaacaaaacggggcgttcactccccccgccattgaaa

SEQ ID NO: 6207 - DNA, 178 bp, Glycine max
  Clone ID: PAT_MRT3847_105614C.1
gtacattttttccaccttaacggcaatagagcctccgtggcacataaacctggcgctgtcgcatacatcttcaacttccaccatgatgtcatcttgttcacctctgggttagacatcatttctcaagaggttatcctctctagaaccccccctcgttgtgctttattcaccactgtgc

SEQ ID NO: 6208 - DNA, 286 bp, Glycine max
  unsure (1)..(286): unsure at all n locations
  Clone ID: PAT_MRT3847_105615C.1
atcattcttagccaaaattgactatcaattaaatccaaattttgtagtgatcaatcttgatccaccaacaaacaccaaggacatctacactcctttagatccacatttctttctaaaaaattatccttgttggaattctgtccctcaacaaccttcaactggaaagtgggntttggggccaaaaaaaccccccttttttggggagacccttttttttggggaggaggacaaaaaaaaacttaacttcacaacctgctgaacaccccattgtcattccccagccttc

SEQ ID NO: 6209 - DNA, 442 bp, Glycine max
  Clone ID: PAT_MRT3847_105616C.1
ggcccaaaacgggaaaattttaaaacaaaaagggatgggggaaaaccccaaaaaatccccctttctttggggaaaacagggtttggaaaaaataaggggaaaggggttggggaaaaataaattgttacaaaaccatcctaaaaccttaaaattttccccccccggttttggaacccccccattttaaaaaattttttttgggggttttaaaaaacccaacccaaggaacttgaaaattcacctttttaaaccctttccctgggaaagttctttccggataaatttggttggggaacccatttttggaagggctggtttaatttaagggtacttgcgggttttgaaaccccaatcagggtggcccaccaaaaggtttttcttaaccccctgaaggcttttatggattctgtaaccatttctttaaaaggggggaattttgggg

SEQ ID NO: 6210 - DNA, 404 bp, Glycine max
  Clone ID: PAT_MRT3847_105617C.1
tcgtcctgacttcttatttttttgaatgctcgcgatactttgccatctgacatctgtttaaatttcaatggttcatatcaagaacgtatagttacgagcatatggtgatgatgattgatgaggagatgatgcttggtaaccacttaaagtaacatgcacatcttatctggatgtattatgtaactgatgaaatttgaagttttagcattccagttctaaatgtattaccaatatattgtgatacttcgccatcatttaaaagaattggtcctaaacgctcctgtttaataaaaaaaacctgctatgtaaaaccccttcccctggaaaaaattaattaaacgccaacataacaaaagctctccaaacattttaagttaaacaggtaggggggggcccccccaaaa

SEQ ID NO: 6211 - DNA, 257 bp, Glycine max
  Clone ID: PAT_MRT3847_105618C.1
ggatattgcatcagcttgtgcacggtcgtcatatgggggcggtctgtaatctgcaaatattcagaaatttattcagtttcagcttacatagatgtggccgtctagtgattaatgttgttgctgcagtttcgtctggcgatgttccattaaattcagtgcagcttttttgggtgaatcctatcatggatactctgggagctgtgggcctcgcaacttgaccaccaactgatcaccctcaggatcgaactccagtgggt

SEQ ID NO: 6212 - DNA, 265 bp, Glycine max
  Clone ID: PAT_MRT3847_105619C.1
atttcaatggttattatggaggtgacaactcattgcgagactataatgctatacagggtgcgtgatgagagcgtactccacgcgtgcgcctacacgcacacttattgatggcaagccctctcgcaagagtaggaatgcgataaggatcactatgaataacgcgctgcggtctcacggcatgactatacgcgaaatggcacacaccgtggctatgacgaaattgcgccctgaagctcgccgtgctatacataaaggtcaatgccgt

SEQ ID NO: 6213 - DNA, 836 bp, Glycine max
  Clone ID: PAT_MRT3847_10561C.1
ttgtattggtttctggctctcccaaccccgggcgtccggaaagctggtgccgatgccacactggcctcccctgacatcgacgccgacacggacgccgacggtcctttcttcgacttagagcttgccgtacccgattccgaagaagacgacactaatgataataacaacagtgactcagcctcagagaaagagttcaagttaacgctttctccttcaacttcaagcaatgatttcatcttcaactcccaacctaataactccaagcctcagttcactgcttcgctgttcaaatccgccaccaagtttcgcgtcttcatgttgggcctcaagaagctcaagcccaacgcccctgccgctccaaacctcaagaagaaaaaacttttcaccgtcaaattcaaggcggaagagtatcccattgtgtccttgttctccagagataacagctccagacccaaagcctctcagaatcaccacacagacgaatcacaatcctcactctcagagacactttcttctgcttccgaggagaaacgcttaatgcgaaagtatttgaaaatggtgaagcctctgtacgtgagggtttctagaaggtccgagaaggtcgacgtgagttctcctgagtccgctgaagcttctacggtggcggagaagattccgacggtagcagaagattctgaaagtgcaaacttgaagggtccgaagcaggggatgttgctctgcctgcggctctacgcaagcatttaagaaaggggccgttcgggcggcggtggcggcttccgcacccgccggtcggtgtcttcgaaaacgcgtgatgatttactttttgcagcaacatg

SEQ ID NO: 6214 - DNA, 332 bp, Glycine max
  Clone ID: PAT_MRT3847_105620C.1
ccttaagcaactctgaagatcactattaaaggagtgcacgcgatccaaagctggggtgcatactgcatcctcaggcaaggatcttacagatctgctttgaaatggctcaacggtccaaaacaggcagaagataaacatcatctgtgagctctcagatctgtggctagaacactagatacactgaggcgagatgataaaggaacaggcaaagctatcaattactcgacccctgccaaaatctgacttgcttagatcactgatcggttacaggcagggcgctggtttgatgatcagggaagagcatcatatgcagctgaagcagaccgacttct

SEQ ID NO: 6215 - DNA, 411 bp, Glycine max
  Clone ID: PAT_MRT3847_105621C.1
ggggtgaattgaatttatatttggagaaagaaaaggtagcagcgacgcaatgcacaatgggagcatccaaaccacagagttaatgcatctttcttgctaccgcagacacttttgaacatggagtgaacttggaatgacaatatattataattatgttacatattcgatatatataattaatatatatgtgtcttaattatatgaattatcttgaacttaacgtattttattccttaaattttaaaaaatttatgaaatttatctcatttatttatccattaataagcataaaaatggagatagaatttgctaaaaaataaaaagttggaatacaacgtgtcaaaaactaaaaaaatcgaatgtaaaatgtgtcaaaaattaaaaaaactggaggtacaaagcgtaattata

SEQ ID NO: 6216 - DNA, 1356 bp, Glycine max
  Clone ID: PAT_MRT3847_105622C.1
gcaaataatccttctttgaaatttcacttcccatggcaatcaacacttaatcacttccctggtttgatacaaaatttcgaaagaaaaaaaaatacagaatagtaaggagacaaagttcgtccctgctccctcccttatttttgcttcccttccaaaggagtattctcttaataataaatccaaacattaaactgtgtaaacacattctttgtattaaattctttttgaatggcgactaggcgagacgaaaggagctgcggaaggtgtaaggtagggaagaaaccttcagttcaaaaatatctattgaaacgccattaatcaggaataggcgatgagactgaaattggtccaatgtaagaaccgtaacttacaaaccaaacattagtcattcagaaattgtttactctcaggtacagataataaacattcaacctcaaaggggcctgaaaccccgtaaaagcattcagaaactgtgacaaggtattgtatggacacaatctccatcaaacatgggtgcttcttagcaaggtaaactaccatgtagttgcttattataaaatagcttcgatgccaagaaaatagattgaatcgacctcactttgtccaccaatggaggaagtctttgcgcctattgatctttttctgcagctggaggagtccatacagcaaagcctcagcagttggaggacagcctggaatatatatgtcaacaggaacaatcctgtcacatccccgaactacggagtaagagtaatggtagtatcctcctccattagcacaacttcccattgagacaacccatctaggctcaggcatttggtcataaaccttgcgaagagcgggagccatcttgttggtgagagtgccagcgacgatcatgcaatcagactggcgagggctgggcctgaaaatgatgccgaagcggtcgagatcgtagcgggcggcgccggtgtgcatcatttcgacggcgcagcaggcgaggccgaaggtcatgggccagatggagccgcgccgggcccagttcatcagatcgtcaaccttcgagatcacgaactccgccgccttcgacacgccggcgggaggggaagcggacggaggcggtggcggggcatatggggcgggcgtgggtgtggatgttgatgcgttaagagatgggagcgttgtgtggagggaaacaactctttgaggggaaaccagctgagggaagcgtgaagaggctcgactcagaagagccatagtgatgctatgctatgagccaagaaagacactctctctcccacctacatgaggtttgtataaaaacagaaaagactctgtgtgttttgttctccccttctgtcgtcttctcgcagccgt

SEQ ID NO: 6217 - DNA, 1532 bp, Glycine max
  unsure (1)..(1532): unsure at all n locations
  Clone ID: PAT_MRT3847_105623C.1
agagaagaaaccttcaattcaaaattattatttattgaaacgccattaatcaggaatatgcgagactgtaattggtccaatgtaaaaaccgtaacttacaaaccaaacatgagtcattcagaaattgtttacactctcaggtgcagattaagcattgacagataacaataaacatccattattcaacttcaaatgggcctgaagccccgtaaaagcagcagcacataaaacattcagaaactgtgacaaagtattgtacggacacaatctccatctaacatgagtgcttcttagcaaggtaaactaccatgtaattgcttattataaaatagcttcgatgccaagaaaataaaccgaatcgacctcactttgtccaccagtggaggaagtctttgcgcctattgatctttttctgcagctggaggagtccatacagcaaagcctcagcagttggaggacagcctggaacatatatgtcaacaggaacaatcctgtcacatccccgaactacggagtaagagtaatggtagtatcctcctccattagcacaacttcccattgagacgacccatctaggctcaggcatttggtcataaaccttgcgaagagcgggagccatcttgttggtgagagtgccggcgacgatcatgcaatcagactggcgagggctgggcctgaaaatgatgccgaagcggtcgagatcgtagcgggcggcgccggtgtgcatcatttcgacggcgcagcaggcgaggccgaaggtcatgggccagatggagccgcggcgggcccagttcatcagatcgtccaccttcgagatcacgaactccgccgccttcgaaacgccggcgggagaggaagcggacggaggcggtggcggggcatatggtgtaggcgtggctgtggatggggatgcgttcagagatgggagcgttgtgtggagtgaaactaccctttgaggggaaaccagctgagggaagcgtgaagaggctcgactcagaagagccatagtgatgtgttgttgttgtgagtgaaggaatcgcacccaagtttcagcgcagtatctactgctctctctctccctctccctctccctccaaattttccttcattctcacgcgccgccgtggtttccgccggcggctactccctatccaccgcgcatccatcccgcttccctctcctcgcttttctcacaaaacaaaaaaaattaaaaatttctccgaagactgtgtattatcgttatcgttcactgagttaggttttgctgttcttcctagggttttattgtgtccaataacaagaggagggggaagagaaacaaaacaaaaaaaaaaaagaataaaaggcaaaaattagggatttttttttgggaaaaaaaaaagagaaatttaagttatcgttgttgtagttggtgcttggttgagatggctcaagttcaagttccgcctcagaatgcgatgccaggtccaacngtggtggtggtgccggtggtgctggaaccagttcgtacgacgtcgtttactcggagatct

SEQ ID NO: 6218 - DNA, 218 bp, Glycine max
  Clone ID: PAT_MRT3847_105624C.1
acggacaaaactggggctttatttatattattagggggaaaaacatttttgccattacaccctactagatggggggcccagcaaaaatactgggggcaccaagaaactactctccttaacaggggaaaaatccacgggggaaatccattgccctatcactggcaggagaataaagaccactatttcgaaagacgccaacatgtgggcgctgaaaatat

SEQ ID NO: 6219 - DNA, 244 bp, Glycine max
  Clone ID: PAT_MRT3847_105625C.1
gaaaaggccagttaagaggaaattaataaatcctatgaaaaggctggtatgaacaaggggggagataaaggaagagatcctgaaaagccccccgattaatgtaatgtatttgaagttttaagatgattctgatgatatagaatctgttgaactgcatagtgaagaggcactgaaagaaggaatgagtggaggaggtacgttttataatccattagatgtatgtgaattaatttatggtggagca

SEQ ID NO: 6220 - DNA, 146 bp, Glycine max
  Clone ID: PAT_MRT3847_105626C.1
tcactttttttttttttttgttatccttttctcttgggaaccggggaggaacacgtttatggcataacatgaaaattctagctgtttaaaggccaacttccttgtttataaacaagcgcacaggccttcccatggtgcacacaacc

SEQ ID NO: 6221 - DNA, 319 bp, Glycine max
  unsure (1)..(319): unsure at all n locations
  Clone ID: PAT_MRT3847_105627C.1
ttnaattananatttttttttttgacaaccacaccaatcgaataatgagggggggaatgttacaatgtaaataaatgtcatctttacccaaaatatggtcccaacaaaaagaaacaactgaggtatataaatcattcaacacatgaatcttataacaccaacactacctgtctataataccaaaacaagggttgcccaacccaaacctaatccttctagaacctttttcaaccacatgaaagcctctgatccactctcaaaagtggcaccacacacaagtccaggggaaaaaacaaacttcctaggaccaaaagcccct

SEQ ID NO: 6222 - DNA, 389 bp, Glycine max
  Clone ID: PAT_MRT3847_105628C.1
ttttattttttttttattttttttttattattttttcggttttatttttttttgggttttttatgaaacccagggcggaccccggggggaaccccagaaatacccaacgggcccagcagggttccccacaaacccaaaggaggggcgcgagaacccccgaagaaaaaaggggaaaaatggggcaaaggaaaaaattttcacccggggaaaatataaaaaaacggcagacaccaaagccaaaaggcggatcccacgggaaacaatgggccgaaaaaaaacccaaaaatcacggggccccaaagaaaaataaaaaaaaggaacccgccacggaaaaacaaaaaaaaaaaattttgagaaacgcccgggagccggttaaaaaaaaagaaaaa

SEQ ID NO: 6223 - DNA, 615 bp, Glycine max
  Clone ID: PAT_MRT3847_105629C.1
aaaacaaaaggcaaaactgggcccctaatttttaaaaattttaacaaaaggggcatgcaaaggaacaactaaatttccaatttaactaggccccaaaccctggccaagcccttaaaaaacagggggtttttccaaaacaaagggccctatactcggttcaacaggaacgggggaaccaacccccacattaagggggatatccttctggccacaaaggggagaggagaaccccagctggaaatcacaacattttttgggacttccccacacatggggtaacctttttttggaaataatctttcctatctccccaccccttcgcaggttaaacattggggggggattcatttttaggactaaaaagcctcgatatgaaacttaaaactataccctctacgggaaaaacagggggccagcgctcacttgcaagctaaaaaccattgggggcgccaccaggggggtgaaaaattgatttgcaaacccccccatcaggatacacattggggggccataactttgggggaaatttcactggggggggactatttggggggggggggggaaagctcataatgggcttgaaaaatcccccctcaaaaagaggatggggggggc

SEQ ID NO: 6224 - DNA, 258 bp, Glycine max
  Clone ID: PAT_MRT3847_10562C.1
gttaaacatacagtctggtgtagaacgatgacgagattgtagcagcagcttgactctgcatgacgatgatgcattgatcatacagacagcacatcatattatatctgttatatctagatatagcaacacctaatcacaagggctactttaacatctttcatgattctaaatgccgcaagctgatcaagttgacagaacaccatagactctaaactactaccaacgataccttctggttcagtaggagcatttatctac

SEQ ID NO: 6225 - DNA, 422 bp, Glycine max
  Clone ID: PAT_MRT3847_105630C.1
tggtgatggagcaactcattcagagacttgacgtggaaatgatccttgcgtatgtcggagatttcgatctgaatatgcctcgtgcgagcactatttctgaccccattcgtgatattcaggttgtttctattctacctgaaatataatctttgtggttggggcacaactgccgaaagctatcggagactgttccttatgggttccaaagacattgagctttgccgatatacctcttacgggacgtgatcattgaaaacctgagcctgcatgtgataccgtccattcctacctttgacgccttccttagtgcctacttttgaggatagctgcatgcctcactttagacatgctggcaactgggtacgtgagagaacatggtcttccataatttgggctattatctgtgaaacgatgtggctata

SEQ ID NO: 6226 - DNA, 245 bp, Glycine max
  unsure (1)..(245): unsure at all n locations
  Clone ID: PAT_MRT3847_105631C.1
atcacatcactaggcacaccaccgcatgttcgcattatcaagatgcccttgcattgctggcctttgaacgtgcggcgtgagaggatcccanccacaccatcaaatcggctttaaactcctgcaccctgacaatggactacgtactatccgacttgcttctcattactaaccaaaatactggactaacaaatcctttcaataaatatattaagatatcaaagcttgatcctctggacctttatata

SEQ ID NO: 6227 - DNA, 472 bp, Glycine max
  Clone ID: PAT_MRT3847_105632C.1
agaagacgacagaagggcttgcaacgaactccacggaagaccagagagaagggtgccccacctctgcctcaacccttcactttttttccctttatgctttacattatagtttattttgaaattaaataaaataaaataaacaatcatcttccttttatacattaaattttgttttttcttctttgtagcttcaatcttgtcgtagatattccgtaaaaaaaaaatctttgtcgtagatgttataatacaaaaatagtttaattattctgtggttaaactgtttttttcttcctttaattgggactctaatttttttattttttttaaaacattactatttttcaatttcatatttttaaaaaatatatacatttatcatgatcattttctattatgtaggaaaataaacagtattacacaccggtcttgggagtattttttttctttaacgaattggagtaaaaaaatatta

SEQ ID NO: 6228 - DNA, 696 bp, Glycine max
  Clone ID: PAT_MRT3847_105633C.1
ccgaaagccttattagctgtgtgacaggaaagggttccgagattggtgattttcttacaatgcatccgggggtgaactgcataagtttcactggtggggacactggaatagcaatatcaaagaaggccggcatggttcctcttcaaatggaattgggtggaaaagatgcctgcattgttcttgaagatgctgacttggatttggcagctgctaacattgtaaaaggaggcttttcctacagtggtcaaagatgcacagctgtaaaggttgctctggtcatggaatcggttgccaacactcttgtaaagagaatcaatgataaaattgcaaagttaactgttggacctcctgagattgacagtgatgtcacaccagttgtcaccgaatcctccgctaacttcattgaagggttggtaatggatgctaaggagaaaggagcaacattctgccaggaatacgtaagggagggaaatctcatttggccattgctgttggataatgttcgtcccgatatgaggatagcatgggaggagccatttggaccagttttgccagttatcaggataaattctgttgaagaaggaatccaccattgtaatgctagcaattttggccttcagggatgtgtcttcacaagagacattaacaaagcaatgctgatcagtgatgccatggagacaggaacagttcaaatta

SEQ ID NO: 6229 - DNA, 675 bp, Glycine max
  unsure (1)..(675): unsure at all n locations
  Clone ID: PAT_MRT3847_105634C.1
ctcctaccgcatttgttttcggaccccacaaaagcctgactcagcaatcaggttcctcagagaccacggtttctctaactcccaaataaacagtatggttagaagggtaccatggttgctttcctgcgacccttgcaaaagagtattgcccaagtttcaatttttactctcaaaaggtgtttctagctctacaattgttgacatagtgagtaagtcccctgcaatactgagtcgaagcctggagaatactatagtcccaagctatgatttggtatttagattcttgaaatctgatgaccacactatttcttgtttgtttggtaattgcatttactatggcagaagagattacatcgagcgcaacatcagagttttgcttgataatggagtgggagaaacaaacattgcaagattgcttcggaaccgttgtagggcggttttcacctctgatattcttaaggtggtggaggaagtaaaggatctggggtttgatccttcaaaatcagcttttgctacagcattgcttgccctaaaaagtatgagtcaaacctcgtggaaagagaaagttggcgtctataagacatgtgctaggtccgatgaagcctgtcgtgcagcatttaagatgcaccctcactgcatgttgggcatcatagacaaatanatactgtgatgaac

SEQ ID NO: 6230 - DNA, 248 bp, Glycine max
  Clone ID: PAT_MRT3847_105635C.1
cctaatttttttttctaattgaccaccccaaggtgagtctcttgaatttgacggccttagatcaaaagaaatctgattctgatcatcgaccccttgtttacatcagaacataatttcccttcgcggccaatctattattaataccaatattaacttcaatgtccagtataatgcttcttctccttcttgaaactacaaacatttatgacacatttctccccaaatataaaaaaaaagttttctcaaag

SEQ ID NO: 6231 - DNA, 247 bp, Glycine max
  Clone ID: PAT_MRT3847_105636C.1
atcaccccccccccccccctcgaggcaggcaagccaatttactcactttgcttccttcccctttgtcgttcaaattcaagtggcaggcccttactttaaatacactaattcaacttcacaattactttcaacttccactatgaagacgaactacatgctaaccagaaactttcttcagtggcacttaagttgtgaagtggactcaatttgtgagctccaattccgcccacgcgtccgcggaccgtgg

SEQ ID NO: 6232 - DNA, 526 bp, Glycine max
  Clone ID: PAT_MRT3847_105637C.1
aatttcaatgtgtctgggatgcttttgtctttgcattgttctaccgcacgcttgatatgagagctgtcgatgatacctcagcgaccgctctttctgcttgtatgctaccaggaatctccaatcctcttcctctttactggagagaagatgttagatcgagtttacccggatgaaaatctcgtcatgcagtcgcacgcgaagccaaacggggacttgatcacatacttcgtgtaacacatcaaatcagagagccaccttagacaaggcctttttcatggtgtggggatgcaaatcttatcttagacttacggtgtctagaacatgatcctaataggtaaatcctacagcagcaactggccttttattcgtttttcttgatctgtagcgagattatttattttcattagtccgaataatcttacgatatgtgaaaactatgacagtactttgatctttttgtcgattgcaggatccataaagatcgatccgtccacatgcttgtccgactccagagaagacatggaca

SEQ ID NO: 6233 - DNA, 270 bp, Glycine max
  Clone ID: PAT_MRT3847_105638C.1
ctcaactgaagaaatgctacaatatttttgtgaaccattgagtctggaagataaagtattgcggtaatctaataccattatatatctatggtcctactgaaatcttatgtgatatgaaatcgagtattataatctcacacaagagcttaccttctatataccgcgtcattggaaaatcctaccctattgtctatgataatctcgtacaatctaataattttccttctgcagaatatggtggtctaaagagctgaactccaaccatcaaag

SEQ ID NO: 6234 - DNA, 379 bp, Glycine max
  unsure (1)..(379): unsure at all n locations
  Clone ID: PAT_MRT3847_105639C.1
tctcccgttttcttatgcaccggcgtcacataccancgaagcagcttttgaaaatggctcgagtcaggccacaacncctntcccncctccttgcatgttcttccctccaaagacttcatccccaatcttacgctccaccgtctcatccgcctctttcttctctcctcctccgacaacaaacccttcttccccttctccttcgaccatcttcgttctctcctccgcaaaatccataccttctacgacgacctttcctgaaccctcttcataatcgccgaatttcttcctaaaattctttgataaacagccttctttcaccaccttccccggcttttactttttcctggttccttcgctcgccctaatcatttttaactga

SEQ ID NO: 6235 - DNA, 387 bp, Glycine max
  unsure (1)..(387): unsure at all n locations
  Clone ID: PAT_MRT3847_10563C.1
tccgaagccaacacacacccggggcccgaaaggaacgccgaggaaacaacccccgcaacccccaaaccacgcgaagccgccaacacacacaacgcacggagagaaaccancacggcagccaccaccaccacacacgacggacgccggaaacaaaaccggcagaaccacgcacaccggagccaccggggaagccacnaacaccacacaccgagcgcaccaaaaccgcgcagacacccagaccgacgaacaagcncgcaaacaaaccaacaccacaacaaccgaccaacaccgaccgaaaaagcaccgccaaccggggaggggacacaacacaccgaacaaacgaccgcccacnacgaaaggaacggccggaaccaacgcacgaagaga

SEQ ID NO: 6236 - DNA, 379 bp, Glycine max
  Clone ID: PAT_MRT3847_105640C.1
ctcactacacaggccgtgcagcacattttgtttgtttacttatcaacaccgcataagcgatggggcatttgataaggatgggactctcccaaaggacggagaggcgatccctcttaaagagcgtgaccttgttggttgggaatggtgtactgccacggcaaggagattgagctcggctgtacctttggtgctctctgcccttggggagcctcacctcaacatctgcaagctcgtgctgcgctaggcaaacatagactgatcttgatcgacccgaagagggcatttcatctctttcataatacaaagaggacactgttagaagagatgtacaagacttgtgtaggagaagttgcataggaatattgaaggatgtcgtgct

SEQ ID NO: 6237 - DNA, 291 bp, Glycine max
  Clone ID: PAT_MRT3847_105641C.1
ttggggaaagttcattggaaatggacagtgttggaatgatcctccatgattaagttgatgattggggcctaaaacttgatgatagggcaatcattcctgtaaatactgacattatataaggatgaaaatgcgcatgaaatgcaactttgaaatgagctttggcttagcaagtatgatactattgggcagttagtactgatcacgtcatgaattgctgcaggcttacaattggaaatgcattctttgagatcactccatgacatgcgacttttggatatgcagaccaaacat

SEQ ID NO: 6238 - DNA, 351 bp, Glycine max
  Clone ID: PAT_MRT3847_105642C.1
tgggcgtcctgttctaggaatatgtcaatttttgtgataaatcttaaacgagccctgacccatgccttactgctggggacccaccttgctgacagggagcttctgcttctcgcaagggtcattccgaaccatctgcagctctgtgtcgagaaatcccttcacacagaagaaaccacctcttgctctgtcgttgctgagcctcatacttatcggcttaattcctagaactgtctgtttaccaaatgtggcaacaaacatggctaaaataggccttctcgaacatgtctataaaacacaaatccttactccgcccttgcagggagacctttagcatcatatttcgcacctcct

SEQ ID NO: 6239 - DNA, 413 bp, Glycine max
  unsure (1)..(413): unsure at all n locations
  Clone ID: PAT_MRT3847_105643C.1
gtcgaagtgtctcatattggagaagttacttggatagacttaaagagaatcctaacaaagatattctggatgtgcttcgaattagttatgatgaacttcaggatttggaaaaggaaatatttttagatattgcttgtttcttctgtggaaacgaagaattatatgtgaagaaagttttagattgttgtgggtttcattctgaaattggaataagagccctcgttgataaatcactcatagataattcaagtggattcattgaaatgcataatttgttgaaagttttaggcagaacaattgttaaaggcaatgcacccaaagagccaggaaagtggagcagggtttggctccacgaagatttctacaatatgtcgaaggcaacggaaacaacaaacaatgaagccattgttnta

SEQ ID NO: 6240 - DNA, 284 bp, Glycine max
  unsure (1)..(284): unsure at all n locations
  Clone ID: PAT_MRT3847_105644C.1
cccacgcgtccgatttctttttgatttcaaaaattttccggaaaaaatttgaatctattttgtcaagcgcagaaacctcactatcanaactgattatgacaatatacactacaagagaggggtcttctacttctaactacaactttattggtgttagatgaaattctaacacggatgaaatttgacctgcttatacaaagctggctatgcaatgctatacctatacttcacatcgtcgccttctttgctggctgaagataaacacatattccaagccattcaag

SEQ ID NO: 6241 - DNA, 431 bp, Glycine max
  Clone ID: PAT_MRT3847_105645C.1
agtttctgaggagagcagctttcttgaagcacaatctttgggtcactccttatgttcccggcgaaatgcatcccggaggggagtttcctaatcagaatccacgcgttggagagggtttggctacttgggttcagaagaatagatcattggaagaagccgatatagttctttggtacgtgtttggtataacacacattccccgattggaagactggccagttatgccagtggaacgcattggctttatgcttatggtattccactcaaagttagcgtatttcattgccattctttctgtgcaaaaatagagtgagattcatattgaactactataacatgcttagggttatcacataatctcctaagttttgagtgcaatgtagttcttcagtgtgaatctcatttgaaatatcctaatccccaaactgatg

SEQ ID NO: 6242 - DNA, 434 bp, Glycine max
  Clone ID: PAT_MRT3847_105646C.1
cgcgtgcgcgcgcacggaaactcggaatgagactcgagggagaagcgcgacacgcccatccctgtccagctcgaccatgagaagctgcaccagactcggactcgccgcaaagctaccgaaggcctcaagaaagcactccgactgctctcggcacaatatgctatattcgtgtctctacacaagatctaccagtccgagggtgtcggcggcctctactcgggtcttgaggccgaagtcctcaaaggcttcctcagtcacggcttgacgatggtgatgaaggatcgggtgcacgttggggtcatccagctatactatgctttgctcatggtcacgaaaaaatggccggatgagctgcagaaggcgcaggccaaagcgactcacgctattgaagatgcgaaggacaaggtacaggcttctgcggctcatgctatcga

SEQ ID NO: 6243 - DNA, 603 bp, Glycine max
  Clone ID: PAT_MRT3847_105647C.1
ccacgcgtccgatcaaaatcaaatcgaattggattggatacaatacaatacaaccctatataagccttcaaaacctgcgctgcgtgctgtcgtttcatttgctttactcaccgaaagtaacggagggatttccttaacccacaaactctcaaataccctctctctctcaccgaccactatgttgcagagacctagacgccgctgcgagggcactgccatgggcgccatcgttctcgatctccgtcccggtctcggaattggacccttctccctcgggatgcctatatgtgaagcatttgctcagatagagcagcaacctaacatatacgatgtggtgcatgtcaagtattttgatgaggaacccctgaagttggatgttgttattagctttcctgatcatggcttccatcttcgctttgatccgtggtctcagagattgcgccttattgaaatatttgatgtaaagcgacttcagatgtgctattctacttccttgattgggggaccatcaactttagctacatttgttgctgtatatgcactgtttgggcccacatatcctggaatttttgacaaggatagacgcatttacaccctattcta

SEQ ID NO: 6244 - DNA, 354 bp, Glycine max
  Clone ID: PAT_MRT3847_105648C.1
tagtataggtgaagctgtgcggctccggtacgggatcggagtttcgagctacgacccacgcatttttgtattcttacacaatctctgatcaacaacgctagagaacattgtataatggatcacgtgatgagattaaccattgacatctactacatgaagcttgaagtgtgaactgactgaaacatgtcctaaatgcttcagtcacatcaccatggacagcatcaaccttttgaattctctctttaatgtcaaacgtcctaggacgatgacagtcgaagcagctatgtccctaacaccgccagctaccataaatcaactgtaggcggcggaggatgcaccgattgggcacacatt

SEQ ID NO: 6245 - DNA, 1716 bp, Glycine max
  unsure (1)..(1716): unsure at all n locations
  Clone ID: PAT_MRT3847_105649C.1
ggctcgaggttgaaaaagcataacgaaggtggtttgtttttccgtcttaatcaaaatcgcgaatcgaattggattggatacaaccctatataagcattcaacacctcacctgcgctgcgtgttgtcgtttggcttgctttcctcaccgaacgaaagtaacttaacccgcaaactccaaaataccctctctctctctctctctctcaccaaccactatgttgcagagacctagacgccgttgcgagggcactgccatgggcgccatcgttctcgatctccgtcccggtctcggaatcggacccttctccctcgggatgcctatatgtgaagcatttgctcagatagagcagcaacccaacttatacgatgtggtgcatgtgaagtattttgatgaggaacccctgaagttggatattgttattagctttcctgatcatggattccatcttcgtttcgatccgtggtctcagagactgcggcttattgaaatatttgatgtaaagcgacttcagatgcgctattctacttccttgattgggggaccatcaactttagctacttttgttgctgtatatgcactgcttgggcccacatatcctggaatttttgacaaggatagaggcatttacaccctattctatccggggcttctgtctgcatgggggagtggaattgcctttacagtttcctgatatgaccacgccagttacatgccgtgtttctatatatgatagctcctctggtaagaaggttggtgtgggggccttaatggacaaggcttctgctcctccattacctgctggcagcatttacatggaagagttccacgtgaagctaggggaagaattgtacttcactgttggctcacaacacattccttttggtgcatctccacaggatgtgtggactgagcttggacgtccctgtggcattcatcaaaagcaggtagatcaaatggttattcattctgcttcagatcttcggccacggacaactctctgtggagactacttttataattattttactcgtggtctggacatattatttgatggacagactcacaaaatcaagaagtttgtgttacacaccaacttccctggtcatgctgatttcaattcttacattaagtgcaactttgttgtctatggctcagatttagggggatctttccaggaagtaaataacagcaaacagagggttattacacctagcaccaaatgggaacaagttaaggaaatacttggggattgtgggcgagctgccatccaaacacaaggctcagcaagtaacccctttggttctactcttgtatatggttatcaaaatattgcctttgaggtgatgaagaatggatatattgcaacaataactctcttccaatcatgatgatggcgcttttggttactctcaatctcatctccatattgttctaagatctatcaaggttggatatggaaattcaggagtaacaggctaggtttgtacgagcactgtttaaatattgcagccttccatcatcattatcgtggcaaggggctatgaaaattgtacagctgtgtaacaaattgtacatattaaaatcctgttaaattatgtaattttctaacattgacatcttgcacaaagcaaatgtaatgaattccttttgctttgcctttcagtgtaatgagattcttagttacttgctataatttataaaaaggnttgttgtct

SEQ ID NO: 6246 - DNA, 1307 bp, Glycine max
  Clone ID: PAT_MRT3847_10564C.1
ggctcgagaatgtattggccacactacattatgtagataacattagatatcacatgatgaagcaaattaggaaactgcttagcggagatctcaggaccaaaaaatttactacgaaacggtcaaatgtagtgaaccctccaagaatcccatagcattcccaaaaaatcactgataaaatcgcaggcgaagcgtcacagtcactccctctcctcacacgaaaaaagtatccccccaacccaccccaccccacccccaaccctcaacttagggttcttctgttcttcttcttcttctcctttaaccaaacaacaagaaaaaaaaatcacattccccaaaacacccttctcgctccgcatggcgaaaacgaggccaggcagaaaggacgtggactcgtacaccataagaggaaccagcaagatcgtccgagctggagactgtgttctgatgcggccctcggacacgtcgaagccgccttacgtggcgcgcgtggagaagatcgagcaggacaacaggagcaacgtgaaggtgcgtgtgaggtggtactaccggccagaagagtcgattggtggtcggagacagttccacggggctaaggaactgttcctctccgaccactacgatgtgcaaagtgcacacaccattgagggcaagtgtgttgtgcactcttttaagaactacaccaagcttgagaatgtgggtgctgaggattactattgtagattcgagtacaaggccgccaccggggctttcacccctgaccgtgttgctgtgtattgcaaatgtgagatgccttataacccggatgatctcatggtacaatgtgaagggtgcaaggattggtaccatcctgcttgcatgggcatgactattgaagaagcaaagaaactagatcattttgtatgttctgaatgttcatctgatgatgatatgaagaaaccccaagctacattttttgcatcactgggagctgatggcaaggtggagccaaagcggcggaagagatgaccataatgcagtagtagtaaacatgtgaggtgtgtttggctctagctgaatttggctggctctatggtagcttttgtgtgttgtacagcttcttctagaggctataaacatttcatgtatttgactcaggttatgtatctatccgtgttagattttatcatgacattcatctgtttttcatttgtccatgatgagacctccgatccaagtgttaattcttgagatggcatcaaaccttaaaaactaagtacagagcaattgttagtttaaaatgttggttcctttttggtaccttgcttttg

SEQ ID NO: 6247 - DNA, 130 bp, Glycine max
  Clone ID: PAT_MRT3847_105650C.1
agatctctctaaatgcccatgatcctcatatactctctccgtatctaaatcaaatctggtatggtttaaacatgaggaactgaacagcttgtaatcgtttgacagtttcatctaatgccttcacattttt

SEQ ID NO: 6248 - DNA, 581 bp, Glycine max
  Clone ID: PAT_MRT3847_105651C.1
ggctcgaggctcaacagtacttctcttttgtataaatgccacaacaaacaaaaagaacaaggtcaagagagggcaaaggtcaaaagaattattccaatatatataccatcactcaacaagccgcgttttcaccctcgaaagtttcgttaaccagctgtgtttcactgtttacacccaacactttctatgtgaccattcttaagacaccctcctccattgctttatctcaattatctcacacttctttgtttagtgttctttcctcaataatgaaggaagtgagtgctgaaggtggaggtggtctagggcaagcatcatcatcagttcctgccccccaaaatgggaacagcatgcaacccagttccatgaaaatttccaaaagtggagaggtgtatagttatgattatgaagaaacaggagatgagccttcaagatttgaggtttggggttggtatctctatgagttctgctcctactttgttcaaactgttctcatccctgtggtgcttcctctcatgattagtcagttacagaacctcccaatggaccctgttcgggtctggttcaagagccaccaaggc

SEQ ID NO: 6249 - DNA, 1379 bp, Glycine max
  unsure (1)..(1379): unsure at all n locations
  Clone ID: PAT_MRT3847_105652C.1
ggctcgagggaacatttttatggcccattagtgcatggacggagtatcaattggattaagcgccttgagactgcagaagatgctgccaaagggattgaatatattcacacgggttgtgttcctgtcgttatccacagagacttaaaaagcagcaatattcttctcgacaaggacatgagagccaaggtctcagattttggtcttcccaaacttgctggtgatggagtttcccatgtttcaagtatagttcgattaactgtacgatatctggatattgagtagtttgtgtcccacacccaacccccctggtcatgctgatttcaattcttacattaagtgtaactttgttatccatggctcagattcagtagggggatctttccaggaagtaaataatagcaaacagagggttattacacctagcaccaaatgggaacaagttaaggaaatacttggggattgtgggcgagctgccatccaaacacaaggctcggcaagtaacccctttggttctactcttgtatatggttatcaaaatattgcctttgaggtcatgaagaatggttatattgcaacaataactctcttccaatcatgatgatggcgcttttggttactcaatcttctccatattgttccaagatttcccaaggttgtgtatggaaattcaggggtaacaggtagggttgtacgggcactgtgtataaatattgcagctatccatcatcatcattgtcgtggcaaggggctatgaaaattgtacagctgtgtaacaaattgtacataaaaatcctgttaaattatgtaattttctaacattttcatcttccacaaagaaaatgcaataaattccttttgctttgcctttcagtgtgatagaaatataatgaaatacaaagaccactcnncaacaatagatcatntaagatattctaaaataatctaaaatacaataatgatattataagctattttctatgtagagtaatgatacaaaaatacctcattattttaaacacttctccaacacttcttatttctctgtatttctcttcctatcacatcataaaccctatcatatctatacttttctcttctttttttctccctctctctaggtgttatatatcataatgggtgttcatgtaacatttttccttacgtgctcccacaacctaaagcttcccatttaagtttgtaataattaaacagaaaataaactaaaaacacaacgtgccaaacaatgtgagaggagaaaaatagaggtagctgaccatgtcaaggctagacagtgcattggggcggagacaagaccagatagcatatgagacaacaggctgatggagagaacacgttagatctgaccaccaacagagaaa

SEQ ID NO: 6250 - DNA, 440 bp, Glycine max
  Clone ID: PAT_MRT3847_105653C.1
cgccgtcccgtaagcctcggtaattccgtctcgtataataccttagggcccagttcccctcttttaaatccctattccgcccgcatttagaaacccttctagggtccgaagcaattaaaacgcctggagacagagggtagtttcccctacggtgcaggttcgctacaccgaagggggcttctttgcggcggtgagatccgtgccgcttatacccgatcctaacagagtgaggattttcagggtttacattaattgacccacagaaagaaagataccaaaattgggggtttgttcgtctggaagatgggtgactggtggttggttgggttgttgctagaattttcggagtctctgttcattacaccaacccatagcttctttttttttcgacacgcttgcattgaatctgatttcccagcctatgttcttatcttgccaac

SEQ ID NO: 6251 - DNA, 513 bp, Glycine max
  unsure (1)..(513): unsure at all n locations
  Clone ID: PAT_MRT3847_105654C.1
taatgtatttcgtattnnntaatcaaagcaattacgctgaaactagaatttattcttctgcaacatcttgcattgaaagaatgagatggcttttgtcccttgtctacctaaaataagctcagtttcccgtcaccgccacatgcatgctagttgctagaatgtgactactgactaatggtggggtaagtggacgtaagcatagccacttgattaagacgttgggttatcttccatttttttccacttgatttctattcttcctttgtttgttgtattgctgattttgcagcccaattgtttggaaagtgtgttgttggtctctatcttctgcaaaataggttggttgcctttaatgttcaaacttgagattccagaatgcctttgtttaggtggtggatctccttttagacacttgaaggaagtaaaatcccaactgtacttaatgggaatattgacatgaatttcacagtatagggatattcttcacccataaagggttgaaatcagcacaaa

SEQ ID NO: 6252 - DNA, 591 bp, Glycine max
  unsure (1)..(591): unsure at all n locations
  Clone ID: PAT_MRT3847_105655C.1
cccggggatcctctgagtcacctgagcatcactggtgtttgtgtgtgggcgagcgtgtgcacactacaaatgcctaacattaacatgccaatgcctagactgctttggctctttttcaaagtttcaacaagggacaanngtttttcattttttaagntncttttttaaattaaggtttttttnaaaaatattttgggggggggttttnnngaatatattttttttttttgttttttnnggnnnggccaattgaaaattaaaaaacctttttaaaaaaaaaaatttttttttttggggtatagaaagaaatgggagagtggatattttttaaaatttgttttataaaaaaaaaaggggttttaaaaatggggttttttttaaatttttttgaggggggggggggttatttttggtttggggcttattggggttataataaaaagagagaaaaattttttttatggggggttttgttttttctttcattttacccccccatctataaaaaaatatttttaaaaagagtttttttgtgggcccccgtttgtttttattttaaaaaatctatataagggggggggggggcttttt

SEQ ID NO: 6253 - DNA, 145 bp, Glycine max
  Clone ID: PAT_MRT3847_105656C.1
ccaccggaggggagacgctgcgcgaagcagacacactgggggggtacacaaaaaaaaaaaaaaccggccgctcttaaagatccaggcctaccttacccttgcatgcaacgttctacctcttccaaagtgtcccctaaattcaatt

SEQ ID NO: 6254 - DNA, 565 bp, Glycine max
  unsure (1)..(565): unsure at all n locations
  Clone ID: PAT_MRT3847_105657C.1
ggctcgagggccgcctacgttgctaccctacgtcttggcctgtttcgaggatcagcaagtcggaggagtgggaaccagtcaacgagtgaaaccatgcggaaacaagatgacaatttgggaagtactcgctgctttccgacttaccatccgaaacattgaaatcgcctcttcgacacatatcgatggcggtatcccctgtctatctggtcgaacagccgcttatagaaccgtcatcctcaaagatcccgactttttgcatggtttcaccaacgacctttggctcggcaaatatcacctcaactcgggtgatgacaaattcctcactcgatggatggtctcgcacggctggaatacctatgtgcaagtctgtaaagaggccgagctgctcagtacgatgaagcccaattggcgattcttgaagcaagtgttgcggtggacacgaaatacctggcgatccgatttcaggtcgatcttcaccgaacgttatgtttggacgaaacattcctatgtggcgtacacgatgttggataaattcatcaacccgtngacgttgctggtgggaccg

SEQ ID NO: 6255 - DNA, 282 bp, Glycine max
  Clone ID: PAT_MRT3847_105658C.1
acgcttccgtatcgttgagaaatatagggaaaaattggattcgctgaaactgcacaagctgctgggcacaaacgttctcaagtgtggcacatgaaatgtgttgcttgaccccaatgaagtctacgaaatctccatggccatatctcggccaaacattcggaaattcgttaaggatgggtttatcatcatgaagccttccactatttacttacgctcgcgtgctagtacgatgaaagacgcacctaacaaaggtcggcactctggttatggttagataaatgg

SEQ ID NO: 6256 - DNA, 590 bp, Glycine max
  unsure (1)..(590): unsure at all n locations
  Clone ID: PAT_MRT3847_105659C.1
ggctcgagctcttcgtgcagattacatgatctttattgtaaatcatgcttgataatttgttgtttctctttaggtgacaaaatggctctcgcggacataatcccaaattccaccttggccttaaacacgaccctatgggtttgcgagcacacaactaagtttcaacgtaattcaaagggaatattctacaacggcaaccctttaaactacacattatctgtggtctctctgcaggcctccttagtttgtttgtccactacatggttgcaatcctttcttatcccatttggggagaccaccttcattccacaagtgctgggagggttgctgacggtgccatcaatactgggacaaattaaaaatcttgacaagttgctcttcgctccaaaacctttctacgtgtgtgaggcaatctctctttacgggaccttgntgntcctgttcttgatgggagtcaaaatagacatatctgtgctaatgagactgggaaaaaagaattgggccattggcttgtgttcttgtgtattgccactaatattaaccatatcttctgctatgcttctacgccaaattttgacccccggaacaga

SEQ ID NO: 6257 - DNA, 656 bp, Glycine max
  unsure (1)..(656): unsure at all n locations
  Clone ID: PAT_MRT3847_10565C.1
tacttttcggtaccttattacataaaaattctacaattaagcgtgtttgaggacaagtaaggataaaacacgctaggatcgagtaatgaaaccaacaaagaccggaatgggctacatgcaaccaacaaagtgcagagtgggagataatcgagtaatgaaaacacctggctgcagttggataacacagttaacacagttcacgagagtatgaaatttaagaggaacttatagaaggatcctttatccactcagtgagaagttggcattcgcgtttggtctagttagtactagtgtaataaagaaccagccagtttgtaatgaactctgagcttgttcaaaattatcttttgaaaaatattgaaatgagcttattaatgagtcaattattggtcacgtcgtagactttgcgtaatcaaatgccatgcatatcnnnaatgtttgaaactgaacatcagtataaagaatcacccatccacgaacagctannngagtagaagctcaggcccttaagagaagcgggtccgataaacatgttattttgacttcaatacaaggattcatgtgtaatgaatatgaaatgtccctattagtttaaaaaaaatacaaagcgagtcatgtatgaacttcaacttgtatcttatatttgttttcaatgc

SEQ ID NO: 6258 - DNA, 138 bp, Glycine max
  Clone ID: PAT_MRT3847_105660C.1
ggcaatttgattaaattaccaaagttgagacaaagttttcgaccagtgaaataaaatggcaggcccagctattttatttcagtggtcgaaaactttgtagcaactttggcaatttgattaaattacacgttttgaatt

SEQ ID NO: 6259 - DNA, 356 bp, Glycine max
  Clone ID: PAT_MRT3847_105661C.1
atcacttctacccaatgtgtgggccaagtcacaggctcacaactgggggtaaggaatgggggtcaaattgggcaaccttagaggaataccaatagaaaaccgtaaacaggggccttaagatggcccacttaaacaaatcgaatacggccaagttttaacacacacacgtagcggggccccctaccgcgtttaggacgacctccgtaaattcaaaggataaaaacattattcacccataatattgaaacctaggacacccacccacaacattgggcaccctggaaaaatttgaaacatccactttttccccaactttccccccagaaattctttacagcccgaaggggctttcctgt

SEQ ID NO: 6260 - DNA, 263 bp, Glycine max
  Clone ID: PAT_MRT3847_105662C.1
ccacgcgtccgatctctcatgctaaactatactgaccttccaaaggctgcaaggatgtgtgacgaaaggatagatgatctggagaaggaccctatacactacattggtgttgcatcctgaacgagacgctctcgtatccgaatgaaggacatcgacaggtctgggtgcctgtataggtaagtcgaggcgtttaagctgaagatgagattatacacgttcacgcaattggcgagggatcagaacacatctgaggtgtcttagtg

SEQ ID NO: 6261 - DNA, 400 bp, Glycine max
  Clone ID: PAT_MRT3847_105663C.1
ttcttttttttttttttttttttttttttttttttttttttttttttcaccagactattttaaaattattactaagtagaaaaaaaaacacaaattaggaggtaagcaatcacaagtttgtaacaaagtccaaaatcaaactaagtaggggggatgggggggaggaagttattttgtttccaaaaaggcaacccttggggtcgggaaaaaattaaaatcctggcagttaagggacatttccttcactggcaatcccgagggggtagcggaaaaggggaccagaaaggtcatgctcaagggactcactaaaaaacaaaccccaattttggccagcaactgggttcaccttataaaggcattcttcactttctggctggaggaaggagtcatgaagcatgcc

SEQ ID NO: 6262 - DNA, 211 bp, Glycine max
  Clone ID: PAT_MRT3847_105664C.1
ggatgacaccgttgccggtcctcgcccggaaaacggccttggcaagctccgaaagccccacaccttcgttttccgatttgcctccggcagggaatcaaacaggggaaccttgaaatcgtccggtgaaaattccccggaggatccggtaaaagtgacccaaagattcatgatcgtgaaaccccctggtggtaaccaaaatccgagcggatcc

SEQ ID NO: 6263 - DNA, 758 bp, Glycine max
  Clone ID: PAT_MRT3847_105665C.1
cttagcttatggcaatcaagagagcaagctcatcattctggccagtggtggaccccaagccttagtaaacataatgaggacctacacttatgagaagcttctgtggaccacaagcagagtgctgaaggtgctgtctgtctgctctagcaacaagccggccattgtagaagctggtgggatgcaggcactggggcttcatctgacagacccaagtcagcgacttgttcaaaactgtctttggactctcagaaacctttcagatgcagcgactaagcaggaagggatggaaggcctccttgggactctagtgcagcttctgggttccgatgatataaatgtggtcacctgtgcagctggaattctctctaacctcacttgtacgcaccgtccttcgtgctggtgacagggaagacatcactgagcctgccatctgtgctcttcgtcatctgaccagccggcatcaggaagccgagatggcccagaatgccgttcgccttcattatggactgcctgttgtggttaaactcctgcacccaccatcccactggcctctgataaaggcaactgttggattgattcgaaaccttgccctttgcccagcaaatcatgcgcctttgcgggaacagggtgctattccacgactagttcagctgcttgtacgagcacatcaggacacccaacggcgcacctccatgggtggaacgcagcagcagtttgtggagggcgtgcgcatggaggagatagtagaagggtgtact

SEQ ID NO: 6264 - DNA, 300 bp, Glycine max
  Clone ID: PAT_MRT3847_105666C.1
gccaacgctgtataatttcctaatatcaaagtgtgatttgctacagcttgcgttacagctctttaatgttttctaccatatgaccttcactttttattaactgaaaaataatgatttgtttgagaaaaaaaatttcggtcaaaatagaatgctatatttatgactatgcttttttgccattccaagtgagttaaagcctacacctaaatgcttcttaaggatattaggtaataaccatctgctggccaatttgtagtcccaacgatcgacttgattgctggacgcccctttttctaccta

SEQ ID NO: 6265 - DNA, 912 bp, Glycine max
  Clone ID: PAT_MRT3847_105667C.1
ggctcgagcataactcagtctctgttcacctgggtggagtaccctgtgaccctcttcacccaattgcgttcgatcccactctgaacaagccttgttcttccacctctctgttttggaactgcaagaggagaaggaagaggaaaaactccattatcatggcctctaatctcaggaccaacaatttcctgcgccatgtggaatcaatgaagcttcttccatcaggtgctggccacatttcgcacctgaacgctgtgatacttggtgaatctctcgccactgaagaggatgatttcgttcttccaagtgaggactttgctggccaagccaatgttcagtccccagaacagtattccgcccacgcgtccggatcgattgaggaccctgctggattctggtctgagattgcctcagagttctattggaaacagagatggggtgacaaagtgtgtgatgaaaattttgatgtaaggaaagggaatataaagattgagtggttcaagggtggcatcaccaacatctgttataattgcttggatagaaatgttgaagctggacttggtgacaaggtcgccgtttactgggaaggcaatgagcctggtttggatggtactttgacatacactcagcttctccagcaagtttgccagcttgcaaactaccttaaagatattggcgtgaagaagggagatgctgtaattatttatttgcccatgcttatggagcttcccatcgcaatgcttgcctgtgcccggattggtgctgttcattcggttgtatttgctggtttttctgcagaagctctttcccagagaatcattgattgttaaccaaaagttgtaattacttgcaatgctcgtaaaaggggctctaagcctatctatctgaaagatattgttgatgctgcaatcaatg

SEQ ID NO: 6266 - DNA, 506 bp, Glycine max
  Clone ID: PAT_MRT3847_105668C.1
caggtcctgtcacgtataggcagaggcagtgctgcacaggccaaacaagaactacctctagcgcgtccgggctctccagggcaactgccttggctaccccaggaagagcaggggccacaaaaaaacacgccccccgccgaactggcagtggccacctgccacccaacacaggaagcgctacaaatataacgggttaggcccggataaaataggttaccatcttagggttttctactagctgaggcaccggtggcagcacggcataaagccccagctgaggcggacgatgccccggccctactagtaaagcgccctgctatacggggataacgataacacattcaactacgccggcattgtccccccgtggccacttagcccggggccaggcttgctcctgaggcctctgctgcagctgaattttcctctggcgcgccagcataggcagccacagccgacgggtagtagcaagcggtaacaaggcctaatgagaacacgccacaagt

SEQ ID NO: 6267 - DNA, 731 bp, Glycine max
  Clone ID: PAT_MRT3847_105669C.1
ctcgagccgtttttcacggacgcgtgggttcaagaagctgaaaaaccaacaaaagggtgcataaattgttgagaactcagacatggcttgtgggtgttcttcaacaacattggcagagaagatttcatggaattgttctgtgtttgtggcactaatgctggttttgagtagctgcgagtcaaacacaagtgatttcacaagtcagatgatgcttcatgggagtgtcaccggcaatattagcaacaacaacaacaaggcgtgtgatgagatttacgtggttcgtgagggagagacgctacaaacaatcagtgaaaaatgtggggatccttatattgttgaagagaacccacatatccatgatcctgatgatgttttccctggcctagttatcaagattaaccctttcaccaatagaggctaaaatgtttcaatttgggataatgtttcttctacccaaggttctgctatgtgatacaaggttacatgtaagtctttgtttgtagaaagagcatctcatgtatgcattattatgtaaccaattacggtttcaatttccgcgcgaattgctcgtctttagaaggatggaagcataatacatcaaatcaaagtggttatgaacttccacctcaattttttctgaacgatttgtgattttgtatgagagcacgtattgtagcgaagtttttgtgtaaaatatatatagatgaaaatatgagtatattttgtccctt

SEQ ID NO: 6268 - DNA, 406 bp, Glycine max
  Clone ID: PAT_MRT3847_10566C.1
ccattttgtcaaataaatataaaaggtttctttaataaaaataaatatatttttagagagagggtgaggtttttataaggaaatgaacaatgatgatattaactttatataaaataattggtctgaatgaaaaatataaaaccgatttgttgatttattcattttgatgaagaaaaaataatatgaatattatggttatataaatagataatattatagaaaaaatatagtaaattaatgagggtgggagtacccgtaactattaaatagagtcacgttaatgtcagtttttaaactaacaataggctttactctttcttttcctctcaattacgggttttcttctactccttacaaaaccatttcttttttttgcatacactcaaacttagttcaataaaatgag

SEQ ID NO: 6269 - DNA, 486 bp, Glycine max
  Clone ID: PAT_MRT3847_105670C.1
cctcttttttttcttttttcttttttttctttttttttttttttttcttttttttttttttttttttttttttctttcttcccaaaccaaaccctgggctgagaaacaatcaaaaaggggggggccccaacccaataaagataaaacctccccaccctcccccacaaaaaaaaactaccccccaaaacccaccccccattactggaaaaattaataaaagggccccacccccccccgggtgtaggagccgaatcaaacaacccttacctgaaacgaggcaaccctttcaataaactaaaacccctcaattgcggcccgggggaaaacaactagaaattgggcgcgaaccctgaaccccaggaaaatcccccccccccttatccccaaaaacgggcccagggggagccctaaaaccccccaaaaatcttggatccccttcgccggggggggggggtccgtttttgtcccctccacccaacccccccc

SEQ ID NO: 6270 - DNA, 548 bp, Glycine max
  Clone ID: PAT_MRT3847_105671C.1
ctcattcatatccttttcataatactggttctttatccagagctaatacttccaacaattttcctttacctttttatggttggaatttggaacttccgatggaggccaagacaccctcctcatatggacacaagactatcacatgctgatgctgctcatcctgatgaactagatgaagagtttgacacattccctttttcacgatcatcggatatggttaggatgaggtacgatcgcttaagaagcattgcagggaaggtccaaactgttgtaggtgacttggccactcaaggagaaaggttccacaatctgcttagttggagagacacaagggctaccactctctttgttacattctgtttcattgctgcaatagttctctatgttactcccttccaagttgtgttccttctaattggcttctatgtgctaaggcaccccagattccgccagaaacatccttcagtcccattcaactacttcaagaggttgcctgctagagtagacagcatattgtaaacatggatgatcgcacttgatattttcca

SEQ ID NO: 6271 - DNA, 945 bp, Glycine max
  Clone ID: PAT_MRT3847_105672C.1
ccgtgtctcgcgattccccgttcatacccctaggcccatgctgagaggctatcttgcaagcctttaatttccatgatcatgggataccaaaagcctgcatggttggaagctctttacacacaaaagttcttcgtggggtgctcttaccatgagaacgctaaaaagaatgagaagaatgtctgctgcttagattgctgcaccagtatttgtcctcactgcttgccatctcatcgcttccacaggcttcttcaggttcgccgctacgtttatcatgatgttgttaggttggaagatcttcagaaactcatcgattgctccaacgttcaggcctataccatcaatagtgccaaggtggtgttcatcaagaagagaccccaaaaccggcaattcaaaggatcaggaaactactgcacctcctgtgatagaagtctccaagagccttttatccattgctcccttggatgcaaggtggattttgtgctgaaacactataaggacctctctccctacttgagaacatgcaactccctacagctaagccctgattttctgatcccacaagatatgggggatgaggaaatgactcgttctaccgttgtggattgtgatgaaccaatgagctcatcttcaggttcatcagggtcagagaataacatgagcatgaacatggcttgcacagagatcgttaggaagaggaggagtggatggagcactgtttgtgcaaaattcatggccaatagcaataaggtttctgatgaagacatggccataagcatgagtagaagaaaaggcatccctcatagatcccctctgtgttagctccatcacccggcggcgtgtccctgcccccccgacaacggaaggattaattactgttagtttactacaacaacaacaaaaaaatgttaacttttttatttattaataataggatattttgactga

SEQ ID NO: 6272 - DNA, 199 bp, Glycine max
  Clone ID: PAT_MRT3847_105673C.1
cagcattcatgttaccccaaaaaatagattcagttatgccagcttgacaactgtggattatgacttcaatgcggtgaatctgaacgaaatggtccagacggtattgggatgttttctcccaaatgaggtttctgctgctgttcatgaggatggtgcatgcaagtcgaccgagcaaacatgctttctggatgccaatgca

SEQ ID NO: 6273 - DNA, 229 bp, Glycine max
  Clone ID: PAT_MRT3847_105674C.1
ggctcgcgaaaaataaaaaaaaaaaaaaaataaaaaaataaaaaaataaaagaaaataaaaaaaaaaaacaggaaaaacaggttgagaaacctaacacggacattcgcggggctcgtccttagtctgggccgctgctgctttgttcccccttccctgttctttttccgggcccggcccttggggctttcctgtttccccttgcgtgtctttgtttgcacttgtcctgct

SEQ ID NO: 6274 - DNA, 1059 bp, Glycine max
  Clone ID: PAT_MRT3847_105675C.1
ctcgagccgaatcggctcgagcacacacatcttctaattcgcttttgtcaacctctttattaattggcacaacccgtgatggcaatataaatagcaaaaccaccagcaacaccaccctttgtccacgagagaaagaaatcaatcacatcctatccaaattcaaatcacgaagaacaagtaaaaaggaagagatgggaaatgctatggggagtaaaaaagcaaaggtgatgaaaatagacggtgaaacgttcaagctcaatactccagcaagagcaaacgacgtcgttaaggactaccctggacatgttctcttggactctcacgcggtgaaaaacttcgggcctcgggccaagccacttgagcctgactaccagctcaagcccaagaagatttattttttggtggagttacccaaggttaagcccgaaccattagtaacgaggagggtgcgatccagtggaatccgtggcatgaacgcccaggataggcttgatttcttgatgctgtcgaaacgctccgtttcggaccttaccatggtgaagcatgggcccaagccagaaaatggtgggcccacgagggtcaaaatgaggctgcccaaggcccacttggagaggcttatggaggagagccacgacgggagcgaggtggcggagaagatcataagtttgtatatggggaataatgccgccgtggacggcggcggcgcaacggtggaggcccaaaaggaggttcacaatcgcaagccacgaaggaaacgggtgagtttcagtccagtggaacaaggggaaattcatgaagaatcagcagctcctcaacagtcactagtttatagcagtccttctagatagtcatttatgcagaaccaaaccattatttatatgttaggtgcttctgaagcaatttaatttattgccctaaaatctgtagcctatatattgataaaggcatgtccatacatttatacactagtagtgctcgcagaccagaagatgcaaatgttgcttcaatgtttcgccccatttgtagtcaaatttggaaatatattttttagggattaag

SEQ ID NO: 6275 - DNA, 139 bp, Glycine max
  Clone ID: PAT_MRT3847_105676C.1
gacaacagttccgaaggcccggttcatgtgttgcagtgacccacggggctcactgctgactgatcctgtggaatcaggggcagatgcaaatgccaatgcacatcagtcacagaaacatatactgcgcatatttggcggc

SEQ ID NO: 6276 - DNA, 281 bp, Glycine max
  Clone ID: PAT_MRT3847_105677C.1
ctcaatctcactttttttttgtggttttctcttttgggtcttcagcttttcaagtgaagtcccaaagatcaaaatttcaggtgtgtttctttctctttttctttcttctgggtttgttttgtttttatttgtatttttatgtgcctttttctttctgggtatttgtggaatgtttttatgatttgctgttggattttgtagaagagggattttgttttattttttgggggggatttttttcttcttattacactgtggtagcagaaaatctgatgtcttgt

SEQ ID NO: 6277 - DNA, 397 bp, Glycine max
  Clone ID: PAT_MRT3847_105678C.1
cctgaagactttgaaatcccagttaggccattattgcaacgttgggttgccgaaggatttatacaagaaacagggaatagagacccagatgatgtggcagaagactacttgtacgagctcattgatcgtagtttagtccaagtagcaagagtgaaggctagtggaggtgtcaaaatgtgtcgcatacatgatcttctccgagatctttgtatatcagagagcaaagaggacaaagtgtttgaagtttgcacagataacaacattctaatctcaacaaaacctcgtagactgtccatccattgtaacatgggtcactacgtttcttcaagcaacaacgaccattcatgtgcccggtcttttgtcatagttgggctcaggtaacttttttcagtctaag

SEQ ID NO: 6278 - DNA, 310 bp, Glycine max
  Clone ID: PAT_MRT3847_105679C.1
gcagcaatttctttctcaatctcaaacttgtcatggttctgaaagtgcatcaaagttaatacataggagcttcagctgtacctcttttgatgggaagcctggtttcccctttgaacctcaccctgacactctcatggactttcaatgccatgctttgaactcccctgaaaacactttcttcgcagcacaaatgaggagagtgtgcagtacaggagacttgcagaacatgaaatcaacagatatgtctcaaaaagggagccccttgttggaggaagcaaacttcaaagtagggcgttatagtgctgaagaa

SEQ ID NO: 6279 - DNA, 540 bp, Glycine max
  Clone ID: PAT_MRT3847_10567C.1
caaattcttaaataaaagtgcccccattttcccaaaatcaccatctagagttttctcttttccactgaaaatcaaattagggtttggatttcggaattgccacagaatcatggccactctgaaagagcttcttcctcctgcaaaatcctcctccaccgcctactacgaccacaccaacgatccatggttcaagcagcgtttctcctcagaagaggaggagttggaatctcaactgatgcgactggagagaaagttggtacctttgcattggagatgcagctttatgtgcagcatatgccccagttacagggttttagatgatgagctttgcctcaatgttccatagcagaatcaaagcaccatgtagctttctcgttttgtctctgcacctggatccaaaatccttcctgtcaccgtcgacgataacggcaacgtcgcctacgacaccatcgtgaggcaaaccgagaccaggtgatgggtggtgtcagcaactccctgtgctccgaaaagttaagaaagggtgggtcgatgatgagtggc

SEQ ID NO: 6280 - DNA, 510 bp, Glycine max
  unsure (1)..(510): unsure at all n locations
  Clone ID: PAT_MRT3847_105680C.1
ggctcgaggcttgtcacatccttaaacccagtttgtttcctctattttactcctgaaacttcctggttttcacgttcttttgaaactgaagttaatttgactgttccagaaaatcggttatgacaaggcagcaacagttgccaagacagctcacaaagaggggactactcttaaggtgatgatgccattgttattcttgttttcctgtttgtcttgcttattctgacctctcgttttgaatattaacaaaaaaattatgctgccatatattaattcttaacaaattaaatttaagaagtacactatatatacaagtttattcttgcagaaccatttcaactcttggattctttttttcattaatagttgtgatatttatatgagtgaattgatcacttaatagtttttgtgtttttgtccaataaatcttggctaaatatcgaaattgaaatgattgcttaagaagctgcattgaaactcngagtgctctgctctgaagatttttgacag

SEQ ID NO: 6281 - DNA, 551 bp, Glycine max
  Clone ID: PAT_MRT3847_105681C.1
ggctcgaggtgcaggttctggtgcaggtgctggctcaggctctggctctggttcttcatcttattcaagttctggctcttcttcttcatcagggtcaggatctggagcaggttctgaagctggttcctacgcaggatctcatgctggatctagcgctggctcaggctcctctagagcgggttctgaagcaggttcatatgcagggtctcatgcagggtcaggatcatatggtggtaatggaaagtagataaaatcatgcatgcatgtcagttaaaccatattatatacggtcatgtggagaaaagaacatgtcggtgtcattgttagtttactagaattataccttagtatgcaaaaataagtttatgcatgtgttgtgtccatcctgtttttctttttcttttgtacaagtagataggagtcgtgcttctccttactgtgtccaatgtgcaataatttccttgaagggttgaataactaaatcgtgtatactttgttattggtttatccagtgacaattctataatatatcaactatagcttttattaag

SEQ ID NO: 6282 - DNA, 284 bp, Glycine max
  unsure (1)..(284): unsure at all n locations
  Clone ID: PAT_MRT3847_105682C.1
ttcttctcttgcggctanggttttagcgcanttcttctagatntaaggnagatgggtanggaaanngttcacatcagtattgtggtcattggccatgtcgactctgggaaatcnactaccactggtcacctgatttacaagcttggangcatngacnagcgtgttattnagaggtcgagancgnatcngctgagatnaacgagaggncttnnagnatgcctnggtgctggnctaacttaggcgaacntgananagggtcnncnntgnanatgcttgtngaantt

SEQ ID NO: 6283 - DNA, 291 bp, Glycine max
  Clone ID: PAT_MRT3847_105683C.1
tctggatagcggacggtgctcatgacatcttcaaatgtgctgctgtgactgaaactgcgcttgctgccgcatacaaggcacgtatgagcagatagacttcttgaatgaactctacctaagcccaacatggtcactgccggctctgatagcccaaaggtaccaccagaggtgactgccgagtacacaaaacaaggactcctggagactgttccaactggggcgccaggaggtgtgaatctgcctggtggggctaaagtgaaaaaataatctaccacataaagctgtataaaa

SEQ ID NO: 6284 - DNA, 304 bp, Glycine max
  Clone ID: PAT_MRT3847_105684C.1
ctttctttaacccaacctgatgctcaactgtaggggggacagggagggtaggttatttttgaagccttgagcgcgttcatttgtacatggcgatgtccataagccgttcatcttgtcactacgcattctcagaatgtttttaaaagccaatagcagacatagactgatgtgacttcagaaagacaacaaagttgaaggggggagtggagaattcaaggatgaatccttgttgcacaacaccttgaggagaaagagggccaaaagctcatgatgatggctacactgtgatgaagaggtaaagact

SEQ ID NO: 6285 - DNA, 550 bp, Glycine max
  Clone ID: PAT_MRT3847_105685C.1
ggttgagcagaaacttattttattgttcaaggagaaacggggaaaagttcattataataaaacgtgaatattatgctcgctttaacttacatactgacacgctgatatctatacttaaaaagggctctttgacactaatcaagaacagcccatgtgaatcttttgtttaatcgacttatctcaattttgggtaccacctccggttccactgccagctgcgggacctttctcatacatggtttcacccgtgttaccacctgaaacgtggtgcatatttggtatgatggggttacaaatgctctccaactgcttcattttatactaaaattccacatgctgaacacgttggtttacatctagactttggataggctgctgaatcgcatcttcaattttcttattatgatcagaatacaagctggaagcaatcatgtcatacttgattgccttcctgatgttgtaggcctatttcttcaatgaatttttgccctccactttcttattatgctactcctgctgagactagtgtttgtaataactcacatgggtt

SEQ ID NO: 6286 - DNA, 378 bp, Glycine max
  Clone ID: PAT_MRT3847_105686C.1
ttcttacgcgtccgcagacgcgtggtggtcactagctggatggtagtaatggccatgtgctatcctagatgataacccggatggacagaggaggacattaacgtaagattattgctgatgggcaatggcaataacatcatccttgcactgagtgttatggacacacgggtgtgtgacactcttatcacttaacccgctgggctcaggatgaattactactttgtggaacgggcaatgaaaaagctggaatggtgggtcatgatcgacagagtcatattactggatggcatgtatatgccataactagaaccagagatagttgcgtatgtcctaacggggacctagatcaaacagcgcatgcatctgactctgatcata

SEQ ID NO: 6287 - DNA, 310 bp, Glycine max
  Clone ID: PAT_MRT3847_105687C.1
ccacgcgtccgatgacttactgatacggaaccagactcaacagccacaaagacaaaaagggaggtgcaaatagaggacaaacccaaaaggaagctcacaaaaccagcatacctcagtgactacgtatgaagaaacggacaaaagctcatgatccttgctatccttagtgttgtctgctatcaggggacaacctaacaaattccgttagtgtaatattccttgggaatcaattagtacaattctattactaggaagcactataaataaacaatgtaataagcaagcaagcaatgaaaaatctcgatactta

SEQ ID NO: 6288 - DNA, 299 bp, Glycine max
  unsure (1)..(299): unsure at all n locations
  Clone ID: PAT_MRT3847_105688C.1
gtcgcangcacncttacgtaanctcggaattcngctcgagaacagantcaattccncnnctntcntnctcccnatccacantatnnggatccggatcccngccngcntgccacaacaacaacaccatacgncgtcgtcaaatannatttttaacanccatcctcctcccngtatgntgccaccttgcggggncttnaanagggancnctatatggacnctgtnncnnanatngtnngggctattaaggtccttctcnacgtgttcntnangatngagcatatnaanatgganatnncca

SEQ ID NO: 6289 - DNA, 392 bp, Glycine max
  Clone ID: PAT_MRT3847_105689C.1
gggcagaaataaaaacattttcccctaattttaccttggaacattttttaaaaatattttttccctcatggcaataacaaaaaatcagggtggagagataaaaaaaaggggaaattaaaaatttttttcgcccgattattattaaaaacaaaggggggggcagggtaaattattatccccggggggggctttattattaaacgggagcgcgtttaaatcaaacgggaggggggggcaaaaccaccaggaaaccatgttggcgcccctgtcctcaaccacggggggggaaaaaccccactccctggggcagccttcggggacaaaagggggagggcgcgggtttttccccgttggggaaaaaaaccgccccctgggggttgtggttgtggggg

SEQ ID NO: 6290 - DNA, 416 bp, Glycine max
  Clone ID: PAT_MRT3847_10568C.1
aatagctaatccttaaagaacacatagctctggtggtattgattactggccggccacgccaaatgtgcactcaaactgaatagaaaccccactactcgtgcgtaccaagatttggcttggtttattcataaagcgccgtaattaaaatatcttgacatggcctcgcatgccttttggctgacccacgctatgtagctgtggaccacacctttcgcaagggcttggctctttttgggcgcccacgctccattgcggcacgtgcggcctttataagccgcgggggggttgtatcctgcggtctggccttactttttcagctcacgtatggccctaccggtggctccaacgcccccgtggtttaagaaggccgcgcatgccttaatggctgctggtcgctcgatcagtgccaagccctt

SEQ ID NO: 6291 - DNA, 270 bp, Glycine max
  Clone ID: PAT_MRT3847_105690C.1
tccacatccatatattggataattaataatcaaaatgaagcatttgtctatttttagacattagttgattttctttaaataaagtttttaattttgaggcttatgagaagaaggaaaaaaaaatctatattgatagaatcaattatcccattatagtataaatatttctaacctaaatagggttacctagctagtgtgcgtgatagtgtagacatacaaataaaataaaagcaaaaaacaagtgtctctctccaatatatatcctacttt

SEQ ID NO: 6292 - DNA, 1178 bp, Glycine max
  unsure (1)..(1178): unsure at all n locations
  Clone ID: PAT_MRT3847_105691C.1
gactacgggaacttggccagctggagcaagatcttgttttcggagatgcaacaacaaaagatgtgatcaaattttttaccatgaaagaagatataacccatgaaaataagttgcgcctgctaatgattcttgcatctgttnagtcggtagaaatttgagggagaaaagggtcagaatttgatgaggctagcaaaattgacagaagaggatatgaacattgtgcccaatttcagaatgcttggaggacaaccagtaaccaaaaaaagtttgaccgctgcttttggtcttaagtttgatatccataagaagaagcatgctgcaaggaaagagcgtcctggtgaagaagagaaatggcagctatcacgcttttatcccataatagaggaactccttgaaaaactcatgaaaaatgaattgtcaaaggaagattatccatgtttgaatgatccaagtccatcttaccaaggctcacctttttctggtcctgtaaaccaaaatcctcactcaatgagatcaagacgaacaccaacttgggctcgaccacgaggttctgaagatggatattcaagcgattcagtgcttagacatgcatcgagtgatttcaggaggatggggcaacgaatttttgtattcattgttggtggagcaaccagatccgagcttagggtttgccataagcttaccgaaaagctaaagagggaaattattctcggctcatcaagtattgatgacccagcacaatttattacgaaattaaagatgataacgacgcatgagctttcattagatgatatccagatatgatgttaagggtttgagaactaaaatatgagcttctggttacttatatatatatatatatatatatatatatatatatatatatatatatatatatatatatatatatatatatatatgatatgtgtgtgtgtgttgtaatcatatagtttaatcatcttgatattacaaattctttggaaatttaactccttgtgaacagactaacaggaataatcttcattggttactaacgagaataactttatttttcagtgaacagattggtttagacaagaaaccagttaagctagagaacactttgttgtaaacaataatactttcaactcgctaaaatccatttagtggtgggaatttgagttttagattcaagcttc

SEQ ID NO: 6293 - DNA, 327 bp, Glycine max
  Clone ID: PAT_MRT3847_105692C.1
gtagatgtccaatccgttttccttttgaacaacttgggaaccgtctttcaaactgaaaaaaactcacaactttcttcagtctcaacccccctggtatgttggagccacttaaagtctagcactccctgggccctgggggaccccaaggcggatatattcccgggagccataaggcacggctggggcattcaatggatcctcccatacctggtagcccaggtttggatacacatctgcatcataccgaccaagatccgaaccgaggtaatgttctgtgcccttaaacgcagtatcaggggcgaagcattacgacgaacccgtgaatac

SEQ ID NO: 6294 - DNA, 145 bp, Glycine max
  Clone ID: PAT_MRT3847_105693C.1
acggaaaattgttaaaacgtcatattctgtccactttttcctctttttatgcatgctactttaagtataatggcattgtattcaaccatcgatttagcccacaattggaagtgaaactaatttgagaacggaaaattgtctagta

SEQ ID NO: 6295 - DNA, 219 bp, Glycine max
  Clone ID: PAT_MRT3847_105694C.1
atttgccctctctgcagaaatcaaaagatgttaacccatgattcctcctccatcttcctgtctcttccagttcctcctcctctttcctctcatactctcccattccgattccgattccggtcaccccgtgctcccgcgcccgctgatcgtggagtacccgcagttcgacgcgatgctgcggtgccgcgcgtggcgcactacgcagcaagccaacaacct

SEQ ID NO: 6296 - DNA, 240 bp, Glycine max
  Clone ID: PAT_MRT3847_105695C.1
agtgtaacttctttgtttgggggaagtcagttgtgtcaagtgatgcttttctgcggcacacaggtgaaaggatgttttcttatgcatacactaatagaaatgcaccatataacctctgcaggtgtcttggcggattcttgccgcttcctatgacttatactgattggcataccacatgtcaactgatactgactctcgtcgtgctatgtgaaacaagacttactggatctttacttcttt

SEQ ID NO: 6297 - DNA, 555 bp, Glycine max
  unsure (1)..(555): unsure at all n locations
  Clone ID: PAT_MRT3847_105696C.1
aaatcataaattttcaaattaaaaaaaatgtaattttaaataaaacaatatagtgtgtggtctctcttgatgtacaacctcgacggacaagaaacaatcattagctccatcactatcctacaaccaacaaaggaatataaactgattttttttcttttcatttcaatgaatatacacaaagcctgaagaataaaataatagagaccctaaaaatgatatcagggtctagccaagtaacctataatcaatagctaacagctacatgtaaatgatagcaaccaattaagctcatcgtgcccaagaaacagaatcaatttcatcccttgccgctttatatagttcaagccttttagcacattgttgcctccgctccatcaaggcagggttttcatctaacaactgtgatagctgtttagcctctttcttccctatttgtgtgtagaaatggtttagcaatgacagttttgcttctctgacctgancataaaccacagcctttggaatagtgttcctaagagtgtctgataccataccgatataggaagatacgtttga

SEQ ID NO: 6298 - DNA, 804 bp, Glycine max
  Clone ID: PAT_MRT3847_105697C.1
aggagagggaaaaaatgaggaagttgaagtattatctcaagttagaagaagagagccaacaaaaattgcgtgaggcggaggaagctcggaaacgtgaagatgctgaaaggaaaaagaaggaagaggaggagcgcctgcgtaaattggaggagatagctgaaaagcagaggcagagagagagggagcttgaagagaaagagaaccaaaggagagaagcattgttgggtagagctgctgctgaaccagctcctcctgcccgtccattggaatcgggatctgctgctcctgcggcagctgccgccgccgccgctgctccaacacctgggaaatacgtacctaagttcaggcgagagagaaccgaaagcgcaggagctgcgcctcctccagaaacagatcgctggaacagtagcagcaggccagatggtgacaggtggcgaagtgatgatcggagaaccgcatttggttctggtggaggttcaaggtcatcttctacttggtcatcttccaggaatgcccgttgaacattttgtggcctgatttattgctggcgactttttgggagttctctttgtaccgagttcttaaatttattatctttttaatacttacgaagtcctctattggattggggagcctgccaacaaaattttctatttatgattgagtggattgcatatggtattcgaagtttcgattagacgagtacttccgaacaatttttctattttttgataatgttgagccttcgtagaaaatgaagggtaaccgtatactttattttctacgaaactttttgctgcctct

SEQ ID NO: 6299 - DNA, 1527 bp, Glycine max
  Clone ID: PAT_MRT3847_105698C.1
cttaccaaagttggggcccaagaacacagagggctcttgctcgaacatcattattcagaaaggaaagaagaccaagacgacaagcttcttgaaatggaacgggaggaggagtcgaagaggctaagactgctgaaaataactgaagaagcggaacaaagagcgcttgcccctgagtttgagcagaggaaaaatcagatcatacagggggagatagaggagagagaaaatgaagaagcacaagcattactccaggaagctgaaaagcgtattaaaaagaagggaaagaaaccaatcatagagggggacaaaatcaccaagcagacattgatggagttgactttgactgaacaactccgggaaagacaggaaatggaaaagaaactgcagaagttagcaaaaaccatggatcatttggaaagagcaaaaagagaagaggctgctcccctgattgaagctgcatatcaacagcgtctagtggaagagagacttcttcatgatcgtgagcagcagcaagaggttgaactgagcaaacagaggcacgagggagatctcaaggagaaggagaggcttgttcgcatgatgggcaataaggagatatatcaagcaagggtggttagtcaccgccaagcagagtttaacagattgagaagagaacgggaagagcgaatctctaggattttacagtccaggagacaggagagggaaaaaatgaggaagttgaagtattatctcaagttagaagaagagagacaacaaaaattgcatgaggaggaggaagctcggaaacgtgaagatgctgaaaggaaaaagaaggaagaagaggaacgcttgcggaaattggaggagatagctgaaaagcagaggcagagagaaagggaacttgaagaaaaagagaaacaaaggagagaagcattgttgggtagagctgctgctgaaccagctcctcctgcccgtccattggaatcgggatctgctgctcctgctgcagctgcagctgccgccgcagctccaacaccagggaaatatgtccctaagttcaggcgacagagaactgaaagcacaggagctgcgcctcctccagagacagaccgttggaacagtagcagcaggccagatggtggtgacaggtggcgtggtgatgatcggaaaagtgcatttggttctggtggaggttcaaggtcatcttctacttggacatcttccaggaatgcccgttgaacattttgtgctctgttttattgctggcagctttttgggagttctcttggtactcttcccagtttacgttctagaattatttttgataccgagttcttaaatttattatcttattaatacttacgaagtcctctatttgattggggaacatgccaaaacaaaatttgattgaatggattgcatatggtaatcgaagtttcaattagacgagtacattcgacctatttttctacttgttgatattgtcgtagaaaatgaagggtatcattagtatactttattttcaattggaaaccttttgcttgctct

SEQ ID NO: 6300 - DNA, 361 bp, Glycine max
  Clone ID: PAT_MRT3847_105699C.1
ttatatttttttgcccaactcactatttagtggacggggttgttttgcttctgtaaactgtccaataacagaacctctaatgagtccacgctacagaaggacaaactgtgttgatatctaccaatcttattgatcaggttttagcccacaaggaaatgccaaatatgatcggcgggctaccagcaaattgtaagaccaccatactctgcaagcttatacttggagagatcgctaccacaaattccaccattgaggttaatgagaagacttgtgtgaaacaacaacattagcttcactgtatgcgaaggtcaaggccatgacaatattcgaaccttgtggaagaactacttttaaaaaacac

SEQ ID NO: 6301 - DNA, 395 bp, Glycine max
  Clone ID: PAT_MRT3847_10569C.1
ctcctatccactagtaacgggcggagtcgtgctggaattcgcccttcaatcagccctcctgctcagggccagctcaagagactccatgctaccgctacaattcctagcaaccagcctcctagactgaatatagccctaggcgacattgacaagcctctctcttacctggtacattcaccttactaatcatggtttattgaggctaacaccagatacacccgtaccttgactgtagataccacatccttattcagtaattcaaaatcaccttaaactctatctaatgccacacatgatgacctttatgacagactatatactcaacaagctgttaaccactttctagctgatacattacttatacatagcatatctcctgttacatccagacttga

SEQ ID NO: 6302 - DNA, 119 bp, Glycine max
  Clone ID: PAT_MRT3847_1056C.1
agccatagggcctggatctaaggatcggaggtgccctacttgccgacgcccgctcccacctgcctgaggagatctcaagggttcatatcagatacgataaacttacactgcccagctcc

SEQ ID NO: 6303 - DNA, 400 bp, Glycine max
  Clone ID: PAT_MRT3847_105700C.1
gggaaaaaaactggcacaaaaccacattgggacaaaaacccccccccaaaaaagagggtggaaaaaggccccggctcctaattttttaagcatttaaccaaccccaacggttttggggttcaaaacaagaaaccaaatcccaaaagggttaaaacaaatcccccccccaaacaaaaattaaagggggggtaaagcaaaccttttaaaggctaacagaaaaaacccgggggcccccaacagggggtttaaaaacacaagttttggaagggggacccattacccacttttttggggggcagtctacccaaaagggccttattgggacagggctctgcatccccaaaaaaaaaatccccatgggccttaaagggcaaaaaaggcctatgggtttggggggggc

SEQ ID NO: 6304 - DNA, 425 bp, Glycine max
  Clone ID: PAT_MRT3847_105701C.1
cagaacaacaacacataacacacttctcttatcccctcaaaactataataatttatcatcttcactcatcaacagagaaagtttaaactactatggtggtgatgaaaatgcagattctcgaacccttgacctatttccacacaagagggatgaccaagatggaatttctcttgctgagaggaaatcatcatctatgctctgtgctagtgcttctatggacactgaaatcacctccaaccagttttttgagtttcttcctttaagaaactgaaagggatcatatcactttatatatatggtagctaggctcgctttgtagatggtgggttgtagatgtctaccatggccatcttggagaagaaattaaaatgtgacaaaggaacgaaaggtgagaaagtgagaaccatatataaagatttgttacc

SEQ ID NO: 6305 - DNA, 405 bp, Glycine max
  Clone ID: PAT_MRT3847_105702C.1
ttgctcacgcagacgggatactacatgtattggtctggccggttcaattaacaacgggctggggcacacaaaaacatgtagtgtgaccattctattgttcggtggtgccgattgaccacactcgcggtggtgatcatggactgggacgataacgactcgacatgtcttgagctggggcgaggaactgtggaagctctatgggacacacatgttgttggcttgacgcgcgggacggggggttgtactactatgttccacatgagcctaaagcgcaaactcttttataattgggacaacagcggtgggaccttgcatcagacatgcaagggtgagtagaaccttcataacatagttactgccatagaatctagcgccttgtatgaggcgaccattataggaggagat

SEQ ID NO: 6306 - DNA, 318 bp, Glycine max
  Clone ID: PAT_MRT3847_105703C.1
ggacaggtagggtaatggcaaaccatggcactattgccagctaatatactgtccaagctcaaaggatgacaggcacttattgaaagatctatgaagatgaccagctctacactacaatacacatacaagctatatctggacttcctaaatctaagctgatgggatacgaacaagaattatcatcattacgccaggagattgaagataatcttgctatggctggacaggcgatgaataaaacgctaacacaaaagccatttgcgatagagcatgggggcgatagatcattgtctcattctccaatggacagaacccaca

SEQ ID NO: 6307 - DNA, 206 bp, Glycine max
  Clone ID: PAT_MRT3847_105704C.1
ttcccgggtcgacccacgcgtccggagattcaaagcacaacacgttttccttttctgttgcaatgcattgtgctaatacaaaaaaacaacacggaatttctagcgtattgatataaatggggcttgccttggaaaactagtgttgttttttttcttggtagtgcacttgagtacgtgcgactgttgggcgaacctacattctgcaa

SEQ ID NO: 6308 - DNA, 811 bp, Glycine max
  Clone ID: PAT_MRT3847_105705C.1
ggccgcccccatcgcgacccgcgcctgcccctcccccgtccgcggcgccctcgtctctcccccgcagagctcgctactcccccccgtgagtctctgtccgcagctcgattgcgccgcgtctcgtggccagtcgcggcgtccgcgagagtccggcacaaacgcagaaaggaaggagcgagggaggagcaacaaagccaccatctttccctctttctcgttgattctgtttctgggtttcgctccgttttcctcggaggcggtgctcgcgacccgtttccgccgctaaaatgggttgcgcgagctcgaagaagacggtcgccggagccggtgattctacgccggaggggccgtgcgtggtgccttcaagttctcggaggcggagcaataatgggttggggagaaaccaaaacggcgtcgtcggggaggcgcgtgagggggaggcgcgtgaggaatggagcaaggggagcttgagagaggggaatgggtctgtgtctttaatgagtccgtgtaagtttgtggaggctgagcaaaatgcggctgggtggccaccttggcttacatctgttgctggggaagccattcaagggtgggtcccactcaaaacggattcttttgagagattggattggattggcagaatgcggctgggcagcctccttggcgtacgcgtgttgctaacgaagccattcaagggtgggtctcactcataacagattcttttgagagattagataaggtacctaaacaaccccatttcccaacttgttagtaaatttcaaagattggataaggttcatatttaaaaaacatt

SEQ ID NO: 6309 - DNA, 438 bp, Glycine max
  Clone ID: PAT_MRT3847_105706C.1
atctctcgagggaagggtgagtagggcttacccgtggaatggggccctggctcctgcatagtgcttgtttgtcaccgaagtgctatattgcatgtccagaccgacaggctaagcattatacgaaagtatcttagagtaatgagacacgcgaagtctctagatactatgtttgacacagtgcgtgggaccgtgatagactgacaattaattggagtatgaatcacagaatactgacttacatgtcgtatgtagcagctgacatagagtatgcacatacgggtaatgaactactaccgtggcatagacaaaatccaaaacacgtgctgaaacgtactattaatatggaacaagaaagatgaccctgctgtattactatgtaacagagtatggttctggtacaaaaggccctatcatacactacgagctagaaccagcgag

SEQ ID NO: 6310 - DNA, 381 bp, Glycine max
  Clone ID: PAT_MRT3847_105707C.1
cccacgcgtccgcccacgcgtccgatagcttcaaggttttaaattggggttgtggttttgtcacaatccctgatactgcttgaaattgtggataaatgccgccaatgtggttgccattgatccaaaacaatttaacttcgtttccttttcgataacaaaagtacttatataattgcttatatgataaaactcttgattgcttatatgatgaacatttcagaagagtttgattatggcttatttgttataacatagatgcttagtgtttgtttgggagagttcacaaaaacagcttatgatagctttgaggtttttagttgtggtcacagtccttgatattgcgagaaattgcagacaaatgccagccaaaatcactgtcgc

SEQ ID NO: 6311 - DNA, 1083 bp, Glycine max
  Clone ID: PAT_MRT3847_105708C.1
gtttagttttttgtgattgttgaatacattgatgagacatggaagaacaaccccattttaccttctgatccttaccaaagagccttggctcgtttctggtccaaattcattgatgataaggtaactcaacatttcaaaaatcttcttagttttcatgatttgtgctgatttgtcagcaaaacatcacgatgaaatctatatatgtgaaatctttctggtgtggaatatatatgtgaaatctttgaatatgttagagaactcaaaagtcaacagccaaccatgatttttttttaatgtatcaactttttgtaaaacaatattagtgatttgaaactttatggaatcatatactatgattttgggagaaattttattttattttactatttttatctggggtggggggattctgacacgtatttgtttctatataactcgatctaaattctgtttgtcctaatcactttatgaaataattactaaatattgtgatttgcgaaatcagattgtgggtgctgtatcgaaatctgttttcacggttgatgagaaagagcgtgagaagaatgttgaagaaacatatgaggctcttcagtttcttgagaatgagttgaaggacaataagttttttggaggagaggaatttgggttggtagatattgcagctattttcatagcattttggattccaatttttcaggaaatagcagggttgcagatattcacaagtgagaaattccctaagctctacaaatggagccaagagttcatgagccaccctgttgtgaaagaagtccttcctcctagagacccactttttgccttcttcaaggcccgctatgaaagtctttctgcttcaaaatagacttatttaagatatttgttgagttatggctgtttgaatttcatgtcaaattgatactagctatatgtaaatccctggaagaaaaaaaatcttaggatcttgtttccattttagccattttagttgataaagaaattcattttttccaaataagttttgtagtgagaagcctttgtcttcctttataaaatccttcaacatgcataatgttattcgtagag

SEQ ID NO: 6312 - DNA, 994 bp, Glycine max
  Clone ID: PAT_MRT3847_105709C.1
aagggacgacagaaggggataaatctcttgaattgattgttgtaagactttgtaattgaggtgctgcaatggcttcaagtcacgaagaggtgacccttttgggagcaattgcaagcgcatttgcttgcagggtgaagattgccctcaagttgaagggagttaaatacaaatatgtggaagaaaatttgaggaacaagagtgaactgcttctcaaatccaacccagttcacaagaagattccagtgtttattcacaatgagaagcccatagcagaatcccttgtgattgttgagtacattgatgagacatggaagaacaaccccatcttgccttctgatcttaccaaagagccttggctcgtttctggtccaaattcattgatgacaagattgtggatgttgcacgggaatctgttttcacggttgatgagaaagagcgtgagaagaatgttacagaaacgtatgagggtctgcagtttcttgagaatgagctaaaggacaagaagttctttggaggagaagaggttgggttggtagatatagctggtgtctacatagcattttgggtccctttcattcaagaaattgcagggttgaagttattaaccagtgagaaatttcctaagctctacaagtggagtcaagaatttgtgaaccatccagtagtcaaagaaagccttccccctagagacccatgaaagagaaaaactagaaattataaaattcattcattttattttcgtattttaaatgagaatcaatatctcagaatacagggcctttaattatcaaaaaaaattgtataaaaagaaggatttgataaacttgtcgcccaataaaaaattgtggtttgaatttcaggccaatttgaaacaaaatgtaatttagtaacctgggaaattaggaaatccccaaggaacaaaaaatcctaggattttgtttcccaaaaaaaaaaaaaaaaaaaaaaaaaaaaaaaaaaaaaaaaaaaaaaaaaa

SEQ ID NO: 6313 - DNA, 470 bp, Glycine max
  Clone ID: PAT_MRT3847_10570C.1
cttgggatccctttaaaagcgggccgcccctttttttttttttttaccccaatacaatatccaataattattccgggcttaataccaccatataaacaacaaggtgggccattgactataccaaaattaacaaggggctaagcccaaatatacatattacaacctgcctttgaagggccgccccaagttggcaccagcccccaaggtagtctttggccaagtaaggcgataccaacatttaagaatcccattttaggcaagggaccattagcccctccaccattaaaggcatttttaaattaattcccctttatatttcttagggaaaaaaattttggacccttttggtaccctttttccataattccaaatggcctaaaggggtcaaaagggaaatggatggccaaaaattaacaaaagccctaagggtaaacccattcatggttctttccctttcccctgggggattt

SEQ ID NO: 6314 - DNA, 1203 bp, Glycine max
  Clone ID: PAT_MRT3847_105710C.1
tgcaatggcttcaaatcaggaggaagtgacccttttgggagctcctggaagcccatttgtgtgcagggttcatattgccctcaagttggagggagttcaatacaaatttgtcgaaagaaattttgaggaccaagagtgaactggcttctcaaaaccaacccagttcacaagaaggttccagtggtttattcacaatgaagaagcccttagcaagagtctcttgtgattgttgaattccttgatgagcctggaagaaccacccccattcttgccttctgatccttaaccaaaaagccttggcttcgtttctggtccaaattcattgatgataaggtttttggtgctgcaatggcttcaagtcaggaagaagtgaacccttttgggaactactggaagcccatttgtgtgcagggttcatattgccctcaagttgaagggaattcaatacaaatatgtcgaagaaaatttgaggaacaagagtgaactgcttctcaaatccaacccagttcacaagaaggttcccagtgtttattcacaatgagaagcccatagcagagtctcttgtgattgttgaatacattgatgagacatggaagaacaaccccatcttgccttctgatccttaccaaagagccttggctcgtttctggtccaaattcattgatgacaaggtttttggtgcttcatggaaagctgttttcacagctgatgagaaagagcgtgagaagaatgttgaggaagcaattgatgctctgcagtttcttgagaatgagataaaggacaagaagttctttggaggtgaggagattgggttggtagatattgctgctgtctacatagcattttgggtccctatggttcaagaaattgcagggttggagttattcacaagtgacaaatttccttagcttcaaaagtgggagcaagtattttttgaacatttaaattgtagatgaaagtctgccccctagagatcctgtttttgcctttttcaagggtcgctatgaaatcctttttacttcaaaatagatttgatgatgtggtgtgagacgtagaatttctaagaattatgtgtctgttattgagtttttgctgttaaaatgatgcttgtaagttgtaatctagaatttctccatgtcaaagaaatattccaaggttgttattgacattttgctatttcaatgaataaattatattgcatct

SEQ ID NO: 6315 - DNA, 1977 bp, Glycine max
  Clone ID: PAT_MRT3847_105711C.1
agaacaaacagtgtttcgaatagattatcctaagtctttgggaatagtgctgcaatggcttcaagtcaggaggaggtgacccttttgggagctactggaagcccatttgtgtgcagggttcatattgccctcaagttgaagggagttgaatacaaatatgtcgaagaaaatttgaggaacaagagtgaactgcttctcaaatccaacccagttcacaagaaggttccagtgtttattcacaatgagaagcccatagcagagtctcttgtgattgttgaatacattgatgagacatggaagaacaaccccatcttgccttctgatccttaccaaagagccttggctcgtttctggtccaaattcattgatgataaggtaattcaacttttcttctttccttgttttgttcttatttgtcccctaaacaccacctttcatgatatctatttgtatgttggaataagttagagaaacatttaaaaaaaaaaattgaataaattctattcattaattgtaacaactttgtctaaaatcgtattaattggggtggggtattatatatgtttcacagttggttgtacagaaatatcagcaacacaatttttaacatgcctttttttcaatcattttctattattaattaaaatttattaaaaataacaagtttaagtgaatcacacttttaaatctttcctaatcttgtaatttttaatcaactttattcaatagtatagttgttagaaagagtgtagagattgttttgctagcagttagcaccactttttatgctatatatataacccagttaagtctgtcctaattataatataaattaagcactaataaatactgtgatttatgaaataggtttttggtgctgcatggaaatccgttttcacagctgatgagaaagagcgtgagaagaatgttgaggaagcaattgaggctctgcagtttcttgagaatgagataaaggacaagaagttctttggaggagaggagattgggttggtagatattgctgctgtctacatagcattttgggtccctatggttcaagaaattgcagggttggagttattcacaagtgagaaatttcctaagctccacaattggagccaagaatttttgaaccatccaattgtcaaagaaagtctgccccctagagatcctgttttctcctttttcaagggtctctatgaaagcctttttggttcaaaatagatttgatgatgtggtgtgagacttagtatttctaagaattatgtgtttgttaaaggcttctatgaaagcctcactgcttcaaaatagattcatgtatgtgagactcagaatctctggggaaaattgtgtgtggtgtggactacttgttttgtttgtcattgagctatatcgctgttaattaggattttgtttcaaaatgatgcttataagttgtaatctaggatttctccctttgaaatcctaggttgttcttgacattggtccttatggttcaagaaattgcagggttggagttattcacaagtgagaaatttcctaagctccacaattggagccaagaatttttgaaccatccaattgtcaaagaaagtctgccccctagagatcctgttttctcctttttcaagggtctctatgaaagcctttttggttcaaaatagatttgatgatgtggtgtgagacttagtatttctaagaattatgtgtttgttaaaggcttctatgaaagcctcactgcttcaaaatagattcatgtatgtgagactcagaatctctggggaaaattgtgtgtggtgtggactacttgttttgtttgtcattgagctatatcgctgttaattaggattttgtttcaaaatgatgcttataagttgtaatctaggatttctccctttgaaatcctaggttgttcttgacatttgctatttcaaagaataaatatatagcatctttctatttctcccaagaagagaa

SEQ ID NO: 6316 - DNA, 1796 bp, Glycine max
  Clone ID: PAT_MRT3847_105712C.1
ctctaagtatttaattaacgatggaagtcttctcgacagcgaaggtattttttttctatttgtttctggattgttctcatgattttagtgcaaaaaaaaaaaaaaaaaactaatacaaaataattcttagtcaacatcgcgtaggctgaatattatattatactaaaatattgtactaaaataatctttctagctctatatatagcccaccaagccttagcaatttgagaacaaaacaagtgtttcgaatagattatcctaagtctttgggaatagtgctgcaatggcttcaagtcaggaggaggtgacccttttgggagctactggaagcccatttgtgtgcagggttcatattgccctcaagttgaagggagttcaatacaaatatgtcgaagaaaatttgaggaacaagagtgaactgcttctcaaatccaacccagttcacaagaaggttccagtgtttattcacaatgagaagcccatagcagagtctcttgtgattgttgaatacattgatgagacatggaagaacaaccccatcttgccttctgatccttaccaaagagccttggctcgtttctggtccaaattcattgatgataaggtttttggtgctgcatggaaatccgttttcacagctgatgagaaagagcgtgagaagaatgttgaggaagcaattgaggctctgcagtttcttgagaatgagataaaggacaagaagttctttggaggagaggagattgggttggtagatattgctgctgtctacatagcattttgggtccctatggttcaagaaattgcagggttggagttattcacaagtgagaaatttcctaagctccacaattggagccaagaatttttgaaccatccaattgtcaaagaaagtctgccccctagagatcctgttttctcctttttcaagggtctctatgaaagcctttttggttcaaaatagatttgatgatgtggtgtgagacttagtatttctaagaattatgtgtttgttaaaggcttctatgaaagcctcactgcttcaaaatagattcatgtatgtgagactcagaatctctggggaaaattgtgtgtggtgtggactacttgttttgtttgtcattgagctatatcgctgttaattaggattttgtttcaaaatgatgcttataagttgtaatctaggatttctccctttgaaatcctaggttgttcttgacatttgctatttcaaagaataaatatatagcatctttctatttctcaaaaaaaaaaaaaaaaagctccacaattggagccaagaatttttgaaccatccaattgtcaaagaaagtctgccccctagagatcctgttttctcctttttcaagggtctctatgaaagcctttttggttcaaaatagatttgatgatgtggtgtgagacttagtatttctaagaattatgtgtttgttaaaggcttctatgaaagcctcactgcttcaaaatagattcatgtatgtgagactcagaatctctggggaaaattgtgtgtggtgtggactacttgttttgtttgtcattgagctatatttaattagtatttaaggatatttgttgaacaacttgtgtcttgttgagttattgctgtttgaatttcatgtaaaatgatactagctatatgtaaatcccaaaaaaaaaaaaaaagaatcctaggatcttgttttcgttttggccatttcagttaataaagaaattatatttttcgatataaaaaaaaaaaacacacataaaaaaagataatgaaaatatacatataa

SEQ ID NO: 6317 - DNA, 460 bp, Glycine max
  unsure (1)..(460): unsure at all n locations
  Clone ID: PAT_MRT3847_105713C.1
atgatcatgattagctatctcgatcgaactgtccaaggtcctgtcacaaaagggtaacgttaatatgtatggtcgctacccgcgccgctgatgacgggcggcaaacactaggccggggtaatagtggcagggtagcacgtatgaggggcatgcaataaacacagcaccgggagcttttgggttacaggaagaggcataatgtttgtccttctagatatcgcccgttgggctaagtgtcacattggatacacgcatggtgcggttgaaccagttatacttgaaattaagaacggatacaagtttgtaaggtgagcagtttgaccattttacattgttatttgtacaaaaaaggcggtantgcgtacaatcaaggccagtatgagtccaacaacaatcgccgtaaaggagcttgatggcggtacaaacaggaaaatggttaacggctacttaagggttatac

SEQ ID NO: 6318 - DNA, 1293 bp, Glycine max
  Clone ID: PAT_MRT3847_105714C.1
ctatacccatgatatgtatataggtatatcttttctaattgattacgtatctgctgaatacctagtcctgattcccggctctataaaaggagaataccttaggaattcatcagaaacaaacaaacaatttaccagctatacttgttccttttgaaggttagaagtgctacaatacaaacaatggcagctactcaggaagatgtgaagcttttgggtattgtgggaagcccatttgtgtgcagggtccagattgcccttaagttgaagggagttgaatacaaatttttggaagaaaatttgggcaacaagagtgatttgcttctcaaatacaaccctgttcacaagaaggttccagtgtttgttcacaatgagcagcccatagcagagtctcttgtgattgttgaatacattgatgagacatggaagaacaaccccatcttaccttctgatccttaccaaagagccttggctcgtttctggtccaaattcattgatgataagattgtgggtgctgtatcgaaatctgttttcacggttgatgagaaagagcgtgagaagaatgttgaagaaacatatgaggctcttcagtttcttgagaatgagctgaaggacaagaagttttttggaggagaggaatttgggttggtagatattgctgctgtcttcatagcattttggatcccaatttttcaggaaatagcagggttgcagttattcaccagtgagaaatttcctatactctacaaatggagccaagaattccttaaccacccttttgtgcacgaagtccttcctcctagagacccactttttgcctacttcaaagcccgctatgaaagtctttctgcttcaaaatagacttatttaaggatatttgttgaacaacttgtgtcttgttgagttattgctgtttgaatttcatgtaaaatgatactagctatatgtaatttagtaacctgggatattaggatatccccaaggaaaaaagaatcctaggattttgtttccattttggccatttcagttaataattaagaaattctatttttccttgttaaaaaaaaaaaaaaataaaaaaaaagaaatctgtaaataaaactaaatttaaaattttttatttttaattggggggtccgttaaaagtattcaagcttacctaccctctccttccaacttcttgtctcttttttttcttattatgagatgcaatctaatatgagggaaatttatacttaaccgtggtctccttcatatcattttcctcgggcatcatcctcttatataccccaatac

SEQ ID NO: 6319 - DNA, 323 bp, Glycine max
  Clone ID: PAT_MRT3847_105715C.1
aaaacagtggggaagctggtagcggcgagctgctggcgaagccttgcgccgcgtgctcactacccctgcatgcccaaatatgccaagggcgagagtggaagcaccgggcaagagctctatgagtccaccggtgctctctacgatggcggacagagctgcgctggctgcgccggagccggggagaaggcctataaacgcctgcccggggtccgtgaagccatcgatgacgccctaaacaaccgcgcccacgtaatgaactacccctgcttcgataactgaagtaacccaagcacactcctacgaatacattaattgactctgct

SEQ ID NO: 6320 - DNA, 890 bp, Glycine max
  Clone ID: PAT_MRT3847_105716C.1
ttttcttccacacgtccgctcaagccactcctcactggaagtcgaagtcgtcgcttgccaagtgcatttcttctcatttcttgctgcttccgcgaatggcccgaaacataggaggattactggcgctacttctcgctgtttcgatctgcggagccgtcacgattcctggtcccgtctccgatgctcaccgttccgccgcgttagagctcttcgatggatccttttcaagtttagaagaggcctatgaggccctaagagtttttgagattcttgggattgggaataagcctgatgtgagcacaaccacttgcaagaaagtagcagaaaaccttgagttgtcatcgcctgtgaaggatttgttctattcgttaaaggttaatggcatattaaaatgcaaggttgatggggatgttttcaaggatattgctttgagacttaaagccactgtcaatgatgcgagtactttggtggagatgtactattcaataggaagtctggttcttataaaggaccaggcttctgatgttgatgtgcttcttactgatgccgatgggaccttccattcaatcaaggctctgagtcaaagtgatggaagatggcgttatagttctaataatccatctagtacctatgctgctggattagcacttgaagcacttgctggagtgatctcattagcatcttctgaaattgatcagtctagggtgaatacagtgaaaaatgatatattgaagcttttcgacagcattgagaaatatgatgatggaacattctatgatgagaaatttgttggtggacgtgagttggttcttataaaggaccaggcttctgatggtgatgtgcttcttactgatgccgatggatccttccattcaatcaaggctctgagc

SEQ ID NO: 6321 - DNA, 318 bp, Glycine max
  Clone ID: PAT_MRT3847_105717C.1
tcggttcgagctcgtagccgaatccgctcgagctcggttctggagtgatagggtctcgtcaatctttctcttattgttcttgatcatggcataccacactccttctatacgcttgcattgagccttatgatacatgagttataaactgataaagcagaagactagattccattaatgccccgttccaggagagtgagaaatacgattcttactgttcttatagtttctcccaaaattaggattactagatcgagaaagagctggctggtgtcacgctcgacgaggtatccagagcacgctgggttggccctcatgctt

SEQ ID NO: 6322 - DNA, 203 bp, Glycine max
  Clone ID: PAT_MRT3847_105718C.1
cggctctcgcaaaaacacagttggaggaaccatcctgcgtagtgacctattggccaattcttcgacagagggcaattttagagccagtgatcaattgctgcgcactcatcgtattacacgaatgattgaaatggcatccacagtcggtatacctgataatacaggtgtagcattagcctgcgctataaatagttcttataggg

SEQ ID NO: 6323 - DNA, 273 bp, Glycine max
  unsure (1)..(273): unsure at all n locations
  Clone ID: PAT_MRT3847_105719C.1
tcatgctcgagtgcttggtnctcgctccntnacaaaanaagctatggaccacaacatctaatctacatctaaacanacaaacanacacncctcttaattatncttttgattctcaaattcttctncggnnttnttcccttctttttggtttcatnncagtatgggnncggtggactgttatccttcttcgtaagggacgatgctgccgtggtgnctttngattcgctncctataaggttccgattccganccaccgacgangaactcgncaat

SEQ ID NO: 6324 - DNA, 683 bp, Glycine max
  unsure (1)..(683): unsure at all n locations
  Clone ID: PAT_MRT3847_10571C.1
gtattnncnanatgtaaacnnntaccantggtaccagagattaaatttacaaggcaccaaggtgctaccctccaagaaaatcatccaacctaagtttcttcaaacaataacaacaacataggtaaccttaagtttccttttttatacattattttgctcttttatatgtaaatgatgttcttcttggttaatcacaacacaacatgtatttcttttaatttattattatttccagcaagattttatcagtaaaatatctgaaaagcatctggtgaatggaacagcaatgttttctacctggctaataatgtaataaacatccctgccagcaccatctcacagatgcaatttaaaataaaatacaagaaatttacttcattccgaaacccatcacatccctgatagcttgtgactaatgaaggaaataatgatattgaataatgtgcatgtatgggaaacccagttagtaataggaacagatccactaacagtgtttacaatttgacaaccatatccacttcatttatggggaacaggggaaggaatgataaagcaaatgaacatagatcattctttgctcccttaaatcagtgtcacaattgcattcagttacattgaaccaatagttttctnngnnnngtttgtgnnannaacnnntcacaaaatggnnnnngtcacatant

SEQ ID NO: 6325 - DNA, 221 bp, Glycine max
  unsure (1)..(221): unsure at all n locations
  Clone ID: PAT_MRT3847_105720C.1
cttgactccatgccctctagctggaccttaacggcgcctttttttttttttacacactacatgctcacatgagcgctctaacatactcacacagccagtatttcaaagcacctgctacaataccaatgtgctactgccacaagtagggtaataatatttacaaaaagtgcacctattataactgctgaaagaaaaatgaaaacactngaacttccaaggaa

SEQ ID NO: 6326 - DNA, 113 bp, Glycine max
  Clone ID: PAT_MRT3847_105721C.1
atggttctagccaaagaatatttgcttctattttgctacactcaaacattaagtgaaaacgaagatgttcacagccaaggctaaggcatataaataactccgtttaccaatta

SEQ ID NO: 6327 - DNA, 549 bp, Glycine max
  Clone ID: PAT_MRT3847_105722C.1
agcaactctgtttactcatctggtgttagaatggatagttcctctcatcagctcctccccttcaacgaaaacgacccagaagacatgcttctctatggcatcatcacttcatgccaagaaaaaaaagtgaccatcaaccaagagcaagtgaataagaagaggagcagcttccgcggcgtgcggaggcggccgtgggggaagttcgcggcggagataagagactccacgcggcatggcgtgagggtgtggcttgggacattcgacaacgccgaggccgccgcgctggcgtatgaccaagccgcattctccatgaggggctccggcgcggtgctcaacttccccgtggagaaggtgaaggagtctcttagagacatgaagcttgatggatgctctcccgttgtggccttgaagaggagacactccttggctgctaagaggaagaaggaagatgtccttgttttccatgaccttggggctgattatttggaacacttggtgatgtgctctgatctacctagtacaaccattgtttaatctttcatgacttgc

SEQ ID NO: 6328 - DNA, 355 bp, Glycine max
  Clone ID: PAT_MRT3847_105723C.1
gttttgcgcccgcccacgcgggcgcggattcgaaaccactctccactggcacccactctctctctcagacatcataatgggagcagtgattctgccaaatctcggcaccaagattgcgattccggtctgcgccataatgggaataaggttagccctctaccagtgggtactcgtctccaaggttaagctctgcgcaggcagagaagctaaccctaacgccggcggcaaaaatggctacaacgatgacctcatcgaacaagaggaaggcctcagcgatcacaacgtagaacgcagatgcgccgaaatacaaaacgccaatatcgaaggagcaaactctgtcctgtgcactgaatac

SEQ ID NO: 6329 - DNA, 743 bp, Glycine max
  Clone ID: PAT_MRT3847_105724C.1
ttatcatttcattatctagaatcaagatcattttcaaaagaaataggcaaataactatctgattttgtttaccgttttgaaaaataatggttgtttgatttctaatgtctttcaaattccaattgaagtacataaccccagggagcattagctacagtgaaattagttttaggaacatgaatttttatgattaagttggtgaacttagtcataatattgattgaattttatcttctagtgaaaaattcaactttgttcaaagcacatgacatatgggaacaagaattattggcagtttatttgtatattttcaattatttgctctatcttgtattgatgtctgtcttgtttcttattgcacggctattttatgcagaatacttactcattccttttgttagatgaggatgcagcggcaatattgacttgagaattagttttgtttaaatggtgctgcctttgtcacaggccggcttggagtcgctacattagttttaagtttttaattgctaatttaaatgaagatatatttcttttgggatgaaaaaaaaaaaaaaaaaaaaaaaagctaaaaaaaaaaaaaatagggcggacgatctaaaatgataaaggaaaaagaacacacgcttgcgaggggaataattataatatagggcgccggaaagacaattcattggcccaggtttaacaacgtggagtgggggagacccctggcgttgcccaaaaaaatcaccttgaagcga

SEQ ID NO: 6330 - DNA, 408 bp, Glycine max
  Clone ID: PAT_MRT3847_105725C.1
gaaataagagcggatgtttagaattgtggaagcgaaaaaagcccgggaccggatggtttaaatttcaaatttattaaacagttttgggagatgttaaagcccaaaatcagccgattcattgctgaatttcatgctaatagggtattttcaaggggcaccaatgcatctttcattgctttgatcccaaaggtgaaggatccacatcatcttaatgaatatagacctatctcattaataggctgtgtttataagattgtggctaaactcctagcacatagactgaaggtgtttccaaacataattgatgagaggcagttagcttttatcactggaagacagctgctgcacagcgttttgatagctaatgaggcggtggataaagcaaaaaggctgacaagtcatgctttt

SEQ ID NO: 6331 - DNA, 284 bp, Glycine max
  Clone ID: PAT_MRT3847_105726C.1
gcctcgcaagcaaggatcttctgacaacttatatgatcatttgctttctttctatagcaggcattacatattccaggggctcatgccaaccagatgagggcaaagctacctatatccttctcattattcctcaagccacatcctttacgatatcatttccccaaatcctggctagaatctaatactccacaactaatggttgaagacaggccattcattatattgaaaccttatactggaactacaaaccattctttcacatctcacatgccattttcttacat

SEQ ID NO: 6332 - DNA, 1582 bp, Glycine max
  Clone ID: PAT_MRT3847_105728C.1
caagttgtaatatttgtggggtaaaagccatgattcagataattggggcttgctgacataaaggcatgattgaactctccactcctttctatataatcccttgcacacgcacttctccacttcatagtcacaacttgagatgacggttcaaaaggaagatttgggcttgagtctaagtttgagcttccctctcctctcctcttctccttccagccacaaccctcagaaaccctcttggaacgaccctattttcacttcccacgcgtccggtgaagctggatcattcctccgcggaatcgatgtgaaccgtttaccttctgtggttgattgcgaagaggaagcaggtgtttcatctccaaacagcacggtttctagcgtcagtggaaagcgcagcgagagggaaaccaatggagaagaaaacgacacagacagagcttgttccagaggcatcatcagcgacgaagaagatgctgaaacctctagaaagaaacttagactctccaaagatcagtcaattgtcctggaagagagcttcaaagaacacaacactcttaaccccgtaagtaaacgtacacatgccaattaattttttttgtcctgtatcagagacatagtatcctctgatctactggatcatatattaatctcactcacgatgtataggtgcgattgatcatagaaaattttgtacacaatgtgaatcaaatacagactgttgctaaatagattattttcattcacaaggatgtagtgggacattatactgttcaattaatttgttttttgttttgtgcgtgaatatgttgttgtgttgtttgcagaagcaaaagttggcactggcgaaacagctgggtcttcgagcgagacaagtggaggtgtggttccagaacagaagggcaaggtgggttcatttcgccaacatttttgttgtgtgatctttaagagttttactgaaattaattttcaggacgaagctgaagcaaacggaggttgactgcgagtttttgaaaaggtgctgcgagaatctgacggaggaaaacaggaggttgcagaaggaagtgcaagagcttagagcactgaaactttccccgcagttctacatgcacatgaccccacccaccaccctcaccatgtgcccctcgtgtgagcgtgtcgcggttcccccctcctctgccgttgatcctgccacgcgtcaccatcacgtgcctccatctcacccccgggcctttcccattggcccatgggccaggcccttcgatgccctccgtcccagatcttagactcgcggaaacaaaatgacaaaattgaaaaaaaagataggaagccatgaattatgtgttcaaagtgtggtctaagatatggttgttaggaaaactgattttgtgggtctctaatgttttgtactagtttgacccttcgtctttcttttggatttcggggcatgacctggtctagttactagttaggttttttagttttataatacttactgcgttactctcgtttctcatgattaaatccgagactttctgtaaagtttactggtcttaattaatagtattatatatagctttcttgtgtg

SEQ ID NO: 6333 - DNA, 838 bp, Glycine max
  Clone ID: PAT_MRT3847_105729C.1
atacggctaggagtagcaataagaacggggggcgaagaaatgtggcgacgttcttgtcgggacaaggacaagggaagaggttagcttccatccatggcagagtacgaaaggagcatccagcaccagtcgaaagaaacagccttccaggccctgaacaccataatccagctccacttcgagaaaaccctggagaagaagcgtgccatcgacctccagaagaaggagctctacaagctcttccagatattcttcatcttcctgggcctcgtcttcctggtcctggcccagtccccccgcctccaatgccgccactgctggatccccatcaccctcctctccatcgcccacctcatcttctacgtctccgtcgcccaaaccctaaggtgcatcaacgccttcaagtaccagcgccgctgccacaagctcaccctcggcttggccaccgagaaactcagggacatcaagatcagactcgccgccgcctccgccgccgatgccgactacgattccgttgttgccgacgacgagttcgagattcactaccaggaaccccctgagacctatttcggaaagtttaagaggaattgggctctgcattttggcttcttgatcttgatctacgcttttatgatctcttcctctgtcgttcttctttgcttttaatttccacttcagtgttagttctggaatcaaatccattctcttatcattcgttctgtgcattttttatttattttagcattaacagtcatttaccgagaaacggttagatccgtagattgctatggccagtcaaaaggtctatattgctttatagtaagtagcctatggttatgac

SEQ ID NO: 6334 - DNA, 381 bp, Glycine max
  Clone ID: PAT_MRT3847_10572C.1
tcaaattggtgggaaaattgatgaattcagagacaaacctatagtgggaaaattagtagtcccggaaattgtggatgtgagttgtggatcgcccaagatacacaattcagaaaagattgatggggacagacttcacaacgaaattgaactcgaggatttggcagaggatcctgttgtggatgagggtaatgaagggttgttaatattaacaaagttgaggtagaattgatggaatgtgattctagagagaacaaagttgaagaggttgagatctcgcagtgcgaaagatattataatgagattgaagaatctagtatgaacgaagaaatgggtgaaaacaaaggcttcgtggtggatgatgatgattgggaaggatcgacc

SEQ ID NO: 6335 - DNA, 767 bp, Glycine max
  Clone ID: PAT_MRT3847_105730C.1
cggtccggattcccgggtcgacccacgcgtccggagctggcttgggcttggcgtggttccatccatggcagactacgaaaccagcaccagccacaaccaccactcgaaagaaacagccttccaggccctgaacaccataatccagctccacttcgagaaaaccctggagaagaagcgcgccatcgacctccagaagaaggagcttcacaagctcttccagatattcttcatcttcttgggcctcgtcttcctggcccaggcccagtcccctcgcctccaatgccgccactgctggatccccatcactctcctctccatggcccacctcatcttctacgtctccgtcgcccaaaccctaaggtgcatcaacgccttcaagtaccagcgccgctgccacaagcttactcttggtttggccaccgagaagctcagggagatcaagaccagactcgccggcgccgccaccaacggcgccgactacgactcggtggttgctgacgaggagttcgagattcactaccaggaaccccctgagagctactttggaaagtttaagaggaattgggctctgcattttagcttcttgatcttgatctacgcttttatgatctcttcctctgtcgttcttctttgcttttgatttgtaatttcatgcaaaatgagatgagactcacacttttatatactctattttaattcaaaactttcatctcatttcactttctttctgtttttttccactctactgaattctagtgttagttctg

SEQ ID NO: 6336 - DNA, 413 bp, Glycine max
  Clone ID: PAT_MRT3847_105731C.1
agcagcttgaggatggacgtacacttgcttattacaacattcaaaaggagtccactctgcacttgttactccgtctgcgtgcgtcgaatacaaatctttgttaagaccttgaacctacagacaatcaccctttatgtccagagctctctacaccatcgacaatattcatgctaaaattcaccacatacatggtatcccaccacaccaacaactgcttatatttgcatcaaaacacctagatcatatccttacattacatgattacaatatacacatcgaatctaccctccacttggagctccgtcttaatcatgagctgcaaatatctatcaacaccttgcctcatcagacatttactcttgacatcgccatttctaaccccacttacattgagacatctaatattcaacaca

SEQ ID NO: 6337 - DNA, 186 bp, Glycine max
  unsure (1)..(186): unsure at all n locations
  Clone ID: PAT_MRT3847_105732C.1
nttcnanngcacgcgtacgtnagctcngantncgncctcgagaganngtgntagccctgtnganncgtnccccatggttcgattcctttcccagtannacnctcgcncgtncgaattctganncgntttnnccgcgagnnagggggaccgccctgtangctgngggtcctggggacnccnnncccg

SEQ ID NO: 6338 - DNA, 253 bp, Glycine max
  Clone ID: PAT_MRT3847_105733C.1
ctttacttcactttcatacacatacacatggtctttaggctagctaggaggttttctgatttatgtctatggaagcaatagagaaattggacttgtctttttttagccaagccaacactaacatgaacacatcatcctttagaaaaccacttttacttatgaaaaataaaatcacattaaataattactgctgcagttgcacaatctgccatggataccatcataaccaaaggcaaatcttcgaataaaccac

SEQ ID NO: 6339 - DNA, 238 bp, Glycine max
  Clone ID: PAT_MRT3847_105734C.1
ggttctcaaaaggcaggccgaaaggacacaaaagaagggccggccacgaaccgtgagagcgaaaaacaaacaacgcacaggtgaaaaaaaccaggggaaagagcgacaagccaaagaaacgggcacgagaaacaaagacgacggagacacgccgcagaaaaaaacaagacaccgcaagacaaaacaaaaacacacagcgcagctgcacacagggaacagccaaggcacacgaacccaa

SEQ ID NO: 6340 - DNA, 121 bp, Glycine max
  Clone ID: PAT_MRT3847_105735C.1
gtgcagcgaggattaggacccgaacctggaaaatgcaaaaagatgcgccttaagaggcataacttggttaacaagtgagtggttgtaaaagcattggctccattaggagagctatgggaat

SEQ ID NO: 6341 - DNA, 684 bp, Glycine max
  unsure (1)..(684): unsure at all n locations
  Clone ID: PAT_MRT3847_105736C.1
ccacgcgtccggaatctcgttcggaatctttagtggtgccaagttgatgccatcatctcaaaactacaatcaatacccgataagctgactgaggtaacttttttgtgtgtgcaatatgactcacacaaattccttcatcttgatcatcgagtgtgtatatcatttcgaatgaaattgccttaaatttggatttaaatctcctaaaatatatttttggggagagatgttcaacttgtgaaaaaaaaattgaatttaaatctcgtaaaatatattctttgagagatgaaaagttttatattaactaagtcatgaattcagaattagtttctgtaacttatttgattggtcaatgaaaaaataatacatttcatcttttatgaaatntaacatccgatcagaacatgacacatgataattattattcgataagaacatnacacgtgatagtcaacattcctttatagcaatataagggatcaacattgtatgatttgattaaatacgaacataaanattcgtgaataattntacaggggaacaaaatttaaaattagaaacaaaatagaggactaaaaatgtaanttttgtcaacttatttaaaggattaaaatttataagaatactttgggggatctcacanaaaataaaaaaaatcattattaattattgccaaaaatattttta

SEQ ID NO: 6342 - DNA, 1646 bp, Glycine max
  unsure (1)..(1646): unsure at all n locations
  Clone ID: PAT_MRT3847_105737C.1
acaacacttccccaacggtttgccagacagtgattgtttttctataggtgtttacaaaaaaaaaaaaaaaaaaaaaaaaaaaaaaaaaaaaaaaaaaaaaaaaaaaaaaaaaaacaacccgtcccccataccttccgcggccaaacagagcaaaaacccaacacaccacactcttgcaatcaatcaatggcggaaccttcctcctcgaagcccgccgtccctctcctgaaggacgagctggacatcgtgatcccgacgatccgcaacctcgacttcctcgagatgtggcggcccttcttcgagccctatcacctcatcatcgtgcaggacggagaccccaacaggaccatcaaagttcccgatgggttcgattacgaactctacaaccgcaacgacatcaacaggatcttgggtcccaaggcctcctgcatctcgtttaaggattctgcttgtcgctgctttgggtacatggtgtctaagaagaagtacatctacaccatcgacgacgactgcttcgttgctaaagatccttctggaaaggacatcaatgcacttgagcagcacattaagaatctcctatgtccatccacaccatttttcttcaacaccctttatgatccttacagagctggtgctgattttgtccgtggatacccttttagtcttcgtgaaggtgccccaactgctgtttctcatggcctgtggcttaacatacctgattatgatgctccaacacagcttgtcaaacccctcgagaggaacaccaggtatgttgatgctgttcttaccattcccaaaggaacattgttccccatgtgtggtatgaatctggcattcgatcgtcagctgattggacctgcaatgtattttggactcatgggtgatggtcaacctataggacgatacgatgatatgtgggctggatggtgtgttaaggttatctgtgaccatttgggcttgggagtgaagactggccttccatacatctggcacagcaaagcaagcaatccttttgtgaatctcaaaaaggagtacaagggcattttctggcaagaagagatcattccattcttccaaagtgccaccattccaaaagaatgcacttctgtccaaaaatgctacattgaactctccaagcaagtcaaagagaagcttggggctgttgatccctacttcaccaagcttgcagatgccatggtgacttggattgaagcttgggatgagcttaacagcaccacatccgaagaagcttcttccaagtcagccaatggtgctgctgctgctaccaagtgaaccttttatggttgcggactttagttttcaaatcagagtaattttgttatcatattttttttataatgcaagattatagaccaatttattgattttgatatcatcattattactatttatattataaatatcattaatgtatttcaggataatttttttcgatattgtgaatttgtgattggaaccttagaaatttaattctgcttagtggatgagttttcctgtttatactaataatttatttttctattttagtaaaaacacatctagtctagtggatgtatttgttacatttttcttcctttgctgatgttacatgtttcttgannttnnncaaagactattgggcatgt

SEQ ID NO: 6343 - DNA, 341 bp, Glycine max
  Clone ID: PAT_MRT3847_105738C.1
gggaggcaagcataaagcttgttttcatgaaagtggccccccccaaaaacaatcaaactccctggggggttgggaaactatttatccacttccttttttaaaaacattcacatgctcaaattaacccctgcctaaaagaaaaaatcccccggggggggacaacaaaaccaaagggggcaaaggggttttgctaaaggtaagggaacaccctacctttttgcttccatttgaagttaccagccaactgaatacaacaaatccctcagaccataaaccttagtacagaaaatgtttactatggaagccctcggtttgggcgggatcgattcccaccataatta

SEQ ID NO: 6344 - DNA, 1526 bp, Glycine max
  Clone ID: PAT_MRT3847_105739C.1
aattcctttaattaactccaatgacgccagatccctgttttcgtccccttttccccttattttcaaacaccaccgcgtaacacaacacttgcccattcccttataatagacaaacgaaacacacctcactgacactttccgtgtaaacagaacagagcaacactgaacaatggcgcaaccttcctcctcctcgaagcctgttgtccctctcctgaaggacgagctggacatcgtgatcccgacaatccgaaacctcgacttcctcgagatgtggcggcccttcttcgaaccttaccacctcatcatcgtgcaggacggagaccccaacaggaccatcaatgtccccgaaggcttcgattatgaactctacaaccgcaacgacatcaatcgcatcctcggacccaaagcctcctgcatctcgtttaaggattctgcgtgtcgctgctttggttacatggtctccaagaagaagtacatctacaccatcgatgacgactgcttcgttgctaaggatccttctggaaaggatatcaatgcacttgagcagcacattaagaatctcctttgtccatccactccattttttttcaacaccctttatgacccttacagagaaggtgctgatttcgtccgtggatacccttttagtcttcgtgagggtgcccccactgctgtttctcatggcctctggctcaatatacctgattatgatgctccaacacagcttgtcaaacccctcgagaggaacaccaggtatgttgatgctgttcttaccattcccaaaggaacattgttccccatgtgtggtatgaatttggcattcgatcgtcagctgattggacctgcaatgtactttggactcatgggtgatggccaacctattggacgatacgatgatatgtgggctggatggtgtgttaaggttatatgtgaccatttgggcttgggagtgaagactggccttccatacatctggcacagcaaagcaagcaacccttttgtcaatctcaaaaaggagtacaagggcatcttctggcaagaagaaatcattccattcttccaaagtgccactctttcaaaagagtgcacgtctgtccaaaaatgttacattgaactctccaagcaagtcaaggagaagcttggggctgttgatccctacttcatcaagctagcagatgccatggttacttggattgaagcttgggatgagcttaacaacaacacatctgaagaagttccttcaaagccaaccaatggtgctgctgctgccaagtgaaccttttatggttgcggattttagttttcaattggagtagtttcttccttgtcagttttaattgattatcatatttgttaccatattttttttataatgcaagattatagaccaatttattgatattgatgctatcattattactatttatattatattcttattataaatatgtatttcaggatattttttttccatatcgtgattggaatcttagaaatttaatcctgctcagtggatgagtttttct

SEQ ID NO: 6345 - DNA, 2085 bp, Glycine max
  Clone ID: PAT_MRT3847_10573C.1
ctcgagccgattcggctcgaggccgttgaagcgaggaaaataggtgaaggcctgaagggtgaatcacttctcatctgttctccattggaagccttcgtccattctgagtcagatcgaaagctcacaagcattacgagttgaaatcgttggaacctcgtcgaacaaccgttcaaatcgtcaaagacaaacgagctctgactcgccggaatctcaccggaaagcaagtctttctgaacctgtcgtgctcggaactcagttggcgaacttgaaattgacgcttagggcaactccaacgaaaaattccgtctaaaacgaggaaattctaaaattcccgttcgctcttgcagattcacgctcgttctctttttcgctctcgctgatcgtggctcgttttccctctcgagctttctctctgaatttgaaaatgtcaatggcaagcgaatctagctgggttgggaggaagcctgtgaaacgcattgggggaatgtccgatgctctatcaattgcagccgatcttggtttctccttgtcccctcccccatcccaggaaggacttcagaattcatcccccacaactggggaaaagggtgaggacttgatcagtttttgagagaactgactactgtccaaagaaaaattgcagatttgcaagttgaacttcaaggtcgaaaggatgacaaaaatgttgcacatttgactcatgtgagtgaaatggaaaagaagattgagacattggcaaggattactactatactcaaagatgttattcagaacaaggatcgcattatagctcgcctacagcagccgtattcccttgattgcattcctgttgaagcagaatatcagaagcaattctctgaactactgatgaaggcagctagtgattatggtgctttgacagcatcagtggcagattttcagtggagtcagaatttcaaacgcgtccgcccacgcttgggggaaatgcttcggcccattcctgtagctttggcatcttgcactcggttctttgaagccatgtctgccacaagagagtcatttgcatcacttcaaaaactgagagttggccattttgattcccctctacctagaacaccagccggagatccttcccaaagagtaccaggagtttctgattgtctaacaccacctccatggaaaactgaaacaaactttgatgacttaggcatcagaaaccaaagaaggcaacatctagatcagcaggtggaggatgtaaacagctaggtaaatgagatccatcagaatatctgtacaagcctaaggatcttgtcttgccttccctcatttaaagaagattgttacatagatatctaacatactctttgtatcatttgtgagatatatcatatacatcaattatttttgcaaatcaattatttgtcattgttgttgcggaattatgtatttttgagtcactagaacttgcgtcacaaaacgcaaacaaacagcagcatttgtttgttgctattgtattataaaacgtgcccctgcttaacacatgaggctgaagatttggtgcaaatgttcaaaccagtaattttcagtaatccattgtaagcagccactgatttgtgcatacccttttattcagtttggggggtaatgcttcggcccattcctgtagctttggcatcttgcactcggatctttgaaaaaaaaaaagccacaagagagtcatttgcatcacttcaaaaactgagagttggccattttgattcccctctatctcgaacaccagctgtagattcttcccaaagagtatcgggagtttctgattatctaacaccacctccatggaaaactgaaacgaactttgatgacttgggtatcagaaaccaaaggagacaacatctagatcagcaggtggaggatctaaacagctaggtgaatgagatccatcagaatatttgtacaagcctaaggatcttgtcttgccgtccctcatttaaagaagagtgttacatagatatctaacatactctctgtatcatttgtgtgatatatcatacttcaattatttttgcaaatcaattatgccattgttggtttagaattatataaaaa

SEQ ID NO: 6346 - DNA, 517 bp, Glycine max
  Clone ID: PAT_MRT3847_105740C.1
gattattcgtcagccatatcttttccaggtggtcatctacctgcatctctgaaggttctgcatatcagcaatcttaaaaatctggaattcccgaccgaacacaaaccggagttactggaaccactgccaatatacaacagttgtgattctctcacgtcccttccattggttacctttccaaatctcaaaactctccgaatcgaaaactgtgaaaatatggaatctcttttgggttcagggtcagagtcatttaagagtctgaattcttttaggattaccagatgccccaacattgaatcattcccgagagaaggactgcctgcgcccaacttgactgatttcgttgttaaatattgcaacaagttgaagtcattgcctgatgagatgaatactcttctcccaaagttagaatatctacaagttgagcactgcccagaaattgagtcgtttcctcaagggggtatgccacctaacttgagaacagtttggattgtcaattgtgagaaactactgagcg

SEQ ID NO: 6347 - DNA, 511 bp, Glycine max
  Clone ID: PAT_MRT3847_105741C.1
agccattttatagccttacaaggaaagtagatcaaaggaaataacagcccacgacttagattcttaagaacgtgcgaggtatttgactaagttcaaaaatagaaaaagaacaaccaactaattattgaatcactattgaaactaattaatcctattacaagttgaactactagatcctaattacaaggaaacttccacgatcttaacttgcttatgctgctgttggatttaatttggtggcgcgggcggtgatggcggcggtgttagtggtgatggtggtgttcgtggtcgtgcctgacgacaataaggagatacattgagtttaggaggcggtggatacagcaacagcctgcctcttttaattgtcttgatgagcttgtgaggggaatccaagaatgagccatgggagacttgagaattagaagcattgcttatgaaactaaaatgggagattagcaatgcatgcacaaggatcgtgccaatcaacaatgactttgaaaccataatcgtc

SEQ ID NO: 6348 - DNA, 1899 bp, Glycine max
  Clone ID: PAT_MRT3847_105742C.1
cgtcacgtcggattagccacatggatttctgcaccttcagttcctttcctttgcaaaactgtcaaaggtacatttggatatttggctcctgagtatttccaacatgggaaagtatctcacaagactgatgggtttgccccaagggcccctgcactgattccagggacctttccaatgccccaaccttagttggagatcacatactgtgactacaacaagctcaaattccgaacctttctcagaaaaatgttctgggaattcggtcttgcttgtgtggccaacccttcccggcgtcggagaagctccgagagaagctctgcctatggaaaaaagacgaatttggagcacaacaaggcgtggctgcttgcggagtctggtgggtgtggagcagaattgaccaatgctgaccctcaatcggttcactcctctttcaggttcagcttctgttctcaggtggagttggagtccttgagcatgagttcttcaagtgctgcaacggttttgatggtgaatttggacaatgggatgagtgaatctcgcgccagggagatgaagtggaggagaatggagtcgttggagaagagcatatcccctgtggctcacagcttgatcaggtttagctatggtgaaattatgtctgctactaggaatttctccaaagggagggtgttggggagaggggcattgagctgtgtttttagggggagagttgggattttgaggactgcagtggcgatcaaacgattggacaaggaaaacaaggaatctgccaaggccttttgtagagaattgatgattgcaagttctcttcatagttcaaatgttgttccccttttggggttttgtattgatcctgaggagggtttgtttttggtgtacaagtatgtttcagggggcagtctggagcgccacttgcatggaaggaagaagggtagttcacctcttctgtggcctgtgaggtacaaagttgcgattgggattgctgaagctgtagcttatctgcatagtggaactgaaagatgtgttgtgcacagagacattaagccctcaaacattctgctttcttcaaggaagattcccaagctatgtgacttcggattagctacatggacttctgcaccttcacttcctttcctttgcaaaactgtcaaaggaacatttggatatttggctcctgagtatttccaacatgggaaagtatcagacaagactgatgtatatgcttttggagtggttttgttggaactcattactggccggaagccgattgaggcaacaagaccttcaggagatgagaacttggtcttatgggctaaaccttttctacaaaaagggaaaggagcaattgaagagttgctcgatcctcaactcaagtgcagtcttaaattctcaaatcaaatgggtagaatgattgaagcagcagctgcatgtgtcacaaatgaagaatctcggcgacctggcatacgtgagattattgcaatactgaaaggtgaagaagaacctcttctctccaaaagaaagaagtccagttttcttgggaatggatgtgtgattgattgttattctcagttacaacaaacaaataatgagatgaaaagtcacttggcattagcaatgttaggtgttgcagagtttgaggatgatgattatctctatggtcgataaaacatgatgacaacacttaagtaaccttttacttttttgccatgattgtcactaagagtgcttaaggttagatgttgtgagcgagttgaaattgtaaatagaaataggagcttagatgaagattgtgtgtagatatcttcccttttctctaaagggtaacgctaatagattttcattcatgtttgtggatcatgttcaattcatgttggtaaatgaaatgatttttatctgatc

SEQ ID NO: 6349 - DNA, 167 bp, Glycine max
  Clone ID: PAT_MRT3847_105743C.1
ggctagagggccggtaacctaatttccgttttgttcgcccccgccgaaatctttatagggggagtggctcatcaagttcgatcgcacattcttctacaagcacgcttttaagcattactatactcgtacacgataaagaaccctatcaaagcttatcactcaacaag

SEQ ID NO: 6350 - DNA, 1105 bp, Glycine max
  Clone ID: PAT_MRT3847_105744C.1
gaaattaattgatttcttactttcaaacgaagaaaaggaagaaaccaaacgcggcctccaagttccgagttgcgagttgcagagagagcaatgagtcaggaatcgtttatatatagcttcgtggctcgggggacgatggtgttagccgagtacaccgagttcactgggaacttccctgcaattgcagctcagtgcctccagaaactaccctcttccaataacaagttcacctacaattgcgaccaccacaccttcaattttctcgtcgaagacggttacgcttactgtgttgttgccaaggaatctgttagcaaacaaatctctattgctttccttgaacgtgtaaaagcggactttaagaaaagatatggtggtggaaaggcagacacggctgttgccaaaagtctcaacaaggagtttggaccagttatgaaagagcacatgaagtatatcatagaccatgctgaagagattgaaaagctaataaaagtgaaggctcaagtttcagaagttaaaagtattatgttagagaacattgataaggccattgatagaggagaaaatctaactattctggcggacaagacagagactttgcactcacaagcccaggaattcaaaaagcaaggaactcatgtccgtcggaagatgtggtatcagaacatgaaaatcaaattggttgttcttggaattttgttgcttttggtcctggttatctggctttctgtttgccatggattcaactgcgcaaactagaaacaaatgaaagtttatggataggtatttaaatgatgtttaaagagcaatttcttaaaagctttagcaagaatctgcttagaaggggggagtttggcaactggagaaaaagtttcctaccttctttatttgttgataatcatatacgatattcttggaaattcttaagagaaaggagatcgggtgtatttgtaatgtatcatatgctggactgtttggtcttgtcaaacaatatagttgtaatttgcttctcttttcttctttattttaaatatagaaaaatgttattaacttagcctctcgtttaaacaattaatttgatccccctaaatctggatttttcgtcttc

SEQ ID NO: 6351 - DNA, 364 bp, Glycine max
  Clone ID: PAT_MRT3847_105745C.1
tctgttcgattttcggaacatcgcacatctcttgacacatgaaaacttttatagggcattgatgcatcatgactggcagggaaatcctccatacgatgaaggggaaagcaggggttgaaacaccagacacagggagtggaaaagggaaaacatcaaatcacattacacatgggtttcacttgatgaagggcaaaccagtgcatcctatggaggattatttagtttgagaaattactctagaaaaggacagctaattacgcttgcttgcaatatttgatggccaattaggccatgatggatcaagctatttgcagaaccaccttttacaaaacatattgcaacagcacgacttttggactgagac

SEQ ID NO: 6352 - DNA, 359 bp, Glycine max
  Clone ID: PAT_MRT3847_105746C.1
ctcataagatcgctgtataacttgacatagtgtggagattctaaccatgtttgttttttgcgtagttcgcaaaggcttggtggcttgtacatactataggacctatcaaaccaatgcatgtctgcctgacgaaaacagactatgtggagcgctgctaacttgttaccacgcgcgggtcaaatgataagtattggaaccacaccacattcgtgtcttgtaaaccattcctgaagagtgcgttgaaccaacaaaagactgcctgtctgtctaacaatccagattaaactctacaacagtgcaacaacatgctttcttttatgctagagaacacgaaaatcatctgaacgacatatttatat

SEQ ID NO: 6353 - DNA, 1097 bp, Glycine max
  unsure (1)..(1097): unsure at all n locations
  Clone ID: PAT_MRT3847_105747C.1
aatcaagcccctcagaaaaagaaactgctttgctctggctgctctatgnnagatacctttccaatataaagcagccattgaacttgaactacttggtcgtgcaacagggagatcaaataaaatagttccaagacctcctccagctccatattcggagcttgtgccaccagctcgcgttctgagcaatatgccaactttcatggatgatgagagaaaccaaatggcttgtgctatttgtctgaccaataaaaaggatttggcatttggatgtggtcacatgacttgtagagattgtggatctaggttaaccaattgtccgatatgccgtcagaggatcaccaatcgtcttagggtgttttctagctgatagcagaatggaaaatcatgtacaaagtaaaattcaactaagggctaagaagataaatgtcttctgtacatttgttggtgtggctttcaagagtgcccaagaatgaccatggtgttgcataaaggtggtttcacattgtaggaatgatttaggagttgagacaattgtgcatgtatttgctagttgttcaattaggccatgtcccatgtgtttgaatttgaagaattgtattttaaccgctgcacattgtacatattgtttatatgtacttatgttaaaaatttatgtatgcaggatatccatgaacttatagataatatgataggttgcattttgtttaaacttaagaggatgtggtcacatgacttgtagagattgtggatctaggttaaccaattgtccgatatgccgtcagaggatcaccaatcgtcttagggtgttttctagctgatagcagaatggaaaatcatgtacaaaggctaagaagataaatgtcttctgtacatttgttggtgtggctttcaagagtgcccaagaatgaccatggtgttgcataaaggtggtttcacattgtaggaatgaattaggagttgagacaattgcgcatgtatttgctagttgttcaattaggccatgtcccatgtgtttgaatttgaagaattgtattttaaccgctgcacattgtacatattgtttatatgtacttatgttaaaaatttatgtatgcagg

SEQ ID NO: 6354 - DNA, 2092 bp, Glycine max
  Clone ID: PAT_MRT3847_105748C.1
ttcctctctcagtctcactttgcctcgcgtctctcagtatgggttctggttggagaagagccttttgcactagcgacccagataattccacaatacgcaccaaacacagaacccaaagccctactccttcccccagaagctgcgtcagcctcggctttctctcttcaacaatcacagaattatcatcaaatagcagtcccaaatttcaaaccaaaaccaacacctcaaattcaaattctcctctctctcctaagctcaacctctccctcttcggaaacagtttcaaattcagaaataattgtggaatctgttcgaatagcgtgaagacagggcagggaactgccatttacactgcagagtgcggtcacgcgtttcacttcccatgcgtcgtttccgtttcccatgcacgcaccaacgtctgccccgtatgcgacgccacgtggaacgacgtgccgcttctgcaaaacaacgccgagaaacaaaatcaaccgattcatcatcatcgttccgattctgtctcctcctacgatgacgacgagcctcttccttctcctctcacatgctccgcacaaatcgctccaatccccgaagatgaagaaaacgacgacgtatccgagttccctggctttttcgtcgatccaaagcctcaatcctcgttgagacaaaacgacggtggtgattcgaggagcgttcgagtgaagctgatgccggagtgcgcggtcatatcagtttcgcaaagccacgaaacacgtgctttggttttaagagtgaaagctccaccggtgctgtcgccgccgagatggcggcggcctgccgatggatctcgtgacggtgcttgacgttggaaacagcatgagcggcgcgaaacttcacatgctaaagcgcgcgatgcggttggttatatcttctctcggcgcggctgaccggctcgccgtcgtggcttccgcggctgattccaaacggttgctaccgctgcggagaatgacagctcagggacaacgcgcggctcggcgcgtcgtagataggctcgtgtgtggccatggaaacagcgttggtgaagaagcaatgaacatagccgcgaaggttctcgaagatcggagagagagaaacactctcgctaagattttgctcttatcagacggtcacgataacgccaacaacaaaaatcaacggagattcttaagccacgtgtcttcttccatccggttcgattgtatcaaagttccggttctttcgtatggcttcgagacgaagagaaccggcttaatgcacgaaccgttagaggatgattttgcattatacgttgatagaacattgagtgtggcggtgcatgatttgagaattcagcttggtttctcggcgccggcggaaatccgagccgtttattcatgcagcgggggacccactgcgctgagtactagcgcggctcggcttggtgatttatacgccgaagaagagaaggaattgttagtagaggttagagtgcccacgtcagcattggggacccaccacgtgatgacattgcggtgtgttaatattaacaaagaccctgtgtctcaagagtttgtatacggtgcggaacatgtgtttacggtggtgccgccgcctaagagtattccaatttgtggcggtagggtggagcggcttagaaatgtgtttattacgagccgagccgtagccgagtcgcggaggctggctaagcacaacgatttttcgagtgctcatcatttgctttcttcggctcgggcgcttttggctcagcttggctcggctgaggaatacgtgcgtggcttggaagccgagcttgtggagcttcagtggcagaagcagcagcaacgggttgagagggaggcgaggtgggtggatgagagtggtgaggttttaacgccgacgtcggcttggagagccgctgagaagctggctaaaatggctaggatgaagaagtccttgaacaaagtgagcgacttgcacggcttcgagaatgctaggttttaataatgcttagttgtaatttgtatttttataaaaagaaaatgtaggttcccgaaaatgtataaaataaaataaaagtatggaattgtagttcaaaacc

SEQ ID NO: 6355 - DNA, 197 bp, Glycine max
  Clone ID: PAT_MRT3847_105749C.1
aaatcttctccttccctacaatcttttaccgattatctatggggttggcagacatgcttgtgataacagagcttcacgacccatatgctcggaacgtaacatccgtatttaatgcacaatcttcattgcgcagactggacccttgggcaccatttgtcccatcttatagggtcacatatccatctagatgctgttgc

SEQ ID NO: 6356 - DNA, 111 bp, Glycine max
  Clone ID: PAT_MRT3847_10574C.1
gttactcttggttagaagtcaaactagaggactctggctcgcactcgcgggtgtgctacaaattaccttgcctatagttggatacatgctcatgaaagtgcccgttcttac

SEQ ID NO: 6357 - DNA, 642 bp, Glycine max
  Clone ID: PAT_MRT3847_105750C.1
ccacgcgtccgaggatgccctgcaaacttgcttctcattgtggctcttaccagaggaactcatctcggagatcctctttagggttccggtgagatcccttctgcaattcagatgcgtctgcaaatcatggaaaaccctaatctcccatccccaattcgccatgcaccgccttcgtacctcaatcgcccatccaaacattgcccaccaacaattgacctcttccaaactcgtatcatactctgtgcattcactgctgcaaaactcttcaatccctgaacaaggccattattactcctcgacgagtcacaagtaccgcattcttggttcctgcaatggcttattgtgtttgtctgatattaacttaacccatgtcgtattgtgcaacccttccatcagatcgcaatccaaaaaattccaaatcatggtttcgcctcggagttgtttcacttactattgctttggctatgatcacgtgaacgacaagtacaagttgctggttgttgtgggtagttttcaaaaatccgtcaccaaattatatacctttggtgcagattgttattgtagcaaggtgattcagaatttgccgggtgatcccaccaggaagccaggggaggttgcgaggggggctgttaattgggtggg

SEQ ID NO: 6358 - DNA, 426 bp, Glycine max
  Clone ID: PAT_MRT3847_105751C.1
tcggcggccgccctttttttttttttttttaaactttttaattttatattatttataattttgtattttggtatatttttacacgtatcaccccccaaaacgacaaaaacaattggtctactcaaatctacaaaaaatttgacacaaaccaacacaacccaataatcaaactgccatacagaaatatgacatcaatcaaccggacccaaaaccatttgtgcacaaaacccaaaatcaaacactgtaccctctgatggatggatgcaaaaccccaccattaaaaagggggagaaccccccaaacaagcctcttccatggaggcctcacaaaccccaccgtagaaaaagtggccaatgcccccatgttattaatgccacaacctaacaatcgacccacaatgagtttcaaaccaccccaaccataaaa

SEQ ID NO: 6359 - DNA, 2190 bp, Glycine max
  Clone ID: PAT_MRT3847_105752C.1
gacaaaataaaataatctgtggccaagttaccatctactgtactacttgttctatataaattctacccatcccttgctctcatgtcacattgtatttgcactacgaccatttcaggaagaaagaagtgcaatggacatcggaacctatggctatcctacaccagcagtgaaaaagattgagtcttactatgatgtgccagagggagtggatattcggggaagatatgatgcagagtttgcaaaaatcctcacaaaagatgctttgaaattcgttgctgacttgcaacgtgagttcaggaaccatatcaagtatgcattagagtgcagaagagaagcaaagaagaagtacaatgaaggggctcttccagagtttgatcctgccacaaggtacatcagagagcaagagtgggtgtgtgcacctgttccaccagcagttgctgatagaaaagttgaaatcactggccctgtggatagaaagatggtcatcaatgctctcaactctggagctaaagtctttatggctgattttgaagatgcactgtcaccaggctgggaaaatcttatgagaggccaagtgaacttaaaggatgctgtggctgggaccataagcttgcatgacaaagcaagaaacagggtttacaagctcaatgatcaaacagcaaagctttttgtgcgaccaagaggttggcacctaccggaggcacatattctgattgatggtgaacctgcaactggttgccttgttgattttggcctctatttctaccacagctactcagcattccggcgcactcaaggtgctggctttggccctttcttttatcttcccaagatggagcattcaagggaagctaagatttggaacaatgtgtttgagaaagctgagaaggtagcaggcatcgaaagaggaagcataagggcaactgttctgatagaaacacttcctgcagtgtttcaaatgaatgaaattttgtatgaactgaaggaccattcagtgggtttgaactgtgggcgttgggattacattttcagttatgttaagaccttccaagctcatccagatcgcctcttaccagatagggtcctagttggcatgactcaacacttcatgaaaagttattctgatcttctcatcaggacgtgccacaggcgcggcgtgcatgctatgggaggaatggcagcgcagattccaatcaaagaagatccagtggctaacgaggtagcactggaacttgtaaggaaggacaagcttagagaagtgaaggcagggcacgatggaacttgggctgcgcaccctggtctcattccagcctgcatggagattttcaacaacaacatgggcaatgcttccaaccagatagacacagtgaaacgcgaagatggggcaaacatcaccgagcaagacctcttgcagataccaagaggagcccgcaccatggaaggtctcagattgaacacaagggtgggaattcagtacgtggcggcgtggctcaccggaagcggttcggtgcctctatacaacctcatggaggatgctgccactgctgagatcagcagggtgcagaattggcagtggctcaagtatggagtggagctcaatggggatggtcttggagtgaaagtgaacaaagaactttttggtagggttgttgaagaagagatggctaggattgaaaaggaagtggggacagagaagttcaagaagggaatgtacaaggaggcttgcaagatcttcactcgccaatgcacgtcaccaatgcttgatgattttctcactctggatgcttataattacattgtcgtgcatcacccgagggaaacatcaaagctttgaagtttgaactaaggaagtggttctttattatgcataataattgggtcctttagattctgtcttgtttgttctcctaagttgtctttgtctttttaccatcacttcatcgtttcatgaagggcctgggacgtcatataattgtgcgtggaagagaagaataaagttcgtcattgtagctatattttgaatgatataacttgccttatgtttactagcaatgaaaacaattatactagaaatttgatatatatatttttgtcactagattatgtcgattactgttatcaaaggtatttcccctccagcattctagaaaaggtacgtaggtccaattgcctacaagttacagctctcta

SEQ ID NO: 6360 - DNA, 758 bp, Glycine max
  Clone ID: PAT_MRT3847_105753C.1
aaatactgcaacctaatagcttcccaggcaaatgttatcattgtttccgtagagcataggaaagctcctgagcattttctccctgcagcttataatgattcttgggccgcccccaatggggtgcctcccctgccccctcccaccccccgcaccggcgacccgtggctcatcagtcatggtgatttcagcaaagtttttatcgggggtgatagcagcggtgccaaccttgtccataacctcgccatgcgggctggggttgaagttttccccgggggcggtaaagtttacggtgcttatcttaaccacccttacttctggggttcaaagccaattgggtctgaagctgttataggatttgaagagacccctcagtcattgatttggaactttgcgtaccctgatgcacctggtggcttagataaccccatgatcaatccattggctcctggggcacccagcttggctcaacttggctgttctaagatgcttcttactgttgccggtaaggatcacctactcttcagggacagaactctgttgtactataaggctgtcaaggagagtggctggaaaggccaagtggaactctttgaagaggaacaagaggatcatgtttatcacatgtttaatatggaaactcaccaagccaaaagattgataacaatcgtcgctaattttcttcgccagtgaaaccaattaggatctgctcgtttcaccttataacaagggcattcttaattaaataaatttcctagaat

SEQ ID NO: 6361 - DNA, 493 bp, Glycine max
  Clone ID: PAT_MRT3847_105754C.1
tctggattgcaaatatatgatatagtgaagtacatgattactaaaagacacacaatggaccccaagctgcggggttacttcgactttgctatggatcaggccttagcatatcttctaatgtcagcatcatcatcagctgccaccatagtctgtagttggacaaacagtgttttggctgcagacaagcacgtgcaaatggcgaacgcatgtgttgctttatccttcgttgcatttgtggcctttgcctcttcctctgttgtttctgctttcattttttgtagagtcaactagtgtctgcaattggtctatatagtaacattatatctattattgtatgtgtcaaggacacaaactgtatgtgtggattttacaatgaattttagtcggacgttgctgatatggtttgcagctgaagttagatttgtcttagtatgtgattctaattagctatctattattgtatgtgtcaagtacacatactgcatgtgtggat

SEQ ID NO: 6362 - DNA, 294 bp, Glycine max
  Clone ID: PAT_MRT3847_105755C.1
acgacccagcgtacgccacgcgtgctacgagagaagctgctcctttttatactagtgctgtaagatgaaactgagatcggtggacatgtgcacaaagagcccaacaacacttgtaagtagaaacagattaacaccaatacctcatcgtactgttccgtcatcaaggcttgcgtctaaggacacaattggcttgatacattctgaagactgcatcacacatgtcgtgaatttgatgaataaagagtatgcaatctactactacatactacggtctactataagtgagctgaatat

SEQ ID NO: 6363 - DNA, 371 bp, Glycine max
  Clone ID: PAT_MRT3847_105756C.1
cttttgttttgggtttgttttttttttttttttttttggggttttttttttttttttttttttttaaaaaatcaagaaagggaaggggtttaaaaggggcttaaagggtgtggggggaataaagggggggtttaaaaggggtgtgggtaatacatggggtgggggggggggctgaaatgagaaaaattggttgataaccgggcttaaaattaagaaacgatcccagaaaggtgggtggcaaaacgggtaaaaacactccgctggaaggaactcggtctaactaaacaatggccggggactgggtaagggtcactccctgatgtttgacctggaaccacttcatagaatcctcctttggggaaggggggggg

SEQ ID NO: 6364 - DNA, 478 bp, Glycine max
  Clone ID: PAT_MRT3847_105757C.1
cactccacaataaatatatatttaaaataattaaatattataaaacaaataaaagtataattaatgtgatcttaaactttacaaatgatagataaatataatttttttttcaaaaattcaacactaaaaaaaacagaaaaagtacatgctttcaacataaaaaaaaatcatattgtcaataaacctgatatcataatttaagtactaatagttattataaaaattaataaaaatattaaaataatcaaacaattaaataataatgtaaaattattttgtatcattaatatataacattttttgttgtttaaaactgaggttcaatcataaattgacatgtatagcatgttggttatattttataataattacttaaaaattatatcaacaataatttaaaattagatgctatgttaaaaatttatactaataatacatgcttattaaacttgaaacttaatttaaattttattcacaa

SEQ ID NO: 6365 - DNA, 317 bp, Glycine max
  unsure (1)..(317): unsure at all n locations
  Clone ID: PAT_MRT3847_105758C.1
gagctcactgacggcggccgcccttctttttttttttttttgttttcaggaaaagnaaatactctcattcccattatcacttgaaaaaaaaaacgtccatcaccgtaatatatattaacattcctccaaccttacattaatataaaagggaaaaagggatttattaaactaaaaaatggttgacctggtttttgaaccgacctgacatagtgtattcaatattgaggaaactggtcctgtaacgcccgtgacaagcaaagttttgcttctacagaaaccattatgtgcaaacaaagcaacaaggggggattcaaaac

SEQ ID NO: 6366 - DNA, 635 bp, Glycine max
  Clone ID: PAT_MRT3847_105759C.1
gaatccaaacctagctaagtgctcttacaaagagaggagtgagtgagaaacaagatatttaaagttacaaaaaatggagagagtggcaaaggtggtggtgatgttggccatggtggtgctggtgctaattgcttcaaatgttgaagggggacgattactgaagcaagagaatgtggatcagcccgagaccttccttggtgggatatttccaagcccaagcccaggtttcagcttcaccggtgtgggctttggcccatctgggttttgcactttccctggtggttgtaccggtaccccttctttgcccactattcccggtgctggcgtgtcactaccagttccaccacatgcataaggaaaatggctttggtagaagacctatgttattattacttaatgctaagtagtaaattaagtactgtagaactttgtttaagctttaatttgccttttataatcatatgtttgcgtctattaggttttgttttgggttcatggctgggtgtgatatgatttctatttggttggtcactgctacgatcttactggtcattactgtaatagagtgtcagcttctatcatggacgctacagtttttttttttaaattatttatattatattatagttatgaac

SEQ ID NO: 6367 - DNA, 377 bp, Glycine max
  Clone ID: PAT_MRT3847_10575C.1
gtttttttttttttttttttttaggaaaactaaaatacattcataaacagtgacttacacttcaattaggaataatgttacatgttgctacaccaaaacaaaatattatcacccacacaaggccttgggcttgtgccagggagttcaactcatttctcactcctatatatgccgtcaagttaatgtagcgcataatcatctaacacacatcttcactttggttgatttcttatggacttgggcgttgtaatgctttttgcaagcatccactcatttttcactgtgtctcaaccgcactcgagcatcaaccaacctccagcaaactcaaactttagtccattaaaagctcactagtcaacactcaacactcatcaaag

SEQ ID NO: 6368 - DNA, 435 bp, Glycine max
  unsure (1)..(435): unsure at all n locations
  Clone ID: PAT_MRT3847_105760C.1
gtgttaggggttttttataaacatcaaatcttccagttcattaatgcaacccacgaacgacaaccataattcggaatataagatatcatctcatgcaggacatcccttgtacataggacaaatggcattaatgctgaaagaaaattcccctcctnagacgggtgtaaggnaaggnnacacatggaaaaaaagaaaaacccccgggggggccgagggagggacaaaacatttttcccctactctataaggggtaactcctagaacgagtgcacaaagtcaaatgctaattcccagacgcgcaaacaatgtggaacaagaaccaaaaatgtatacatatagaggtatatatatatagatcaacctagatagatagacattccctaagtgtgataacaaaacaaaaagcctcgcggagtagcgagcccatattttccc

SEQ ID NO: 6369 - DNA, 683 bp, Glycine max
  unsure (1)..(683): unsure at all n locations
  Clone ID: PAT_MRT3847_105761C.1
ccacgcgtccggaaacaacaaaatcccctctcttcttctctttcttttccttctttgtcttcatcgctcattcaatcactcgttgcacaacttgcctcgtcctttcaaattctgcaactttccctgtctttttcccaaactctgtttctggctatcctcaactttccctccttccatgttttctgcttagttctagaaccttctaataaacatttaggtctttggggcatggactggctgtttatgccaactgtcaatatctgtgaagaatgtttaacaggccaagaggtgctcgtgcttttaatgtattgaattggaaacatcaaggtgaatcatctgtgacaacaggtttacttcaggatgttccaccagagattgaattgtcggattatagaaggatcccaagtccaggtagtgagagcccttcagaccttcttaatggtgagagcctaaatgtagagcccattgctgatttggatttcttcttcgaaaggctttactgctactactgtgagaaagggctctggtgcatcatcataaagtggatagttgaacttctgagtcttggtttcaccatatgtttttcgggttttttcttactatatgttgactggaatgggctccgaaatgcanagtgtgggatggatgcagttgaatctggaaggagcctttgtgatcttgct

SEQ ID NO: 6370 - DNA, 900 bp, Glycine max
  unsure (1)..(900): unsure at all n locations
  Clone ID: PAT_MRT3847_105762C.1
ggtccggnnaattccacgcggtacgacccacgaccgtccggnaaaaatgccaaacggaatcgagccgtcacccacaccgcaagtcaagtcggcaacgacgcgcgtccctctttccctccaaaaaccaaaaccttcgtccctctaaaataaaaaaaaatgaaaatatttttattttcctataatttttaaaatgatataaaaaaaaacaggcatagtattagtaagtagtatgataattgtagaataattaatttggaaatgtaaaaaaaaaattgggtgtttccgatagtagtagttgtagcggtcaagccgagccgatccgatgacgcgagccactcacacactgggggttcccccaacaacacgcgcccctccccggcgaccgtaccgtattatccctcaccattcccactctttcgccttgccgtttcgctttctctctcttcttcttcttctttctctttctctttctctttctcttttccctttctctttatctctcttccaaccctaattccctttttccgatgccggacttccacgactccctcctcaccaccacgccgccgccatcgcgccccgtccccgtccgcgaggactgctggtccgaggaggcctcctccacgctcgtcgacgcctggggccgccgctacctcgagctcaaccgcggcaacctccgccaaaaggactggcaggacgtcgccgacgccgtcaacgcgctccacggccacaccaaaaagacgcaccgcaccgacgtccagtgcaaaaaccgcatcgacaccattaagaagaagtacaagatcgagaaggctagggattcggcctacaacggtactctctcttgctcttggcctttctacgaagcgcttggacgctctaatcggncctaattttagcgcg

SEQ ID NO: 6371 - DNA, 1719 bp, Glycine max
  Clone ID: PAT_MRT3847_105763C.1
ctcggaattcggctcgagctgtaacatggattctccaatcgacaacagttgctcttccaagaagaagaattgcagtaacatggattctccaaccgatgttgtggttgagaagtctactgtggaggatttaccacctggatgggtgaaagaattaaagattaggaagaacagcaagggcattcggaaagatccgttttatatagatccagcgagtggatatgtattccgttccaagaaggatgtacttcggtatcttgaatctggtgatatacgttcatgtgcatttaagccaagttgaagacaagtccaagatgaagacaatttaactccaccacctgctgccaagagacagaaactgtagcagtctgcacccgaacaacagcttttttcagccacagaaattcttgataaaagcaacttagaaaactttggtagatcggctcgaggtaagaaacactgctacagtccctgaaactgatattcaaaaaactttggttgacaatgttacaggaagaaatgccactacattccctgaaactgatactcaaaaaactttggtcgacaattttgtgggaagaagtgcctctacaatccccgaaactgatgataaaaaaactctggctgacaatgatatgggaagaagtgccactacagttcctgaaactgatatccaaaaaactttgcttgataatgttacaggaagcagagacagtgaaaacaatttgcttgacactgttacaggaggcagcgacagaaaatctcaagtacgatcaaataaaccccagagaaagaaagaggtcaaagtacctatgcggttatcaaagcgacttgctggccttgaacctgaggtagcgcctgctgaaagagctattgaatattcgactagaaaatcatgcaaagaagaaccaactgcaactgctactttaactaatggagtgtctgaccatcacgatgctggggaagaaaccaagcttactcctcaagcttctgacagtttgaaaacagaagtactaggagaatcattaaaccagagtgagaagtcatatgatgcccaaactggtcacaaggaacaattgcagaaagttgaagctgaaaatattggggatgcaagatcagagccacagctccccttaccgtttgggaactcttggtcagatccatgcctagaatttgcaatcaagactctcactggtgctttgccagttgatgctggtgacattatgcccgctttgcctcctggctttgataatccgccatataagcaattgcatgggaatgtggtgacaagcattaatcaagaagctcacgataactcaaaccaatcacagaacaagaaagagcttaatatggttagccaacctgtgttgaggtccagctccacctcttatgaaaatgctcccaaatttacaactagacactcttatcttgatcaaggcaacataataaggaatttgaatgaagaaccccgtcacactggaaacataacaccacctgtgcatcattctaggaatataaactcactaacacatgaagagccattaaagcaaaatggacagtttgtcgagggtggatttgttacaatggggcaacaactatttgaaactggaacttgtaaccatgataattctgaatcacaagatagtgctccgtttatgaattcttggtcagacccatgcctagaatttgcatttaagactcttacaggcgtgataccagtag

SEQ ID NO: 6372 - DNA, 316 bp, Glycine max
  Clone ID: PAT_MRT3847_105764C.1
acactagatactggtccttcggcctcctatgttttgtgctcagcttataatatagccagctcgctagttcaaagaaaataacttccaacttatttaaaagaaagtacagacggggcgaacggcttttaggttcaaatttaaaatactctccaaatgtgtgtgtaacagaacattacctcatcaagaataggttctagctccctgtgccgagcttcagcaagatcaaaaccattcttgcggagctcctatgatgaattgatccagcagaatttaccacaatacaggacacattctttggtgtgcaactatatgaacg

SEQ ID NO: 6373 - DNA, 414 bp, Glycine max
  Clone ID: PAT_MRT3847_105765C.1
ggttctagtgtatgtgattgttgtgactcgttcttcttcgtcgttatcttcttcttttgttgtttgtgtgtttgttttgtctctcagctgaaaatgtcttgctgcggtggtaactgtggttgcggaagcgcctgcaagtgcggcaacggctgcggaggctgcaagatgtacccagacttgagctacagcgagtcaaccaccaccgagaccttggtcatgggagaagctacattcaagattaattgctttgcagaagaatctatgtctatgctgatgatggacaatttcgtgatggatatgttgaagatttcaatataattaaagctttttgtaaaaaaaaatatttgtaaaagcctttttgtccgacgagagaagaggggaaataaaaagtgtaagagtaaattatatcaaaaa

SEQ ID NO: 6374 - DNA, 178 bp, Glycine max
  Clone ID: PAT_MRT3847_105766C.1
ggagatggtagtggaagtgtcacttctattttcggatttgcgttttagattggagtaggagatattgattggattgctattggtatagagttatgatgtgttgtcgaatcttgttggtggttagcgctctctagatagaggcacaattaggagggtgttattccattcccggcatctc

SEQ ID NO: 6375 - DNA, 543 bp, Glycine max
  unsure (1)..(543): unsure at all n locations
  Clone ID: PAT_MRT3847_105767C.1
gacccacgcgtccgacggattttttgttcgagtgagagtgcaaatgaacaacagttcgccggcgttgacacttccgtcggatacgtcgccgtcagtggtgaacatgttcagaatcaacaaagttgctgaccgtttggcttggattgctcaacctggcaaccgaggcgagcctctctaattttacaacctctgcctctcggtgtgtggaggcattgattatgcacttgccaatggcgaaactccacccaagggtgatgatctgccactactcgtgaaacagatatgtcaactaaaaaatgatgaatgttcgcatgcagctatgatggtattgctgatatctataaagaatgcttgtgaaattggatggttccataccaaagaatctgaggaacttgttagtattgctgatgagatcggaaaggtctacagtagtttggggactataaatgtcagacctagatcttgcagtcctgtgatttnatcatttatgcagaatttttattctaaatgtaaattgggttcttatacttgcatcgattgaag

SEQ ID NO: 6376 - DNA, 285 bp, Glycine max
  Clone ID: PAT_MRT3847_105768C.1
ggggcttaattttaccattaaatttatcactaattaacttaacaataaacaaaataaaatgtgggataggacaaagagactaggattttccttactaacgtaggaggcaaaataacaaaaaaaaagaaagaagaccgaaaataacttttaaaccaaataaaaaaaaacctaacaaaaaaccaaaaaaaatatgggcataggaccaaaagaaaaggggctgcccaccaaccgagcaaaggacaaactatggatttaacaaaggatggagtaaacgaaagggagaaa

SEQ ID NO: 6377 - DNA, 3230 bp, Glycine max
  Clone ID: PAT_MRT3847_105769C.1
cccacgcgtccgcccacgcgtccgcccacgcgtccgagttcttctcccgatggaactttcctcaaagaaagagttactatctcgaatagtatcaacactaacgcccaccatcacactcatcttcttcttccttgtgctttctccgagcctgtgcacatcactcggaagcaccaacacagttggatcggagttgctgaaggttgctccttctgaatttgaggggacagtgagaaccgtcgttgatgtgttgcaagaagtcacctctattctctccgagttcggttctggcttcggcgattcacgtctttctccacgcgtccgcggacgcgtctcgagccgctcgagccgattcggctcgagggctattccttcactaataaaccagccacaaagaacaccctctctcacattctccttcctcctctttctcgctatctgcaccccattggatgctgctcacaccgacttcgcaggttcagcctgcctcaaagtttcccctagccacttcgccggctcggtcaccgaagtcatcgctgccatacgtcaactcgcttcgatcctctcacgcttcggctctcccttggccaacttccgcctcagcaccgccatcgccgactgcctggacttgctcgacctctcctccgacgtcctctcctgggccctctcggcctctcagaaccccaaagggaagcataacagtacggggaacctgagttcggatttgaggacatggctaagtgcggcgcttgcgcatccagagacgtgcatggagggattcgaagggacaaacagcattgtgaagggtttggtctcggcaggcatcgggcaagttgtgtcgttggtggagcagcttcttgcgcaagttcttcccgcacaggatcaatttgacgccgccagcagcaaggggcaatttccttcttggattaagcccaaggaaaggaagctgctgcaagcaattgcagtcactcctgatgtcactgtagctttagatgggagtgggaactacgctaagatcatggatgcggtgcttgcggctcctgattatagcatgaagcgttttgtgattttggtaaagaagggtgtttatgttgagaacgtggagatcaagaagaagaagtggaatattatgattcttggacaggggatggatgccaccgtaatctccggtaaccggagtgtcgtcgacggctggaccaccttccgctcagctacattcgctgtgagtggcagagggttcatagcaagagacatatcctttcagaacacagcagggcccgagaagcaccaagcagtggcactaagatcagactctgacctttccgtgttcttccgatgtgggattttcggttaccaagacagtctctacacccacacaatgcgccaattcttcagagactgcacaatcagcggcacagttgattacatcttcggtgacgccactgcagtgttccaaaactgcttcctaagagtaaaaaaaggcttaccaaaccaaaagaacacaatcacagcacacggtagaaaagacccaaatgaaccaaccggtttctcattccagttctgcaacataactgcagattctgatcttataccttctgttggaaccgcacaaacgtacctggggagaccctggaagagttactcacgaaccgttttcatgcaatcgtacatgagtgaggtgataggggcagaagggtggttggagtggaatggaaactttgcattggacacattgtactatgctgagtacatgaacactggagcaggtgctggagttgctaaccgtgtgaagtggccagggtaccatgcattgaatgattcgagccaggctagtaacttcaccgtgtctcaatttattgaggggaatctatggttgccttcaactggagtaaccttcactgcgggactcacagtttaacagaaataaactactgccacgccttggcactctcttgtacttaattatataaagttattatatatttatagtttatatcataggaagaaaaaaaaggtattataagaaagaggtgaatgggtccgtgttcactttaattaattggtacttgattattaaagattttccattttttggtaaaggagtacttggggagttcggtgttttttttcttcttttttttattaaagggaggctatagccattacaaacgaataactctagggaaacaagttcccatacaatcactccaaagcaaacccttacaatctacaggaagtagctcgaaaatgtgcactcctatagggatgtcaagacccttggctgccaaacaatcagctacattatgcaacatttgtttcctgaatcatcgaccactacactcttccccacaggattttcctccatgggttaaaccaggggaagaaactacaagcagcaaatttggtgagtttcatcttacgttatttctttaggttagcctatcccaaagttagttaaacctattcctattcccgtgtataagcctataccaaaaccaagccgccttggtgaagcctatttcaaagccaattccaattataaagtcaatttctaatgaagaagaaaaatttaaaggacttccaaaacctattccagtaattaagccgattccaaaactaattcctgttgtaaaacctattcctgttccaatatataaacctacaccaaaattaattcccatcattaaaccttttccaattgttaaacctgtaccaaaaccttttacagtgcaaaaacccatccccgctattgacccagagtcttttctaaagccaacctttcccaaagaaacctattatttataaagcccctccaaccttaatttcggaacccactctttttccttttccaaaacccatccccgttttcgaggccacttttagaagcctttctttgagaaacctattcctaaattgccacttgaccctaaattcaagaaaccacttttgccacctttcccaattcaaaagccaatttcaagtccataagatgataagactttaccacctctcactaaaaaatatcttgcttagacgatctatttctaactcctatttatgtgctctatatctcaaaattattagttgcacttgataatcctagggtatctctctttatgttggaatacctatatagttaatgttatctcctcaataaagttctcaatatttgcggttgttaatcaattttatattaatacaattacaaaaagtgggttgattttccctttttt

SEQ ID NO: 6378 - DNA, 377 bp, Glycine max
  Clone ID: PAT_MRT3847_10576C.1
ggcgagcgaaacaaaaacatatccatgtatttagaggatcaaataaaacaacaaaaattttttaatattcacaaaagtttatcttgcgctccaaaaaagactaataattcccaaacaaaaaactacgcgcaccttcgccccgaatgaaactaataaccttccttgaagtcaatgaccacataaaaggggataggggtaactgtcttcaacattgccccctcgaccatgaaaacaagtttgggaccctgaagctgactcttggtgctgatcttctaaaccttggtcttggccacagccttgaactgattattttttatcttcctaaggcggaacttctcattgcacctgaatggcataacatgctccacacgcacgtg

SEQ ID NO: 6379 - DNA, 246 bp, Glycine max
  Clone ID: PAT_MRT3847_105770C.1
ctcttcctacttgaagaaagtagtatacatccctgacaagattccttttgatccgatctcttgttttgagggagacaacatgattgataggtccacaaaccttgactggtacaagggtccaactctgcttgatgcacttgaccagattattgagccctagatgccctttgacaagcccctcatgcttacccttcatgatgtgtacatgattgtaggtattggaacttgtgccagtgtgacgtgttt

SEQ ID NO: 6380 - DNA, 206 bp, Glycine max
  unsure (1)..(206): unsure at all n locations
  Clone ID: PAT_MRT3847_105771C.1
agggntctcatgcctggaaacaaacttgctatgcacgagtttatggttcttcctgtgggagctccctccttcaatggagccctgaccatgggtgtctaagtgtatcaccttttgaagcctgtgattaaaaacaaatctggtcaagatgcaataaatgttggtgaccaaagtggctttgcccctaacatccaagaaaacaaggaatg

SEQ ID NO: 6381 - DNA, 442 bp, Glycine max
  Clone ID: PAT_MRT3847_105772C.1
cagctaccttcatcaacagggagtttatcatctcttaccacattacacttgcaaaacaatcaactttctgggaccctttatgttttgcaagaccttcctctccaagatctgtacaattcttactaccaaaatactttttagatatataaatgaataatatgtatatcctgcaactgcatcaatccatagaactagaattttttacttgtgatttattattatgtaggaatatagagaacaatttattctctgggccaattcctccaaaattgctgactatccctaatttcagtaaaaatgggaatccatttaatactactattattccatcacctcctgctgtggcccctgcacctgtagctataggttcatccccccaagaatcgccttggaaagtggcacatggtccttctgccctgacagcaccagtgcctacaagtac

SEQ ID NO: 6382 - DNA, 517 bp, Glycine max
  Clone ID: PAT_MRT3847_105773C.1
acaacatatattttttaatgttgatctttgtagaaccttgtgaaactgaatgctctgttagtccaatgttttcttattaaaaacaaggaaaaaaagagcgaaaaggggcttttgttttttaatggacaaggccatgaaatgcaaacaaaaaaaagaggggtgttgaagagaatcataactggaactgcaggggagaagcatatccaacgccttaaaggtgtgcaaggcggggcctagatcataggttgtgggcaaaaaaaacaaaacttaatatcttgtgctggagcaagacaatgggttaaaatcatgtgctttgaaacaaacccttcaccaccatcttatacctcaagagggggaaaaaacacacggggtattttgaatcgatcagaatagttggaggcaaaaaaaaacagctggggcttcaaaagaatggcctcatacgtaaaaaaaaaatagataagatgcaccccggccccgccattagggcctcctaatataactgtggcaccttggaaca

SEQ ID NO: 6383 - DNA, 216 bp, Glycine max
  Clone ID: PAT_MRT3847_105774C.1
atgcctagaggcaaagttgttgtcacagtgaaaggcaaagttgcagtcacaaactcactgaggtggagtcacagtagtgcagtggcacaaggtcgtggtggcgtggtggcacatgtcacgatggtgcggggaggtagtgcagtggggcacagcttgacaacactcatagttgagagggaacgtgaaggactgaaggtggagggattagatatttag

SEQ ID NO: 6384 - DNA, 526 bp, Glycine max
  Clone ID: PAT_MRT3847_105775C.1
gtgtgagtttcctactggatttgtcaattccttcctatggtgggctcgggcctgatgggttatgggccgaaccaattttgatccagttgagcgcaaggaatatccgaatttccgcgtggcaaagctaggagtataaataagaggtagtgaagtaagctgataataatattggtggtggcagagtagcatagcagatggacctcgtttcggtgtttttccacgctttcaccttggtttaaaccgataagtggtggtgttccgcattcttttccacagtttggtcctggtccaattcagcaggtacgtgtgcatctttaatccacgctattttctgcacttcttcttgttcttttttcctgtatattttactttttttatgttatatctgctgaattaaaatacaaaaatctgagtatttttaattaataaaacttacttctcttcagtgaaatcatgagtggtgtgatgacttcattatgctgaccttctttccattgtatgcttatgctttcgtttttaaatcatg

SEQ ID NO: 6385 - DNA, 997 bp, Glycine max
  Clone ID: PAT_MRT3847_105776C.1
cacggaagcccggtagagggcacatgattatttagattataatctatagaagaggcgtttaacagtaagaaaattgggggtttaaggtttaaggaggtgttggacatggcatggtagtactagtagaagcaactaggaagcactgaagcagttgatgatggtaaataaatgattatgattattccgtactctctctctctctctctctctgcatacttatgccgtgtctcccactccactattaacaaacatgtcattgctcacactgccaccacactcatgaatcctagtcatgaattccaattttaaaccccattgcctctccgcctgccaccgccacccctccgtccccgtcactggcttctgcgccctctgcctccgcgaacgccttgctggcatcccctccgacgaccaccctcccccgccagacctccgccgctccaagtcctgctcccgccctgccacctccgaccccgctccctccccccgccgccgctcctgcgccgtccgcccccgcagcaccctctccgatctcttcacccgcgacgacaccaggaaaaccaaacgctctcacaaaccgaactctgaagttagggtttgtgacgacgacgacgacgacgacgacgatgccgacgaggaaaccaagacggtgaaggagttcatagatctcgaaatactgcagcgcagcaagaggaacgccgcgagggattccagaaccttctggaacgcagccaccgagaagttcaagaagtggaaatggaagcaccggtcaaagaaaaacggtgatgctgacaataatgatgataataatagtgataatgcaaacagaaatgcagcatgaaaggttcatcgaaattttcatgctttattcacattttacggagtatgcttctgctgccgaagtccgggccagctatgctgttggttatatcgatgcatgaacttcaaattgtgaagtgtatacattcctcaattattgagtacctgaaccttcgtc

SEQ ID NO: 6386 - DNA, 2966 bp, Glycine max
  Clone ID: PAT_MRT3847_105777C.1
ttatgctaaaggaacgtgaaagtaaaacggacggtggcgatagaagcgtctctcatctccatcgtctcctcactcctctcttctccagcgttcattttttctcgcgcccaaatacaaaatcacatcacaacagggttccgtgcgacccaatgtccgatagctctcggcgagtcctattgctggggcggctagcggaggcagcgaacgagagcggcgagcacagtccccgctccaatttccgccgagcaggagccgcttactcacccatcgccaacatcagccgcatcatgaagaaagcgcttcctcccaacgggaaaatcgccaaggacgccaaggaaaccgtgcaggaatgcgtctccgagttcatcagcttcgtcaccagcgaagcgagcgataagtgtcagagagagaagaggaagaccatcaacggcgacgatttgctttgggctatgaccactttaggtttcgaggagtatattgatccgctcaaggtttacctcgccgcttacagagagattaagggtgattcaaagggttcggccaagggtggagatgcatctgctaagagagatgtttatcagagtcctaatggccaggttgagaatgttgctcatcaaggttctttctcacaaggtgttaattatacgaattcttagccccaggctcaacatatgatagttccgatgcaaggccaagagtagatattgatcctctccttcagtgtttgacatgtgtgatctaaatgccagtggaacttttatgtcaatatgtgcccttggtatattgaatgcattttatgttatgtaaacactacatgcggggatgttggttcttgtgaccagatattatttattaagacttacatttatctttggaaaagaatcattattcataagttatattgtaaattctggaacaatgcttgtctgattccatcaatcgtcctggtaacgattttatgtacctgattggaagcataaattggtatattctttccttataccatcaacatattcttgagaaaggattactgctggaaggtctggttctggaaaatatcgataatcagcaagcccttcctttttcctcattgtaattgttctctgagagccttcttcccataaacgagtttcttgtactatctgatcttcccggccttgactatggagttgcacctgcctagaaatttcaaaatcaatagctctgctcactgatgaaaatgagttcaaattttttatttcaacctttgtcccaaactttgattgcccaataggtcgtattgatacatttacatcacaacgaagagaaccttcttgcatattgccattgctcactcccaaataccgcaccaacctctgtaattctgccgcatattctgctgcttcaataccatttctcatgtcaggctcagaaactatctcaagcaaaggtacccctgccctatttagatcaacctgtgagtaatttccattctctgcatgtaggagcttccctgcatcctcttccatgtgaacccttgtaatgccaaacctcttgtggcccccaccaaactcaacaggaatatccacatcaagaaaaccagcagtggcaattggcacatcaaactgagaaatctgatacccttcggaaggtcagggtagaaatactgcttcctgtcaaacttccctgctggggggagctaaagatacaggggaactggaattccttgggttattatccatgttgtcctctgatctctttctcttcctcacatcatctgctccaactgcaacagctttacctccttgaggcttttctgtttgaccatggccagaagcccttgatttggaactctgtttattctcggcagttacttttgatgggaaggtaggtcgcacaccaccaggaaatatgtagttaggaatgttactgcgtttcacatgggacacatggatattcattccaggtttccatagagtgtaagcattgacagaatgtttaaattcttcaacagttagccttatatcaaactgttcaccttcattcactggaactccttgcttacgctgcagacccataaagtaacagtggtgaaagggtctagaattgtctgagaattcaccaggatgtggatgacattgaagcataccataagtgtgcctctcaatcttcaatgtcaactggcggagacgagactcaacccaacctttccattgtctaaggtcatctgcattctctgctgttatatctatctgtagataattcttgtatgattcaaaaaaagggataaggctcaaaaagagtatcccaatcagccttgctagcctccatagcctcacatatttcacttccccttcgaaactcatctgacataacacgcaatgtacttgatgtcacattgtaagtggagttcatacagggataaacaggagtaattataggcattagatgatatctatccttgggatttcttctaggatcccaaactggtagtccaagagatccttcttcaatagcacaaagcatgactggatttggccatcgccattgagtatataccctaaagaatcgagacactaacatatcaggaagtgcattaggatataactggcatattcgagcaacaagcaatgctaggtttataccaccaagaaaacctgcaacatttgaatatacaccacgacgcttggcccaaaacctcatgcatctcaatgtcgtgcgaaaggtctgaatatttggaaccaatcgcaggacctgatcagttactctacaaccatttagactaagaacagtttgttcgtcaacactttgtaatattgattcctgtgatatatctaaatcttcaggaataacccacaacgctaatcttgcatacaggagatcaacagaaactccattaaacttgaatttcaccacagggacatgagcatcaggcacagggtgcaattctgttacttcttgcatctcagatagcatcttctgtagcc

SEQ ID NO: 6387 - DNA, 733 bp, Glycine max
  unsure (1)..(733): unsure at all n locations
  Clone ID: PAT_MRT3847_105778C.1
nattgaattcacttaaaaattctcaattttttccttcgtgttctctcttcctcaatccttctttttacacgaagttcgggtaatcatcatcgaaccgaattgaaaccgtgaataatatattggtttctcgtggcggtgatcatcgttgtacccagaaattgaaaagtgtgttattgaaaatatctgattcagttttagttttttttccttttcttattatttttttcatcgttgttgttgctcaagttcatgggagcgttttttttttttttttttttttgtgttttgagctaagaattttttctgaaaagggtttgcttgtttaggtttttttaatttttattttatatttttattgtttcttttgcgtcacggtatggttgttgtggtgagcttattttcagagctgaaataacgggaacgagggtctttttatttttattttaatttattattttacttttattttattttttggtgattgttgttcggtgcggtgaagctgtgtccttcgtaaacgaaacgacaccctcttcttgggggtgaaattatgggccatttagttatcaattttatttaaaaaaacattttttttattgaggattttcatctcataactgagtttgttagtttgattcttctatgatcaattcatcaagttgctttgcagtttggttcatggtgttttctggtgatcaacactaatcatatttgaaggtaataaacaattgat

SEQ ID NO: 6388 - DNA, 139 bp, Glycine max
  unsure (1)..(139): unsure at all n locations
  Clone ID: PAT_MRT3847_105779C.1
actttgaaattcnttaaccacctaacatggtccgaaccattcggagccacacgtgcaataagttcccctcctctcatcttctctcccctacaacacaccagtgtgattttagnngtttcagcctttatcttgcgacaga

SEQ ID NO: 6389 - DNA, 567 bp, Glycine max
  Clone ID: PAT_MRT3847_10577C.1
ttttcctttttttttttttttttttttttttttttttttttttttttttttttttttttttttttttttttttttccccaagaagggataaggggaaagctagtagccccataaacaaaacaggtttggcggggccctgttataaaccccccccccccccttccaaaaaaccctccctcgtttgaaaaaaaaaaaaaatttatgcccccggggggcggaaaaaaggaattttccccctttttgggtttggtttggggggaaagggggggggagtttcaagaacccccccaattttttgttttccccccaaaagcggggaaatggggaccccaaaaaccgaagggttttttcgaattcagttaaaggcccacccacccaatctttaccttgacaaaaattttttatttttttgcttcccaccaggggacattcaacccatacttttccaagcgggaagagaaatagctatttaaccggggtggaaacggttaaaacatggcattcacaaccaattttgggaccaaaaccgctggggcaaattgcaaacccctgaaatgccgaaaaagg

SEQ ID NO: 6390 - DNA, 965 bp, Glycine max
  unsure (1)..(965): unsure at all n locations
  Clone ID: PAT_MRT3847_105780C.1
cggacgcgtgggcggacgcgtgggcttgatttcaatccaaagcaccaaattcgcaaaactaaagtgttactaaggtgagagagagagaagaaaaaaaaaatggtgaacttcatgttgatgattactgcagagcttgagaacctcacgaatctgcaaccccaagatggctgcgacgaccccaacttctcctacctcttcaagttgaaatgcgggagatgcggagaactgagccagaaagaaacctgcgtcgtcttaaacgacaccgttcctctccccgttggcaagagcaccactcatctcattcaaaagtgcaaattttgtggcagggatggcactgtgaccatgattgaaggcaaaggtaaaccactcacccaggaaatcagtgaatcagggaagtacgccccattgatgttatttgactgtaggggctatgagccagtagattttgtattcggtgatggatggaaagttgaatcactggagggaactaagtttgagaatgttgacttgtcaagtggagaatatgccgagtatgatgagaagggagagtgcccagtaatgatatccaatcttcgagctacttttgaagtgacaaagtagagagaactggtttactgtttgagtattttcttgatgtataaaattgactgttctcttcctagatgagcttttgagctctgggttgcatcataattaggcaagaaatttgtgggatcttctaacattacatgttaaccttgttgtattgaagaggaaaaaacagcttccaagttccatgcgtttctggtttactatctgaatattttcttgatgtataaaattgactgttttcttcctagatgagcttttgagctctgggttgcatcataattaggcatgaaatttgtgggatcttctaacattacatgttaaccttgttgtattgaagctggtnnnnnnnnnnnnnnnnnnnnnnnnnnnnnnaa

SEQ ID NO: 6391 - DNA, 867 bp, Glycine max
  Clone ID: PAT_MRT3847_105781C.1
ccctcccggccgctggctctctctctctcaatggttgtgatacctatcctctgtttatattacgtgttcaaaaggacggcaatagtggattgatttcaatccaaagcaccaaatccccaaagcaaaagtgctactgtcttagaaagagagagagagagactgcgtttgacgccaagagagagaaaaaatggtgaacttcatgttgatgattagtgcagaccttgagaacctcaccaatctccaaccccaaggtggctgcgacgaccctaacttctcttacctcttcaagttgaaatgcggaagatgcggagaactgagccagaaggaaacctgcgtcgtcctaaacgacaccgttcctctccccgttgggaagggcaccactcatctcattcaaaagtgcaaattttgtggcagggatggcactgtgaccatgatcgaaggcaaaggtaaaccactaacccaggaaatcagtgaatcagggaagtacgctccattgatgttatttgactgcaggggctatgagccagtagattttgtattcggtgatggatggaaagttgagtcgttggagggaactaagtttgagaatgttgacttgtcaactggagaatacgccgagtatgatgagaagggagagtgcccagtcatgatatccaatcttcgagctacttttgaagtgacgaagtagagagaactggtttactatctgaatattttcttgatgtataaaattgactgttttcttcctagatgagcttttgagctctgggttgcatcataattaggcatgaaatttgtgggatcttctaacattacatgttaaccttgttgtattgaagctgataaaaaaaaaaggtttaattactt

SEQ ID NO: 6392 - DNA, 550 bp, Glycine max
  Clone ID: PAT_MRT3847_105782C.1
attcggctcgagggtcatagaccttaagaaaagcctattaagtctgataggctggcttatttagcaaaaatatttttttaaaaaaaattattattattatgatatataatattatagttatttcaatgaaattgcgaaattattttaatgatttgacgatttgaatcattttaatgtttggaatatgttgattcctataagtgtaaatgagtagcaggaataaaggctcttttcttttggtggaactcaaaagactttggtagcctatcacgtgtaatatcaataggcaagttttggccacatcttgtggtgtaaaattgtcgttttgtttttaatgaaaatctttggctttgttaaaggaaaaaaaaagtaaataggaatgcaatgcatccaattttgggtaacttaggaataacatataagtcgttgtttcccactttaatatttcaacgaataataattttattatcatacaataattttttacactttgtaatatgaaaccgacctttaaataggcttacgggtcaagcccgacttatataaaggc

SEQ ID NO: 6393 - DNA, 479 bp, Glycine max
  Clone ID: PAT_MRT3847_105783C.1
ggaggcacgccccagttgttcaccccctattcgttgacatgaaagattgactcagatacgtaggcgaaattactgttgtgattggggaaacaacaccaaacgatctgtagggaaagattgtacatttgctgattgctgtggacgcacaaggaccactcttttactcaatggtctgcctgagaggaattcacagagacctctctggcttatgttctcgcaaataggcactggactcttgaaaggccggaatgcgtgggttcaagacttcatacgacacagctcgcctggtggagcgcacaatgattatggctgttctttaacacgacgggcgtaaatgcctctagttgaacgtcgccggtagctatacgagcctgatgagatgagagcactgtttcatctggatcatgcggattggcatgcctggtgtttgagctgatcttacactgaatgctgagaatctgtctcacatgggacccgac

SEQ ID NO: 6394 - DNA, 476 bp, Glycine max
  Clone ID: PAT_MRT3847_105784C.1
caaaaggcataaagtgcatgtctcgtctttcatgaacagagataatcatatcaaacagcatcaaccactcatacccctgcaccccaccgggcgccccatctccatccacacccccacttcctccaccttccactccacctccccctgtcccatgttatatacaaactcaaattcagaatcgtcagctcactcacctgtgttcgattgatggggacgagacgaaatgatgatgtgatgtaataatgtgatgttgtgatgttgtggtcgttggagtcgtagcgggtcctcgtcttgtcagtagtcggttcaagcggaatgggagatggaaacgatatgcgatgtataagaagaaagggtagaactttcgtaggccggtcgatgagaggccagcatggcaatggctcgagagaagttggtgggcagtgtcttgaagcgccgcattggaaagcctgcgacagacggcgaggtggaaagcg

SEQ ID NO: 6395 - DNA, 279 bp, Glycine max
  Clone ID: PAT_MRT3847_105785C.1
gccacgcatacgggaggtctctggaaggatattaatggaattgatgataagacggatgccagcatggtttgagaagaccaagaagagataacggtagaacttacggaacatactgactgcaataaattgcgaatgatggcatgtcgacctgcaccgagtcaggtgacttggatggggtatgccactgcatcatgatagactacaagtgattatagaatcactgattcactggcagaccctactgaatcatatcacaagcatgtagaggagttcgctaga

SEQ ID NO: 6396 - DNA, 382 bp, Glycine max
  Clone ID: PAT_MRT3847_105786C.1
cggggcggcccacacccgtccgcccacccttccgattggggaaagtcttttgggaaagggaacctttgaccggaaataaatgcggggctttattgttggagttggtggaaattccacttgaaaaccgggtggttctttaaactccagtcccacccacggttggaatagcctttttatgtaccatctttaatatggataatctaaaaatccaaatggccttttgcaccctgttcaatattggggaatgataaaggattctaccttacttttccatttttggtggggtggccaaaggccaccagaaggtttgtttaaaagagaaacggtttttagggtaaaaattggtggtttttttacgtttttaatccagggtacctttaat

SEQ ID NO: 6397 - DNA, 331 bp, Glycine max
  Clone ID: PAT_MRT3847_105787C.1
ctacgagtgaacctgccattgcatcaagttaatatcgatcatatactaaacaggtaacatgatggatattctgctggtgaaattttaaaaccatatgcactgattttcatggtaggactcaattaggtgaaaaaggacagcgttaccactgtccactgtgcatgtccaccactaaggctacattttgccaacccttattctttaagaggtgcttaataactacttatgcctgttgtatttacccggaccatcatcattgactactacacctatgtacctgacaagtgcaaatgactctagcatgtaagattcataaggctactacgtttac

SEQ ID NO: 6398 - DNA, 680 bp, Glycine max
  Clone ID: PAT_MRT3847_105788C.1
cgacggaacacattctacgtactcgacagacaattccatccctgtcgtcgtttctcaactttgcgtatcagaagacttcattttcttctgcatttctccgttaaagaaaaagcaagaacaaaattaaatttactattttgtgtgtgacactgtgtcttatttatgctctttctgtattttctttctacatctatattctaaaccttccttttcctttctgtctgcacctgcgttttcatttattgatgtccttcttttgttttatttgccaagatgattttctgattggtttttgatgttacaaggaaatctgggcatgttccacgagcctatcttacaggactaaagagtgagtgatggaggaattggcaggggcgtttggcaccagcgccagcttggctcttcgtttgggtcaaaccgttttctcttcttcttcccttctcttcatgtgtttggacgttggtttctactcttacactgctttctgctattcggctacaggctgggggttcgcattgccctccagcagtacgtggttggtggcagttgcctgctccgtcggccttctggtcttgccggttcaacgaaggctcataatgattatcttttttggagacatgatgttgtcatgtctgtcactagctgcagcatgttctacagccagcatcgcagatcttcta

SEQ ID NO: 6399 - DNA, 636 bp, Glycine max
  Clone ID: PAT_MRT3847_105789C.1
gtctgaagtatgatcattctttaattttctttctatctagctatcaatcggaaacaaccacgggatagatgcacttttacaaaatgctagtgctcggtagttgagggaattgccccctcatttgttacaggggcacaggtagttcaaggaactttgccaaaagcgatgcaaaatatcagtggagtgacaccattcaaatcattgatataggtagtggaaggaagaacagagtcgtatgacttgtgaataggaccatgcttcttagaatttgggtttaaacttaattcaagcctaaaagctattttaccggggaatatagattgtgacctgcgatgcttaactgagagacatgaaaaaccatgaagtcgtgaagattagaagttgaagtatctaaaagcaaagaacaatgtatttcaagcattaggtcattctaccttgaagacaatcgttagtaaataaaaacacataaaggggaatttgggactctgaatcagaaatatcaaggtacaacacgagtcaaacgtgcttatttgcaaacattataaggagtttgaagtgctccacacccagaaaggagactgggtgaatgagtactttgcttgcactcgttatcatcaacaagatgagaagctaggg

SEQ ID NO: 6400 - DNA, 247 bp, Glycine max
  Clone ID: PAT_MRT3847_10578C.1
aagaaacataccgaaggagaacatcatggtggtgctaaagcggtgtcaggtgctactgttgctcgtggtgggagcttctcgcaccgacctgagcgctgagcaaacgtgaccatgctcataggaagggatcatgatgagcacccaaaaccatgctgagacctcatgaatgtgctctcgctaatggcctcataaaagcactggcgaagttatacggcgaaattcatgcaatctacattgtaaaagctgt

SEQ ID NO: 6401 - DNA, 798 bp, Glycine max
  unsure (1)..(798): unsure at all n locations
  Clone ID: PAT_MRT3847_105790C.1
ccacccgtccggtccgctttcctttttatccttagtataagagagactactagtttaggacgaaatttatggtttacttcggagaataattttaaaatatcatcgaacaagcagttagagttgtgaggcgcttttagccggagttgcttctctcatcgtcagttgtcgttacgttggtcgaccgagtgtctgtgcagctaattctgcaaagcgaagagggaattttgttaggatggttgaatattgacaagagaaataacgggaaacaatagacatggataccggtggcaattctttaccatctgcacctgatggggtgaagagaaaggtgtgctatttttatgatccggaggttgggaattactattatggtcaaggtcacccaatgaagccacatcgtatacggatgacacatgctcttctagcccattatggattgctacagcacatgcaggtccacaagccatttcctgctagagacagggacctttgtcgttttcatgctgatgattatgttgcattccttcgaagcataactcctgaaacacagcaggatcatctaaggcaactgaaacgctttaatgttggtgaagattgtcctgtttttgatggcctctactctttctgtcaaacatatgcagggggttcagttgggggtgctgtcaagttaaatcatgaccaatgtgatattgctgtcaactgggctggtgggttgcatcatgccaagaagtgtgaggcttctggattttgctatgttaatgatatagnccttgcaatcttanaacttctcaaacacat

SEQ ID NO: 6402 - DNA, 1228 bp, Glycine max
  Clone ID: PAT_MRT3847_105791C.1
tcccgcggtcgcacccacgcgccgcgtccgacggcgttttgtttggagaagaggggctgagggagaggggatggaggacattgaggatttgctgattggaagtgcaactccaccgggctttcgtttgccattagcagcggctgttggcgtggggacaaagcggaatcaactctcttcttcttcgctttcgccttcacctgcaatccctggcactcagactatcttcataaagacctttggctgctctcataaccagagtgacagtgaatatatggctggtcagctttctgcttttggctattcattgagcgatgatcctgaccatgcagatctctggctcatcaacacttgcacggtcaaatccccaagtcaatctgctatggataccatcatatcgaaaggaaaatcttcaaataaaccactagttgttgctggttgtgtccctcaaggaagtcgggatttgaaagagctcgaaggaatcagcatagttggagtccagcaaatcgatcgtgttgttgaaattgtagaggagactttaaaaggtcatgaagtgcgtcttttgacccgtaagaaattgccagcacttgaccttccaaaggtaaggaagaacaagtttgttgagattcttcctattaatgttggttgtttaggtgcttgcacttattgcaagacaaagcatgctcggggtcacctaggaagttacacaattgatagccttgttgggcgtgtaaaatctgtcatatctgaaggggttaaagagatatggcttagcagtgaagacactggagcatagggtggtgacattggtgtcaatcttccaacattattgaatgccttagtagcagaactaccagctgatgcaagcacaatgttgcgtattggaatgactaatccaccatatatacttgaacacttgaaggagattgctgagattttgcgccatccatgtgtttactcttttctgcatgtaccggttcaatctggaagtgataccattttgagtgcaatgaatcgagaatatactgtgagcgagttcaggactgttgtagatactctaactgagcttgtgccagagatgcagattgccactgatataatatgtggatttcctggtgaaactgatgaagattttttgcaaactatcaaccttattaaagagtacaagttacctcaagttcatatttcacaattttatcctcgaccagggacacctgctgcaaggatgaaa

SEQ ID NO: 6403 - DNA, 181 bp, Glycine max
  unsure (1)..(181): unsure at all n locations
  Clone ID: PAT_MRT3847_105792C.1
cccacgcgtccggtctctttccaatcagatagggtgggagatttcagtgaccccaccacccctatgagcagctcaagtgtgacatttnattaatanagaaaggggtcacattggcttttttttggttttatacttttctttttactctttatttttttgtttttttttttttctttatttt

SEQ ID NO: 6404 - DNA, 431 bp, Glycine max
  unsure (1)..(431): unsure at all n locations
  Clone ID: PAT_MRT3847_105793C.1
ctctaacttaattttacactttttttaccaacacccctcctattctgcaggaagactccttatctaatggtactaaggnccctcatccctttccctccccctataatacatatttacatacatttattctttccataccttcattacttacttacaaaccattttattaacttcctccatcttatacaccctttttcaaactttctcttattacctcaacatactcctaccttatacctccctttcttaacttcccaatttataaccacttccttctatttctcatacttccctacttcttaaaagtcagctttactttcactttttatcatacttccatatcattactaattccttcttcacattcttctattcaatctattccatccctaacattttactcttcctataaatacctcaattccctttta

SEQ ID NO: 6405 - DNA, 383 bp, Glycine max
  unsure (1)..(383): unsure at all n locations
  Clone ID: PAT_MRT3847_105794C.1
ttttatttttgttatgttgtatgcttgtttctggtattaaataatattgcttttgccaaatatcatgtgcatgatgaaagtagccaggaaaccacatactacctctttaatatatggcccccgctttcacatctaaccttatgaccataggctttatgcttcctgtttgcacacccagttgttgacgcgttgtttcctatttaaagaggaacatggctgtataaattaaaaattcttttttaaaaacccccccacggaaaagaaatatgacccttntaattcttctctggcttccaacctaaatggggagggcatgtcttttatttttgaaaggactttatggctgcaagctatggctccgatttttgtgggcatgtaatgat

SEQ ID NO: 6406 - DNA, 114 bp, Glycine max
  Clone ID: PAT_MRT3847_105795C.1
tctgttcagcattttgaaaatgatataatggcgttacaaggttttaaattgcggttttagtcgcaattcacatttccgatgcaatcacagttataatactaaaagaaatcttta

SEQ ID NO: 6407 - DNA, 339 bp, Glycine max
  Clone ID: PAT_MRT3847_105796C.1
ctagagtctcacaaaattcttgcgttttcggactatggcctcgcacgtcaacattggctatcacacttcctcttctccgtatactaactgcactaagattctctcacacctgaagctgactagtaactcctatttgcactcgccactcatgcgcgacatgactgttctggcaaccagcgcagcccattacatggacgctcacacctgtctgtccccagatatcgctcgtacgttgcagaaccacaatagtacacactttcaacaccttctactaggtgtctatccacagtgccaggttgcttgtcctccaatacatgaacagctgttatcatcacaaga

SEQ ID NO: 6408 - DNA, 410 bp, Glycine max
  unsure (1)..(410): unsure at all n locations
  Clone ID: PAT_MRT3847_105797C.1
gacaaggtcatgatcgaatttcacagtggattcttctgcttgaaggaacactgtagccttgggctacatatagcaatatttgactcagcatgcagtagttatatttctttcactagaatagattatacttctgcatcattctgcatcaactggcccatgattaggagaaactttcaacaactttatatcaaataaattatgctgaaactttacaatatcaaaccaggttgtaaccttggcttatgtattttttttaaagatattaataatttttaagacttttaaagttaattaatactgttaatttttgtcaaaaaaaaaaaaaaaaaaaaaaaaaaaaaaaaaaaaaaaaaaaaaaaaaaaaaaaaaaaaaaaaagggnggaagatttaaaaggaaacacaaactaaa

SEQ ID NO: 6409 - DNA, 131 bp, Glycine max
  Clone ID: PAT_MRT3847_105798C.1
ctttaatactataactaacatcccaacaccattcatggattggactagaggccacaccctccgccgcggctccaccgcggccgtctacatcggggagtcccaccggtccggtgaagtgtttgccgtgaagt

SEQ ID NO: 6410 - DNA, 683 bp, Glycine max
  Clone ID: PAT_MRT3847_105799C.1
ctctattaaccacattcgctctaaatcctaacagaacccaaaagaaaagagggaaaaatctcttacatggcctcttgatgccctggcaatgtggcaatccttgccatagccatttacttacatactacctgcaccacctagcatgcttgaaagggtcatgatggagtgagcaaagggaaataaactattggacttggacaagatcgcatggacttctgatctgaggatgaagatgttatctcaatgaacttgaccgttgtgacttcacttcttgaaaaatgtaatgtggatccaaagcaaagaggacatttatggaccgggagtgaaacaggtatcgacaaaagcatattatttaagaccttactgaagcaagtttttgacgcaagtggcaatactgacattgaaggtgaggattcaactaatgcaagctatggaggaacagatgctctgttcaactgtgagacttggctggagagtaactcatggcatggacgatatggactgggagcttgtacaaacactggagcatacacagagagacctgctggtcctactggatgatgtggtggaatagccatgctagcaaggccagatgctgctatcggtaatgaaagcatactcatgagcagtcacatgcttcaggcatatgagttttacaagcctaaccttgctatcgaatatcc

SEQ ID NO: 6411 - DNA, 130 bp, Glycine max
  Clone ID: PAT_MRT3847_10579C.1
ctcatacaggcgcctgtgctagtgctttatccccgctatccctaactctagaactgggcgggatttgcaccagcacaagaagcatggctacaatatctatcccttactgcatgaaagtctgggacatact

SEQ ID NO: 6412 - DNA, 468 bp, Glycine max
  Clone ID: PAT_MRT3847_1057C.1
ggcggtgcctggccgccgacggtaggctgggttcttttgagggggcggcccttttttttttttttttttttttttttttttttttttttttttttttttttttttttttcgggcccccccccaccttttggatttttaccaaattaaaacggggggggccccttttccaattaatttaggggaaaaaaaaaaaaggcttggaggggggggaaaaaaaaaggggggggttggaaaaggaacctggatttccaggggcctggcttggaataaaataaaatttcatgggaagggggggctgggccaaagcaaaggaaaacttggccgaaaatagggccgcccaacccccccccaatagggggcccaccccagtaaacccggtggtgtgggaggtcaccattaacaatggggggccaaagggggggggcgggtttaatggggcccccaaaaaagggccctgctgccaaaatg

SEQ ID NO: 6413 - DNA, 229 bp, Glycine max
  Clone ID: PAT_MRT3847_105800C.1
caacactcgagttcatattctagtgggccaagcatcgcacggacacggacccgcagcccccatgggggggccagacccaagaccacacggcgagaagccacagcccgagcatgcctggactgctcgaacaaccgcgccggacagggaaagagctacggatgcacaccggcaagacaaaggacgcacacgtctactggttataggagcacccggggagggcgcgaagaac

SEQ ID NO: 6414 - DNA, 325 bp, Glycine max
  Clone ID: PAT_MRT3847_105801C.1
agccacgcaaaaaaagaactattgaaacataattggtttatctcaaacatacacacggtcctgttttattgacacctttaacgccactcctaaatagggtctttaagtccttataattttggttggccgaacttcagattcacagaatgcagtctcgggaccggtatagtatctgtgtccatgccttccagatttgaatttaaatagtgagaccgagatgtgggggtgtgggcgaccaatgcactattgcggggaagaacagcagaataatggcttcgggactattaacgcggaaatgagagttccaacgctccgggaggaatgg

SEQ ID NO: 6415 - DNA, 111 bp, Glycine max
  Clone ID: PAT_MRT3847_105802C.1
ggctcgaggctgctcagaggaagcttatcagagaaacttatgccaaggccttgaggacatcttggccataggtcttggctttagttcctgtgattagttttctctgagtgg

SEQ ID NO: 6416 - DNA, 136 bp, Glycine max
  Clone ID: PAT_MRT3847_105803C.1
gcgactttccacaagaaccttttagcaaatctggatcatcagcaaatgcttcgtaaccattagctgggatttcccaatagagaggaacctttgccgcttgattagaaaccacaaaaaaggtagaagtggacttgtt

SEQ ID NO: 6417 - DNA, 271 bp, Glycine max
  unsure (1)..(271): unsure at all n locations
  Clone ID: PAT_MRT3847_105804C.1
tctttcnttctggagccaattcggtttgatgctgaccctaattccaattttatgtccgcgggcttgcaacgtaataacttttatatagggtgccctaaattaaattaacgggccggggtttaacaaccgtttggacgggaaaaaccctggggttccccaacttaatggcctggcagaacatccccttttcgccatggggggtaaaagagaaaaggccctgaccgatcgccttttccaaaatttgcgcagccttaatgggaaatgggacccc

SEQ ID NO: 6418 - DNA, 393 bp, Glycine max
  Clone ID: PAT_MRT3847_105805C.1
aagacaatgggagcaccataaactttctttgagagcttgccctaccagtttgagggaaccaagtatagaacacgtataaggaagaacaggggcattgagcatacgactgtgttgagatatgaccatctacctacgtgaacacgactgctgatacacatattcactgcttgtacctgctccaataacctgaatccggttctgagccatacgtcatgctatgatttcatcgaactgatatgctggtgcaactagatcctgggaaatctacaggcacagacctgacacatcatcttacctgagatcattatataacagattagccccccttggacttcacaggcgatattttctgcaaggcatacagactactataaaatactatagcccattgaa

SEQ ID NO: 6419 - DNA, 1503 bp, Glycine max
  Clone ID: PAT_MRT3847_105806C.1
atgggtcctttgttgtactcctctctccttgttcttgttttgatcctcaggtttgtgcaaagaagaagagtaaaaaatcttccaccatgtccaccaagtcttcccctaatcggcaacctccactacataaaaagcccactccaccgctccctcctcagcctatcagaaaagtacggccccatcttctccctctggttcggttcacgctttgtggttgtcatctcctccccaaccttgcttcaagaatgcttcaccaaacacgacatcgtcctcgccaaccgcccgcgcttcctcaccggaaaatacctcttctacaactactcaagcatgggctcctccccctacggcgaccactggcgcaacctccgccgcatcatcaccatcgacgtcctctcgacgtcgcgcctcaactccttctttgaaatccgaagggaggaaaccatgagggtcatacaaaagcttgctagggaaacatgcaatggcttcgccctggtgcatctcagacccaggctcacagagatgacattcaacaacatgatgagaatgatatcagggaagaggtactacggcgacgacatcgaggcggcggatgcggaggaagcgaagcaattcagagacataatgacggaggttatgtcgctgttgggtgcaaacaacaagggagacttcttgcccttccttcggtggtttgattttgacggtttggagaagaggctgaaggtgattagcacgagggcagattcgttcttgcaaggactcctcgaagagcatcgtagtgggaagcacaaggccaacaccatgatagaacatctcttgactatgcaagagtctcagcctcattactactcggatcacattatcaaaggccttattcagggtatgctgcttgctggaacagacacaacagccgtggctatagagtgggcagtatcttctttattaaaccacccagagatattgaagaaagcaaaggatgaaatagacaacatggtaggacaagatcgcttggtggatgagtcagacattccaaaacttccttatcttcaaaacattatttacgagacacttagattgtttgctccagcaccattactattgcctcattattcttcagaagagtgcaccatagggggattcactattccacgtgacaccatagtgttgatcaatgcatgggccattcaaagagatcctgaacattggagtgatgctacatgttttaagcccgagagatttgaacaagaaggggaagcaaacaagttgattccattcggattgggaagaagagcttgtcccggaatcggtttggcacatcgttcaatgggcttaactttgggattattgattcaatgctttgaatggaaacgaccaactgatgaagagattgatatgagggagaataaagggctggcattgccaaagctaattccattggaagctatgtttaaaacacgaccaatcagcgagaaagttatgcaacaattagctatatttggtacctaa

SEQ ID NO: 6420 - DNA, 404 bp, Glycine max
  Clone ID: PAT_MRT3847_105807C.1
acggctgcgagaagacgacagaagggtgccgagatagagtatataagtggtggacaaccctcacccatgaactaacttttgggattgagttaggcccaaacctacattttaagatggtatcacagtctatcctaaatccatcaaaagggtcacccactatattatttacgcatcaagcccaagagtgctaggcgagaggggttttattgggaaaaacacaagtcccacatctgcactgtatgctatagtgtttgctactcaacctagataaaacagaattatagtctgaccttcatttgctttgagaacacattggaatggaaacaaatgtgccatgctgagacatacatacgaccatggtacaagaatgacctctcaagtgcacaagaaatactatgatcaac

SEQ ID NO: 6421 - DNA, 240 bp, Glycine max
  Clone ID: PAT_MRT3847_105808C.1
ccgaagaatatagtaaactctacccaaaataaaacgaagagagtttttatcatacaaaaacgtattaatttattctctttgacaactcaaccactttaaatatcacccccctgacacaaaaagcacttaccatttatcaagtccattaaaatgttttaattacattctttagctcatatacatacaaccaacgtctttattgcccaatgaaaacttttatatctaaatctccaaactaac

SEQ ID NO: 6422 - DNA, 195 bp, Glycine max
  Clone ID: PAT_MRT3847_105809C.1
ggggcgacccacgcgtgcgcacacgcgtgcgtacagatgacaacagactacttagggttcgataataacatagaacggggctgttgagataagtctgaagagtgttactgtttcgatgaaacgactcatggattcgattgattaatgacatcgaatgggaacttttgtcgttgacgaacttccaacacaagggct

SEQ ID NO: 6423 - DNA, 304 bp, Glycine max
  Clone ID: PAT_MRT3847_10580C.1
tttttggaaaaaacgctaacagatattatttgttgactcaccagcatgtgtcctgaaggggcccgcaaacataaaaaaggactttggacgaaccctatggagggacaccaatgcatatttacaccggcgtgctgctcaaactctacgtagcatgaccgaccaaagattgaaaagctgggcgcgcctttcaatgtttgaactgcacctaccgaacactgggtgtatgagccgaacatcacatgtctagatgaaccgagtcagtacatacacatcattgggtgggactgtctgacaacatgcttca

SEQ ID NO: 6424 - DNA, 222 bp, Glycine max
  Clone ID: PAT_MRT3847_105810C.1
ctctctactaactcaactttaaagagggcttcatgggcatcaaccattcatggatttaagacttaacgaacatgtccatccctctaatgagaatttggatgaaaacacattggaatgataacttatctcacaatatgattccacagaatattaattatacacacctctttctctttacattatcatttcccctcctttaactataattgttagggaagcatt

SEQ ID NO: 6425 - DNA, 389 bp, Glycine max
  Clone ID: PAT_MRT3847_105811C.1
acttattcggctgggggggatcagcaactatgatatctttccgaccagagattgtttatcatattccaagataaaccccggtggaaatcaaatagaaacctaccccttcctccagggggattctttaaaaaaattttgacaaaaacatgggatttgtgtcactgcacacactccactaagggggggtgcaaaaaatgctgaatggtgtggaacaattttagttgtttggaagaacaatttctcaaaggggtgggtgaaaaatacaaaaagactggcgcccagaacactcttctgtggggaatacaaaagaacactgtgggcattcctaaatcgccaaaactggagagggggaaagagaactttcgcggtttccattttgaggtgtctaa

SEQ ID NO: 6426 - DNA, 2048 bp, Glycine max
  Clone ID: PAT_MRT3847_105812C.1
tcgacccacgcgtccgcccacgcgtccgaattcccgcctttctctctctgtctgtgtgagtttgtttcattttttgcgttatacctctcttaaagtgttcccgccagagagagagagagaggggggcaaggcaccgggaaaagtgccactaattgtgatgccgaatcccgaggctcaccacccctcccggtcccgggcccggccctccacgtcagccgcggcccgccccccggcccgggcccgcgtctccctccgccagcttctgcgcgtggcatcagtcgcgagcggcatccagttcgggtgggccttacagctctctctgctgacgccctacgttcagcagctggggatcccccaccaatgggccagcatcatctggctctgcggcccagtctccggcctcttcgtgcagcccctcgtcggccacatgagcgaccgctgcaccagccgctacggccgccgcaggcccttcatcctcgtcggcgccgtcgccatcgtcgccgctgttctcgtcatcgcttacgccgccgacatcggctggctcctcggcgacaccgcggactaccgccctgccgccatcaccgtcttcatcgtcggcttctggatcctcgacgtcgccaacaacgtcacgcaaggtccctgccgtgccttgctcggtgatctcactagcaaggatcctcgaaggacacgtgttgcaaatgcttattactcactgtttatggccattggtaacattcttggctatgcaactggatcatatagtggttggtacaagatttttacttttgcccaattcggctcgagcacaattagttgtgcaaatctcaagtctgctttctttcttgacattgctttcattgcggtcacaacatatatcagcatcatggcagctcatgaagtgcctctaaattcaagtgaggcagcccatgctgaagcaggggcaggggagtcaggtagtgcagaagaagctttcatgtgggaattatttgggacattcaaatattttacaacccctgtatggataattctgtctgttactgctctgacatggattgggtggttcccatttactctctttgatactgattggatgggtcgagagatttatggtggtgatccaaatcaaggccttgtttatgatactggagttagaatgggagcacttggtttgttgcttaattcagttgttcttgcattaacatcattgttcatggagaggctatgcaggaagaggggagctggttttgtgtggggaatctcaaatatcatgatgaccgtttgctttcttgcaatgctagtagtaacctatgtggcaaataacatgggctatataggcaaagatttaccaccaactggcattgtgatagctgcgttgattatctttaccattcttgggtttccactggcaatcacttatagtgttccatatgccttaatttccacacatattgagtcattgggactcggccaagggttatcaatgggtgtcctaaatctggcaatagtggtcccacagataatagtgtcactgggaagtggaccatgggatcagctatttggtggaggaaactccccagcctttgctgtggcagctgtttcagcccttatcagtggactcatagctgtgttggctattcctcgatctggtgctcaaaaggctcgaagccatgtatgaggtatcatgttctgtctgcttttggcatttatttctttcgaagaaggatggtgaaaatgaacaggtagcatggatttgtatatagttatttttttattgtatccttttttcctgagcaaaaatttcaatctcccaattgtttccgaataaatgaatgaatgcttgaatgtactttaatattattggtcataatttaaagtgaaaaacctgattttttagtgttattattttctgaagcaagctttgggaacaatttttgtgtatgatcctgatgagtgagttgtctgtttaaaacagtgaggttggttggctatgtaaatcatgacacccttcaacaagctgtaggaaaaggatgaataatactcttgatgtc

SEQ ID NO: 6427 - DNA, 1222 bp, Glycine max
  Clone ID: PAT_MRT3847_105813C.1
gggcctcacaccttaggggagttcagttgcagaccttcacatggcaaaatcattcttcacttagttaggaaccgaaccatggctataacgttcggtttagtgactcctaactccaacactttgtgtctcactctcaccacaccacccctcatcgccaatcatcgtactactaatgttgtgttctctggtcaaagtgtcttcagctatggacacactaatctttcttattcacaccaaagggcttcttcctttgccactattgtctgttctgctgctaataaaccatcctcttcttctgaaattagctctacagccaagataaggagcgaggttctctctccctttcgttcagttaggatgttcttttatattgcttttgttgcaagtggtgctcttgggggattcatagcaaccacacaactaattggtgcactggctaactcatcaagagcatctgaagtccctgagattctgaagggccttggcatcgaccttgcagcagtgtctttatttgctttcttgtatttcagagagaacaaagcaaagaatgcacaagtggctcgcctatcaagagaggaaagcttatcaaatcttaagctccgtgtggatgagaagaagatcattcctgtgaactcattgagagggattgctcgacttgtcatctgtgctggccctgcatcctttgtaaccgagtcttttaagcgcagtgagcctttcaccgatagtcttttggatagaggggtgcttgttgtgccctttgtaacagatggaaatgcacctgctttggagtttgaggagactgaggaacttgccactagaaggaagagactctggcaactggctccagtttacatcaatgagtggtctgagtggttagatgagcaaaagaagttagctggtgtaccttttgattctccagtgtacctatccctacgcttggatggtcgtgttcgtggcagtggtgttggttatcctccttggaatgctttggttgcccaattaccacaggtaaagggaatgtggactggcctactagatggctttgatggtagagtttagaagagcaagtgtttttttctacttctgaaggttgaactctcatacttaccccctcccccacaaaacaaaaagttcttcagcccgttttcttcatattctctttctggttttgtttctaatagtggagattccattaaacttttatgatttgattttaattgtg

SEQ ID NO: 6428 - DNA, 299 bp, Glycine max
  unsure (1)..(299): unsure at all n locations
  Clone ID: PAT_MRT3847_105814C.1
attgatgncagattgaganaaagaatagatccncantacaatgaggttcaggcgcagatggagancnaatttgttncaaattgtcncttgatgatgnngaaactcctaaaggttccatgttggatcttaanatttcncaatctancaattgcacttcccaagaacacagttggaggaaccantctgcgncagtgaggnattggcaaattttttgacagagggcaattttagagcaagtgttgatttgcagcgcatcatcgtantaaaggaatgattaaaatggtggctacagttggtat

SEQ ID NO: 6429 - DNA, 437 bp, Glycine max
  Clone ID: PAT_MRT3847_105815C.1
ggctcgagaaaggaccacaagtattgctggtgggaatgattgtgttgcatgatacaataacatagcattggagttcaataataggctcatgaatttgaccattaagctcagccaagagctccctggactcaaagtggtgttagctaatgcatattacattatgttgagtgtcataaaaagacctcagctttatgggttatgaatcgacactcagtggcgtgttgtgctactggaatgtatgagatgggttatgcatgcagcaggtgccaaatgttcagctgcgcatatgcttacagatacgtgtggtgagactctttacatccaactgatatgacatatagtctcgttgcacagtacgtggtgctgcgtgtatgatatcaattcttacactagataaattaatcactacaagtgaaattttatttatgtactagtat

SEQ ID NO: 6430 - DNA, 521 bp, Glycine max
  Clone ID: PAT_MRT3847_105816C.1
ctttttttttttttttttttttttttttttttttttttttttttttttttttttttttttttttttttttttttttttttttttttttttaaaaacccaaatgccaaaacccactgcccttaaggggggcatacataaagggggacctttgtcccaaaacccattttatggggtaattgccccccccctttacaaaaagataacagggcaaaaaatgcaaattttttttacctcccaaaccaaaaatttcccccaataaatccaatgggcaaaccaactaaaaaaataagggggctaatttttaaccctaattgtctttcccaaaaaaaacttgaggctccggttttgaaggtccctctggggtttctgctaagaaaatcccttgatttcctgaagggaaagaaggcaaatttggctggttctgccccaaaacccaaaggaaaaaattccccaaagccttctgggttaatgcgtgtcccttcaagctttgattgaaggaactcagaactgacctgctgggc

SEQ ID NO: 6431 - DNA, 1209 bp, Glycine max
  Clone ID: PAT_MRT3847_105817C.1
cccacgcgtccgcccacgcgtccgcggacgcgtggggcaggatttgcgggatcacttctatgcgcacggagaaatcgaatccatcaaaatggttctccaacgggcttgtgcttttgtaacatatacaaccagagaaggtgcagaaaaggcagctgaagaactctccaacaaactggtcattaagggcctaaggctaaagctgatgtggggcaggcctcagacatcgaaacctgagtcagatggctctgatcaagcaaggcagcaggcttctgtggctcatagtggattgttgcctcgggcagtgatatcacagcagcagaaccaggaccaaacacaaggaagggtttactataacaatccaccaggaccaccacctcttcagcaggaaagaagctactaccccatcaatggatcctcaaagaatgggtgctcttgttgcatctcaagatggtcctcctggtgggccttctgggtcaggggagaacaagcctagttcggacaagcagcaaatgcaaaattatacccatccaatgatgccacctccacctggccaatatcatcatcagtattatcctccatatggttatatgccaccagtttccccttatcaacagtacgcatctccatacaatgctgcagtggctccatcccagacaccagctgcaaatcatccttatcagcattctatgcagccagggtctggacaggctgcacatgccccagctgaatctggaacatcaacatcaggatcgcagcagcattaaacttgcccatatactgatgtttctagccatgtttaagtttttccttaaactaactatgctgtcagggaagatattttcactcaagttgtcaatttactatctctactagctggatattgatttccttgtggcatgaacgagttattttataatttgattttgtgcttttgtaactcttggcttcctggttagatcatagtcatgctcagctttagtattacttattgaattctaatgttactacaactgaacttttgttgtggatataaagcatttggtaaagatgaccaattgattttatatacccatcaaataattcgtgaagaatgtagatagattgttttagaacttgtatcgttgagggatatattagttgtttttgaaaagtgggattgacacccactaaattgttcggtttttcatttttaacgactaaaggtgtttc

SEQ ID NO: 6432 - DNA, 568 bp, Glycine max
  unsure (1)..(568): unsure at all n locations
  Clone ID: PAT_MRT3847_105818C.1
cgtaagctnggaattcggttcgagctccaccctttattctcttacgtctccaactaatcatacagatcgataatcataatcatatctatagctaattaacttaattattttcatccctgtactcttcttctctcctctaaactctcttttccattcttgcttcctttgtgggttgtttgagttttctttccttcaatttaattgaaagatggcttgcttggtatctcgctcaggaagggaattgcagaggtacaacaacatgggtggccggcaagttgttgggtgagttcggtcgctattgtgtcttattgcgtctgcgaaattaatgtttcattnttgtttttcacttgggtcaattaattttcaataggagttaattggtaggtccctggtggctcactntttctatgtatctcccgattntttgttttgccttcgaaaagggtcataatatatagatccaaatatcagattactctatcatggatatgcatgttggacgtgtaatctggtgtatatatattcggcgcaatcaatncattaatttctttggttccctaattggatc

SEQ ID NO: 6433 - DNA, 258 bp, Glycine max
  Clone ID: PAT_MRT3847_105819C.1
cttttgttctgagttcttggtttctttggtttctgcttctgacaatatattggaacttggtatttagggattggtgctttttctaggggtacccagttagaacatttttatcttcttcttctacttcttcttctctaactcatatagtcaaagctctcatctttgataagttgtgtacaaggtctatgagtcgttcctcgtagtgcagagctgggcatggtcttaacgttgagtctgagtgattctgctacttactat

SEQ ID NO: 6434 - DNA, 370 bp, Glycine max
  Clone ID: PAT_MRT3847_10581C.1
gggcgaatgggttaaacctatatatttatttgtgtataagcgccagccaacaggagggggaggggtttacatctatctgaagtataaagtgactaacaagttgggaagggaaccacccacagagcgagcaacctcttaggaaccaggaaaggggacatatggactcaaactagggttgttgatggtaacaccacaggctttgtctgggttgcctcacctgggcacacggtagtagatggtggataaccggacctgaatgtcccaagacgggtgcttgactccacaaggctgcaaacgacaacctctggcatgggacttataactatacgataaagagctgtcttaaacgctactgcaaaccccacacctt

SEQ ID NO: 6435 - DNA, 165 bp, Glycine max
  Clone ID: PAT_MRT3847_105820C.1
tacggctgcgagaagacgacagaagggttcattccaacagttctaattaaaatgaactcacaattttgtcagagatttcttgtgccgctatagatgtcatttggccatatcgctttgttcaggccatcttccatttgacatgtcttgcaatcggggatgaagggt

SEQ ID NO: 6436 - DNA, 212 bp, Glycine max
  Clone ID: PAT_MRT3847_105821C.1
tcgcccacgcgtccgtacagtccaagatatatggacaatggtaccgtactggcacaacgccatgatctatctgatcatcggagggttgatacaccatcgatgttgacatttatgatcgaccctacaatgtattactaactgaacttacactgagttgatttatgcactccacattggcgattggaaatgctgtaccgccattgtgttaaatg

SEQ ID NO: 6437 - DNA, 188 bp, Glycine max
  Clone ID: PAT_MRT3847_105822C.1
gccggtgtgaggcactaaacgaatacgtgactatctatcaagagtattacttacaacatgcgctgtatcatagtcgttatttcagtcgctcactcactgatggccaaaactttatccacctccgctaccaccaccgacgtgacctcctgtggttatatcaccctatgggtggggcggctaacgaacct

SEQ ID NO: 6438 - DNA, 398 bp, Glycine max
  Clone ID: PAT_MRT3847_105823C.1
cccacgcgtccgatggtcatgaaaaggtttgctttccccccatcttctccgcctttaccggccatggtctccgccaggctcggcggattctttcgctcgcagtgatacctctctgtgttgtgactgacctgccgtattgttcttgtccgcggggcttttgtcgcagggagcgtctcctcctctaccttctaggcgggcgagttgccagccttcccatttcctatgggcgcaatgcatgtcaatgtggcgacattggcgaatggctagactatgctcctatcctctcctatggcccttcttctagactgcggccattgtctccttagcacctgcggaagcgtactttcttggtgggtattcatgggcactggtcgacatgacaatgtcttcacgtcttg

SEQ ID NO: 6439 - DNA, 361 bp, Glycine max
  Clone ID: PAT_MRT3847_105824C.1
ggctggagaatatggagcccctaacctgttttttcctcatactacaagcgttattcttaccctgagcgaagtgggaccatagggcgaaatgaagccatgagtatcacacgctagactcggatactcgcaatggactttcttgaccaacgctgtgctctaagaagagacggagttttgttgctatcgagcaaaaacgctgtgtgaaacgaggctatataaactctctcaaactggaactaccgcgacaagacaccatgttcgcggaacggagcttcttggatcaaggaaaaccgagaaacaatcgtgtctctgaccaaagttcagcgtataagtgcgaaacctgccgaacaggcgactattg

SEQ ID NO: 6440 - DNA, 334 bp, Glycine max
  Clone ID: PAT_MRT3847_105825C.1
gggcccaaaaatttggttttttaaaagcgaaccatgcaaaaattggaccccgaaataaaggggccctttaaaaagcaaacggaccccccgaagggaaggccccaaaactgggggggctaaccaaaaagggaaaaggggggtttaaaaaacacggggggttaaaaccctttgaaaaagggggttttggcccccgtgatcaaaaacccaattgggggggcaaaaggttcaaaaagggggggggaactggaaacatgggccgaaaaagggggttcctaaaaacgaaaaccccgggggaagaaacccagcttaatgggccccaaataaaaggaccccc

SEQ ID NO: 6441 - DNA, 123 bp, Glycine max
  unsure (1)..(123): unsure at all n locations
  Clone ID: PAT_MRT3847_105826C.1
tccngggcgcgctatgaggccgctgaaagggcgcttgatctcatctgggaccttgttgagccagcctttacagacaggagcataaacatgattaaagggatgtgactccgcacgggtgcaagt

SEQ ID NO: 6442 - DNA, 272 bp, Glycine max
  Clone ID: PAT_MRT3847_105827C.1
atgcggctccagctatcatggctgagcatgatgctcgagatgtacaaaggcccctcgaccaatggagaagcagcaaagggggattcatggcttccatgtacattttagtcttgccagcattggataacatgggctttgaggcaaacatggtaagcatagtcctatacttttatggagtgatgcactttgatctagccagttcagccaacacactcacaggcttcatgggctcaacctagttgcgggaccttgctcgtggcttcatctcagat

SEQ ID NO: 6443 - DNA, 235 bp, Glycine max
  Clone ID: PAT_MRT3847_105828C.1
gttagagatccttttatgaaaccagtgatcagtgtcaacaaattatgttatctgtgttgacaatctaatattgttctagtaattttattcaaaaaaaaaaaaaaaaacaaaaaaacaaaaaaaatcaaaaaaaaataacacaaaaaaaaaaaaaaggtcgcccccccactattaaacctctcaacccacaaattaattcctgaccctttccctcaaacataccaactttccctat

SEQ ID NO: 6444 - DNA, 288 bp, Glycine max
  Clone ID: PAT_MRT3847_105829C.1
ccagggagtttaatctttttttctgggcattgagaaacattattctattttattatataggaataaacaaaacaaaacattcccattatcttttttccaatccaccccccaccctaacagttgcaactagcaacaaccctttgtaaagaaggtaaaaccattaagaaattcaaacccgcattaaatcgaaatcagtttccaccaaaaactttggggatcttctcattgggccccaaaggaagataagcaaaacccctgtaacctttttaagaaaaggaaacacccgcc

SEQ ID NO: 6445 - DNA, 362 bp, Glycine max
  unsure (1)..(362): unsure at all n locations
  Clone ID: PAT_MRT3847_10582C.1
gttgggggcgttgtggagggtggaagcgtccaagtttgtccatcctttcaagtgcgttttccgcgtgatccggcgggaatgatntntanntttanttaagaaagtagcgttgngcgtccgtggggctgttctaggttgggcgggtgttgaccgtccctggtgcttcttttccttttgcccctgtgagcaccatggggggggaaggacccacgatccccgtcggctgggcaggcgccgggattgagtgtggtacctgggtttggagccgtagattggtctagtgcccccccgtcgtcttagtgtgcttcctcctgcggttgcgcgggcgtgcgggggggcgcattgggggggaaaagccgggg

SEQ ID NO: 6446 - DNA, 463 bp, Glycine max
  Clone ID: PAT_MRT3847_105830C.1
aaaggataaaaatttatgttttttaaaaagttttatttttttaaaaattaatataggttaaaggggggaaaaaattaactcaacgggatgggaccctgacccgatttcccttttttttttacccccttacagcatgttttttttgggggggaaccctactttatatccccccggaagctataaaaaaaaaaccttccacgtaactgaacaaatttgacaattttgttactggccctgggtttgcccaaaccccctttttttttgttaaggggccaaacccacatttggttttttgaagcataagcggggaaaaaaaaacccctaagcccctccccatttccccaaagggccctcaaatttttcaaaagggccggggcctttcctttttcggaaaaatcgttggctcaaggaacccaatccccaaggaatactttttttcgaatttcaaaaccctcaggggttc

SEQ ID NO: 6447 - DNA, 454 bp, Glycine max
  Clone ID: PAT_MRT3847_105831C.1
cttgttctttgcttctaagttaagttggtggcataatgtttgtcttccaaaacagaacatgtagatttagatatgctaatttagtcaactatttgtgtgttctacttgtgattacagccatgcccatacccatcatttgtatttggtattaatgttttttttttttggaaattctatgccctgcttagtgccttggacacataggcagatattctatagtagtagactgggaaaaaaggtcacagttacaacttctaggaattggaccataggaaggccatgaatgatttaggctaatgctggcttgctgttttttggatcatatcagttcatttaatttattgcgtctgatttgacaaatgaactctcttgtctttggctcgtaactcttgaacttatctctttcatgttaaccaatgcttcaccctcacttaatcccttttttttctcttta

SEQ ID NO: 6448 - DNA, 519 bp, Glycine max
  Clone ID: PAT_MRT3847_105832C.1
atcaaaactattattctgctcttagatttgttatcgtcgccgacttttgttaattaatatttctgccttcttttaatttacgggggaaatgaatgcgaacatattttgataaaaaaaaaaaaaaaaaaaaaaaaaaaaaaaaaaaaaaaaaaaaaaaaaaaaaaaaaaaaaaaaaaaaaaaaaaaaaaaaaaaaaaaaaaaaaaaaaaaaaaaaaaaataaaaaggggggggccctttttaaaggaccaagttttccttccccgggcttgcaaattataactttttttttggggcccccaaattcaatttcctggcccgggttttacaacggtggggaggggaaaacccttgggttcccccaattaattcccttggaagaacacccccttttccccggttgggtaataacaaaaaagccccgcccgatccccctttccaaaaatttgcccaccctaatgggcaaagggaccccccctttaaggggcccattaagcgcgggggtggtgggggttcccccc

SEQ ID NO: 6449 - DNA, 203 bp, Glycine max
  Clone ID: PAT_MRT3847_105833C.1
ggttcttgtgtgagagagctcgttgttggaactcgcccttgttcttttggcggtctgcggtagggtttgttcattctctgacctgaaaatcgtttgttgcttgcggaactgaggacgcagaagctccttgccgtgcttgatcggctcgggaggctagagcatgtacccagacttgagctacactgagtcaaccaccaccgaga

SEQ ID NO: 6450 - DNA, 846 bp, Glycine max
  Clone ID: PAT_MRT3847_105834C.1
cgttaaactgttgctacccactcactctcacattgctcctccacgccgcaaacttcgccattctcgctcgcatctcaacccttttttcactctctcggaaaactttaaatgaagccatgtttttgaaatacaaccttatgtccctactttaaaagggttgcatccaggaaggaggaggttcaatagaagggttttagcaacatgggtcactttgagaaacccatcattaaggtggagcctttggatgaaccaattaactctacaaaagttgttgaggacactgaagtcgacatcatgagttggacaaacaagggtgattttggtccgaacaaagttgaggaccctgatgcaacagactattcaagctcgtttgctgacactacctctgatgctgaaaatggttatagattgagtgatgctgaagtggagtcagaattcttgggtgataatggcttggcaaacacttctgatggttctgcatttcctatgaggaagaggaagttgaccaatcgttggaggaactttatacgacctctaatgtggcgttgcaaatggacagaactaagaattagggaaattgactcacaagcattgaaatatagtaaagagcttgcagaatatgacaagggaaaacatacagcacctgatgaatttactttagaagagtttggttcaaagtcattgccatttttgggtgaacagctcagaagtaaggccaaaaagagaagaagaaggaagaaagttgaagacacaactgatattggatcgtatacgtcacgtcattatattttctcctatcttgagaatagaagtctgatcctgatggctatttggctgatgattttg

SEQ ID NO: 6451 - DNA, 331 bp, Glycine max
  Clone ID: PAT_MRT3847_105835C.1
ggccggcccacgcgtgcaaaataaagggcttaaccacaaatttttatgattccattacacaacaacatcattggtttttttctatatttatgggggtcctctgcaatgatcaccttgtgaagatttgatctagacttgcttattttttttctgttgctctttgccatggtaatcagagtggtgcacttctattatcatggttctgcctactgtacttggtgctcttttttaatggtgatccagctaaatccttttttatgctcaaccacaatttatctatccatcacaattttatacatatcttttcctacatgtattttctttcttccat

SEQ ID NO: 6452 - DNA, 328 bp, Glycine max
  unsure (1)..(328): unsure at all n locations
  Clone ID: PAT_MRT3847_105836C.1
cagattttgcttctaaatattctgcatgtgtacatactactcaaaatgggttctttcggcataatgactatttggtcaaagaaaaacaattatgtgcgcctaaaggatccatgagaagattgcttgggaaagaagcccatgtgggagattaatgggacattttggggttcaaaagattgtanacatggggtaggggcatttctatggcccgcatatgaaacatgatgtgcatgagttttgtgaatattgcattttttgtagggactcaaagtctanggtcatgccggatattctttattctccggtgtctattcctggatatcgtggg

SEQ ID NO: 6453 - DNA, 382 bp, Glycine max
  Clone ID: PAT_MRT3847_105837C.1
gggggcaaaaaaatttcttttttttttggggggggggggtttcccggccccccttccaggggggggggggcgtttccctacccccttttggcggaaattcaacttggggggcggggggaatttgggccggcccttgggccttcccgggctaaattttaacccgggggaaaaaatttggagcaaatctttgggtcccaagggttaacccgaacaaaacttggcggggtttccccccggccccaaaaaaaaggggggggccgggggcttatcatcggttttagcccccttgtcaacccgctttaccgcggggaaatttgaccccgcggggggggggggggtctttccccaccggaaccccggggcgggagggtggccacccccc

SEQ ID NO: 6454 - DNA, 831 bp, Glycine max
  unsure (1)..(831): unsure at all n locations
  Clone ID: PAT_MRT3847_105838C.1
cacgcgtccgctcctctttctaaacatgtttttcgacctgtccatcctttagcatacaatagttacgtgtgatgcgtatgcacgtgacgtggacctccctagtcttgtattattttctttcattgatataatactccgttgctgggaagtatttcttacctgtagtaagttttaaaatacggtttgtgaccgtgatttcagctgcaacgtcaaggtttttggaggtgtggccgcatcagctgtatttatctgcaatttctcactgtaccaaaaaacgcaacgaaacaacaactgccaccactgtgacctcaatttaaaacncaaaaaagtaagtggttcgcatattgtaatgctaaggagtgacatgggtgctctttctgtgctgctggttctactgatattctgcaattctgggattcttggtatagctggaggtttgttgaatttcacaaggtatgctataccacgtaagaatatctctggcaatggcaaagcagagttggaagacaagagaggcgtgccatcaggagctaatcctctgcataatcggtagagtagagaggacatggtggtatttgggaccacacagaaagtgatgatcacagagtattagttttaggaattaggacctctcaaaggggctaaaggaatctgctattccttttgttcctgtttggatgttattgttatctgaaacatggaaaagtatcaaagcatataacaattgcctaaaatattgattctttttctgtgctcatctgacatgtttatacatgagctgtctcttggtttagtaacacctaatggatgtcttgcttgcatgcctattat

SEQ ID NO: 6455 - DNA, 348 bp, Glycine max
  Clone ID: PAT_MRT3847_105839C.1
gacccaaacgtccagctgggagacaataaaggagagacaggcatatcatcagcagtctcgtcaacgcagtcgccaaccactatcaaagccatcacactccaccatcatctcgttagggcaactatgattcgacgaagtgatagtggatagcatcgtctcatcactagccgtctcctagtgaaggatgtcttcttcgactgtcgcagtatgccttcatagctgttaaagacacaggatttacctcaactgatgtcctatgtcacgagaccacttgtgttgttagacacaagattgtgtcggataagcttttggataacacaagtgttacgcacctcgttcccatcacca

SEQ ID NO: 6456 - DNA, 565 bp, Glycine max
  Clone ID: PAT_MRT3847_10583C.1
aaaaaaaacccccaaagaggggggccaaggaatttatccaaattatccccaaaaaaaaaaaaaaccccttttccggaaaaaaaaaaaggccccccgcccataggccaccgaaaataaaacccctttttaaaccggccccccatccctttttgggaaaaaaaaggccccccaaaaccaagcccccccgattcgggggccccttttagtcccccccaaaaattcgggaccaccaaaaccaccccccccggggccccccccaaaacaaaggggcccccaccccattttcggggcccccccccaaaggggaaaaaggcaaaacccgataaacccccgttcggaaccaaggccccgggccttgaaaagggaccaaaacccccccccccctaaatttcttcattctgggttggcccaaaaaaccccttgggttcaaagccatcagggcggccccaaaaatggggggacctggggggatttttccccgaagggaacccccccccccccgcgggaatggcaaacccattttttccaccttgggcccccccgggaaaaacatcaaatttggggg

SEQ ID NO: 6457 - DNA, 516 bp, Glycine max
  Clone ID: PAT_MRT3847_105840C.1
ggccatgatctctatctcctgaggatctaggatactttcatctgaagaaaaaggctaaatacaggaccactcaaccaaacgggatactcaagccagatactgctcaactttacatgtctttctaattttgccatctatgcaaatttatcactgctacaaactcttaatgctgcaggctgatgcaggcagggaagaaagatagattatttactgacagcaccaggaaatcaaaatgatacaagagtttcatgagatgaagacagtaggcatcattagaaatctgtctcctaaccccacactttattttatactatatagatattatttccaatcttgaggcatgagtctctttttcctttttacttttttttccctcttgaacttactacaaaaatcacatttagctttaagaacttgttaatgttgcctgccacaagtttctacaaattagtaagatagatttttcttttctatgcactaatttacccaactaatgtgaactgattctgaattcag

SEQ ID NO: 6458 - DNA, 206 bp, Glycine max
  Clone ID: PAT_MRT3847_105841C.1
actcttaaattctcagatatgtggagggaagcttttttagatgagcacctacttccttaaatccaaggtaaccacctcactcacaccactatcatctaccaatacagaatcttttgatctcatatcaccaatcttcctcacttcaaacctgatgaaataactaccatcaataattactctaatgagcacttatcactttctccaac

SEQ ID NO: 6459 - DNA, 672 bp, Glycine max
  Clone ID: PAT_MRT3847_105842C.1
ggacgttggaagaaagatagatccagatatcaatggcgacgaatcacgaaccggttttagggtacgttgtgctttacgtcaaagacgtagccgagtcggtggctttctatgccaaagccttcggctattctgttcgtcgcttagacgagtctcacagatggggagagttggaaacggggaacacaactattgctttcactccgattcaccagcacgagaccgatgatctgaccggtgcggttcataaccctggatcttgtcgagaaagaccacccatggaggtttgttttgtttactctgacgttgatgctgcttacaagcatgcggtggagaatggagcggtggcggtgagcgagcctgagctgaaggaatggggacagaaggttgggtacgtcagagatattgacggcaatgttgtgagaatgggaagtcatgtgaacccacccaaatagcatacgtttaggtggacatcgcataacagtaactgggaaattatgcttttacgtttatgcttatgtttaggaataaacaagaaccactgtgagatgtgtatttactctacaataaatcaacttttgccaggcactttctcgtaactagtttaactgagattttatatatgatgtagatgcgatggaatcatggattttttaataacatttatcttctgat

SEQ ID NO: 6460 - DNA, 475 bp, Glycine max
  Clone ID: PAT_MRT3847_105843C.1
ccacgcgtccgctccaatccgctatgactcacgtactctcttctcactaccattattgactctactaccttgaactttacacaatacaagctctctgcctactaagacgctcttgatgaacgtgagaacttgggggatctttctggagtgtgaggatctccttacaccttgcacagtcatcttaacactttccacggtctcctactactgattaacgccatgctcagagactccaattattatatcattcacttcctgcttactcatttcttatataagactagatggctggagatgatgcactttctaccgagagccgattgacgctctatctccctctggcgagatcctccttcctcgtcgtcttatgcctcttactcttgctgtcattttttggtttctctttcgcctcaacgcatactagtccggcattcgatgtgcacaatctgcacccttaatagcggctcaacgcttg

SEQ ID NO: 6461 - DNA, 253 bp, Glycine max
  Clone ID: PAT_MRT3847_105844C.1
aacaaacagtaacagtacagagcattgtgatgcatgtcagcggacaaaaccagaaccacatgcctgggaattgatcttcccaatagaggtatgtggtcctgataatggtcttgaaatgtggagtttttagtgggcatatcaaacttcatggcgtgtgagtgttcttattgatatttccaaacgttctacatgtatttatattcttttgtgaatctctcacgatttagaaatggctggtcacactctgatgcca

SEQ ID NO: 6462 - DNA, 323 bp, Glycine max
  unsure (1)..(323): unsure at all n locations
  Clone ID: PAT_MRT3847_105845C.1
cgaccggaccggaaaccccgggccgacccacgccaccgcttacgcttccgaccccgacagaggacgaaacacggacagctccctcacaaagaacccgcccaacaacacggccagacccaaacaacgcnaaacgaggagcccgccaaaggcccaggagccaccgggaccaagaaaaaccacacccaagaacgaagaccagaaaaaggccaggaacacgggaagcggcacaggacgcaccaggagccccagacgaagccgccacgaacaggggagggccaaaagcacgcaccagcaaaccgaaccaccccaacgagccacggaga

SEQ ID NO: 6463 - DNA, 210 bp, Glycine max
  Clone ID: PAT_MRT3847_105846C.1
tctaaacctgcccactttaacataagcacagcatggacatggaaacaacattaaacaactgagtatttatggggacacgcatgatgaaggtccattcattgacgcagcacttactatcgcgcttcgtattatttaaaaagaaagccgacagatcgaataaaggttgcagagagttaagatctagatcctatatgcccctgaaggatccgg

SEQ ID NO: 6464 - DNA, 633 bp, Glycine max
  Clone ID: PAT_MRT3847_105847C.1
ccacgcgtccgattacatccattattaatagtattatacttacgaaaagaagacaccgtatctacttcatctgaccttgtagcctgattaagcaggagtgagcgatagaactagccacactttcttgcactactgcttctctataccttgcttcagccgcccgaactattctcgtgtgcacacaaatggtctacacactggaaaaacactacaacactatgagaagtctctagccacactcctagagaaacataccggactgcgttaaggtctgtagctactccacccacggagtttaaggaacctaaccgagcatgagtcatatattccggataacggcgttcttgccaaggctgtctgatctttctccaggccactgaagactaaaccatccggacaccatcagaggctctaaccaaggcacacgcatagcccaagaacgctgtagatgatgcaccaaaaataacttatactgtcagggaacgcattagagtatcttacctgaaacctagcggagcttgaccatatactacattaaccccgatactgtggactataactagaagagtaaaagcttgagcttggcaagcttatgaaccagagatcccctgatactcactaggataagcggga

SEQ ID NO: 6465 - DNA, 143 bp, Glycine max
  Clone ID: PAT_MRT3847_105848C.1
ggaattcggctcgcgatgaaggcccaagcgtctaattcatcccaaattcaaggccagacaagtgagaatggccatttcaatacctttcaacaacttatggatttggcagtctcatagaatctcactacaaatctcataacgga

SEQ ID NO: 6466 - DNA, 520 bp, Glycine max
  Clone ID: PAT_MRT3847_105849C.1
ttaaaaaatgcacgtatattactggggttttaccaacggcttatagttccttattcttcacataatgaaagaaatttgggagtacttgcattctaatgccggcggaaactagaattcaattattgcggaatgaaataatgagcaaagtgtgtatgcaatgatgatgcaagtactaacaacctgagaatttttttccctttcttttatggtataggaagaaactgagaatctttcagttttgcatgtgcaaatgaattgtcatattttagatatcaataacatcaatgctaactttctcggcacatgcgtgagtcaactcttatcaaagccgcagattaattattgaaattcttttgaagctataaaccaataaaatgactatatgttgaattgtatatatgcgtggacatgtgtattactttcaacagacttcaattttcattaaaccaaacaatcatcaaatattagtgtatatgctaaggataagcactttggtgcatgcagatcgatctagtatgat

SEQ ID NO: 6467 - DNA, 163 bp, Glycine max
  Clone ID: PAT_MRT3847_10584C.1
ctcgagccgggttcttaaagctgatttctatgatttatcgaaacaaatggtccaaatttgtgacaagcgttcattttcctgcataattgagcacaagcattgatgcatgttctggggcggcgcgattcttatataacttcacacccgaaattaaattccgatc

SEQ ID NO: 6468 - DNA, 380 bp, Glycine max
  Clone ID: PAT_MRT3847_105850C.1
gggcataaaaaaattctatcatacatatatatttggttcctttccctctttaaggattaaataatatataggacagctattataagcaagatctcttcattcgtcctcggtaaacgcctaagttcttaaatgtgtacatattcaagcgttcatcttcctccacaaacacaaaatgagtggctgatctctcggtcatgtcgttgctcgtactcatcatattcatccatttctttttcagcttcttcagttttgccataatcgaggccattgaccttcactacctaaatcacagttgttcaagtaacaaaaccttcaccccaatcagcttctacaattccaacctccaaacccttctcacatccctatcttcccatgccacc

SEQ ID NO: 6469 - DNA, 202 bp, Glycine max
  Clone ID: PAT_MRT3847_105851C.1
agacaatgcagcactctgacagtggggctgtcatctcgggacacaaaggttttctacaccaatccactgcccggttcttgtaacacagtggcttttgccaaactctaaaaaagattcgctctgaagcgcatttcgagaaaaatggatttgatgggattcccagttgttctggaagaaatgtgtcttaagtattttgatatat

SEQ ID NO: 6470 - DNA, 489 bp, Glycine max
  Clone ID: PAT_MRT3847_105852C.1
tttgttggaggttaaggcgcctagccattatcactatagcccaaagtagcattgcaaaatcccaatttcagatgtaaagtactagtaggttacaaacagacacaactttgaacatcttttctgggatttataatataacaatcagcgcactaaataaaaaacaaaaacaaaagcacctaaatttattttcttctccaagatggtcgctggtagttacttgttgataaagggattagcagcaggctggaagaataacttgtgctcttgagcaatgttaacactgatgttgccactacatcgtggaaatcgaactccatcgccgtcgtcagtgtcgtcgtcctcgggctgcaaaaacattgaccggcgatcatttcccatgagccttgcaccattgacaattcctcttgccttttgccggtgggcacgagcacgacgtggtaatatgtcttcactgtcagagagcacaagccttctatgatcctcatatct

SEQ ID NO: 6471 - DNA, 698 bp, Glycine max
  Clone ID: PAT_MRT3847_105853C.1
cgcctctctttctctctctcactggttcgaggctgaatccgaatctcgaaactcgttccgctattatccatcaaaccgtggtgttgtcgtgtttctctctatcgctgcttcgactcgcggcaatgctattagggttagggttagggttacggtgactcttcgcgattgtagcggtaacagttcgtcgtcgcggttgcaaaagttttcgctcaattgataagttagagtttcggttatcatcatgtccgatccttcgaggggtcgcgtcaccattactctagggcgtagcggtcatgttgtgaagagggatgtatctgctgcagatgtttcttctttctcttctcttcactcagctggcactaagcgttctgtaagagacagaattggaagtaatgcagataattctgggtggtatggaaatggacatagcggcaataaacgacaccgaggagatgtaagcatgcaaaatggactggatggcagtaaagatgaccttcgattgaagctcatgcggaaaagtgcatctaggcagactgacagcaatggcaataagaggcatatggacctccgtgaaaacctttcaaaggcaagtcaccctctgactaacagttataattcaaagcagcatgggccagaatcaagggaaactagtctggtgaggcaaattccctcagctagaagttctgatgatttactgc

SEQ ID NO: 6472 - DNA, 253 bp, Glycine max
  Clone ID: PAT_MRT3847_105854C.1
cttccgtgtctctgaaaataggcgacggaaccgccagatacagaagagcaacagtgtgttcctccgcagttaacattctcatgatagtctccgtcatcaccaccaacctcttcgccctctacgccttctcttcttccccaaaagaccctcattcccaccttcaccttcttgacaaaaacttctccctcatctctgagcaggtcaccctcattctccgagagatcgatatgtctcagaagaaacttgcccaaat

SEQ ID NO: 6473 - DNA, 1526 bp, Glycine max
  Clone ID: PAT_MRT3847_105855C.1
cccactcgtccgtcctgattcaatcacgcagccacgatattccctgcgcacagcaccactactccctcggtgctcctccgtttccacttcaacgccaaatcatcgcctctctctctctctctcttccaccaataaccccttccctcttctctctctctctctaattcgaagctgaatccgaattcaaaccgtggtggtgacgtgtttttctctgcctctgcttctagtcgcggcaatgggattagggttagggttacggtgagtcttcgcgattgtagcggtaacagttcgtgtcgcggttgagaagttttcgctcaattgataggttagggtttcggttatcgtcatgtccgatccttcgaggggtcgcgttaccattacactagggcgtagcggtcatgttgtgaagagggatgcatctgctgtagatgtttcttctttctcttctattcattcagctggcactaagcggtctgtaagagacagaattggaagtaatgcagatagttctgggtggcatggaaatggacatagcggcaataaacgacaccgaggagatgtaagcatgcaaaatggactggatggcaatgatctacgattgaagctcatgcgaaaaagtgcattggggcaggctgacagcaatggcagtaagaggcatatggacctccgtgaaaagctgtcaaaggcaagtcaccctctggctaacacttataattcgaagcagcatgggccagattcaagggaaacaagtttgaggcaaattccctcagctagaagttctgataaattactgcgtatggaatccatgagaagctcatactctccttggacattggatcatattaggagaagatcaccagatgggtttccaagtacttccagggggatttccccccaaagggatgttcaagacctacatagaaggcctgtaagcaggacatatgatggtgtcagatcagaacttcctatcagtgttgctcaaaggccttcatatgtgggtgatgaccaagtacaagtccaacaatctccccaaactgtggatggcctattacatgcattgggacttcaaaaatatgccattctctttaaggctgaggaagtggatatgactgcattgaagcagatgggagaaaatgacctcaaagagcttgggattcctatgggtcccaggaaaaaaattcttcttgctgtcttgccccgtactaagcgtcaacaatgatcgatttctatcctgcatgatgctgaaactgacattattggaacaccagtttttacatttttttttttttataatttggatgatggttaagcacatatctgagaatttttacgaatatcacacccattgtcccttatagggttcgagtatccttttttgaaaaacaagttcgggttaacattctcgtctattggagatattgatctgttatatatggtgtccatactttctcttattttttatcattgaaagaaataggaaattgaatcagagtatgttcaacaaaaaaaaaaaaaagggcgaccgc

SEQ ID NO: 6474 - DNA, 769 bp, Glycine max
  Clone ID: PAT_MRT3847_105856C.1
ccacgcgtccggaaattaaaaagttgtctggtcagcaaaaccttcagcagcgtattcatcaccatgctaaaattaaggaggaaaataacaagttaaagatacagaacgaagaactcagtgcaaagctccggaagtcagacatcttccattcgcgtgtcaaagaagaccttgcacgtcttcgtgcttctactggcgcaaaaaaaagcattaatttggatgaggaacaacgtctgatgataaagctgaaggagatcgaggaagagaaagtacaactagcccagcaattactgagattgtccactaatgttctaaaggtggctggaatagcaagaccaacatcagatgtaaatccttctatggctgaggaagccctacaggacctcaagaataggataactaccctggaaatggaacaagaagatttgaagtttaagaataaaattattaaggaaaagattcgattatccgagctcatgccacaagcttctcctttgaacccgagatctgaggagaatcgtttaactccaccaagggtttccctggctccattcctttccagttttgatcgatagtgaagcgtgctattgtattttgtcgtgtttagccattcatgttatattctttaattaagctgtaaataacatgtatgtagtctacgttgtaaataatctttatgcacaattttcggaaagctatttaaagagaaattattttgcgagatattcagtatatttgatgatgtattaaatagttttaaattttacgaaat

SEQ ID NO: 6475 - DNA, 256 bp, Glycine max
  Clone ID: PAT_MRT3847_105857C.1
cataatcacttgacgcgaggaacatgacaaaccacatacctgggcttctatagtgatcatatttcgtcggagaacatctcgttgaagcatctaacatgacttctaactacagaacaagctcagcctatttgaaaaccccatctggctatctggctccagataccatcaccaatggcgctctctctcactaactggaacggtctgtatagactcatggccaacggatattgcaacactcacaccaggcatgtgttcc

SEQ ID NO: 6476 - DNA, 415 bp, Glycine max
  Clone ID: PAT_MRT3847_105858C.1
gtggaaatctgtattgcaacacctggaagactgatagactttttagaatgtgggagaaccaatctaagaagaaccacctaccttgtccttgatgaagcagatagaatgcttgatatggggtttgaaccccaaataaggaagattgtggaccagatcagacctgacaggcaaaccctaatgtggagtgctacttggccaaaagaagtaagacagcttgctgaagatttcctgaaagactatattcatataaacattggtgcactagaactgagtgcaaatcacaacattcttcagattgtggatgtgtgtcatgacgtagaaaaggatgaaaagcttattcgtctaatggaagagatcatgagtgaaaaggagaacaaaaccatttgtttttgtgaaaccaaaagaagatgtgatg

SEQ ID NO: 6477 - DNA, 711 bp, Glycine max
  unsure (1)..(711): unsure at all n locations
  Clone ID: PAT_MRT3847_105859C.1
tggatttcatgcaaatttgtttggacacaagacaaaattctttttgctttgggaggacattgaagacatccaaatcattcctcctacattttcatcgatgggcagtccgataattgtcataactctttggccaggaagaggtgtggatgcaaggcatggtgcaaaaactcaagatgaagaaggcagactgaaattccggttccagtcctttgtgtctttcaatgttgcaaacaggtagactggggaaattttatgttattaagacaggcttggttcttctaaatgccttatctgcatatctgactctgactctaaaaacttctgtgtattttatttttctggtctctttggtcttcttgatttttttatgtttggtaatttttaggtctattacaacaccagcatcattttgaatttaaatccgtgaaatggtttctgttggaaataatatttgtactgcacttctgtaatagtatgtgtcacgtgataagtttgcatttagtgtacatgggaattagtagttatgaagttgggtaaaattaatattaaccttcgaaattgttttatggatgccatgttctctaattatgaaagcattctcattctgaaaaatatttgtctccttcgccccccctctaaagtcaaccgttttgattgtgaattatngttgagataaaagatgtcagtatcgacaattcacaattgcatcta

SEQ ID NO: 6478 - DNA, 478 bp, Glycine max
  Clone ID: PAT_MRT3847_10585C.1
ctccattatcagtcctttttcaggcgtggtttttacctaaccctacaattcgccgatccttccagttagggtttttcgctctcagcgaaaacggtgtatatagaaaccctatctattcctccgatgcaccaggggaattgaatatatataataagaaaaaggcaaaaaaaagaggtgaaaaaaatttgtctggtaaattgttaattctgttgttttgcgtgtttctggactcaggtaatttctaaagcttatctcggttttccatgcgctattcgattcagaattttaatatctgccagggtttaggacttttttatttttatgtccgtttgactttgcgatttggggcttggatttagtagatcaggattgagtttggttgttcttgctgtttggaatgattctctgcttatttgtaatttttggagctgatttggttttagaagtgatatttatagagtttgttttttatttttta

SEQ ID NO: 6479 - DNA, 360 bp, Glycine max
  Clone ID: PAT_MRT3847_105860C.1
gaaacattcatcaatatcaactttatttacaatccatgctggaggaaaaccaaaaccctttttttttcactggggcaaattaccacccccctaaaaaaaaaaagttttaaaaaggtttcgggaaccaaccccaatttacacaacgggtttaaaaccccccacaccaaaaaggaccacgggaaaggggcaacccctttcaccagtcggaacacaggggggatccacaacaacgcagataatgaaaacaaaaaaaaaacccttgctgggccggaggggaccccccctggtccaaaaaatgcgccccccaaagcaaaaaggggaaaaagcccccccccccaaggggaaaaaatcccccccaaa

SEQ ID NO: 6480 - DNA, 340 bp, Glycine max
  Clone ID: PAT_MRT3847_105861C.1
gctgattgtttttacaaatgatatgggatgtgcaatcgatgattcagtaattgctattgtgacggatgaccacatttatgtgggtgagaatgcttgttgcaaggataaagatctggttcatatggaggaacacttgaaagcattcaaggccaaacgtggtgatgtgttttgctacgaccgcgatgagagatccatgctagctctgcagggtcctcttgctagctttattcttatgcgcctgacaaaagaggatgtgagcgaactctacttcggggagttcctggtgttgtgcctcattggctcaaagtgtttactttccttgacatggcatactggggaa

SEQ ID NO: 6481 - DNA, 244 bp, Glycine max
  unsure (1)..(244): unsure at all n locations
  Clone ID: PAT_MRT3847_105862C.1
cctnnggtgtcttnctcgtggtttcctgctatctcnnnttgatgatacaaagcnngnngnngtggngtctggttgggctctgnngtgggcngnntgcgttttnggntcnngtggnccttgagtagcttccgtngtgtgcccttttgggttgctttgccnntnttgctgggtgggttgntcccgtgggnggcnntcnntngttgtgccttgggtcttcttnnggggntgtgnncttgntnngttg

SEQ ID NO: 6482 - DNA, 928 bp, Glycine max
  Clone ID: PAT_MRT3847_105863C.1
cggcccacgggtaaaagactttacggagtccttgggcgttgtttgggaaacctctggatttgcataaagaaagacggagattagagaagatggagagcgtctgaaaatcggaggcgtggaagtggggaggaagatgagctcgatgagtttcaaggtcaaggacttcttcaatggtgggcccaatcaggccgacaagcttgtggaggacgctacttccgaggccctggacgagcccgactgggccctaaatctcgatctctgcgatctcatcaacgccgacaagctcagtagcgtcgaactcgtccgcggaatcaagaagaggatcgtcctcaagagccctagggttcagtacctcgcccttgtcctcctcgaaacccttgtcaagaactgcgagaaggccttctccgaagtcgccgccgagcgtgtcctcgacgagatggtcaggctcatcgatgaccctcagaccgtcgtcaacaaccgcaacaaggccctcatgatgatcgaagcctgggctgagtccaccggcgagttgcgctatctccctgtctacgaggaaacttacaaggatgatttgaccaccacacttgtaaagtagtgttctcggtcacaaactactggacagcctgaaccagagctatgatacctgttaagcctaaccagctttctggaccaaattagaacttctagtctctgtgatctgttacttagattcttatttgttggtatatggtaataccaaattagaacttactcatatgtataagttctgtataagtttcgggtctattctcatttcttatctaagacaaccaccagattcacaatttccaatctaaataaatagaagggcagtagaggtgtgacattttgacattctgagttgtaaaaaacgctcaagaaagataatataaaataagaatttgctaat

SEQ ID NO: 6483 - DNA, 473 bp, Glycine max
  Clone ID: PAT_MRT3847_105864C.1
ccacgcgtccgatccgaaccacaatatcttacgtgttacaccagcgctactgaggaccattagactacaaaacggcattcaggtgaatcgaacgcgagaggagtcgtcacataggacttgccgccttgtgtgtgaaatagtgatactgccaggaataactacagccacaatggcgtacaacctatactgtgaagtagactcgttccaacttagatgcgcaacggtatgtgtcaatgagaagacctaagacaaactgcacttgtaataatcataaaaagataagccatgtcataacaaagaggtgacagcgtatgtcaataagaaaaacatacgactcgcttctcataatctaaaggagatttgcaaataaaagacaataaatgtgcaagagaactgatccttactctcaacaggcatagacacctatgtatgcaacgatgctaaccacatcagggtcgaggacaaacaagctg

SEQ ID NO: 6484 - DNA, 495 bp, Glycine max
  unsure (1)..(495): unsure at all n locations
  Clone ID: PAT_MRT3847_105865C.1
ggttttnnnttnntnnnnnntttttnttttttttttttttttctttttttttgttttgttttttttcttttttttgggggtcaaancgcgggggggaaaacaacaccccttgtttaaaaagaaaagaaggggggccgctttagggggacacaataattaaggggggtgaaaaaagtgcgggcctggggggccaataagacctggtaattaaaaaaacagcaaatagtttcccctaaaacggctctttaaaaaaccccttttcgctaattttgggagggagttttctcaaaaagaaggttcttttttttttgggggggggtgtttttcaaaagaatagggggttgtttacccgggggggggggtcgttggagaaccagtttaaaaaaaaccatttcgactttaatttccggccccccctgtgttttagacgcgcggtggccctnccaagtcttcccccggttctctttttttaggcgggggatggaattggttttt

SEQ ID NO: 6485 - DNA, 228 bp, Glycine max
  Clone ID: PAT_MRT3847_105866C.1
gggaacccaccccagaacttgagccgattaaccctggggctggtcttgaagacattttaatgccctttggagagaaaaaccttggctttttacatttgaatttggaccaaaccaccaatgctggtttaagaaaccattcgccagaaccggggtttattttacaagaaccttcgaagctttaaggctgtcattttttgaggggtcccaaaacttcccagaacttttttc

SEQ ID NO: 6486 - DNA, 640 bp, Glycine max
  Clone ID: PAT_MRT3847_105867C.1
ccacgcgtccgcttcagggacggaggcacctcaccgcgcacacacagttcacgacctttctctgtctctctttgttctcaattgaattccaagttggggtttctgaaatgggttttataaattttcctgatatgctgaggagcgtgttagggttcatgatccgtttcttcttccgatccttcaccaaagcgatgggcttcttcttcgcgtgcttcaggatcagagacaatcgccgcacaaacacatcgcaattgattacctcctccactcaatccaccggtgttgtggtatctcgaaatcgctcgtcttctttattatctgaagaagagagagatgattctgcgaggattgatggtgttgggtttgagggagatttccaggggcttaaggatgaggctatgtttcttaaagcttgtgggaccttagcaggaacacctgctgaaattcgtaaagcatctgagaagttgaaatcacttgctcctgataaagattcagacccttcaagatttcattcttggcttcctaacacgtctgtggagaaactgcagctggatgtccaaccattttgatccaccaactggccataaatctttggccaaaaattggggaaaatgcattggattcattgtgaccacacacc

SEQ ID NO: 6487 - DNA, 514 bp, Glycine max
  Clone ID: PAT_MRT3847_105868C.1
gttttccaaaaggagaactgggctgcgcaagaaagccaacgaaatctctgtgctctgtgatgctcaagtagcactgattgtgttcaatgctaaagggaagctttttgagtattcttctgaatccagcttgcttcaaagtcaaactgaaatagtactcgggaaggtttttaaattgtgcggccgtgattacaatttcgttgcaatctttggtattgtggaaaattaagaaaaatgcagctgatgttgtaacaattgcgattatgacgcggttgtgatgagttgaaaaacttgatgctgccactcatggtcacagacggtgtttccaaaccttggtgcagtaaaaagaaatgaaatagtagtaatatacatttccatacaatttcctagctaatttgttattgtgttttcattacctttttttatttattttttcctattttgggtttaatgcattctaccctctggtgacacatatccgagttataattctatggaataagtttacattatattc

SEQ ID NO: 6488 - DNA, 397 bp, Glycine max
  Clone ID: PAT_MRT3847_105869C.1
agtcatgtacggaacaggggcataaaatttttcacagccgtggaaccaaccaaaaaaaggtactttgcgagcgttctgtaacttacccgcctaacactaatggtatttggcacacttttataccgttccaatgaaaaatgcgggtctaagaataccttattctatttagcccggagctgcccctttctcttttgttgcaacaggtgacatcacctctatctttgactcatgggatacagagactttgggcccctgctttaccctctgggtgttaaaaccaggcattgtttttgttttccgaggaggacgcccaaagtttatgccaccctgtacacattgaatcatacacccgacttgaattggagcgcattatttagcacaacatgcttttctttgc

SEQ ID NO: 6489 - DNA, 891 bp, Glycine max
  unsure (1)..(891): unsure at all n locations
  Clone ID: PAT_MRT3847_10586C.1
ataatttggcgcgcgcttaacgcaacactatgtcagactctttcctctcattgcgttttctcttggttctttacactttttcagcctcagcccgaccttatgaagactatgacgacaagtcatccctttcctccacaataagtgacactgcacttctctctccaagtcccaacattagatgaaaccacctttgataatctcctatcctttggttactaccgtaaaacctgtccccaatttgaatccatcctacacaacaaagtcaaagaatggatccagaaggactacactttagcagctagtctcatgaggctccacttccatgattgctctgtcaggggatgtgatgggtccattctgttgaagcatgatggaagtgagaggacagcacaagctagcaagacactgagagggtttgaagtggtggatgatataaaggcagagttagagaaacaatgccccaagactgtgtcttgtgctgatattctcactgctgctgcaagggatgccacgtttgagttaggtgggccttattgggccgttccttatggtaggagagatgggaaggtatccattgctaaagaanctaatatagtgcctatgggccataaaaacattacttccttaattgaatttttccaatccaaaggcataacantacttaacttaattgttctctcaagagctcataccattaaaaaaatttcatataactccattcaatacagactatacaacaaccaaagaacaatcaaaccagacccaaccctagatcccaagtatataaacttcttacaaagtaagtatagataaacctcagaatatataaatcttaatactacaacaccaaagacctttaacaatatttactacattaatctccaaaagaaa

SEQ ID NO: 6490 - DNA, 388 bp, Glycine max
  Clone ID: PAT_MRT3847_105870C.1
cttgagccgaatatgctagaggaagcttccctgtgaaagttgtgagcttaacgggctagactcctgcgatgagagctgtttcgaaccgcccgacgaggccaaggtcttggttgtgaacttgctttacgacgttgatcgcctgaaatcggccatgcttatagaacatgtcgtaactgttgtaatcgcttaagttatttataacacgtaaactgactagagtcgcggtttatgcgcatgtgacgatgagtactgatgaagaagctgaacgtgctctggagcaattcaaccgttatgatatctatggaagactgctcactgatgataaggcttctgcatgcggagctcgacatgaacgctgaccaggtactagttcctttgaatgttgctt

SEQ ID NO: 6491 - DNA, 344 bp, Glycine max
  unsure (1)..(344): unsure at all n locations
  Clone ID: PAT_MRT3847_105871C.1
gcatctnanagnngcnnacgtnnnctcngaatgcngctngtagccggaanacaaggcgggnaaganagtctntntcttntntctacaatggnnngncagcgaanagngngntnccttcgngtcacnagcgtcagntcngnnngggnnatnccatgngtgtcagcctacngctggnnnanngtgnnntgtgttttgntnngannntgttcgtgggtgncntggggacaaanntttgtaggggnaacnggaacttgtaggcggctganntttcagangangatcancttngngtaggagggtnnncntttttgngnnagtnntcnngnntgtgggtntgnngntnt

SEQ ID NO: 6492 - DNA, 261 bp, Glycine max
  Clone ID: PAT_MRT3847_105872C.1
ttctggtgcaggaggctggattatacacgtcccccatttggttggagtgatgactttaacagggtgttctcgtttggatagttagagctttttgtgttgtccatcttggacaaggcatcctgtgtgttgctggtttggcccccactgtgagattgagttgatatattggtggcggggtttccgtggctcaagtgctttcatggcctttgtgctgctgggggcttgaggaggtttggtgagtggggtggagatttgggtctg

SEQ ID NO: 6493 - DNA, 200 bp, Glycine max
  unsure (1)..(200): unsure at all n locations
  Clone ID: PAT_MRT3847_105873C.1
cnaagatcttnnttncnaaaggtgnntccaaagtgnggtgtgattcccanannctangcttgtgannanaagccttcctcctgctttcttttgaaacctctttttttctattccccaaccagacaagcagacgctnntcactcatcancactgngatcanggctcctaatatgaccactgtcaantgcaccatcanngat

SEQ ID NO: 6494 - DNA, 623 bp, Glycine max
  unsure (1)..(623): unsure at all n locations
  Clone ID: PAT_MRT3847_105874C.1
agagaaaatacagtttggaatgctatgatgagggtaaggactggcataggaagtggcagttttagcaaattttatagaaaagtttgggtaagctaattgtagggatctgcactcaaacaatagacccaagctcggaaaaattagctttggggtcactaattttatccattacccccttacaatctatataaaaaataacatgagtcatatcccaaaaaatagcccactggatagttcaccttccaattccaaacactaagacaaggagtttgcgaacctgtattagccaaaatgaattcgtcattgctgtctaacacaagctccctagctgaataagttctaagaattgatgcaagctgcacccacattaattttcagaaatcctggtggtggaggttcccaatgaggaaagcccgttgcatgagattgaggcggattagaaatctgggtaataacccttgcagagatccaatctgagagggaatgagttgatagggaaacaatttgcttcgactaaatttgattgttctcccatagtttggtgttgcgacttttccatcaaaaccccacaatatagtagcaaccttggatgggaggataaacaaacctannggacgcgtggg

SEQ ID NO: 6495 - DNA, 231 bp, Glycine max
  Clone ID: PAT_MRT3847_105875C.1
aaaaaacccaaccggggggaaaccaaaattatttaacccaagcctgcccaaagccggggaagctatgcctcacgtatttttatacataagctaacatgccctttaccaggctttgtatccccctagcaaataacaggttcccccttattttttcccaaggaaaacgaagccggcataaggcactcttaatttccttttattaggaaacctaattatccccaacggccccgg

SEQ ID NO: 6496 - DNA, 1503 bp, Glycine max
  Clone ID: PAT_MRT3847_105876C.1
gctgaccatgtaactaaactacccaataggtgtaataacaatctagcctgagagtctagtataacagacttcagtgactaccatatgagtagttatgctaatattccccactcagattcaagggggatggagaaaaagattggtccatgaccctgagtttgttgtgcaactcaaaaaacctgtatgctgagagggacttagttagctctttatggccttctctttgacaaaaaaaaaaaaaacaagtccaactccatgtgcttagttcaggagaatcgggagtgaagcattgagtcttgaaagagggaaacagtgaattgtctttgccaaaaaaaaataaggtttcagtgctggatctggaatctggatgctagggctatatttcttggactgccaagaactgagttatggaattgctgccattgcaccattctctcatcgcttgacattcaacaactggccatcatacatccagcgcctccgttgtaaggtcaactttgaagcactgatctttgtttcacatatcaaggaattaggaaaggccattgttcatcgtcttcgccaccctacagaagggaatgactatccgctggaggaaactgataagtttggaaaacagcaaactgggaagtttgttgtgttgcatctgcgttttgacaaagatatggcagctcattcagcctgtgattttggtgggggtaaagctgagaaacttgctctagcgaagtaccggcaggtgctttggcagggaagggtattgaactctcaattcacttgatgaagagttgagaaaataggggcgttgcccacttgactcctgaagagattggattgctcctggcagctttgagtttcaacaatagaacacggctttatcttgcttcccacaaggtttatggtggagaagctaggctagcaactttaagcaagttatttcctcttatggaagataagaagagcctagtctccacagaggaaatggccaaggttaaaggaaaggcatcactgttagctgctgttgattattacgtgagcatgcagagtgacatcttcatttctgcttctccaggcaatatgcacaatgctctagaggcgcatcgtgcttatatgaatctgaagactatcagaccaaacatgagactgttggggcagctatttcagaataaaagcataggctggtcagaatttcagcttgcagttcttgatggacataagaacagacaagggcagataagattaaggaaggagaatcaatcaatttatacgtatcctgctcctgattgcatgtgtagagcttaatggaaacaagttttgacagttgtaaattgatctttagcttaaaattacgtttttggcttatttagtttctccaaaattcattttttctctcccaacttctaattgcagtggtgatgttccagtagttttcgaattcgtgaaattaagatgctgccacggagtcacggaactctttttatgacgtgacatagtattcaattcaaa

SEQ ID NO: 6497 - DNA, 261 bp, Glycine max
  Clone ID: PAT_MRT3847_105877C.1
gctaaatataggcaagctaagttcggataagagccattcaaattttcagtccagtgtattaacaataaggaaaatatgaggagctgcaacattagaaagcacctccacataatgcatgtgagcaattagtgacagcaagctaatttttggataagtccacaaatgatcaagcacacaacaaagcctacaaagagatattctgcttcaaggataggatttatatatatatatatatatatggcattgatcacgtatatatgt

SEQ ID NO: 6498 - DNA, 477 bp, Glycine max
  Clone ID: PAT_MRT3847_105878C.1
ccacgcgtccgctttatagacgccttgctatataccgtttccgtttccttgccggcaattcgattcttaatctctgaaacatgagagagtgcttctcgatccacatatggtcaggccggtattcaggaccgaaatgcttgactgtgagctactactgacttgagcacggcatcgtggcccgatgggcaccatgccaagtgacaaaacagatggcggaggcgatgatgctgtcaacactttcttcagtgagactggtgctggaaagcacgtgccacgtgccggctttgtacatcttgaccccactgttattgatgaagtgaggaccgtaacttaccgccagctgttccatccagagcagctaatcatcgctcttagattatgccgccaacaacttagcccggggtcattataccaatggtaaagagatcggtgatctgtgcttggaccgcatcagaaagcttgctgacaactgcactg

SEQ ID NO: 6499 - DNA, 278 bp, Glycine max
  unsure (1)..(278): unsure at all n locations
  Clone ID: PAT_MRT3847_105879C.1
actatttcagactatcaaactccgacatcctcagagaaatctcttataatttaaaaagtagcatctactcnnataaccntattaattctatatctaatacctacatcaaacccctacttcttcataacatgcatttattaaataaaacatcaacacatgctcttccttttactttaataattcattataactcctcttatctcaccacctttcttcctgcgacacatcattcaaatttctaccctatcaactttcgataatatgataatgacctacca

SEQ ID NO: 6500 - DNA, 542 bp, Glycine max
  Clone ID: PAT_MRT3847_10587C.1
cggccgctcaggcggcgggcgggatatactccagtccctgctagcgctctcattgcccataaccactcactgactcttgcttcttcacatgctcaccgcccacaactgttactgtgcccccgatcagaagccgacgaaataggtgaacgcaaccattctcgccaggaaaagaaaacctattgctccgaaggactatatgaccgaaacctgccggatatggttctcatcctccttatctccaaatgattgaggtcactgtgatcggtctgaactgtacactaagatcgagtacatattggatagaaaatcatttgctagataagcagaatgagatgctctcctgtgaactacaagaatgtactacgccaggacctgctgaaccagtatgctaaatgcaccctcatccagacctacgtttcctacaatgtaaccatagtccctcacaaagcgcaggctaccaccgccaaatctacgactgctgcgctaccgacccgctctaaatacgcaaccgccggtgttccaacgagaaccgaggcaggtaa

SEQ ID NO: 6501 - DNA, 298 bp, Glycine max
  Clone ID: PAT_MRT3847_105880C.1
ggctatactaaggtgaaaaaggagagacggcagctgctacatctactgctgggttcaacgggtggggatgtcacttccggcgtggaggaaagagaagccatccccttctcgctgctagcattcaagagcaaggggttgcttgtgggaatcctaacaaagctatagtgaccatggctactgcaccaagtcactcgcgtgtccagactgctataacgagtctgtaaagcatagacccagctggcctggatggccaagctccaggggaccgttgaatctacccactgatacgaagaaagga

SEQ ID NO: 6502 - DNA, 286 bp, Glycine max
  Clone ID: PAT_MRT3847_105881C.1
ctaagactttccccacgctctttttggctgaaaggtggacgacgtttcttgtacttgatggactatccatggtgaagctcataaccccagaagagaatggagttgaagcccagatgatgttttcattgtgcaaggctgagaataagcattgaacttcctactctgcagggctggttcttgcgtttcatgtgttgggaaaattgtgaaaggtgacgtggaccagtcagatggtagcttccttgatgatgaacaaatagaaagtggatgggttctcacctgtgttgct

SEQ ID NO: 6503 - DNA, 801 bp, Glycine max
  unsure (1)..(801): unsure at all n locations
  Clone ID: PAT_MRT3847_105882C.1
ctgctcctaatcagatggtacagtagttcatcatgctaagtgatgttctagcattaggtttatcaatggtagcgatttatttctggagcaagccacctacaaagaactatacatatggttttttacgcttggaaattatcgtagcttttctcaatggcttagcacttattgttatttcactaggaattatgtatgagggtatcantgagaattatacaccctanacctgttgaaagtggcattatgattctaattgcgtttattggtttaattgccaatatcgtattgaccatcattttaatgatttctctaaaaaaagagaataatattaatattcaaagtgcattatggcattttattggtgatttattaaattctttaggtattattgtggcgtttgtgttgattcattttactggatggaacattgttgacccaattattagtattctcatttcattgattattttaagaggaggatacaaaattattaaaaatgcttcaaaagttctgatggagcgtgtgccggatcgatatgatacagatgaaattatgggagcaatgaaagatgttgaaggcgtgatagatattcatgaattccatttatggagtgttacaactaatcaaagttctttaagtgcacatgttgtaataagtgatgactacattaaatcgccttatgctacaataaataaagtttcggatttgttaaaaacacaatacggtttagaacatgtaacacttcaaattgaaaatataaacctcaatcatttagatgaggagtatttcaaacaacttcaa

SEQ ID NO: 6504 - DNA, 237 bp, Glycine max
  Clone ID: PAT_MRT3847_105883C.1
gtgttttgaggaacggcgagcatagggtgccgcattttattaccggcaacaaacgcagtgaatgcttgattccaagaatgtctcagcatattactactttgatgtgtacgatggcttaacggaaagaaaatcactttatgtgttgcacaacagctctcgaatcatgctctattacatctgtacgatatcggtgcacactatgctattagcaataccactggacctaacagttaaact

SEQ ID NO: 6505 - DNA, 334 bp, Glycine max
  unsure (1)..(334): unsure at all n locations
  Clone ID: PAT_MRT3847_105884C.1
tcctagttttcggccgccctttgtttttggggtgtgtaanagtgtataagggacgcgccggaactggttttatattaccataactaccgtgggaataaaaaattgtggcgagtatattaccaaccctccttgtgtgtgggtgttacttggccccctctgggttttttttttaggaactagataccctggcggggggggggcaagtgacacccctcnctgcacggagggtgtggtaagagaggcgacctattcttttctcccacggttgttatcgtttatttctttttcgtcgggcgcgcctcttgccttttgggcatccttaatggctgggcng

SEQ ID NO: 6506 - DNA, 464 bp, Glycine max
  Clone ID: PAT_MRT3847_105885C.1
gattagccttttttgcaaaagaaatttctgaagtgaatcaaaatggccgaatttaaaaaaattccgaatacatcgattgtcatctctctaaagcgtaaaaacagcctgttggcaaccaagctaccatggatataggtatgcaggcatataactaacaatttctaagccaaggacaagggactgctctttacagcaataattgaaaaagcaaatgaagcctataaaggtagggacattcattgcccatgtcacttggaagcctcttcatcttttgccgccttaggatgtattcctttcaacttaagaaattgttacaccgatcagaccccatattacggaaaaatcactatccacttatatcagcgcggttcaccctcattggacagaaatgcagagtgaactttctcagaccaactgtccagttaatcccagaaggatttgatctgtaggatacccataactct

SEQ ID NO: 6507 - DNA, 160 bp, Glycine max
  Clone ID: PAT_MRT3847_105886C.1
tggattaataaatgttcatcaagcaaatttgataacaatataggtacccctatgtgtgattgttgcttggattctgggaatcaaaatggaccacaactttaacatcctagagacaggttctcttgctgtggctataacaattacagacttcacattacag

SEQ ID NO: 6508 - DNA, 557 bp, Glycine max
  unsure (1)..(557): unsure at all n locations
  Clone ID: PAT_MRT3847_105887C.1
ccacgcgtccggatcgcgagcgccgtcctttttttttttttttctctctcgagnggtagacaactcaaagttgtccaagaaacatttttctttataatcacctgaaatcctttttttttttattaatacaatagttgccctgaatttagaagtttaaccttatgcatattactcaaacccccgtattggaaactagagcctttatgaatttaaatttactgattaatataagggcattcacatcaatttttgaaaacaacagataaattctgtgtaggagtttcgacaggccttgggatctatcatctgcctccttggactagggttggggtataaagcggcagggaaaagagtgataaagaagcgcattcttgaattcttcaaaaagaatggtggttcgttgcttaaaaaaaaaaagttttttggacaactttgggttgttccccaccccaaaaaaaaaaaaaaaaaaaaaggggggggtttaaaaaccaagaaaggggggggcccctttaaagtacccaacctttcccccgggggcttccaattttttatttttt

SEQ ID NO: 6509 - DNA, 1063 bp, Glycine max
  Clone ID: PAT_MRT3847_105888C.1
gagctggagccgaatcggctcgagccttggggtccttcccatcaacggtgctcccaaccgaaacgcaagtcttagcgtccggcccaagaaccctaattcacacccaaagagaaaagaaaaaaaaaacaacagtggtacgtgatgccaccgaagttcgatcccctaattcccaccgcaaggtaaaaaaaaaaaaaaaaaaccagtggtgcgcgatgccaccgaagttcgatcccttgcaggtggtggacgtgttcgtccgagtcaccggcggcgaggtcggcgcggcgagttccctcgctccaaagatcggtccattgggtctctccccaaagaagatcggagaagacattgcgaaggaaaccgcgaaggactggaagggcctccgcgtgacggtgaagctgacagtacagaaccggcaggcgaaggtgacggtggtgccctccgccgccgcgcttgtcatcaaggcgctgaaggagcctgagagggacaggaagaagacgaagaacatcaagcacagcgggaacatctccctagacgacgtcgttgagatcgccagggtcatgagtcctcgctccatggccaaggatctcagtggaaccattaaggagattctcgggacttgcgtttcggttgggtgcaccgttgatgggaaggaccccaaggatctgcagcaggagatttctgatggagatgttgaggttcctcttgaatgaagttgctgaaatttcagtggttttttgttgtttcgtttatgttgtttttttgggcaattttggtttttttttctttttataaaggaatttgagtcataggaatggtatgatagttaagactttggtaaatgatatcacattgttgggtttttgagtaattttgtaatggagttgtgatttgtattgttgccaaaaccatttgtcaaattttaaggttggatcgtaagtttgttatctgccgtattgtcgtgtctttttgagttatacctttgtattactggtatttatgagaatttaatgtgtttctaaaaaaaaaaaaaaaaaaaaaaaaaaaaaaaaaaaaagggcgc

SEQ ID NO: 6510 - DNA, 181 bp, Glycine max
  Clone ID: PAT_MRT3847_105889C.1
tgcgaatatggacgatctgaccgaaggcataacatcatcagagtttgaccctacaccttgtaatacattggcgtatatcagtacaaaaggctcagttcctttagctgactcgcggcagtcagcattatgtgatcctcatgccacactatttgatgaacaagaaccccctggctccagatca

SEQ ID NO: 6511 - DNA, 918 bp, Glycine max
  Clone ID: PAT_MRT3847_10588C.1
cctcatacatataatacttagaagacgacagaagggggatgagcaacaaaaaaattaaattcttatcatttacagaatatggagtcccagacttccacacgagagaaggagtctctcaatctcagggaagtcccagaagcagataaaaccttgggcttggacatggccaagggcagcgcattctgcaagatgggtgaaggttggacatgcatcataactaaaactgaggggcctgatgctggcaaagttttcgttaaatgtggtgaaaattgcacctgtaccattgagggcgaagcagtgtcccaagaattgaatttgccacctgatgttgtgagcagcagtggcagtggagcattctgcaagtgtggtgaagggtggagttgtgtcattttcaggactgaaggccctgatgcaggctctggcaagggctttgctgaatgcgctggacagtgttcttgtactattgatgacaaatccacctaagataaacgatgagtgcatctatgatataatctgatggttatttttctcttgattctgctacaggtttgtaaaattaattgtattgaagaaggggacaattatgatcagtagtatgtgtggtcaagtgtatgtatgatatatatactatgatggttggtttacttccactttgatacatgtttgtaacataagttgtatggaagaagtgagtgaaccatcttcagtataatgtgtgatcagtaataaaggaaatgaagggactgccatgactattatgcttgatcagtattagtttgtacttaattgcatatcagtattagtaattattgcttaataatatgctccatttgtttttttattggagtatattcattactccattcataattccaaaaaaaaaaaaaacggcgcgcgttctataggggtcccaacttc

SEQ ID NO: 6512 - DNA, 257 bp, Glycine max
  Clone ID: PAT_MRT3847_105890C.1
ctcgagccgaatcggctcgttattcaagacacaccacaacgcagtggctggcgtctttaagcctgtgagaagggccattaacctctaactgaatttccctaaacacattcctcaaactactaatgacaacttttcaccctaactggactactacgcatacaaatccttggtctcctacttaatccgctcccaccatgtcattctgaactacctaagattattccctcctttttccatcggtaaacactttatttcat

SEQ ID NO: 6513 - DNA, 204 bp, Glycine max
  Clone ID: PAT_MRT3847_105891C.1
attgcaggcatgcatggtgctggaagcaaaggaagactgggatatgcttgattgataccatttgttgggctcgatgggcacgcttaaagtgcttgagcttactttgacttataccgtgcgtaggtggattggcaggagggagttgctcacattggtgaattgacttatgaagtctatgttccctgcctacaaagactctgttgg

SEQ ID NO: 6514 - DNA, 1418 bp, Glycine max
  Clone ID: PAT_MRT3847_105892C.1
aactgccaatcttcctctgaaatcatagtaaaatacatccccactgaagttcaagttcttgtgtgtaaaatggccaacattttcctacacaatgggggcaacacttgcaaggctaccctctatctcttattcataaccacaaccttttttatcgcaaactctgcaaggattctagatgaagtggaatcccaaccccaagccataggcaatctaccagcacctggagctaccaatccttcactcacaacagctccagtcaccaccacaccacagatagatcctgccaccactttgccaagtggccaaacatctgcacccaccaccatatcacaggtaggtcctgccaccactttgccaagtggccaaacacctgcaaccgccgccaccatgaaccctgctactacagaagactctggagaggaagatgataaccaagtagagccaccagttccagaaacagaagctccagctgctgtcactgcaccggctgaagaggaaactccagctatccctagtgcggctccagtgacaccaaactctttggcaaaagagccatctttttctttcttcatgcatgacatccttggagggtcacgtccatcagcaagagtggtagcaggaatagtagcaaacactgatgtcactggcctaccattctcaaagctcaacaacaacctcttcccaatcactggaggaattccactggtaaaccccaagctcaacggcatcataaccaacaacaatctcccaaaccttgtaggcctcagtggtgcacaatcctccactgtgttcaagaacagtggcaccagcaacactgtcactggtggcaacaaccaaccatttgtctcagcaggtaacctccctgcaggattcaccatccagaagctcatgttcggctcggtgacggtgatcgacgaccagctaactgaagggcacgagcttgattctgctgtgattggaaaggcacaagggttctacttggcaagttcattggatggtagcagccagaccattttgttgacagttttggtgcatggtggtgagcatgatcaacatcatgatgtggtggatgacagtatcaatttctttgggattcataggacagcttcatcagaatctgaggtagcagtgattggtgggactggcaagtatgagaatgctagagggtatgcttcacttgagactcttctcaaggaggaccagcacaccactgatggggtggacaccatcctgcatttcaatgtctacctcactgagtagagagactagctacctgtcattgtgattgattgcctttcatatttagagtttgaatttgaatatttgtgtatggtttgttcaaattggtgctatatgtctctgttaatccttcatcaagtttgcactttggctcattttgctttcttataatcaaaaaa

SEQ ID NO: 6515 - DNA, 248 bp, Glycine max
  Clone ID: PAT_MRT3847_105893C.1
aactcgcccttcttctttcggcgggctgtgttttgccgcggaggggatttcaactgaaaaaacactccgtgcagctataacacttactagagcaagatccagcataggtagcgaagcgcgcatgtgttatttaattgccccaattaaagggtacactacggcaaaaccgaaagcccttgcatgtgttagaggaatgtttcgagtgctgtgaatagatgaagatgtaaatgggggaatgagtaaccacc

SEQ ID NO: 6516 - DNA, 167 bp, Glycine max
  Clone ID: PAT_MRT3847_105894C.1
aacacacttatacttaattaacaggggatagtgaagaaattgtaagaacctttcttgaatgttcgtaaaaagccataaactcatttaacacaagctccggattctaagaagacacaagatctcaacatgaatcgtaaaaacatatatgctttaaatgggcccgagtt

SEQ ID NO: 6517 - DNA, 482 bp, Glycine max
  Clone ID: PAT_MRT3847_105895C.1
atttgcctccactgcactcgtccactccaacacaacacccctttcacaccaccccaacaacaatctccctcttctttctccaccttcaacgttctccaaaccctacaccatctccgcaacaacccctcccacgcccccttcttcttcacacacctccaccaccccatctccacctacgccgtaatcatcaaaatcctcttttgttggaacctccaacgccaactagactccctcttcctccacctcatcaaacaccaccaccctcttccctttcccctccttaacttcttcgaaacactcctccaagacttcaacaacaacagcttcttgcttagagcatttaatggttttattaaaagctgtgtcagcctcaacatgtttcatgaggccattgatttccttttcctaacacgccgccgcggaatcgtccctgatgtcctcacttgcaacttcctcttcaaccggctggtggagcatggtga

SEQ ID NO: 6518 - DNA, 303 bp, Glycine max
  Clone ID: PAT_MRT3847_105896C.1
cacgcgtccgcccacgcgtccgacagcagcgaaaggtccagatgcgggggaactaccacatgctaccgtcgatcaacaataatattttgcgacaaatcaggtgacgccgagtcaactcacgcattcatgcatcgattcaggcgttttgagctcatagaacagccacctttcttccactcctgccactctgatccttccttcgttctccatgactcaatctctctcgacctcgacctcttgccacttctcaaccacttcgacgctttctcaaatctgttgcacgcgccatcattctcttatcag

SEQ ID NO: 6519 - DNA, 271 bp, Glycine max
  Clone ID: PAT_MRT3847_105897C.1
ctcgagccgttttcattgagtggggttacatctgcacttgggagtattcttcgtcgtacatccgactccgccatagctgggccaagccaaacgaccattcaattgctgaagaatgtcagctcgtcgcgcagtcgattagaaaagaagttatcatcccgcacgacccatcaaccaaattcaagcctggtagtgaaacaccgtgttatatcaaaagcagcgttggagcgctcagcaagtcgaacaaataacatttccctttgcgcgccatcca

SEQ ID NO: 6520 - DNA, 488 bp, Glycine max
  Clone ID: PAT_MRT3847_105898C.1
ttacgattcgaacatgttcagatttggtatacactaagagaaaaaactatgtcaggtattacatgggtaaagaaaggccaacagaaatatggaagaaagatatcctttttgtgacaaacatcagtctgtagcgtagactttgctccctcatattcaaacaaatcctcagaattaagcgccgaaatggaatactcggacccgcaagatgtccgagatgcaaattatagccaaattatataaaatatcgcacgcaatgcgattatgcgcgtagagtgccgtagtcgccagtcgcaaggccattgggcacttcttgcagactgaacttcttaaagtccttggtgagatcgttgctcttgcccttgatatctgaaaccggcttgctcgccttcttcgcttgtgcggcgggctcgttgcgcttcgatgtggtgggtgaatcgacgacagtggcttcggaatcgtcttcgccattgtcgacttcttcattttcg

SEQ ID NO: 6521 - DNA, 259 bp, Glycine max
  unsure (1)..(259): unsure at all n locations
  Clone ID: PAT_MRT3847_105899C.1
cganttgtttaataatagtagcaattaattttttnaaatgcttagtagctgtgttgtatgtttacttgtatctccnccattgtncgggtttcatatatgttttccttgaatgattttccttcccctgtatttccacctcccttccctggattggagaggatttgggcattagtggttggtggtgatacgttaaagtgttttatctactccgtgaaatactgttttttatgccagctttgnctaaagccacctgaagnca

SEQ ID NO: 6522 - DNA, 265 bp, Glycine max
  Clone ID: PAT_MRT3847_10589C.1
ccacgcgtccgtacggctgctagaagacgacagaagggggaggactaaaggccacctctcgaggaccacggatgctgagataatagagggtgagttctttgaaattgtgcaagcttctctcaacctacatctcttatatttcaccccactccacatttcttccctcccttcttctgttcttacacattgttctttatctttacctggatttgctccataatttatcatcccctccatatttataccgacccctttcctttttatt

SEQ ID NO: 6523 - DNA, 694 bp, Glycine max
  unsure (1)..(694): unsure at all n locations
  Clone ID: PAT_MRT3847_1058C.1
agaaaacttcaaataaaatgattgagaacccgttgaatactgttcaaaggacacaagaattctggtctagatgatgtaacaaattaacaattgccaagtataaattacctgtactatcaagaaaatagcacctagaagatgcacaaaacagtcagatgataggctcctcaacttgctagcaagtgatgcacctccacctgagttactatttagcattagaaagttgaaagtagaacagatcacataaaaacactggaagaaaaatattaaaagtatatcttctcttcttacagacaaacataatcaattatgacaaagaaattctcaccatctgcatccacagctctgtctccagaaaagaactctgattctgaacctcgacaagcaagaaccggaagcaactcagcaacagcagtcttaatagcactcttcatatcagcagtcagtgtatctcgataagttctcagaacagagggaagtttagcagttctaagcaatccaattacagtaggaagaagactatctttgaaatgattggtttcctcttcttccaactttacttcatcatcctttccattcattggaagggaagctcttgctttagctttggatnnnnnnatcacatctttttcagcagcatcgtttaaggaagctcgaataaactctgcggaaagaatgctgtttatggattcta

SEQ ID NO: 6524 - DNA, 280 bp, Glycine max
  unsure (1)..(280): unsure at all n locations
  Clone ID: PAT_MRT3847_105900C.1
aaaaggaacatgcgtgtgcccctttaactaaaaaaaaaccctttttagacttttatgtgcacttttaatttcaaaagggggacacaaatcttattgtgtacattccccaaccccccctttgggggtctttttttcttccccccccatgaaaaaatgtgtcacgaaaaaaaaaatatatgctccaaaaagttctcctttttttttcttttttcctctatatattntccacaaaatgagtttgtgtttgtggagaaaaaacctttggagatgtctggggggg

SEQ ID NO: 6525 - DNA, 342 bp, Glycine max
  Clone ID: PAT_MRT3847_105901C.1
aaaaaccatggattacccctttttggggctctacttttattttaacttttttttcaaaaaaacggggaaaaaatggtgggggggggggggacataaataaaaaatttggggaacaaaccccgccaaaaaaggtttttttccggggcaaaaaaaaaaataaccggaggaaaaaaaccccctacccagaaattttttccaaaaattgtaaaagggccccaggggaaaaaaaactctccccgcggtttttggaccagggggggacaaaaagaccatggcggcgcaagaacccccctttaaaccggggcaaaaatcaggggttttccccgggaaaaaaatagagtt

SEQ ID NO: 6526 - DNA, 492 bp, Glycine max
  Clone ID: PAT_MRT3847_105902C.1
aggacataacctgtttgttcattattttaagttgattaatttccgtttttcatagattgcattgtaggatataatataatatgatatgattttcccctttgcttcaaggatgttgcttcattcattaattgggttctctataagaaaaagtatggagtcatgaaagtcttttttatttcttttagttgtgatgtattcacatgtttatctttcgtgccaaagtggtggtgattgttggtgatggttgatcaaatactgaatattgaaaagaaaagtggtggacttgtgtaagcaaattccattgcgagaagtagctgttctcaggaatgatgccccttttgatgttattttctggcataaggaatgctttctcaagtgatgaattaggcttggaaatactgaatattgcactccctactactctggctttggcagcagatcctattgcttctctaattgatactgcattcattggccacataggtcctgtag

SEQ ID NO: 6527 - DNA, 234 bp, Glycine max
  Clone ID: PAT_MRT3847_105903C.1
gattgacaaaacagatcgggctcatattcctacacattaccgcaaatctctcacggcgtgaatcttatcacgtgaattgtgaagacgtcgtcctcacgtagcaaaatcaacacggttcgagatgctaaatgtactcagtgttcttagtcaattagataggtactggttaatactcaccgtaccatctacaagattcactatcatctcatacgacttattcagccattcaactat

SEQ ID NO: 6528 - DNA, 548 bp, Glycine max
  Clone ID: PAT_MRT3847_105904C.1
gtttccgtttttttaactggaagttttttatttgtttaacccacgcgaagggaccggcaccaggggagattttggtcacttatgccaacatcatggctaagaaaaacgccaaagtgggggggaccaaaaaaaagggggggcaaaaaaaaaaaagatgattgcgagcgcggggacacaaaacaccataaaacccccgctagaaaaaaaaaaaagacgaataatgaggcagaccaactcacccggttccgcctttttgaaaacgggtttgactaatccccccgaaaaagaagaaagaaatatatgggggcaaaaaacgagcccatccaactccaaaaaactggggccgccccccccccctgcgtttacgcccgactcttggaggaagaagtgtatgcaaagcccctcgggtacaaagaaactagttgggggcttttaatcacaccaagagggggggggatacgccaaaaaatgtgctccctctggcaccagaacaaagtttccccccccggggggggggatccctgcgggggggaaaaccccccccgggg

SEQ ID NO: 6529 - DNA, 388 bp, Glycine max
  unsure (1)..(388): unsure at all n locations
  Clone ID: PAT_MRT3847_105905C.1
cacacgtcctcccactcttccggtgatataagctagttataacaagatgttacanctactggacactgcgattttctgcgaagatgctttttattctcacactcatcttcaaaaccccactgagaaaactcttcatcgtttccctctatagtgttaatcgcggtcgcggtcccttggtggtttctaccgtgtgcgccacattgatggttgttctcgcttctagcctctacagcatgtccaatatccatcaactcacccctgatgccttcataattcaacctcaccttaccaattctctcatttttcaaactcatgcttgaagctttttttcattgtagtttcctgcatgtttcctctttcttgattattgatttatttgcaccctttc

SEQ ID NO: 6530 - DNA, 490 bp, Glycine max
  Clone ID: PAT_MRT3847_105906C.1
ggtgttttttttttttttttttttttttttttttttttttttttttttttttttttttcaaaactaaaaacccaccttttttttccagttttccccacctggtttaaaccccgggggaaagaaaaaaagaaaagctgttcggcatttttttaaagcgggggttacaagacgggaaacgcccaacaaggaaaaataaaaaaaagaagggggaaagggggcaaaaaaaaggttaaccccgaacaaaacccaaaagatttaggctttttaggcagaaccccaaaaccccaaaaaactgggggtaaagcctgttaggggctaaccacgggaaacaaaccccaaggggagggggggggggctagcattctaggaagaaaccccgcccagccaatctaaatatacagatttttattttcactagggaaccaatttttattttaaaactgcaagagagggggcaagaaaaataaaatcggggggtcccaggtttttg

SEQ ID NO: 6531 - DNA, 336 bp, Glycine max
  Clone ID: PAT_MRT3847_105907C.1
aaaaaaaaaaaatatttaaattgaaaacccttcaaactataaacgggggtcaaaaccaatctattgccctaaaacaaaaaaaattgaaatcggattactctattcttggaactccggaatttggaccaaaaaacacttccccaaatcttgctttttgtctcgctcttgaatctaactcgctaatgtcaatgcgaccaaataatctctccctagttgattgcgctatggcccaagtaggatcaaaatcgggcaacatataaactttgattacccaccttcgtggattttcatatctattgcaaccatgataattgttgataccagtgtctaacgtaa

SEQ ID NO: 6532 - DNA, 149 bp, Glycine max
  Clone ID: PAT_MRT3847_105908C.1
ctagcttgttaagctttttggcatggttttgttcatatatatttctcctcatatcgtgattctaccattttcaatattaagctactaccgcttgcaaacatcctgcggactaaagtgccgaaatgtatggtggcaccgtggcactactt

SEQ ID NO: 6533 - DNA, 172 bp, Glycine max
  unsure (1)..(172): unsure at all n locations
  Clone ID: PAT_MRT3847_105909C.1
ggtgtttttttttgnaaaagaaaatttatttaatataaaattttatttattttgttctcaaattgaccgattggggttcttccaagggagagtaactaatccattagaaaatgaccaaaccccaccattttaaggttatgcattgccctttttcccaattcccgagggggtt

SEQ ID NO: 6534 - DNA, 747 bp, Glycine max
  Clone ID: PAT_MRT3847_10590C.1
cctccttgtgggacccggcgctgttgtgcctctccgggactctccgctggggtgtcggatccagatttcagggatgatgctcttttttgggagtcgtatatctccaatctaacttctccatgttgctcttcttttctaattcccttttcacgtggtcttctccaaaagcttctgcttcaattctaattcgcatgtattgatttagtgagaagagtcaatcaactctttaccttattaaaattgtcttataatagtgtttatgaagaagtttatccaaacaagatcttatctataatattttttggtaattcatacattgacatagttgttatgtgcttcatgtgaatacaatattgaaatactcttaaaaggtatttgcaacacccctgggaagtatgagagaaatggctccagacccaaaagaagagggaaaggatcagaagaagaagaagaaagctgaaagatcctcaaagaagctcaagtctgagagatttgaaaagtgggagtccctcagtcgacggctgcgactttgcattttaaagggatctgcccataggagatcaaagccctcttgacgtgtcttgactgctacatgtgtaaacatagttcatctaactatttgctttcataacattaatgtaagacactgctatttttaggcagtccatgaaactcaacttggttgtaggttgactagttgattgacttgattctcttttgggaaatattcaacatgtatttatgtac

SEQ ID NO: 6535 - DNA, 891 bp, Glycine max
  Clone ID: PAT_MRT3847_105910C.1
ttttgtcttcccacgcgttcgctctctcgtccgggagtccttaatgtgccatctttgccagtggaatgataaagggaggatagtaaggtgcacaaaatgtaagcggaaaagattttgcttgccctgtttaagaaattggtatcctcatttgaaagaggaggatattgctcaggaatgtcctgtgtgctgtggtaattgcaactgcaaagcatgcttgagatctgatgaacctattaaaaaaatgaaaggcaaagcaaatactgatgaagttcaatcttgtcatcttcatcagtatttgttgcaagtacttcttccgtatttaaggcagttggatgaagaacaaatgattgagaatgagatagaagctaagatgcaagggctctcggtctcaaagctaaatatagtaaagacagattatgcaaaagacgagcgtgtgtactgtgacaactgcaaaacatcaatatttgattaccacagaagctgtacaaaatgctcttttgatctttgtctcatctgttgccgggagcttcgtaatgggcagcttgtaggtggtgcagatccaattgagtgggagtttgtctttcaaggtcatgattacatgcatgctcaaaaagaaaaggctctaaaggaaagaaaaatggtaaagcaaaatgcatcaaatgctgatgctaagcctgaggttcgtgaatggtcaagatgtgggtggcatgcataaagtaatggtaacattccttgtccaaaagtcaatggtgaatgtaaccatggtttccttgaactgagaaccatattaggcaaacattttatcactaagatagtgcataaagcaaacaaactagcacaggcattcactcttcaagatgtagttaagaaccctgacaacttctgttcatg

SEQ ID NO: 6536 - DNA, 180 bp, Glycine max
  unsure (1)..(180): unsure at all n locations
  Clone ID: PAT_MRT3847_105911C.1
gggtccttttttttttttctttttttctcttctgtggggcctaacctggtgtttttgccagtcactgtggattgcggcccgctctccttacaccacccttggtttgggggagccgggcctgcgcatggtttgtgcactggggnccacaaatatcgggtgggggggaaagcattttttttt

SEQ ID NO: 6537 - DNA, 476 bp, Glycine max
  Clone ID: PAT_MRT3847_105912C.1
aattcggctcgagctcgagccgaatcggctcgagtacggctgcgagaagacacagaagggtacggctgcgagaagacgacagaagggtacggctgcgagaagacgacagaagggtacccgttagatcatatgtttataaaggatcccccactgattgagaaaataggatgggaagaatttaagtctgtgtatttggacaaacaaaatgtaaagcttgatgttgataggtttaggcctacattgcagaaagcccttgagctattgcatcaataagtacggtttgtctttttgatccagtaagctggatgggagctttgagtgtcacagtttattgttcgcagtatttttcctttttactgatatttatctattgtttttcaataaggagcttacggaatgagggacaaagaaatcaccatctgcaacaaaatttctgtgtggaaggaaaatgatgttcaatggacctaaagcatttc

SEQ ID NO: 6538 - DNA, 2483 bp, Glycine max
  Clone ID: PAT_MRT3847_105913C.1
gagatttctccactttttgatgctttgacattttcccctcgttcaccagtgtcaaagttattctataaagactttcttcttgagtaaagcacactccaacaactccttttcatgcaaatgcaaaaaggccatcctttacaaaggccagtagtggcttagcactagcaggagtgtcttgatagagaagactaatcttctctcacattcatgctcatgtcatagacacttaacagccaatgatcactttgtggtaacttccaggaaggaagctctactctgctgaaatgcaaagggacatgtgatgtgatgtgaagtatttggactctggagtctagactagtgcttttggatcatttctcaagtgtgcttcatctgagttctgacttgtgaagttccaaggtatggcggttgaaggcgtaggagaaaatagaatgctgagactgaaatttactccaaggcacaaacgttcaaagagttttcctgataagaaaagaattgaggaggataaaccagataatcgcattcaggcctcaggtcgaattaaggacatgggatacctcgcggaatgtgataaagctaggaaaaaccgaagccctacaaatgaagtccacagtactccgaagcaagagattctacagcttgagagaagattacaagaccaatttcaggtcagatccacgttagaaaaggcacttggattcagatcttcatctctcgttaattcaaatgagatgatgatacccaagccggccacagaattaattagggaaattgcacggttagagttggaagttgtgtatttggagcaacaccttctctccttgtaccgtaaagcttttgatcaacaattatcttctgtatctccgacttctaaggaggaaagtgtaaagttccctctaacaacacatagcgcacgattcatcaatttttctatgcctgaggtcttaaccaagagagaatcttctacagaacaatctaatgagcataagcttgagactttgagcaaggagtatgacatatatgagcctgagacttttgggaaggaacataatagaaatctgctagaagaaaagcatttaggttctggtgtttatcgttgtcattcctctttgtcccattgtccagcatttacaagagaatctcctccagcagattctttagctaaatctctgcgtgcctgtcattcccagccgttgtccatgttagagtatgctcaaagctcttcatcaaacataatcagcctagctttccatcttggcacatcaatatctgatcatgatccagtgacacctaacaaactttctgaggatatggtcaaatgcatatcagctatatattgcaagcttgcagaccctcctatgacacatccaggactttcatctccaagttcatccttgtcctcagcaagtgccttttccattggagatcaacgtgccatggggcgtcccaggctcgggactttgtcatcggtggatgtccgcttagacaatcctttccatgtggaaggacttaaggagtttagtgggccatatagcaccatggttgaagtatcatggcgttatagagaaagtcagaagtcggctgatactgagaagctgctcctgaatttcaggtcacttatttgtcggttagaagaagtagaccccggcaggttgaagcacgaggagaagatagctttttggatcaacatacacaatgctttagtgatgcatgcatttctggcttatgggattccacaaaacaatgtgaaaagagtctttcttcttttgaaggctgcatataatgttgggggtcatacaattagtgcagacacaatacaaaatactatactcaagtgtcggatgtctcgcccgggacagtggctgcgcttgttattttctcaaagttcaaaattcaaagctggagatagacgacaagcctatgcactggagcaagctgaacctctttcacactttgcactctgttcaggaaaccattctgatcctgcggtacgtgtatatacaccaaagagggtgtttcaagagctagaagttgcaaaggacgaatacattcgagctaacttaggcgtacgcaaggaccaaaaaatactcttaccaaagcttgttgagtcattcagcaaggactcaggtttgtgccccattggtgtcatggatatgatcctagaatctctacccgaatccctgagaaagaatgttaagaaatgtcggcttgcaaaatcccggaagtgcatagaatggattccacacaactttacttttcgatacctcatatctaaggatatggtaaaatgattactttgcagcgttacttcttactgtggcaagaaaagtgcatttgtttgatctatgtaattctttttgtacaaagtagaaacggtacggcgaaatacaatattgcagtgtgatacatttgtaaataatctttgttgttcctgtaattgcaactctgtaagtaacaaaaccacaagcggccgctctagagga

SEQ ID NO: 6539 - DNA, 141 bp, Glycine max
  unsure (1)..(141): unsure at all n locations
  Clone ID: PAT_MRT3847_105914C.1
caatcttcactccacacaccccnngnccaaccgnctgaantgcagcaatngcagatggattgcattcgcagcatccatcggtacttcagaagttatctggacaatcttatcttgtgtccaggcttactcctaatcactcca

SEQ ID NO: 6540 - DNA, 283 bp, Glycine max
  Clone ID: PAT_MRT3847_105915C.1
ggctcgaggatccgatgggctatgccactctaatggctgtgatacgggggtcgatccttgtgacggggtgggacaatccattgacatagaatggtttcctgaggacatcgagcgaatgtttatgacttactgcagtagcgatgactgacgcacagctatatatttatcgtgctctgtttacgggatacttaatccactaacatttcgatattactgaggtccccgcgcaagggtatgcctaggactgtcacaaaccccgtaagcgacccgtgcctggcggggc

SEQ ID NO: 6541 - DNA, 3015 bp, Glycine max
  Clone ID: PAT_MRT3847_105916C.1
agtgaacgactatcaactgaattaaccaattgaatcactcattaatcgataataaacaactaacctcactaacaaatagttttagcctcaacaaaagcaaatgggtaatttttcctttttaaaatcatgtaatactctcccaaggtggaatgctaacctcaatcttaagataccattgaaattgaagcggaacgttactgaaagatttaatttaacacgtgtggctgtgaattgagtgctagtacaacactaataataacgctgcataccaaccacagaaacaaacaaaaaaatccagctggcagataagaaacaacaacaaacaacagcaacagagcacgccttgcgttgcatggtgccgacgcggcgcacgttagccgagttgcacgaatccctacatataaaacacaccgtttcgctgtactgattttttttggcccacgcgtccgctcttcttttgcaccgcaaacagcttcacttcacactctactcccaaaatggcggctgctacgacgtcgtattcttccgcaatcgccgcctcgtccgataccctagccaaacctgcttccaccagaacattctccgccaccaacctcgcccttcaatcgtcgtcttccaagctcggtttcaaatccctaaagcttcaccgatgcgccgccgccgccggctccgccctcggcgcgcggatggtgtcggcgccggcggtcaaggcccccgcactgctcgatttcgacacgaaggttttcaagaaggagaagattaacctcgctggacacgatgagtacatcgtaaaaggaggcagggatttgtttcacttgttgcccgatgctttcaagggtatcaagcagattggtgttatcggttggggatctcagggacctgctcaggctcagaatctacgggactctcttgctgaagcaaagtctgatattgtggtcaagattggactcaggaaaggttctcgttcctttgccgaagctcgggcagctgggttttctgaggagaatgggactctaggtgacatatgggaaactgtctcgggcagtgatcttgtgatgctgttaatttctgattccgcgcaggctgataactatgagaagatattgtctcacatgaagccaaacagcatacttgggctttcccatggttttcttcttgggcatttacagtcattgggacttgactttcctaagaacattagtgtaattgctgtgtgcccaaagggaatgggtccatctgtaaggaggctctatgtccaaggcaaagagataaatggtgctggaattaatgcaagttttgcagtccaccaggatgtggatggcagggctactgatgttgctttgggatggtccgttgcccttggttctccattcacttttgccactacattagagcaggagtacaggagtgatatctttggggagagaggaattttacttggtgctgttcatggagttgtggaatccttgtttaggagatacactgaaaatggaatgaacgaagatctggcctataagaatactgttgagtctataacagggattatatctaaaaccatctcaactaagggcatgctagctgtatacaatgctttatctgaagatgagaaaagggaatttgagaaggcttatagtgcttcttattatccttgcatggaaattctgtatgagtgctatgaggatgtagctgctggtagtgagattcgcagtgttgttctggctgggcgtcgcttttatgagaaagagggtctacctgcttttcccatgggtaacattgatcaaacccgcatgtggaaggttggtgagcgtgtccgatctacaagagcagccggtgatcaaggcccattatatcctttcactgctggtgtctttgtggcattgatgatggcccagattgagatcctgaggaagaaagggcattcctactcggaaatcattaatgagagtgtcatcgaggcagttgactctttgaatcctttcatgcatgctcgtggtgtttctttcatggttgataactgttcaaccacagctaggttgggttcgaggaaatgggctccacgatttgactacatcctaacccagcaggccatggtggctgtggacaatggaactcctgttaacagggacttaatcagcaacttcctgtcagacccagtgcacggagccattaaagtttgcgctgaactgagacccacagtagacatttctgtgccaccagatgcagactttgttcgtccggagttgcgttctagcaattagaacttaaaagcaattatggctttcacttcgaatctttttcagatttctcagaactgcagttatcttgttagtttgggttttcatgattggatgctagtgtgtaagttgtattgtcattttacagtttgtacccgcctgtgttctgccactgaggaacgttacttggtgtcctatttaaatgagtcacgctagtacttaccattagaggctgagaaggattaaggattttacgatcttaatttcaggtttgaagtttgtgctcaactgagacctacagtagacatttctgtgccaccagatgcagactttgttcgtccagagttgcgttccagcaattagaacttaaaatcaattatggctttcacttcgaatcattttcagatttctcagaactgcagttttgttgttagtttgggttttttagttttgttttcttggttgaatgctagtatgtaagttgtattatcattttgtagtttgtactcgtctgtgttctgccactgaggaacgttacttaatgtcctatttaaatataataagtctgtaaactacgtccacagacgagtcacattagagggtgagacggattaaggattttacgatcttaatttcatgtttcttacagttccttgcaagccttccgtcagttttagccccggaacctttttagtgatcccggtaactcgatctggtcatagacggtcgaattgaacatgcatatagtgaagaaaagtgttaatgcgttgagttttccttt

SEQ ID NO: 6542 - DNA, 461 bp, Glycine max
  Clone ID: PAT_MRT3847_105917C.1
ctgtcaatgttgctcataggatactatttcccagtgagcgacgactctgtgattgcatcttctcgaggttctcttctgttgctgctctttgtttcaatgaggtttgtaggggagccctgattcaattgctcaattttgctgaagctgttgcaagtggaagcccttcagagtggcgtttgtccaaaatccttgacatgtttgagacattgcgtgacctgattcctgagtttcaatcgttgtttcctgagtcaatggtaaaggaagtaatgaaagtccatgacaaattaggtgaggcaagcagggtcattttcatgaacatggaaaatgtgattttccatatcccagagaccaaagtaattgccccggcagatggcagggttcacctaatgaccagacacgtcattcgctacctcgtgtgtactagtcaggcacaaaagatcttggagcaaatgttagaacaa

SEQ ID NO: 6543 - DNA, 497 bp, Glycine max
  Clone ID: PAT_MRT3847_105918C.1
ggctcgagctcttcataccttgcggttgtggttttcacgcacaattttctagatccaatggagatgtgtaaggaaaaggatcacactgctgtctcgggtatggcgcacttcaactctgggaagaccactaccactggccacatgaccatacatcctctgaggaatgtgacacagggagttcttactatattctgccacaggaagctgatgctatgaacaccaggccgtccaaggctttaccctagccacaccagacccaggctcggcgtgccagactataatcattaccatttgggtcccggaccgttgaaaacagcgcctactatggagcactactaggaacacctggacacagaggattaattaggaacaaggacaatgcgacatacgaagctgactgtgctgttcttatcattgattccactactggtggttttgaagctggaatttcaaaggatggacagactcgtgaacatgctctgctttcattcaccctt

SEQ ID NO: 6544 - DNA, 419 bp, Glycine max
  Clone ID: PAT_MRT3847_105919C.1
gtggagcggaaaacaaaaaaaaacaacgtaaaaatccgagattcgatattctataggaaaagtgaaaaccagaggtgcaagcgagagagagagacagagagacagcgagcgaacacatgataacacgatcagaatctcgtggtgaacagcgtgcgagagtgtcaaatgcaatccaggcatgaatgggcgcgtctgtgtcgttgttgttctgacaatccatcaagcataagctcaagctgggagaatgcggtgcgcactatccccaccatcgcattgtaatgttgagactgtgtggtacaagaccatcagtcttacgtgtgtgggatgcatggggataggacacgatccgctcagtgtggaagcgttattgatagaacacttagggactaatttgtgaggttgatagcaatgatagagat

SEQ ID NO: 6545 - DNA, 472 bp, Glycine max
  Clone ID: PAT_MRT3847_10591C.1
cgagtgacgtggatttcatttcgcaatgggattctgggggatcgaagtgaaacctggcaggccatgtgcttatgacgctgacaatgtgcgagggaagcttcatgttactcaggttcttcattcatatactcaactcctcttccttttttttattcatagaacccgaggttcttggatttctgttgtgcaagaaacactttctttctggtcttgtaaatttctcagtgttggagttcccaacaattgttgctgcttttctttgataatttgtatgaaggtttgaaatgtaatttccacgtgtgttttaatttggactcttgataaatttgcttgacgttattatactagtatttaaaaggcttaattagtctagatttatctgtcaatataacatttgtattcgtgtgtaattaataattatatgcgtttgtatgcaatggcactcaagggttctgaagtcttgtgatttttt

SEQ ID NO: 6546 - DNA, 397 bp, Glycine max
  Clone ID: PAT_MRT3847_105920C.1
aaaattaaaggggcccctttaaccaaaaattttaggggaaaaccgcccaatttgaaaaatttggaaaaatcttctaaaactgggaatttttttttggccccaaaaacattggaaattttaaaaaggttccccccaagtcccataaaaatttttaaccctgggatcaccaaaacctttgggaacaaaaatttttccttgccaagtttgttttgcccccaattaaaaatgggaaaaaagtcccccggtaaaaaacacccccgttggcttttccaagggcaccctctttaaaaaccttgtaaaccaatgggacttttttgaaaatctttggttttgggaaaaacttgttcccatccgtaaaaagcttttccaaagtaatttggggctgccaaaagggggg

SEQ ID NO: 6547 - DNA, 287 bp, Glycine max
  Clone ID: PAT_MRT3847_105921C.1
ggcagatgctttcgcaccagctgtagcttctggtttgatatgcggggatggaatatggactcttcctgcttcaattcttgctcttgctggtgttaagccaccaatttgtatgaagttcttgtcaagagcagcaaatgcgagggtcgatactttcttagggaattaaggacaagtttgaaaattggacttggttttaaacttttgcagccgtagttgaacaaaacaacatagaaggaaaaactattgtgtattatatatcagaaagaaagtatatgttttacatgttt

SEQ ID NO: 6548 - DNA, 871 bp, Glycine max
  Clone ID: PAT_MRT3847_105922C.1
cacgcgtccgcccacgcgtccgctgctcgcttttctcattttgaaccttctgcagctctgtctcaagaatatgtacacaaaaaagaaagtagctttggttctgtcattaaggagcctcagaattatctgcttgatacagaaaacaatatgaaaaaatcatgtggaaattcaaatggctttcaaatgcatactggaattgtctatcaggacagaagttcagcaggttctccaaggagattttcagtaacaaagtttgcacctgaatattgcaagtcaggtagtgctctgaatgatggtccttttcaatctaagcctagctgtgattttggacttcaacaatatgtggatattaccaaaatgaaggaaaatactgtgccaccagccaagccaactgactgtgagtctggatcttctcagatggggcttcaacttgtagatttaaaggaatttattactcaaaaacagcaagctttattatgcacaggtgatgtaaattctggatgcaatgtgaataattgctcggaatataattcatctcgctctgctgaacatgtcctgcctttaccttcttcagtattagatgcaactactacacctgaaaattcagctaggaaagtatcaactgaaaaattaaatgtccaaatgctgcttgatacattgcaaaatttatcagaattgcttctttatcattgcttaaatgatgcctgtgaattgaaagagcttggataggactattcttaaaaacgtgatcagtaatcttaatacatgtgctataaagaatgctgaacaaattgcccctgcacaagaatgttttttcaatcagccagaaacttataagagtgctggagaatcacgtgagtttcaccataat

SEQ ID NO: 6549 - DNA, 844 bp, Glycine max
  Clone ID: PAT_MRT3847_105923C.1
ttaattgcacatcttcagccaaatatgaatgacatgagaaccctggatttaaatggatcaaatcatcaactgacagattatcctttatcgtataatggtagctcagaagcaaatctgcattctgtgggttacacagatcctttttccttcgcaaaagatgatctggagaaagttcaggccgactgtttatcagcaattgcattgcagcttcttttgaagctaaagagacacctaaaaatcatgtatagtcttgatgatgcccgttgtcaggcttattctcctaccgaacaaccgaaacctggagaggttatctccagacagaatattgcttttaatattggtgattcacagttcagtttgcctacaagtccgcaagaattgatacaaagatatcaggaatttaaacatgccttgagggaagacactgtggactattcacattacactgcaaatataaaacgaaagcgacctacaactacgccaagaagagttcaagttcggaaacctgtatacgtggcaggtgggtacgacaacggggatgatgatgaggattatactggcggaagtgcgacacgcaagataagttttagtggccgcaggagtagccttaagaactcaaggcaatatggattgatgtaaagtacatgatagataggctaacttgtacattaaataggaaggaaaagaaaaaaaatacagaataggatgagaaccaactgaataggggtaaaggaaacaggatgtagggaagcatgggcctggatggaatactccttgccttcttagatgactatgatttttgtctgtttccttctgtaatttgcattataatatagtggctgca

SEQ ID NO: 6550 - DNA, 665 bp, Glycine max
  Clone ID: PAT_MRT3847_105924C.1
ggctggaagttctgccagtctaccagaaatctcaaacttagaggactcctccttcaaggttggaaaactttctgttgagcaaaggaaagaaaagatcaatagatacatgaagaaaagaaatgaaagaaacttcagcaagaaaattaagtatgcctgccgcaaaactctggcagatagccgacctcgagtcagaggaaggtttgcaaagaatgatgactttggggaaaccaatagaactacaagtagcaatcatgaagaagatgatgaagaagaagtagttgtgaaagatgaagatgatatggttgattcctcagatatctttgctcatatcagtggggtgaactccttcaaatgcaactattccttccagtcctggatttgacttaatagtttgatcagtatacctacatttagcttgtgtagattttttgcatggccatagaccaccccagttttctcatatctggttttgatggatgaggaaactgaataattagggtcctaatactatacaataagtgaatgaagaacatttagaaagaaactgtatacattttttgcagacactatttcttactacttaaatgtattaagaatcacatgttgtattaactttgtctccatgtactagtggagctcattcatgtactctcttttataagata

SEQ ID NO: 6551 - DNA, 410 bp, Glycine max
  Clone ID: PAT_MRT3847_105925C.1
tctctctctctctctctctctctgtctgtgtctgtctgtatcaatgtgaatcgagtgggagagagggtggggaacgatgctcagaaatgggcgcgtgatgatgagtgtgaggagaaggtagataggcaggctaactgtaaccagatgcactcggaggatgagataggcagagagagagagagagagttagatttttttttttttctttcataaataagaaaaaaaaaaaaaatatgacaaggtgtgtgaaggagaccgtgggctagttaaataaattgacatacatggaaaagcaagagagataaattgcgtgggaatgaagggtgaaaaagaaaccactgcttctaaaactagatcgatgcatgtatgaggaagaaataattaggtagtcgatattgtgcgatatatgt

SEQ ID NO: 6552 - DNA, 344 bp, Glycine max
  Clone ID: PAT_MRT3847_105926C.1
aagtgtacccctatccactcctgaattcttttccctaactccgcatcaagatccaatctagtatgattcacacactcgttgtcaaacctatagataatactgcatccacaggacacaataccacagttaaaacaaagcttctgcatgatcaaaaccatcacatcattagaaactttcaaagacctgatacacaacgagacattgtaacaatactacgatcttcaagaggagcgaggagacatacactatatacactctcaaagttctgaatcaccttcacattgacaactgaaccttatgcaacgtcatactaatcattaacagcttcatcaacaacatctttt

SEQ ID NO: 6553 - DNA, 231 bp, Glycine max
  unsure (1)..(231): unsure at all n locations
  Clone ID: PAT_MRT3847_105927C.1
tagacttataattgccaacggcgtactnctcgaagcatcatcaaagcacactgaattctacccgatcatgtacgtaggatggtgaattggaaatgcttgcacactttacaaaagagagggtaatccatcttatcgtcttttgaatggtgcccaagaggcggatccatgaaccactttgacaacatcctgcgtatgattggccattttcatatattgtgtgggcacccaggg

SEQ ID NO: 6554 - DNA, 107 bp, Glycine max
  Clone ID: PAT_MRT3847_105928C.1
ggcacaactctcttcacacagcgagagtccaacctatcatcctccaaatgcatgggttgctggttgctacagttctagcaccatgagagagacatagctccaaccac

SEQ ID NO: 6555 - DNA, 400 bp, Glycine max
  Clone ID: PAT_MRT3847_105929C.1
tgggtaccggtcgaggacgacggtatcgatcggcgggcgccctttttttttttttttttttttttttttttttttttgttttttttttctttttttttttttttttttttttgaaaaagaaatcccgttttgattgacacaaaaatttttatcacggtctcacgaggggaatttctgaaactggaccccgcacaatctaaccatttcccccacgtgaccctcccaaaccccaacatttgttggaaccttatgacccttacaaaaggttcaagggcggtaaaactggggggaaggccgcatttttgaaaacctgaaaagccgggtacaagggggtaaaaaacgggccccggctttaggggagcccccatttgaagcgccctatccatggcgcaatggggac

SEQ ID NO: 6556 - DNA, 180 bp, Glycine max
  Clone ID: PAT_MRT3847_10592C.1
acgcacacgcgtccgaaaaaaaaaattagagaaacacgactaagtaaaaaaaggaaccgactcgtaagctcgcgcaatggatccatactaagagacttacgtgctgaaggcgacacgtgggacgaaggctcatctgatgaatgaacagaatgaccagacggccgcacttgacgagcttcg

SEQ ID NO: 6557 - DNA, 420 bp, Glycine max
  Clone ID: PAT_MRT3847_105930C.1
tgtggactgacgctgatgctgtgtactgtactgtgacctgacctgctgtgactgaatgtaagttattggatgacgataacgctggcctgtgaatgaatgatggatcaggaaggatagcacttttctttctttctttctttcactgtcttgggtcttggtgtggatgaaaaagtgagtggagaacgtggctagggttgtgtctggcagtttcttttcagcaccagcggtcatctgcaccagtttcttggttttgctttgctttatggaataagttcttgatatcacttcagaacaacctcccacaccctcttccccaactttatctctccatctcattactttatatctgatctacctgtactttgttttgtctctttctcatcggcccctctgatttgcaattaaagagaaagagaaaac

SEQ ID NO: 6558 - DNA, 286 bp, Glycine max
  Clone ID: PAT_MRT3847_105931C.1
aaagttaaaaataacaaactttatttttttttttttcatttttttgggataaaagggaaaaggttttttatttgccccgggcttccttgccggttacattaatttggacatagaaaaaaggggcgcttatataaactcaaacttgttaaaccgaaagaggtggacctgcccacagacccgtgggtttgttggcccaaaagggaaacattggtagaggcaaaatactaatttgtggggagaaactaaaaaaacactccttgcgcgcggagtctcatttttatttgta

SEQ ID NO: 6559 - DNA, 525 bp, Glycine max
  Clone ID: PAT_MRT3847_105932C.1
aaaaaaaaaccggggcagggaaaattcaaaataaaagccccctggaaagggttcccaggggaaaaacggggcggggggaatggattccctaaatccagaaacccgggaacagccccccaagggaaaaatattggggggcgggcccaaagcccattatatactataggaaacaaccccccccccccaaaaaaaaaaaaacccccaagggccttaagcaaaagtttaaaaaaaagttttggaagggggggtttagggggcagggggggcaacaggggccccttggggggggtgggttttgggggaaaaaggcccacttttggaagcctgggtatcattcccaggggggggaacgggggcagtttaaaaagggggggtttaaggggggggggcttaaaccacccaaaagggcgttttttttccggattgggaaacgggtggaaaaaattggggggggggaaaatttcctttaacgggaaccttggggtccttaaaaacaagggaaaaggacacaaccccctccatttt

SEQ ID NO: 6560 - DNA, 790 bp, Glycine max
  Clone ID: PAT_MRT3847_105933C.1
cagctagctatgtaataagttagatgcagtgaggtgccaaaagatcacaaagcttggctgtgaagcaaagtatgtcttataaaacaattacatagttctatcgtactccaaattttacaaactaacctatgcttatttcacaactataacataattcaaaaagtattccctcggcaaaagttgcagatgtacacctagtagcatctttaaagcatgcatgctcagtggtgctttaaataataaaaattaataaagcatgaagttattctggttgaattgctaattgttaatatttggtcataatttaggtgatgttattggatactagagtgaactgtttgatcaaagatgaaattagttataagttctggcctatctgtattctcattatgttcacttccagtctgaatcagggagatcctcgataaaatagtttcgttaggaatttttactttctttcatgttttcactattgaaattcatgaagatggaagattttttatattgataaacctttgcttataatcattaatcagacaaacagtgagtgtacatatgttctgatgggtgtgagaatagagtttagtaggtcatttaaggaaggctttggagccctttttacatatcttacagaaaacttttagtgggctttggttgcgttgctcatgcttgtatctgtttcattttaccatatgcagtaaagttttatatttagttaactttcacatttgcacataaaggactttttcgatgatttcacaggtacaatgtacgaagcaaagggccttta

SEQ ID NO: 6561 - DNA, 150 bp, Glycine max
  Clone ID: PAT_MRT3847_105934C.1
ctcgtttggttttgccggtaattcgacttttgttgtaacgtgctttcagtgcattattgatgtagctgcgtagcttttcgtcttgtttccttattggcattgtggtggtgatttggtttccgctgaaagcgttttcacttttcattcacg

SEQ ID NO: 6562 - DNA, 250 bp, Glycine max
  Clone ID: PAT_MRT3847_105935C.1
cccacgcttacgcccactcgtccgaccacgcttacttatcgcactcttatatcttcatacaggacaggccaaaaaccaaaccacccccgattcccgaaaccctaaccctacctccttgcccctatgcccatggcttacaaacgaaagcttcgaacctccaacccataacctaccaaacccgtcgagccacaacaacataaccatgagactgttgaactcgaccaacatcaacccatcccctaaccaaccc

SEQ ID NO: 6563 - DNA, 292 bp, Glycine max
  Clone ID: PAT_MRT3847_105936C.1
ttaggtgtaaggggggccaccccaaccaaattaccaaagttacaaacttcccaagagaagaaaacaaaggtaaaaactaaaaaatacaacgcgtttttgtccactaaacatcaaagaaaaaaaaaatgcttcttaaccacattggcgccggatcctactgtttttaccgggcgggacccgacccgaaacgtcaaaccccgaatactatacctcttagtttaaacacgccggggaggcgccgccgccaggttccggggaggcatagcggctttcccccggtgtgcgaatggag

SEQ ID NO: 6564 - DNA, 123 bp, Glycine max
  Clone ID: PAT_MRT3847_105937C.1
gaaaaatgggtaatcgttgtcatctgcatgccgaagaaggagtctaaagatgttggatcgagtagcaatagaatggggtagtcacagagggatctggtgagtgaggaagagctgcatcttcag

SEQ ID NO: 6565 - DNA, 446 bp, Glycine max
  unsure (1)..(446): unsure at all n locations
  Clone ID: PAT_MRT3847_105938C.1
tttttggtaaagaaaaaccaccctgtaattaagaaataacggagacaacaaactttccagggcatgcacttcgcgattcgatcgtggccgtctacaattcgtcatgctcctcgtcgtcttcctcgtcgtagtcgccgtctccctccggggcagctccgcccttttggtagaccttagacataatggggttcacaatcttctcaacttccttttgcttcgcctcaaagtcctccttgtcggcctcctggttgtcctccaaccaatccatggcgtcctgcacggcagtcagcaccgtgtccttgtcatcctcgtccatcttgtcctcaagcttgtcttcaacgttgttcttcagactgtacaagtagccctccaaagcgttgcgcccgtcaacacggtccttcactttgctgtcttcatcagcaaactctgcagcctnctgaaccatg

SEQ ID NO: 6566 - DNA, 1150 bp, Glycine max
  Clone ID: PAT_MRT3847_105939C.1
aataagattcaacacaaggggcactttacagctactaccatcttccccgctccttcgcttctacactcatctgggtcctctttttgcactgaatttccgccatggccaccgctccttcgcttctacactcatctgggtcctctttcttctctcaatttcgtgcctttcaattctcttcttctttgctgttccctcatggaaacaagcatgggaatgcagtggtctctgtgaaggcctctgtttctggggttgtgttggtggagaagtctgaggcagagaaggccaataggctcaaaacagcttacactgagaaaattattcccttgctcatggaagagttctcctacaccaacaaacaccaggtgcctaaaattgagaagattgtggtgaactgtggtatcggagatgctgcacaaaatgcaaagggtttggacgcggcaataagtgatctagcactgatcacagggcagagacctattaagactcgggccagggcttctcttgccacctttaagatcagggaaggtcaaccacttgggatttctgtgacactaagaggaaatatgatgtactcattcctagaccgagttgtcaacttgggacttcctaggacaagagatttccaaggtgtgaaccccaacagctttgatgggcatgggaactacagcattggcattaaggaccagggtgtcttcccagagatcagagctgatgttgttggtaagcctcggggaatggatatctgcatcgcaacaacagctaaaaccgaccaagaagcacacaaattgttggctcttatgggtatgcccttcagagagggaagtggtcccgccaccacaattcggaaaaagaagctcaagtctcatcattttgatgcaaaatcaaagggaagaggaaggaagtgacatagttttgatgcaaaatcataggataaaaggaagtaaggttgaggaccaggagacactgtgttgtattccttgtttcattcagatgtaatgttaatatgttgttgattctttttgtaagaggcatgcatatgccatcaactatttcgctataaggttataatgtggttatgcagatcttgcttgctaattgatttccatttatttcctgttttaaaatttggttcagttgacaattatttaag

SEQ ID NO: 6567 - DNA, 499 bp, Glycine max
  Clone ID: PAT_MRT3847_10593C.1
gttctgggatactgtactactttctattttagcatatgaggaagggttggaggtattgggttccgcaatgctttgctcagggccaccttccaaggggccgtggagaagagaaggaccatattcgaaaggtgtcttctggatatcttgatcatagctttgagaggttccaccgcactcagactcagaggccacgcaaaagtaaatggctggcaattttggaaatgtgactgctaaagatcttgatgatgacttggagaggtatcacttagaggctctaagcggattaaaaagcaaaatggaaagtgagataaccactgatagctttaatgactcattctgagtaaataggacaaaaaatcattgttttatataacataatggtaatatgtctgggatttctgatttcgaatttttcttgcaaaatattaactctgctgtatatacaagtttgctatttggacatttatctttcaaaacttaaacggacgtagagttagtt

SEQ ID NO: 6568 - DNA, 142 bp, Glycine max
  Clone ID: PAT_MRT3847_105940C.1
atgcgttcgtaccgacacaaggggactccagcatctaaacatacccactaagatggctgtctgggtaatcttcatagtgctgcttcttgcagcccttatcctcatgccttaagggcttgccacttacttctaaccaatttat

SEQ ID NO: 6569 - DNA, 388 bp, Glycine max
  Clone ID: PAT_MRT3847_105941C.1
ctcgagccgaatcggctcgaggtagatttccatgacatgggagttataatgttataatatgaatggcaaatagatactattgagaagggaaaaaaaaaaaaaaaaaaaaaaaaaaaaaaaaaaaaaaaaaaaaaaaaaaaaaaaaaaaaaaaaaaaaaaaaaaaaaaaaaaaaaaaaaaaaaaaaaaaaaaaaaaaaaaaaaaaaaaaaaaaaggggggggcccccccataataacctcttccccccggaaaaaaattccgacccgttccctgtaggcgaccaacttttcctttaagagagcctatttaaacctgggcgaaataagggacaaaactgttccctggggaaaaatgttaccctttcaaaattccccaaaataaacaaccc

SEQ ID NO: 6570 - DNA, 228 bp, Glycine max
  unsure (1)..(228): unsure at all n locations
  Clone ID: PAT_MRT3847_105942C.1
tgctcagtgatacccttttcttagaacaatgagagangggnaagggagttcaantngaggannactncgacgaagaagatccgggnncttccaanaannatggcacttgnctcngcccctagcnaccgacngagtggaaanccncatncgcacaggctagtgcgangcttncgagaacnttctttgannaagcagttgnagagncagcaaatgaactctgcngttccc

SEQ ID NO: 6571 - DNA, 149 bp, Glycine max
  Clone ID: PAT_MRT3847_105943C.1
acgctatatgtttttaaccgcgatcacaggttggcggagcttagaaccgggaacaaaagcgatcggtacttgagttcaagaatttctcaaattcttcctaattctttgtggaccatttcttaagggaaagaaaatcactctctgtgctt

SEQ ID NO: 6572 - DNA, 589 bp, Glycine max
  Clone ID: PAT_MRT3847_105944C.1
gcgaatctcacaccgtatagtgatggccgagaccgatgttcccgagacgcccgctgcttcagagacgcccgctactggtccatctgtgaaggagtttacgctagaagatgtcaagtcgcacaatttggcaaaggactgctggatggtcattcgggacggaggtatccgcaaggtttatgatgtaacgactttccttgacgatcatccgggcggccctgagatcatggtagacgtagctggacaggatgccactgacgagttcgaagacatcggccattcgaacgacgcgcgtgcgcagctgaagcagtacgagattggtaagatcaagggcgacaccaagcagcaggtgccaagtgccagcacttcgtcgggacgacaggacattagcggtcaaaatggtccgctgtacgccgtggtggcggctgtggtggtctttgctgccttttacattcagtacaaatgatcggcagggtgtgagcaatggcagagcaggacaaacgttgcttggtgtgtggctggcagagcgccatgctgccacaaccttgtcacgggataactaacgttacatataacaactttttggctttgc

SEQ ID NO: 6573 - DNA, 412 bp, Glycine max
  Clone ID: PAT_MRT3847_105945C.1
gttttagtgttttatcatcatgaccatggataatgggggacatggaaagtgtaaaacccgaggcccccccacaacaaaaagcgcgtacgatcaagaaagcagggcctaggagggcacagaccagtcacgaggggaaggacaaacaccacacttggagggcgccaccagggacacagcagaggacgccccaaaaaggagggccaacgacagttacaaagacaaagcgggcccaggcggaaaggtcgagtgcaccaaacacaaccaggaaaaagagggccagggcaggggaaagacggacgcctcggccacaggatagacaaccgaggacagatcggaagacggacgccgagggagcccgatgccgaaagggagcaaaagagccgaaacagacgagctccggaggcgcgaaaaa

SEQ ID NO: 6574 - DNA, 1428 bp, Glycine max
  Clone ID: PAT_MRT3847_105946C.1
ggtcggtgaaatagagactcaaaaccaaatagtttattgctattattatttggccttgttttttcagtgtcaaattgcattattgaaataatcaaatgcactaaccacactccatcacccccatatataccccttctcctctcatactaattaacacactcatccaaacaaccttctttctttttctgtgagcctttctttcaggttcttaacttgatcagtgtgcagtgtccaaaatcataagggtagttgcaaattgcaatggctaagcatgatgttgagggtggttccttctctgcaaaggactaccatgatcctcctccagcaccgttgattgatgctgaggaactcacacagtggtccttctacagggctttgattgctgagttcattgccacaatgctcttcctttacatcacagtgctcactgtgattggttacaagagccagagtgatgtaaaggctgggggtgatgtgtgtggtggagttggcattcttggcattgcttgggcctttggtggcatgatcttcattctggtgtactgcactgctggaatctcagggggtcacataaacccagcagtgacatttgggctcttcttggctcgcaaggtgtctttgattagagcaataatgtacatggtggctcagtgcttgggagccatatgtggagttgggttggttaaggccttccaaaaggcttactacaacaggtatggtggtggggccaatgagctcagtgaagggtacagcacgggtgttggattgggtgctgagatcattggaacctttgttttggtttacactgtgttctctgcaactgatcccaagaggaatgctagagattctcatgtgccggttttggctccacttccaattggctttgctgtgttcatggttcacttggcaaccatcccagtaacaggcactggcattaaccctgctaggagtctaggagctgctgtcatgtacaaccaacagaaggcctgggatgaccattggatcttttgggttggaccatttattggagcagccattgcagccttctaccaccaattcatcttgagagcaggtgctgctaaggctcttggatcattcaggagcaaccccgctatttgagtcaatttaatttcttcttcatgatgagttcaaaatgaagaggaaattataagaataataaaaatattgtcaataatggcaattgcttgtgcttttattgcaaccttttctttgatcctattatgtagattaaaggttcttttcaagacaagagccattggtaaataccctttagtattttcaagcactttcctttctttcagtgtgtgatattttcttttaggtaatttaatctcttgtactcaacgtggaaaaaaatatatataaatccatgcttttacttaaaaaaaaaaaaaaaaaaaaaaaacc

SEQ ID NO: 6575 - DNA, 211 bp, Glycine max
  Clone ID: PAT_MRT3847_105947C.1
ggctcggggagaggtgctgcttctaccggatggatattgtcattcccggttctgaaatttggggcacaaatggtcctactggctgccacatccctgcttctgtatatgggggaccgaataagggctctccatgtgtaacggccgattcttttggaattggagagaaggttggatatgtcattccccaagtttgtgctacctggaaatgcca

SEQ ID NO: 6576 - DNA, 304 bp, Glycine max
  Clone ID: PAT_MRT3847_105948C.1
cctccggggaaaaattttgggaaaaatggcctccccttggattgggatttttttaaaaaaatttgtttttccccccttttttccgggggcgaaaaagtaccccccccttttttggaacaggttttaaaaaatccccaggggggaaatccagggggggtattcttgttggccctttgccactttttgccccttttttttttttgtccaagttggagggaccctttttttggcaaaacccccatgaacccttgggtgggccctcccccccaaaaaaagaaggcccccttaaaaggggattgaaaaa

SEQ ID NO: 6577 - DNA, 811 bp, Glycine max
  Clone ID: PAT_MRT3847_105949C.1
aaattaccaagtacatgatggtttttattgaagtgaaatgttgttaccatatgcttgagtaatatgggcctattaattaccatatctaattgcagttgcattggccacaatgattgcaataaggaattataaggttctggctccacttccaattggttttgctgtgttcatggttcacttggcaaccatcccagtcactggcactggtattaaccctgctaggagttttggagccgctgtgatgtacaaccaaaagaaggcttgggatgaccaatggatcttttgggttggaccgtttattggagcagccattgcagccttctaccaccaattcatcttgagagcaagtgctgctaaggctgttggatcattcaggagcaaccccactatttgagtcaatttcctcttcatggggggatagtggaaatggaaaaaaaatcattggaagtgtttgtgctttgatcctctgtagattgaaggttctttaagacaatgaagcctttagtaaatagtaaaaaccctttagtatttgcaagcactttcctatgtatttccttgttagaattaagctttttcttgagatattggaagtaaaatctattagatgtcttgttttaatattttgtgatgtgtaataagttcgacatgttgttggtgaactagtttggtaacccatattttgagggatgctaggccaatgtcacactttttgcttgtgatattgaattttcacaaaaaaaataaaaaaatcaagtcactgtatgtatgttggaaaattcagaacgaaaatacactttcattccaccaaaaa

SEQ ID NO: 6578 - DNA, 272 bp, Glycine max
  Clone ID: PAT_MRT3847_10594C.1
cttgaaccgaacatgattgcggtatagttatacttaatgggaggggagacccactccatgtttgagagctctataggtgaggtccagcatcgaggtgtgttactccttctcacgacgataacgggtgataaatactagccttatactcacgcaggggtcatcaccaccgtgttgcacgaagtgactgccgcaaaccaaggagagatctagctcatcgtcttagataacctgcaacactctgactgccagctgtctgtgtcggagattctttc

SEQ ID NO: 6579 - DNA, 502 bp, Glycine max
  Clone ID: PAT_MRT3847_105950C.1
aacactggtgcctcctacgttcatgatgcaatgttggtccaaagactgggggatcgccatgttgctgtcgaagacctctatgacgctctcaagcgtaacaacatattacttcgagctgatcatattctgacggctgcaaactatactacagtagctatgtgctttgtatgtgatggaaccatactctattaatgtccaccaagagcaaaccaccctccagatgctgcaagctaaacttgattgtgatcatctaaggacacaagaggctggtgcttggctactataccatggaccaaacgctctgtagctgcatgaggctgcacgggataggacacctaaaccagatgcctggttgttcacctgaggatattcaaatgtataggacctgtggtattacataacttgataagcctatgacaaagcacggcaagcacacacacagggccgggccgagctaaagaggaaaccaatccatatctgggaaacagattcatatgatgat

SEQ ID NO: 6580 - DNA, 1551 bp, Glycine max
  Clone ID: PAT_MRT3847_105951C.1
ggtaaaggtcggtgaatgcgagactcataccaaaaagtttatagctgttattagggggtctttgtttttcagtgtcaaattgcactaatcaaatgcactaaccacactcaatcactcccatatatacataccccttctctcagtctctcacactaattaacacacatcaaaacaaccttctttctttcaggttcttgatcagtgtcaaaaccaaaagggtggttgcaaattgcaatggctaagcatgatgttgagggtggttccttcgctgcaaaggactaccatgatcctcctccagcaccattgattgatgctgaggaactcacacagtggtccttctacagggctttgattgctgagttcattgccacaatgctcttcctttacatcacagtgctcactgtgattggttacaagagccagagtgatgtaaaggctgggggtgatgtgtgtggtggagttggcattcttggcattgcttgggcctttggtggcatgatcttcattctggtgtactgcactgctggaatctcagggggtcacataaacccagcagtgacatttgggctcttcttggctcgcaaggtgtctttgattagagcaataatgtacatggtggctcagtgcttgggagccatatgtggagttgggttggttaaggccttccaaaaggcttactacaacaggtatggtggtggggccaatgagctcagtgaggggtacagcacgggtgttggattgggtgctgagatcattggaacctttgttttggtctacactgtgttctctgcaactgaccccaagaggaatgctagagattctcatgtgccggttttggctccacttccaattggctttgctgtgttcatggttcacttggcaaccatcccagtaacaggcactggcattaaccctgctaggagtctaggagctgctgtcatgtacaaccaacagaaggcctgggatgaccattggatcttttgggttggaccatttattggagcagcaattgcagccttctaccatcaattcatattgagagcaagtgctgctaaggctcttggatcattcaggagcaaccccactatttgagtcaatttcctcttcatggggggttagtggaaatggaaaaaaaaagataattggaggcaaaaaaagttgatattgcaacaataataataataatatggaactgtttgtgctttgatcctctgcagattgaaggttctttcaagaaaaggaagcctttggtaaatagtaaagaccctttagtacttcgaagcactttcctttgtatttccttgttagaattgatgagcttttttttgatatattggaagtaaaatctattagatatcttgttttaatattttgtgatatgtaataagtcgacttgttggtgaactagtgtggtaacccatgttttgagggatgctaggccaatgtcacactttttgcttgtgatattgaattttcccaaaaaaaataaaaaaatcaagtcactgtatgtatgttggaaaattcagaacgaaaatacactttcattccccc

SEQ ID NO: 6581 - DNA, 1667 bp, Glycine max
  Clone ID: PAT_MRT3847_105952C.1
gacaaaacaaacaaagatacatatgaatggaagagagtggtagggaggtggtggtgtagtaaaagtgaggtcaaggtcggtgaaatagagactcaaaaccaaatagtttattgctattattattttgccttgttttttcagtgtcaaattgcattattgaaataatcaaatgcactaaccacactccatcacccccatatataccccttctcctctcatactaattaacacactcatccaaacaaccttctttctttttctgtgagcctttctttcaggttcttaacttgatcagtgtgcagtgtccaaatcataagggtagttgcaaattgcaatggctaagcatgatgttgagggtggttccttctctgcaaaggactaccatgatcctcctccagcaccgttgattgatgctgaggaactcacacagtggtccttctacagggctttgattgctgagttcattgccacaatgctcttcctttacatcacagtgctcactgtgattggttacaagagccagagtgatgtaaaggctgggggtgatgtgtgtggtggagttggcattcttggcattgcatgggcctttggtggcatgatcttcatccttgtctactgcactgctgggatttcagggggtcacattaacccagcggtgacatttgggctgtttttggctcgcaaggtgtctttgatccgagccatcatgtacatggtggctcagtgcttaggtgctatctgtggagttggtttggttaaggctttccaaaagtcttacttcaacaagtatggtggtggggctaattccctcgctgctgggtacagcacaggtactggattgggtgctgagatcattggcacctttgttttggtctacactgtcttctctgccactgaccccaagaggaatgccagagattcccatgtgccggttttggctccacttcccattggatttgctgtgttcatggttcacttggccaccatcccagtcactggtactggtatcaaccctgctaggagtcttggagctgctgttatctacaaccaagataagccatgggatgaccattggatcttttgggtaggaccatttattggggcagccattgcagccttctaccaccagttcatcttaagagcaggtgcagccaaggctcttggatcattcaggagtaacccccataattgagttgtctttctcttccttatgatggctctagtggaaagaagataattggagagatgggggttgatatggcaagtttaataataattgggaatgcttttggcttgtgttttgcaacgtttctttgaccctctcgattatgtcttcaagattgtggataagtgtagattaaagtctctttcatgacagggggagccttttgcactttcctctgtggtgttcttccctttagtgtgtcatttttttcttttaagttattctcttcagctgtcatctctgtactcaaaatatatttatggaaaatgttaaattttaattttaattacattcctgctttttactacattatcatcagccctgacacactaacaaagaaactaacgttgtaagtcaagaaacaaaatgaagaaaaattacaaaaagaaagaaagagattaatgcaatcaaaaaaaaaaaaaaaaaactcgagacctcgtgc

SEQ ID NO: 6582 - DNA, 1784 bp, Glycine max
  Clone ID: PAT_MRT3847_105953C.1
gagtaaaagcatggatattatataattttttttttcatgaatacattgagtagaagagattaattacctaaaagaaaagaacacacactgaagaaaggaaagtgcttgaaaatactaaagggtatttaccaaaggctcttgtcttgaaagaacctttaatctacataggatcaaagaaaagcttgcaataaaagcacaagcaattgccattattaataacattattattcttacaatatcaagtcattttgcttccaattatctcctttttgaaacccatgattatgaagaggaaattgactcaaatagtggggttgctcctgaatgatccaagagccttagcagcacctgctctcaagataaattggtggtagaaggctgcaatggctgctccaataaatggtccaacccaaaagatccaatggtcatcccaggccttctgttggttgtacatgacagcagctcctaggctcctagcagggttaatgccagtgcctgttactgggatggttgccaagtgaaccatgaacacagcaaagccaattggaagtggtgccaaaaccggcacatgagaatctctagcattcctcttggggtcagttgcagagaagacagtgtagaccaaaacgaaggttccaataatctcagcacccaatccaacacctgtgctgtacccttcactgagttcattggctccaccaccatacctgttgtagtatgccttttggaatgccttaaccaacccaactccacatatggctcccaagcattgagccaccatgtacattatggctctaatcaaagataccttgcgagccaagaagagcccaaatgtcactgctgggtttatgtgaccccctacattggatagaaaaattacagttttcagaataggaaaccaaaatttgcaaacaaatcaagccatggatatttgtttacttccaaccaagaaaagaagcacaaatgcaccagcttcctcagtttggaggcttagaaacttgagagaaaaggggaattattaaacatgaaaggccagttaaatttgacgaacaccattatatcatttcataagcactcaaaaccaaaccgagaatgctaattgtctaaatgggggtatgcttgatatttctacaacaatctatgattttaaaaaacagtctgcgaccataattttggtcaattgcaaccacattgccacattggccatatttgtctgcaatttccggcattgcgatgaaaccataacagcgcgacggagattccagcagtgcagtaaacaaggatgaagatcatgccaccaaaggcccaagcaatgccaagaatgccaactccaccacacacatcacccccggccttgacatcactctggctcttgtaaccaatcacagtgagcactgtgatgtaaaggaaaagtaatgtggcaatgaattcagcaatcaaagccctgtagaaggaccactgtgtgagttcctcagcatcaatcaaaggtgctggaggaggatcatggtagtcctttgctgagaaggaaccaccctcaacatcatgcttagccattgcaatttgcaactacccttttgacactgatcaagtaatgaacctgaaagaaagaagggttttttgatgagtgtgttaattagtgtgagaggagaaggggtatatatgggggtgatggagtgtggttagtgcatttgattattgtaataatgcaatttgacactggaaaacaaagccatatattaatagcaataaactttttggtttgagtctcgctttcaccgaccttg

SEQ ID NO: 6583 - DNA, 1868 bp, Glycine max
  Clone ID: PAT_MRT3847_105954C.1
gattaataaaaaaagtgtagtattttgagagaaagaagaaacagacaataagcatagggaaaagagaaaagctaaagggatccatccttgtttttgttttcttctggaggagaatgggggtggtacttgaagccgtgtctttcttcaaaggcaatctggggttgcttactcagcctatgaagctctaaagcttactcctttctctgtctgctttgttcttcttcttggtctttggttcttctctttgtttctcttgatcaagcaagctagaagccaagtggatccctttcactcacatcttactcaatgaagttgctccattcttcactatctctctctaggatgacagtcgtagtattttcattggtttgtggcgtttttatcttctctgtgagtctgccgaagacatgcaccactaaacccgcatcctttagcaggtgagtattcattagcttcaatatactctgagaatggttgtcaatgaatactcacctactacattatcctaaacccgcatcctttagcaggaacgagtgcgttcataatcctgtactgttctttgccatattgtccaatcagagatccggtagtgggtggtttgagacccttttgaatagccacattaatgtaagctccaatggggagatattttctgttagagagagaaggcaaaatgtttcttcaattttgcatactttagataaagtttacaatttggactggttcaatagtgcttccaagaatgagtgctctgctgcaactggcttgaagtggatgcttaatcagggattgatggagcaccataaggaaatagcagagtatttcaatcgtagacgtgtttctattatatttcttttccggagaaacttgctacgcaggatggtatcaatgctagccaattcatatgaccgttatgccaagctattgaatggaacacacaaggctcatgtacactctgcagaagaggctgagattctttcaaagtacaagcctatcataaattctacatcattgctggatgacttacaggatatggagatgagatctgctaaggctttagaatacttctacagcactcggcatatgattgtgtactatggggatcttatgagaaatcacacaaagctaaaagatgtgcaagattttttaggattgccacagatggagttaacgagccgtcacgttaagatacatagaggaccattgtcagaccacattcagaactgggacgatgttaacaagacgctgaaaggaaccatttatgagagttttcttgaagctgactattagtcgtagtctcttctattctaactgctggagaaaggtgtaaataccataccaacttttctgatcttttgtccccccaggaaagcctcagggttcaaaagttttggttttggttctggaacattacctcagtgttctgatgcctttttttttgtcaccacttcgtgatcaactaacaccgttgatgaattgaatgcttcttgtttctttgtagtctttattttgtttatttttttttcctttccttggtgaacatgtatattcctttgccgctaattgattgaagtagagaggagcattgttttgttcaaaccggtgtttaataatttccttggtgaacatgtatattcctttgtcaccatttcgtgatcaactattaattgttttaggaatttagcttttcttagtcacgggcatcaagtactttttaacttatgatttgtttttttttcccactgtgatgagcctctaaaacagttcatcatcgatcttgatgcctcctctatgggtagagcaagcaaataccaatggcaatcaggctttgtgcttgatgagaaacatttttgtagaattatttctta

SEQ ID NO: 6584 - DNA, 422 bp, Glycine max
  Clone ID: PAT_MRT3847_105955C.1
gaacaaaacaatgctcgtctttacttaaatcaattagtggcaaagccatatacatgttcactaaagaaaggtaaaaaaaaaagaagaaaaaacaaaaaaaaatactacaaagaaacaagaagcattcatttatcaacggtgttaattgatcacgaggtggtgacaaaaaaaggcatcagaacactgaggtaatgttccagaaccaaaaccaaaacttttgaaccctgaggctttcctgagggggcaaaagatcagcaaagttggcatggtatttacacctttctccagcagttagaatagaagagataacgactaatagtcagcttcaagaaaactctcataaatggttcctttcagtgtcttgttaacgtcatcccagttctgaatgtggtctgacaatggtcctctatgtatcttaacgg

SEQ ID NO: 6585 - DNA, 375 bp, Glycine max
  Clone ID: PAT_MRT3847_105956C.1
aaacatttaactaaagctccattcaagtaatcattaattaatttttactccccataggataacatagttcattataataatcaattagcatgcccccaccatattgcttttacatagggcaatatcagatttttttacttaaaaagcaaaggctaactaagattagttaatagttcggcagttcctacgaatctgggcgttagtttgagttggtgatgccaagcttcccattttcaacatagaaagtttgaagtcctcaaagaaagctaatgggttctccacgtagttttcgacaatctgtcgtgtctgatcattgccattcacaagagcctggtctgatgggagcaatccctccccagatagaagatttacaaa

SEQ ID NO: 6586 - DNA, 1316 bp, Glycine max
  unsure (1)..(1316): unsure at all n locations
  Clone ID: PAT_MRT3847_105957C.1
gaagttcggtggagcatcgtcgtcgttatcataatcggaatagtaaaagaaaagaaaagaaaagaaagaaagaagaagattaataaaaaaaagtgtagtattctgggagaaagagagaggaagaagaaacagggacaataagcatagggaactgtgaagagctgaaggaacctttgtttttgttgttgttgttgttgttcgtctggattgggttggctttagggctttgaatgccatctggggttttgctctcaggcaatcaagctccaaagctgacccctttctctcacttctaactcacataccttgttccattcttcactttctctctctagaactacaatggtagaagacatgtgtttcctctacaaggaaattcttgttatgaagcctccaaagagatcaccaatgttgttaaggacggcagtcataatattttcgatggtttgtggcgtttttatcttctctgtatgtctaaagcagataagcacccaagctaggactacatttatggacttcaaagtcattgacaaccattctcagagtatattgaagctaatgaatactcacctactacattatcccaaaccttcatcctttagcaggaacgagtgcgctcataatcctgtattattctttgccatattgtccaatcagagatctggtagtgggtggtttgagacccttttgaatagccacgttaatgtaagctcctatggggagatgttttctggtacagagagaaggcgcatggtttctgcaattgtgctgattttagatggggtttacaatttccctggacccaatagtgcttncagaatgagtgctctgctgcaactgntttgaagtggatgcttaatcagggattggtggagcaccataaggaaatagcagaatatttcaatcatagacgtgtttcaattatatttcttttccggagaaacttgctacgcaggatggtatcaatgctagccaattcatatgatcgttatgccaagctattgaatggaacgcacaaggctcatgtacactctgcagaagaggtctcttcatccatctttcctttgattcctgttatagtcatggaatgaagctcacatttgcctatttggtttcttttaggctgagattctttcgaagtacaagcctatcataaattctacatcattgctggatgacttgaaagatatggagatgagatctgctaaggctttagaatacttcaacagcactcggcatataattgttgtactatgaggatcttatgagaaatcacactgtaaggacctcatcagtaaatacctaaatcttctacc

SEQ ID NO: 6587 - DNA, 513 bp, Glycine max
  Clone ID: PAT_MRT3847_105958C.1
ctttggaaagcctaatatgggcccaaatatcagatcacttattcctggtcttgcaatgcatgagggagaaaagtggagcatgcatagaaagataatcaaccccgcatttaatttagaaaagtagaaggttagtttcctattactaaaaaaagatcttagatattggcatgtgtgtcttttgaaaacatgtcagacaaatattgagattgtgccacaaatgtatctacatttttttaatgtgaaaattaccttcctataaaatgtatcctcttaaaaggaactactatcattataaatataatctttaacaatatttttttatttaacacttaataaaaatattagtaaaatttgtttatgatattaaaaaatattgcaaaactatgaataaatgttattaatatatttttataagatttatcgaatattatgtataaatcatgttgttaaagtttttttgtgacattttagattttagcaacatatattatatataacatttgataatatatc

SEQ ID NO: 6588 - DNA, 428 bp, Glycine max
  Clone ID: PAT_MRT3847_105959C.1
ggatttcattgagatatcatttgtgacactggatggactgccaccccaatgcacgatgttcaagttacaatcgattggtttattacctctcaagaatgtgttcccaggacctattgtgtttagaatacacaatattcttttgtgttaaataggtggatgggaaaactgactttcccacagggcacttgccgaagtgtaaaactaatgcctttttctatcgggggcggagctggtgcaaataatgctattctcatgaatatgccaaacgctgattctttcaatagtgagatattatattggagatctcgcctttgaagtttgtaagatgacttcttcctacattaaatgaacagactctttctttatagcatttggaattttggctgatgacaccatcaattttgaggcctttccccacaagctggtgc

SEQ ID NO: 6589 - DNA, 395 bp, Glycine max
  Clone ID: PAT_MRT3847_10595C.1
ggtatttttactttacattggcgcaaccctgcgcactatgatcatgaacatgtaaacaggttttgctggactacgactctcaattggaaggcttcccgtgttctacatacacagccaccacgtaatgcacactgctcggacttacaccctccgcacttgcgagaaacgtagtcccacatttgaagttgaggcgctggactggatggtagtcacctactacatcgtagtatgagctcctgatgccatgaggctctttaagcactcgtatgaggtgaatgtgaaccaacaagagcgagcatgtaagatcagggacactactgtcagtgtcgcaggacaaggattatagctaacactgaaggatcccttatgctcactcttgtctcacactgggccgc

SEQ ID NO: 6590 - DNA, 423 bp, Glycine max
  Clone ID: PAT_MRT3847_105960C.1
aattcccaggtcgacccacgcgtccgccctagcgtcctgttactctatttataactcagatatttgagaaggctttaaaagatggtgcttttgggacttctcttggtgggatttctctctcagctgggttcatcagtttcagcttctggttatggttggatggatgctcatgcaaccttttacggatggggtgatgcctctggcaccatgggtcgagcatgtggatatgggaacttgtacagctagagctatggaggacagactgctgctttgagcatagccttgttcatcaatggtttaagctgtggggcatgtctccatattaggtatgttaatgatcatatgtgcgtgccttctacgctcacttattgtcactgcaaccagtttctgtctccgttacaaaggattccctattaatgcatg

SEQ ID NO: 6591 - DNA, 289 bp, Glycine max
  Clone ID: PAT_MRT3847_105961C.1
aaggaaaaacaagggggggttcaaccaacaatatcatgctcaccaaatacatcaacaaagggaatgttttaaaaacaaggtttgtgtttaatccttacatgcaccaccattagctatacacacgttttgaaacatttgtcgagtttacttattaaacggcgtcatttttccaaagtttaaaatgagaaaaacgggcagttacacaaatcaaatgatttgaaacaaaccctccttatagcagctggtggaaaacagaaaaggctcacactgaaaactttttccaaaacct

SEQ ID NO: 6592 - DNA, 211 bp, Glycine max
  Clone ID: PAT_MRT3847_105962C.1
taaggaataagaaggaatgatgttggtctttggtactactgaaggcctgagactcgacgatagcgatgactaacagaataagtaggtactattgtaggataagtctgagggtctctgccatgtgatcaaggatgacatggtcgacaaggtggaaaaatgatgagggcacgattgtatcgtggattctccatgctgactctagactggtgac

SEQ ID NO: 6593 - DNA, 734 bp, Glycine max
  Clone ID: PAT_MRT3847_105963C.1
tttcaaaaaacgaaactaaaggctcagtttatggccctttcgccgccttattctgattccagaaacatcttcaatcaatctcccctcgtctcctctcaatcaagtttgaagctgagaaataatcatggccggtggtgcgaatttcgtgcagagggttctctcttacgtggtgaatgaagtggttgtcaatggtcttgccaacagccctgcatttcagaggtttgcagtgaggacatcaaaaagaattggagatatttctaacaaagctgttcagaagaggcaggagctagctgagcagatcaaggacatctcaaaaaatatggagtcattcaagaaccagtaattttggtattcttgctacattgctgaagttaatggagtcctgattttctttagccaaagatgttgctggtgacaaggctgggtgtttgtaaatttcttttgttgtaatatattttggttcttaactcgtgatctcaaaagttgggatgcaagggtttttcagtttgcttggtgaactgaaaacaggattaggaggatattattgctagtttacgatactatcactttgtcaccaatattagtttgccttattatttgaaactatagaggacggattattacggaataaaaatgataccttttacattcaaaattaaaaaaaaggaattatatgtgaattcagggcacaaataggcctcttgccaaatcatttgtaagcgacttctttcacc

SEQ ID NO: 6594 - DNA, 506 bp, Glycine max
  Clone ID: PAT_MRT3847_105964C.1
gacccacgcgtccgcccacgcgtccgcacagaggcagaagaagcaaagagtgagaagtgaagagtgaagaagagtgaagaattgaagagaaaatgggtgctgattggggaccagttattgttgctgtggctttattcatcctcttatctccgggtttgttgttccaatttccctcaaagtatagggtggttgagtttggaaacatgagcactagtgggattgcaattttggttcatgccatcattttcttctgcatacttaccatcttggttgtagcaataggcattcacatacacatcaattgaatcctatgttcaccttataagtcaccacaaatctccatatgtatgtttacgattactttctctttttttttttagctcctttgatgtattaatttcccttttaaagtttttcatcttggttttcttctggggtactgtgtaccaaaaattgttcaaaatggaaaaagagatataaaactataggaattatgtcttttgttt

SEQ ID NO: 6595 - DNA, 443 bp, Glycine max
  Clone ID: PAT_MRT3847_105965C.1
aattcggctcgagctttgttgaaaggcctttgtttcttaaaatattattattctttaagtgccatctatctccgaagtttgaactaagatctagcagttccttagactctgtcaaatggtattttaccgaacattgtattcatcaccatgactagtcattgataataaacttggtcatcaaactttgttgaattacatgattagttcaactaattagtcacttcttgaaatggttgactggataaataaagatatgacatgagtccatactttaagatttaaaaggctataacacaagtttgtatgatattaatctaaccatgatagaattagtgatagttaaatataattttttaatattaattaataaatttaacagatattaatatatctcttaaaaaaataatagatattaatatactgaaaagattataatggtatct

SEQ ID NO: 6596 - DNA, 539 bp, Glycine max
  Clone ID: PAT_MRT3847_105966C.1
gttgaggaggcttcatttgatgttgttggacgcttttttccacttttaagtcttgcaatctctaggatcccatcttcctcttcctcgtcttcttcttgcattgcctccatgtatgctgcagtttcagctattttcttctcataagcagcaatcatttctaatttaacatcctccggtacttttttacaagaacccacatctccttttatttgaagttgatgtctttttgctctagaaattcctctcgtagtcgttttgtgacaaaaatcacaggttacactcttcctgttatttttatcctttaaactgttccatttccaaaaggcatctaccctatcaccggtaggcttgaacaacgaagacccctctgaattcaacattctagtagactaaagcactgcaaccaaataaaaaattacataaaattctgctttctattatgtaaataaatagtgtcactccctaatgctagagttcttacttgaacaacaaaaatttgtgaactaattgacacaaaccattcacagttacagccaaag

SEQ ID NO: 6597 - DNA, 576 bp, Glycine max
  Clone ID: PAT_MRT3847_105967C.1
aaaatatctcaagagacatggctgataccctcctcagcgtgctacaccccacctcgcgaccaaagaggccccatcggcgagatgcatcaagataatacgagaagaaaagtggcaagtttacaggaatgcaactggatcccctgcgccggacgtttgcagagactactatgctagatactgcatgcccagcactgttacctgaggagacctggaagaatacattatctctggccctgctacctgacatgatcagaatacacagaagtgctgttactactgcgcgaacgactactctcatcacaaaccacagctcactttgatatctgaaagctatccaagcagactttgacattgacataggaatgaatgctatccatggaagagatgcagctgcacgcgctatcaaggaaattgcatagagggtcactgaggggcctgctaactggcaaacctcccaacactcttggatctatgagtaaatcatatgcctcaagttgatcttgaaattgccttaggatgatccagattatctacatgttttctgcttctgaccgctgttgcacttttttggttaac

SEQ ID NO: 6598 - DNA, 492 bp, Glycine max
  Clone ID: PAT_MRT3847_105968C.1
aaaacaggatttttacactattttacttcctatgtatcaaaaaaaatctctcaattttaacaaggaaactcagaggaaagtgcttctaatttctaaaggggtttttcttttcaccaaaggctttctttttttgaaaaaacctttactctgcaaaggatcaaccctcacaccgggccatattattataattattggcccaatatcaactttttttgcctccaattatctttttttttccattccactaaccccccatgaagaggaaattacttcaaatctgggggctccttctgaactgatccaagagccttagcagcacttgctcttaattttaatggatgggaaaaggctgcaattgctgctcccataaatggcccaacccaaaacatccattggtcgtcccaggccttttgttgggtgtacaagaccgcatctcctaaactcctagcaaggttaatgcctttgccttgtactgggatggctgccaagtga

SEQ ID NO: 6599 - DNA, 151 bp, Glycine max
  Clone ID: PAT_MRT3847_105969C.1
aattctgctcgagcttctcttctcttctcttctgtctccattggacagatagcattttccccttcccagacagatccaagaaccacagtgctcttttttgagccaacggtgctgattctttcccgcggaatcttgctcggcgttggggtgt

SEQ ID NO: 6600 - DNA, 745 bp, Glycine max
  Clone ID: PAT_MRT3847_10596C.1
gaaggatccgcttttctcgcttcttcccttgcagatcctacaaagttttttcctaccctctctctctctctctctctctctcggaggccactgcttattgtgtcattttcattctgatttcaccacttatttgacaaccctttttccatttcatttttcttgtttttaaagttgagcaaaaggcataggcttaccaattatgggcaaggagtggtattttgctggaagatcatctaagagaggtgtaggaggaggtgctgaggctgaaacacaagccccttctggttgcatgtgtgctgtttttcagttctttgatttccatccttttcactttcccaacataaaccaacaacaccaacaagatcaacaagcctcttttaagccaccctcatgcacctcagaagaccacaccacagtctcaaaaggtgctgaagcacctaggaacagcttagaggcagaggatggtgatggtacagtttcatctctctcatcaaaagaagatgattttaaaattcctaagaatattatacaaattaagacaagtggagccacaagaacaagtggtggaaatttgaatgacttgtcctcagaactcaccagctctccagggacaaagacaccaactttagtggcaaggttaatgggtttggatcttcttccaggtgcaaactcaccctctttgtcttcttcatgtctttcaactccaaacacacaagacaatgtgccacatcttcaccaccacctg

SEQ ID NO: 6601 - DNA, 250 bp, Glycine max
  Clone ID: PAT_MRT3847_105970C.1
acactccaggaatcgttccatctatatattatttggaaaaagaaaagttgggtaataaatagttgggttccattgaggcattaagcatttagtaggactggtattttcagattattgtggccatacagttaggggcaattattattgaagtctacatttacaaaacgggttgtttacccaaacccgtatgccaatttaagttcttttggtgttctgtgttctcaagtttaattaatattatttcacgttg

SEQ ID NO: 6602 - DNA, 518 bp, Glycine max
  Clone ID: PAT_MRT3847_105971C.1
ccaacccttccggggaaggacaattgaaaaaagctgctttggcaaggcccccttggagaaagaattggaagggtggcaccaggggtgattttcccctattgggaccggtgggaaaaccaaggaaaagaaggagccatttgccaggtggcatgaggtaccaaaagggttctttattaagttcttctagaggcttccaagtgagccaaggcgttaaagggctctacaagggtatatcttctcgacgcacatggtaactccgctgtggtgtgctcgtgcagtgcgcacatgacattatggaagaaagaccacgccgcggaatagcgttttctcagaagaaaggcgatctttaagcctccaaagccacttctcggagggagaccaatatgtgttcctcaatttttaaacctcggggctctcgactcacatagatttgctcgagaccaattctggagacatgatgagtcccctcctcctttttcaacacgtgctcctaataaagcctctgttgatatgattct

SEQ ID NO: 6603 - DNA, 372 bp, Glycine max
  Clone ID: PAT_MRT3847_105972C.1
atggatccaggactcatatatgatatcaccactgaggattatgtccaattcctatgttccatggatcacagtagtgcatccattagcaaagtgactaagaccaccacaagttgtaagaaaggaaatcaccaagcactgaacctcaaccttccttccatatcagtgccaaacctgaagagggctgcaacagtaatgagaacagtgacaaacgtgggaaatattactgcagtctacaaagctctagtgaaagttccacatggcataaaagttagagttgaacctcaaactttgagtttcaattcagatcctaacatggacagatggcaagtattttgtgaggaccccaatagctgtgaggaccatactgtttga

SEQ ID NO: 6604 - DNA, 2533 bp, Glycine max
  Clone ID: PAT_MRT3847_105973C.1
gcctttgaagctctcctcctatcagttaatctgataatggatactaattcaagaaactggagatgggcaagaaaggcccaattgcttattgcttctgctcttctcttactgcaagactctctggtcaactctgctgaagcaagctctgtgcacattgtatacatgggagataagatatatcaaaatccacaaactactaaaatgtatcaccacaaaatgttatcatcactcctaggaagcaaagaagctgcaaagaattcaattctttacagctataagcatggtttttcagggtttgctgcaagattgacaaaatatcaagcagaagcaatagcaaagtttcctggtgtagtgtctgtcattccaaatggcattcataaacttcatactaccagaagctgggactttatgggggtccatcattccacttcaaaaattgctttctctgacagcaacttaggtgaaggaaccatcataggtgtcatagacacaggcatttggccagagtcaccaagtttcaatgatgaagcaatgggacaaatcccatcaaggtggaaaggaatttgtcaagggggaaagcacttcaactccaccaattgcaacaagaagataataggtgctagatggttcatgaaaggaataagtgatcagactaagaaactcctccaaggaaacaactctgatgaatatctctcggcaagagatgccattggccatggcactcacacagcttccacagcagcaggttactttgtaggaaatgcaaattataggggacttgcttctggtttagccagaggaggagcacccttggcacacttagctatctacaaggcttgttgggactttccaattggagattgcactgatgctgatatcctcaaagcttttgacaaggctatacatgatggagttgatgtcttaactgtttctcttggctttgccattcctctgttctcctatgttgatcaacgtgattcattagcaattggttcttttcatgcaacttctaaggggatcacagtcgtttgctctgccggaaattctggtcctgtctctcaaaccgttacaaatactgcaccatggatcatcacagttggagctaccaccatagatagggcctttccagcagccatcacccttggaaataaccgcactgtgtggggacagtccattgatatgggaaaacataatcttggatctgttgggctcacatattctgaacgcatagctgtagacccatcagataatttggccaaggattgtcaatctggaagtctaaatgcaacaatggcagcaggcaaaattgttctatgcttttcagtatcagatcaacaggacattgtttctgcatcacttacagtgaaggaagctggaggagttggactagtatatgcacaatatcatgaagatggactcaatcaatgtggttcatttccatgtatcaaggtagattatgaagtggggacacaaacactaacctatattagaagatcaaggtttccgacagcaagcctaagttttccaaagactgttattggaaaatggacatcaccacgagttgcatctttctcatctagaggacccagtagcatgtctccaacagtgctaaagcctgacatagctgcaccaggtgtggacattttggctgcatttccaccaaagggcactacaaggagtagtggatttgcattcctatctggaacttcaatgtcatgtccccatgtggcaggaatagcagctctcatcaaatccaaacacccaacttggtcacctgcagccataagatcagctatggtgaaaatagcatctcaaactggaactgatggaagccttatatctgaagagggttccacacataaggcagcagacccgtttgatattgggggtggacacgtggatcccaacaaagcaatggatccaggactaatatatgatatcaccactgaggattatgttcaattcctatgttccatgggtcacagtagtgcatccattagcaaagtgaccaagaccaccacaagttgtaagaaaggaaaacaccaaacactgaacctcaaccttccttccatattagttccaaacctgaagagggttgcaacagtaatgagaacagtgacaaacgtgggaaatattactgcagtctacaaagctctactgaaggttccatatggcataaaagttagagttgaacctcaaactttgagtttcaattcagatgcacgaatccttaactttagtgtcagtttcctgtcaactcaaaagtttcatggagattacaaatttgggagcctaacatggacagatggcaagtattttgtgaggaccccaattgctgtgaggaccatacagtttgaatgaataataagcggatgttatatgtagaaatgagcttaattggccaacaaaatatttaagttcttgtttggagtcatactataaacatagcatattctttggtgagaacatccagcatatttctttgaggaaagagactcgttactcatggaatataatgttcatttttaagatt

SEQ ID NO: 6605 - DNA, 520 bp, Glycine max
  Clone ID: PAT_MRT3847_105974C.1
aattcggcaccaggaattgcaaagtatctatgcaagtttggtgtgaaagccgctgcttataatgcaggagtatgggatatattatactcaatcttgtttgattagatgtagatggtcatttacatagtagtgaattaaactttatcaggtttatcatgtcagttgacactagaatcttcaattctaacacatcatgacatactaggaaagaaaaaactatcatgacatactaggaaagaaaaaactaacgtaccctggtgccaaaagctcctcactctgcaaaggtatgggggatggtaattatatgaagccttctccttccatatgcaaagagaccgattcctgattccagcccatgaccaaccagtcatgaaggtgcaactgtgttgttgtgccagggcacccttcatgatgtactaggaagcagaatctaaaatttatttgtcattctccattctgtgttactttcaaactattctggcatgctctatcgtggatttcacgaaaccaggctcgattg

SEQ ID NO: 6606 - DNA, 375 bp, Glycine max
  Clone ID: PAT_MRT3847_105975C.1
actttacgtacttattgctggtttggtacccttacaggatgactatctgtaggccctgtacaggataatttacctgggagactagaagtgcacttcggggctttcctccgaggcgcggaggctcatcaccaagctcctagccccatccagaacacgcgacttacaattacaaacataatggactttgtgtggttggagataccctggccctagagcttgttgggaaataagagagaggaatatgtgctggaggagaatattattctagatgcgcaggagggacctacttcgatgaatgcttttcacgacatttcattcttggatgggttcgatgggtcgctcgtgttccaggagaagaagagaggagagaaacag

SEQ ID NO: 6607 - DNA, 200 bp, Glycine max
  unsure (1)..(200): unsure at all n locations
  Clone ID: PAT_MRT3847_105976C.1
atcatcataaattgcctctagagtgcatgaatcatatgctgtcnaatatgactgatgtgcacttgcttagagcgagggtattctacaatgcatcactcttgttatctaactcgtattcggtaaagttcgtagttccacttatcgatgcttttagnctgtgagtctaacgtcttatcagaaccattgctcagttacgataa

SEQ ID NO: 6608 - DNA, 472 bp, Glycine max
  Clone ID: PAT_MRT3847_105977C.1
cccacttcgtccgggagaaggagattgttgagaggcagaattcttggctcaacgaggagttgaatgctaaagttaacattgtttttgagctgcgcagaaagcacacagaatatgaagctgatatgacttccaagcttgcagatatgcagagacagtttggtgaaagctctaaatctctacagtggaataaggatagagtgagggaacttgaaatgaagcttaaatctgtgcaggaggaattaatttctgctaaagatgttgctgcagccaacgaagaacaattatctgctgaactctccactgttaataagcttaatgagctatataaagagagttccgaggaatggtcaaaaaaagctgcagacctagagggcgtgataaaagcaatggagtcacaccaaaagcaagttgaagatgattataaagagaaactcgagaaggaattatctgccagaaaacaggttgaaaagga

SEQ ID NO: 6609 - DNA, 196 bp, Glycine max
  Clone ID: PAT_MRT3847_105978C.1
agatagaaccgtgctttctaatcttgtaattgtctgtgtagcttcgtggttaatgcttcgtgttactgtgatgcagctgttgtatttgtactacactcctatataagtataactaaagatgctaattaatattcaattggactacagcagatggctgatgatggacatatggttactctaaatgtgtatgacttga

SEQ ID NO: 6610 - DNA, 314 bp, Glycine max
  Clone ID: PAT_MRT3847_105979C.1
gatttatattttcttttttttttttttttttttaaccaaccggtccctgtagtcgaccagggtattttataccgtgtcttgttagagcaccaccttccccggggatagccgttttatatctgagagtgataacggccaacgatcccacctgtgataaaaggcggacgcataaagagtgcagacagcagtgcctaaggagagatctaacgcgacagtctgggcggcgtactgagtgcccgaactccaattaagagacctgccctgccagccccattagggaactaggaaaccgcgcgggccaagtgaattagcgt

SEQ ID NO: 6611 - DNA, 684 bp, Glycine max
  Clone ID: PAT_MRT3847_10597C.1
ccacgcgtccggtggcggcggcggcgtagatcttgagaacatctccttcttccgatttcattttcacccaaaagcttctcgctttcaacatcaccctcaccaaaacccctcttcaacgagccctactcttcttctttctccatcccaatcgaatggccgagggtgcacgaaccgcgcatgcacccgccccgcacccgatccaacccaaacccgacgataaaaccccgaatccggtgaaggagactccgccgccgccggagaaaccggagcccggcgattgctgcggcagcggatgcgtccgggacgtttactacgacgaactcgaagatacaataagctatacaaacaagacgatcccagccccaaagcttcttcatagtcttcatcatcgcatgggtggaagtgttatgggtcgatgattgttgggttattgtcgtcgtcaatacaccaggaacgtatagttgatcttgagggatttctggaatgttccagtcatccatgttttgattgatatcctcgaatcggacttcctcatcgaagagattgtgtttgggggcgccctcgtgggtctggttttcttgttcatttaataagtttgtatttcttgaagaagatgatgagaaagaattggatcgaaaagagatacgggaaaaagagcgtaaaagtctagacatgattataccc

SEQ ID NO: 6612 - DNA, 478 bp, Glycine max
  unsure (1)..(478): unsure at all n locations
  Clone ID: PAT_MRT3847_105980C.1
ccggaattcccgggtcgacccacgcgtccgaaaacaacaactctacaccagctgacgcgtaaactaagattcaacgtctgcgctcttcagccaccataccatagatccttcattctctgcaacgatcaaacccaaaaaacactgcacctcttcttctggtttaaattcacagtattttgaggaaacaaattaaagggtaatcgctcgcttaatccaccgagctcaattcccacatccccacaaaaaaaaatcaacaaaatcagatttggtgaagaagagagtgtgatttgatgattatgaattgaagtttgaggtggagacatgaacgtgagccatgcttcggttcatccagttgaagaagctncaacgactgaaggtggtggtgctgaccaaaacgttaacgctcctagggtgaggatgaaggatatccaaggcatgcccggcactgccggtggcctgtcttttcgtggttcttagt

SEQ ID NO: 6613 - DNA, 222 bp, Glycine max
  Clone ID: PAT_MRT3847_105981C.1
ctacgacctacgcgtcacgtccacgcgtcagatctgtcgcatcctcagggtgctgcacaacgtgggtggaaagtagcggaaaaatatacgggttgctcgcaaaggctccccgctctacaggatccaagctgacgtacgcatgactcccaactagtaccgcttgcttagggcctactaaaatctatacgctaccactcgactcacaaacgtctgccttggaaa

SEQ ID NO: 6614 - DNA, 1739 bp, Glycine max
  Clone ID: PAT_MRT3847_105982C.1
ccacgcgtccgcccacgcgtccgcaactctacaccagctgacgcgtaaactaagattcaacgtctgcgctcttcagccaccataccatagatccttcattctctgcaacgatcaaacccaaaaaacactgcacctcttcttctgggtttgatgggtgcgatcagatttggtgaagaagagagtgtgatttgatgattatgaattgaagtttgaggtggagacatgaacgtgagccatgcttcggttcatccagttgaagaagctccaacgactgaaggtggtggtgctgaccaaaacgtcaacgctcctacaccataccatagatccttcatagggcatgacgatcaaacccaaaaaacactgcacctctgcttctggttcgcgcacgtttgatgggcgatcagatttggtggagcactgagcaggtgcaccaaacaaaaacaacgacaacttcacacacagctgacgcgtaaactaagattcaacgtctgcgctctgcagccaccatacaatagatccttcattctttctctgcaacgatcaaacaacaaaaaacactgcacctcttcttctggatttggtgaagaagaagaagaagaagaagaagaagaaagtgtgatttgatgattatgaattgaagtgtgagaggtgaagagatgaacgtgagccatgcttcggttcacccagttgaagaagctccaactactgaaggtggtggtgaccaaaacgtcaacgctcctagggtgaggatgaaggatgttcaaggcatgcctggcactgccggtggcctttctctgcgtgtttctcagtttgttttcgctgctgctgcactgtccatcatggcatccactagcgatttcccttatgtcactgctttttgttaccttgttgctgctgccggctcgcaggctttgtggagcttttcattggttattactgatgtgtatgcccttttggtacggcatgcatcacagtcctctttgattgtgagcttgtttacttttgcacagaaccactcttcgccagttagaaacagctacaggcatggctctcatttgttggttcaccacagtgccatcttttctcctgaacttctggtccttagcatcacggtaattaaaaacagtaacacgcagaaacttggacagcttgtaaagttaatgttggtgtcaggggtttggctgttttgtttttcacctgtcaaagttttctatgcttcatgccatgtggtagcaccaaatggttgcgtttactgtcttccaccaaacattcaaaccagaaattggctcagtgagtcatatttggcagtggagtgagtaaacaggactaatatgattagtgcatacaatgtagtagtaatatgcatggtgtaaagaaacagatttgatatgaacatggtggggtttctgtttgtggaaatgtgtgtagtcagacagtacacagttttgttctgttaaaatgatttttttttatagttattagtcacttttaactatatattttttctgtaattgaatatcatttgtttttctagaaagtgcatgctattttattcctttgttttcattcccttttctctcttattaggcctatcctgaagccaaatgaaatgagatctgaattcctcggggaattccaattccacatcttcaagaaataaggaggcaaaaatgttcatatatgaattggaattatttgttatcttattaggcctatcctgaatgcctaggaaatgagat

SEQ ID NO: 6615 - DNA, 331 bp, Glycine max
  unsure (1)..(331): unsure at all n locations
  Clone ID: PAT_MRT3847_105983C.1
tttccattccttttctgatcctgtttaaataattggctagtaagctcaagaactgtaacatatatacatgtatttaagttcaattagcatagccattattggcataaccatcaacttacacacttacaggcaatntaaaagataaatttagtttgtctagaacaatcaatgatntgctatggaattgctgtttctctttattcataccatccagtatagaataagaaccaatgaaacaacatgttcatgaaatcatttcatatgtcttaagagaaatatgtcttgaagntgtatattatcatatcatntgcattcagtgtggcacttgtag

SEQ ID NO: 6616 - DNA, 303 bp, Glycine max
  Clone ID: PAT_MRT3847_105984C.1
ggaaaacagggggtgccacaataaaaggggctgggaatttttatttcaaaaccgggattaattggggggagccccaatcaactaaaaaccttttaaccccccccaaacccccaaaacttgggggtttttgaaacaaaaacttatccaataccgggctcccatggggggaccccgggcccccctcctttttttttttttaaaggaaaaccaaaacaaggggtacagcatacgttgcctttttatcccggggaaaaaatgggcaaaccccccccctcttttaaaacttggggacccgggggcccc

SEQ ID NO: 6617 - DNA, 1971 bp, Glycine max
  unsure (1)..(1971): unsure at all n locations
  Clone ID: PAT_MRT3847_105985C.1
gctgttggcggaaagggatcaaacggggaattttatgttagattctattaatatggtcacacagtgttgtcggccactttctctctctttcgcgcttcaactttcgtttttgcactgattgaaattgtgaggagcaacagaccacttgagatagtttaactcagctgcagggatggatctgtggggtgctcatcatcgacttttgttcattggtcggcatgaggaagatggaactcctgatacttctatgggagaggaatcaaacgatgaagaagaaaaaataattaaaactgaacccgtctttgtgcctgaaattaagaaaaggaaacgccttagccttagtcagcttaaagaggtgaaagaggagtcacatgggaagcaaagcagtagcaagcctaagaggaagaagcatgatagtagggatagatggtcagctgagaggtatcaattggctgagcaaaacatgtgggagagtctgaagattgaagggactcattgttcatgtttcaggagatgtttatggatttatacaaatggaaagaaaaaatggaacagcagctgttggaggtatcgaatactgtatatggtatgctggcaatgaagtagacatcactccaaagtatctgaggctataggataggatataaccaccctttcgttcataagtttttctctgttactcttaaaactggtagagtttagatattgtacagcattaacaacctgatcctgaaaatctatgccaaccactaagttcagaaaagaggttgagtctcaccctgctggctgagctgcaaactgttgatatgtctgactggccttttacagtatacttggttatgacttaaggtaggtagggtcttcagtggtaatgaaattggttgttttctcgacttattgggtaatattatgagttcctttagtataggccttctttaggtagaggctttacccgtatttaacgtattagctgaaactatcttgttagaacttgtacttgacctatttggtaacaagttgccatatttatatatatagaattaataaattgaatgatcttcaagcatctagggaatgcaccacttatagtcctccttcagaaaggtggaaagattggatagaaagcaccaacctagacaatattcangaagatgcatttgctactggattgggaatccagagctacttaatgttccacaagaggttatacttgaagatcccaacacgaccatgccaacacagccacccagtgaagaactgactaacaagaagagcgatgtgctggagttagtacctgtaaaactagaagatcaaccaaatgtaacccctgattcttctacaactgttaattcgaagtcagaccttgacaactcattgattatgtttcaggagatgtttatggatttatacaaatggaaagagaaaatggaacagcagctgatggaggtatcgaatactgtatatggtatgcttgcaatgaagtagacatcactccgaagtatcgaggctaagataggatataaccaccgtttcgttctcaagttttctttgttactcttaaaactggtaaagtttagatattgtacagcattaacaatctgatcctgaaaatctatgccaaccactaagttcacagaagaggttgagtctcaccctgctggctgagctgcaaattgtcgatatgtctgactggccttttacagtatacttggccttttaaattgaatgacttaaggtaggtcttcagtggtaatgaaattggttgttttctcaacttattgggtaagattatgagttcctttagtataggtctttaggtaggctacccgtatttaacgtattagctgaaactatcttgttagagcttgtacttaacctatttggtaacaagttgccatatatatatatagaatttctacaatatcgttcagcaaaaaaaaaaaaaaaaaaagggctggcctacctaaagac

SEQ ID NO: 6618 - DNA, 282 bp, Glycine max
  unsure (1)..(282): unsure at all n locations
  Clone ID: PAT_MRT3847_105986C.1
gatcaattttaaaatatccaacgcaacccagacggaaaaaccgaggggaaggaggcgcaaaagaagacgagagggcgaacaaaacacaaaaggggncanccgaggacgaggcaaccaaaagaacaaaacaggagggaaatggaagggatgaagacaaagacaagggaggaagctaaggagagggacacccaagagagggagacggcaacaaggacgaccagggagaaggcagaaaaaccggccaaaacgaggggaagcaaaacgccgggaaaggaaggaaaa

SEQ ID NO: 6619 - DNA, 451 bp, Glycine max
  Clone ID: PAT_MRT3847_105987C.1
gattgagtctgccttcatctcaccactcaccaactgcatttcctttctttcttcttcgttgcgttttgctttctttctttttcgttgcctttgtttcttcttcattttgctttctccgtttctttcctttattttttttttggtgttttccatgtcagatctgggttttgttttctttatgcttaaatacttaaagttgtttttttactaccctttggtttttcccctttgtgaatcttgagactttgtgcatgggtatgtatggactctgggtaattttagtgtgtgatagggttaaaattttttgttgttgtggtttttgctttaaggtttttgaatttgatttgggttttggattgtgtgtatttggcagtggaatttttcaatttggattaatgggttccgacatttgcattgtgaatggttcgtgcactcacgaatggagaaaggg

SEQ ID NO: 6620 - DNA, 287 bp, Glycine max
  unsure (1)..(287): unsure at all n locations
  Clone ID: PAT_MRT3847_105988C.1
gtcgcatgcacgcgtacgtaagctcggaattcggctcgagttcaaggaagtggacgggaagtctcgagattctttacgtgctttcacgagaacgttcattgctgttcctgccaccaattcagggctatgtattgtaaatgacgaattatttgtgcggaacgccagccctgaagaaatccaaagagccttcgccatgcctgcacccacaccttcttccagcccagtacccacactctcccaagaacagcaggatatgttacaagcattttctacccagtctggnatgg

SEQ ID NO: 6621 - DNA, 149 bp, Glycine max
  Clone ID: PAT_MRT3847_105989C.1
gtaattgtattttgtttgcgattttatagttgttcatggggggccggtcccggtagaagagcaaataaaaaactatttgcaaattggtttatttgaacctgaaaacatccttttttgggttgcaaggctattaaataatttggacccta

SEQ ID NO: 6622 - DNA, 824 bp, Glycine max
  unsure (1)..(824): unsure at all n locations
  Clone ID: PAT_MRT3847_10598C.1
tattctaaataagcattggggggaactttgtaagccgggtgctagtattcggcacatacacaaccattcggttgaaatgctgcagaaaggacttaaagagcttgggattttgagagatgttggaagcagttcctaccataagctgaacccaacttctataggtcactatctagggatggacattcatgattgttcaatggttagcaatgactgtcctctgaagccaggtgttgtaataactattgaaccaggagtgtacatcccatcttcttttaatgttccagagaggtatcgaggcattgggatacggattgaggatgaggttctcatcacagaaactggttatgaggtcctaacagcatcaatcccaaaagaagtgaagcatattgagtccttgctgaacaatttctgccatggaatgggagcgatggacagccaaaacaactaaagagcctatagcccaattgatatattggccatacgcttgcattcaagaaccaggactgtgaatccttgagacttgcatggcactgcccagagcagcaactgaatttctatccttttgttttggtctcttgcatattttttcaacctgggaaacatgtattctataatctttactgggaaaacaaggtgatggtggtgcggttatgccatttatggtgtgtttggatttggataagagaaaagaaaatagagaaaaaaaaagagaagaaaatatggataacaatattttcttttatttgattgaagaggaaaataaagagaaaattttgactctgactgaaagttcaattntatttctttcaattttctcttcatac

SEQ ID NO: 6623 - DNA, 362 bp, Glycine max
  Clone ID: PAT_MRT3847_105990C.1
ggctcgaggtcatacgctgcgtgcgtcaaatatattgtttaagccacccatcgatatttggttatgggttccattgaacctaagcctgctcctccaaatcgcgtgagcagattcaactaccacatatttgcggctggctgaactgccgggcgaatcatctttcacgcaccaagttggtggcgtaaccaaagtatttgtacctgcagcgaatggatgtcattcttccgtcaattaacagccaagaaacttttatgcttcaaacaatggggatctcccacgacaccaatataaccgcacccaggtggatcctttcctcaagaaggaatcgattctcctttcatgccagtgcgctacccgttggg

SEQ ID NO: 6624 - DNA, 447 bp, Glycine max
  unsure (1)..(447): unsure at all n locations
  Clone ID: PAT_MRT3847_105991C.1
wnaaaaaaanttanntagctngcaaggncgaaacnnnnnggacnagcancngctggnaacatgnccggacgtntggggngtagtagtcnggtaggtncgaaccnggatngaagnnaactgantgtgtaaaagagnntgtgngatcnanganganngngtangtngnttngggaggctttgcacntatngacagtgnngnncgnatnggncnagaatctncagtgacngntttgncnnggagngngcgnnantagtngtcagatnantnncaggannntttgagngngagtgtctgntcagtcnnatnancganngtngannncnnnggacnanaaggggtnangtgnnatggnncnntgacgngcgnggtgaacganagaggcgtgnnctngtggtnngcttgnanntggtcaantnggagntnagnnccncggnnggnnangtngg

SEQ ID NO: 6625 - DNA, 132 bp, Glycine max
  Clone ID: PAT_MRT3847_105992C.1
tgagtccatacgccatgcagttatagttcttgaagagatcggcgcattgtcaaatgatgaaccactcacccaactaggggagaagcttgcctcctcccctgtacacccattaatatgcaggatgcttttttt

SEQ ID NO: 6626 - DNA, 205 bp, Glycine max
  unsure (1)..(205): unsure at all n locations
  Clone ID: PAT_MRT3847_105993C.1
ggtgggggattaatcgcccctccaataaaaaaaaagggggggggggggaaaaaaaatttttnttaaattaaacaattttagttgactccaaaagcagaattaagctattaatttgccagttaaaaggaaattacatttttaacgacagaactttttaaaaaggatgatactagggggtgaatttgtttccaaattattaaatgaa

SEQ ID NO: 6627 - DNA, 463 bp, Glycine max
  Clone ID: PAT_MRT3847_105994C.1
aacatttctgccattttctaaaatgcacaaaggcttggtcaaatgactgaatgaatctgcattaacacgagggatggtcatcaatttattccaagaacaacgttgaaccccatactccttcatgagccacaacaaaatgatctccttttgaggtttcacttttggttgcttccatggcggcgtttcgaagcgtcgctgaggcaagccttcgaatctctgcaaccatccctgagaccccctttctccttatccattctcacccccgaccaatacgccctcctcaaccgcgcaatcctccacggtgttttaacggagcctcatttggccaatacccacatcaaacacttgcatgcaatcgtcgtcgacgcccacgccacctttctcagtttactcctcaacgccgttctacaacttctaccccaaactcctccactccgtcaaacgcagttactcaggctcaccg

SEQ ID NO: 6628 - DNA, 379 bp, Glycine max
  Clone ID: PAT_MRT3847_105995C.1
taataagcatttttcaaagcgctcccatactcatattgggtggacaccacagctactatagactagtcatggagcagcttcagcaccaaatgcacagaacccacattcgccacaaagccattgacatgcactcatacgcctagcacatctattatcaacattgccaacctgacacactccacgagctggctgacatcaacaacaccctgaaggacatcaaagacgaagataccgcccttcgctatatccacgccatcgtcaccatagagatgtatactgctcaaacttacacagccacttctaccgctactgctttgaacactgagatgcttgatcatgatactgatagtctagctgatgactatgcgtctactcatct

SEQ ID NO: 6629 - DNA, 425 bp, Glycine max
  unsure (1)..(425): unsure at all n locations
  Clone ID: PAT_MRT3847_105996C.1
attggggcctacctgttcttctgtggttgctacgatctggcctttggaaagaatcactacttggctctatctcttcttccaagcaacagctttcttcgtcgtcggatttggatatgtgggcacctttgtccaaggttcttagcaggccgtgaatggacataactaaaaaaatcttggagagtttatacttcatagtttcactgctgtcgtcttacaagaacatatatataaagtttgtagcctccttcgatgcccgctatcaccagaggagttactcatataaagaatctccagccttcgagcagcagttaccattaggaattctcgtgtgaatagtcngcagtcgaagtacatgtactgtggtttacaggaatctattagataggagagcccataaatatcaagattagacagttttgggctct

SEQ ID NO: 6630 - DNA, 164 bp, Glycine max
  Clone ID: PAT_MRT3847_105997C.1
tttggaaaaaaggaataggaaattttcccacccggttttttttttacttcccagaaaaaggaggggctttttgccaagtctaaatccatattattttccccaacctacccccagaatttttaaagggacggcctggctcttcatgctcttaaagaacggtattg

SEQ ID NO: 6631 - DNA, 380 bp, Glycine max
  Clone ID: PAT_MRT3847_105998C.1
tttttagtaataaataaattcatatggttgttaaaacaaaggctgaaaacagtccgaaccgaaataaacaaatattgaagtactaataacaaactttatcactgatcccagaaaaagcaaaaaaataaatcacattattacagcacaacttgtacaatcacaaaagtccagagtcattcaagccatttgaaatgttatacatcaataacatgttgctgccataagtgtccctttcatcttcagtggttccgttgacaaatgtggcggaagatgatgaattcaaagtactaattgggctagaagatgagggtgtggacgataacagtgaacttaaattgaaatttggcgccccctcgttgttgttacacaaaatttgattt

SEQ ID NO: 6632 - DNA, 317 bp, Glycine max
  Clone ID: PAT_MRT3847_105999C.1
tgatcctttgcgtgtgtatggagatgatctcttaatgagcgttcatgaagtatgtcaagccttaatccagaaggactaaatggacaagcatgactagctggatcatcatatgacgcactacttgaatggtatctgacaagaactatgagcaacacttcgcagtgctgctagttagctgatagagattctgtcataggcgatactgaacgcagatgtataatgctatgcaggagcctcctgaagacacagctatgtatatggtcacaacctcattatgtgctcgtgggataatactgcaactgcaagaagcttatctt

SEQ ID NO: 6633 - DNA, 1060 bp, Glycine max
  unsure (1)..(1060): unsure at all n locations
  Clone ID: PAT_MRT3847_10599C.1
ggttttctaatcccttgatcccaaagaaaaatatagagagagagagaatgtggtggcggcggcgcccgagaccatgagaactacagcaccttccgatttcattttcacccaaaagcttcaccctttcaacatcacctccaccaaaacctccctccaacgaaccctaccctattttctccaactcaatcgcatggccgaggctgcacgaaccgcgcataaacccgcgccgcacccgatccaacccaaacccgacgataaaaccccgaatccggcgaaggagattccgccgccgccggagaagccggagcccggcgattgctgcggcagcgggtgcgtccgatgcgtctgggatgtgtactacgacgaactcgaagaatacaataagcgatacaaacaggtcgatcccagccccaaaccttcttcgtaatcttcaacatcgcttggattagctttattaatttatttatattacatcctaattttaaaaagctttgggtatttcttgatttcgtgaattgtccctttttatcaaaaaggatcgaaatgttgtatgtggaattatacatgtagaataaactgatttttttaaaaaaaatgccagggctaaaatgtacgatttatataatcccgaagattttttcggagattaacttctcgatccgtatattatcttttctcttttgagtggccgaattaatcttaatttatgttagcttttcgtttctgccacgtgaacaatccttttgcactatccatccccagtctttggaagtgttatgggtcgatgattgttgggttattgtcgtcgtcaatacaccagatgactaggtgaattgctttaaggaaccatgtgctaaaggatgtcgggacacaacgctctgataggatgttacattggggtatagggttttatagacggccttgttggagccgaagtgaatttattatttatttagaaaaagttttatgatgatgttagaaaggtgaatgtgagcctgctaccctcttgaaggctngtatttaattatggtttaaaacttgaattaagtttaattttttt

SEQ ID NO: 6634 - DNA, 313 bp, Glycine max
  Clone ID: PAT_MRT3847_1059C.1
gaaaacaccctttttccaagaacaagaacaagagcctcaatctccgagcttgtgataacttgtttccaatgagcatgttaggcctgcgagacctagttctcatagctccaaccccttcttcccttaaccaccaccaaggccaacccttttcagaaaaccacactaacactcacactcccaataacattcctttgccttcttcagcagcttctctcagtgttggctttggcattttccctctcctcactgcgacaccatgtgtgccacagtctcatcatcatcatcataacaatgaggttcaagagttggtggg

SEQ ID NO: 6635 - DNA, 319 bp, Glycine max
  Clone ID: PAT_MRT3847_105C.1
cgccgtagatccagtgagcgttaaccttgtctgacttggttgaacagtacgcttatgagctcatcgagcatgccatgctcatcgtcgcaccggggaagggcatgctggcagcacatgagagctctggcacccttggtaagcacctgttaaacattctcgtagagagcattgctgcctctctccatgctctgcgcgtgctgctatccaccgattcagatgccatgcaatacctgagtggtgtcgtcctcttagtggaaacgctttgccatgaaaatggcctgtgggtaaccatgcgttacggtcctgatagagaacaatg

SEQ ID NO: 6636 - DNA, 317 bp, Glycine max
  Clone ID: PAT_MRT3847_106000C.1
tttacgtttatgcaatcggaggaaccattctgcgcagtgatcaatttgcaaattttctgacagagggcaattttagagcaagagttgatttgcagcgcactcattgcatctaatgaatgattaatatggtggccacagtttgtttttctgataatacaggtatatacatcggtctgagctatgaacagcactttaagggggcgtgccagttatgatatatacaccaactgcattcaagactgtgaattactggaaacctgcttgctcaaaagctatgactatgttaatttaatccaaatccgtgtacttgatgcatg

SEQ ID NO: 6637 - DNA, 2016 bp, Glycine max
  Clone ID: PAT_MRT3847_106001C.1
caaaactcaacctcatcttgaggactgatcttcagcctcaaattctgctccacaggcgaaatgttgtctctcaggctaacctcgttcacccacctcttctccccgccctcttccgccgtcatctctcgccggtccccggcgtttctgcggcggcgccaccacccccatccacggccactctccgcctcgttctccgcccagagcgcggcggcggagacccaggaccgagtcgagaactcgaagaaccgagtcaccgaacgagtcatcacgccaaggtcacaggacttcaacgcgtggtacctcgatatcatagccaatgccgagttggccgattacggtccggttcgcggcaccatggtcattcgtccctacggttacgccatttgggaagccattcaggagtatttgaatgtgaagttcaaggagactggacatagtaacatgtattttccgcagtttatcccatactcatttatagagaaagaagcaagtcatgttgagggttttagtcctgagttagcactagtgacaattggaggtggaaaggaacttgaagagaagctcgtggtccggccaactagtgaaaccattgtgaatcatatgtttactcaatggatccatagctaccgtgatcttcctctcatgattaatcagtgggcaaacgtgacaagatgggagatgcgcaccaaaccatttgtgagaactcttgaatttctttggcaagaaggacatactgctcatgcaactccagaggaggccgaaaaagaggctatacagatgattgacatctataccagatttgcttatgagcaagctgcaatacctgttgttacaggtcgaaaatctaaagtggaaacatttgctggtgcttgtaagacctatacaattgaggctatgatgggtgacaagaaagcattacaagcaggaaccagtcataaccttgggcaaaactttgcccgtgcctttggaacacagttcacagacgaaaatgggttaagggaatatgtttggcagacatcatgggcaattagtacacgttttgttggtggcatcatcatgacacatggagatgatgcaggcctaatgcttcccccaaagcttgcaccgatacaggtggtaattgtacccatttggaagaaggatggtgaaaaagaggcagttctaaatgccgcatcatctgtaaaagatgttcttcaaagatctgggattaaagttaaacttgacgactcagatcaaagaactcctggatggaaattcaatttctgggaaatgaagggagttcctcttagaattgaaattggtcctcgtgatgtggctagtggaagtgtggtgatatccaggagagatatccctgggaagcaagggaaagtgtttggaatctctatggagcctttaaatttggaggcttatgttaaagacaagttggatgaaatacagtcatctcttttggaaagggcaattgcatttcgagacagtaatattgtagatgtgagcacatatgatgatcttaaagcagcaatatcacaaggcaaatgggcaaggggcccttggtctgcaagtgatgaagatgagttaacagtaaaagaggagactggagcaacaattaggtgttttccttttgaacagccacaaggggttaaaaggtgcttgatgaccggcaatcctgctgaagaagtggctatttttgccaaatcttactaaatctgcaaggtttcttattctttgaagtcccgaataatatgatctgcaaagcgggtacttgtacttaatttttgtttaaatttttacttttttgaatagttaatttcttgtcgtaacttaggcaagttagtacaaaaaacacgtaatatattgattcagaacttcaatttatcattgtttagaaaaacaattgagatgataaatgttgaaggatttctattgctgtagtttgatgaaatctctgtaatctatgaatgctttgttaaaaaaaaaaaaaaagggcgcccccccacaatataagccctcccccccccg

SEQ ID NO: 6638 - DNA, 630 bp, Glycine max
  Clone ID: PAT_MRT3847_106002C.1
cgagttattacaggtcgaaaatctaaagtggaaacatttgccggtgcttgcaagacctatacgattgaggctatgatgggtgataagaaagcattacaagcaggaaccagtcataaccttgggcaaaactttgcccgtgcctttggaacacagttcacagatgaaaatgggttaagggaatatgtttggcagacatcatgggcaattagtacacgttttgttggtggtatcatcatgacacatggagatgacgcaggcctaatgcttcccccaaagattgcaccaatacaggcaaatatgaaaataaagggaatgcttacttaaaatgaaaaagactcttctactccgaagtccaaactcctacatgcagatacaggattatgttccatgcctgtacttttatattgtaatttaaataaattataagtttttcatttttgacaaaatcatggggtgtgttgcctggttaggtggtaattgtacccatttggaagaaggatgatgaaaagaaggcagttctaaatgcagcatcatctgtaaaagatgttcttcaaagatcctggattaaagttaaacttgacgacctcagatcaaagaactcctggatggaaattcaatttctgggaaatg

SEQ ID NO: 6639 - DNA, 408 bp, Glycine max
  Clone ID: PAT_MRT3847_106003C.1
caattcatatttgactactaaactaccttcaaaatcaaacacctcactttattcaattcataacatgcaattattaaattaatcaaaacattaatgtctaaggatagatctcaataacagacaaatatttggtcaagggaaatattttgtagtcttggaaccctgcttccatgaagagtttcttccattcttcttcatttctctcttttccattaacacatgccatggttatatccataacgagctttagttccgtaactttgtgctcatcttctttttcgtttatcacaacatctatgataatcacttttcctcttttgccattatttgaaatagcttctttgcagttcttcaatatctttatgcaatccttatcagtccaattatgtagaatccactgcagaaatt

SEQ ID NO: 6640 - DNA, 498 bp, Glycine max
  unsure (1)..(498): unsure at all n locations
  Clone ID: PAT_MRT3847_106004C.1
accaggttggctcgcagggatatcgattactggtcgtaaggggtgggatatctggttcagcagcagatcctaattacccttctggtgactccgtaactcattgcttcctctcttttcaaagcttgtgggtgctctgcttcaagagtctagtctatttatcatttaacggattgccgagcggagaagcgttaactactgggatatcggggagttcctctccagctactggaacttccctcgctacatgagctattgtataagtacaggtacacaaactacatccgctatagtggaaacaatggcatccgtagcttcacccctttcttttgaatggggcatcaacagtaagaaagtcagtagtagtggtaccatctctagttctttactgatcatgtatattttagcaagggacggaaagaagtagatcagtaggaatactangattggcaagggtggataacaaggaaatagagagtgacaagacaattataggaaaag

SEQ ID NO: 6641 - DNA, 361 bp, Glycine max
  Clone ID: PAT_MRT3847_106005C.1
ggccgcccttgatttttatctttgtttttttgtgtgtgttttcttgggttgatccgtggggttcggaccggtgcctgtatgcgccctagttttacgtatagggagtcgaatgagaacaaggcaaaacaagggcagggcagagagcggtgtgaaaatggcaggcgatgacagggccgcgcaacaaacgagcaggaagcagaaagtgaaaagccgggggggcccaaggggggaacgagaaaacatgaggggggcgggggtgaccgcccggtaacacaaaccggagacgcggcaggcaacaggataaaagcaggggggaacgcacggggggaggacggaaggacaagggggcgccccgccgggg

SEQ ID NO: 6642 - DNA, 247 bp, Glycine max
  Clone ID: PAT_MRT3847_106006C.1
tggtggtgggggagctggataaaacaacttttttattgcctcatttttctttaaagtttcccatgacgctggttttgtttatccaaacacccccaatgccaaaattcttcctataccattttatacattacatcacaaagttcccataaacacagaattaaacaatctcacatacattttacactcgattaagaatctacactttacattattattcttacatcttaaactctaatatacattacta

SEQ ID NO: 6643 - DNA, 3906 bp, Glycine max
  Clone ID: PAT_MRT3847_106007C.1
ggctcgagagaatgtgcagccagccaacgtggaaggaagccaagaaacctaaatcaattcaaaagcgttgaattttccatttttcccccataaaataacaaaaaaacaccctcaattctctatttactcgctttgcttcaacgccaccaggcctccttcttttctcattaccctagtttttctccattttcttcataattgaaccgtttctccccctcgactcgatcccatatgtgttgatagtgaaaggcatcgtcctcatcatcatctatcatggcatggtttagagctggagctagcatagcaaaacatgcaattaggagaactctttctaagggtggatccacacaccttgtgtcaagggcaagggtccttccatcgataccatcatcacatagcagaagcttccacagctcggttttcaaggagcaagctgcacctgttcctcgtgcggttcctctttcaaagctaacagatagtttcttagatggcacaagcagtgtgtatttggaggagcttcaaagggcttgggaggctgatcccaacagtgttgatgagtcatgggacaatttcttcaggaactttgtggggcaggccacaacctcacctgggatttctggtcaaacaattcatgagagcatgaggttgttgttgctggtgagggcgtaccaggttaatggccacatgaaggcgaagttggatcccttgaatctggaaccaagggaaatccctgaggatttggaccctgcactttatggcttcactgaggctgatcttgatagagagttcttcttgggggtgtggaggatggctggtttcttatctgagaaccgccccgtgcaaacccttagatccattttgacaaggcttgagcaggcttattgtggaagcattggatatgagtatatgcacattgctgatcgtcacaagtgtaattggcttagggataggattgagacccccacccctacacagtttaatagggagaggcgtgaggctatctttgataggcttgcttggagttccttgtttgagaacttcttggccaccaagtggacctctgcaaagaggtttggtcttgagggtggagagactcttattcccggaatgaaggaaatgtttgatagggcatctgatcttggggttgagagcatagttataggaatggcacatcgagggaggctgaatgttttggggaatgtggtaaggaagcccctgcggcagattttctgcgagtttagcggtggtcttcagcctgagggggaagttggactctacactggaactggagatgttaagtatcatttggggacatcgtatgatcgccctactaggggtggcaagaggattcatttgtctttggtggcaaatcctagtcacttggaagctgtcaatccgcttgttattgggaaaactcgagccaagcagtattacgcaaatgacgtggatagaacgaagaacatgggtgtgttgattcatggagatggaagttttgctggacagggtgtggtctatgaaaccctgcatttaagtgctcttccaaattacactactggtgggacgattcacatcgtgtttaacaatcaggttgcatttacaactgatccgacttctggcaggtcttcacaatattgcactgatgttgccaaggctttggatgctcccatctttcacgtgaatggtgatgatgttgaagcagttgttcatgcctgtgaacttgctgcagagtggcgccagactttccactctgatgtggttgtcgacttggtgtgttaccgtcgatttggccacaatgagattgatgaaccatctttcactcagcctaaaatgtacaaggtaatccgaagccatccatcaactcttgagatctatgagaagaaccttttggaatcaggggagttgacacaagaagaaattgataggatccacaagaaggtcacatcaattctaaatgaagaatttttggctagcaaagaatacattccaaaaagaagagattggctttcagcatattggcttggtttcaagtcacctgaacagctttcacgtatccgaaacactggtgtgaaaccagagatcttgaaaactgttggaaaagcaatcacaaccatccctgaaaatttcacacctcatagagcagtgaagaggatttatgaacaacgggcccaaatgattgaaactggggaagatattgactggggatttgcagaggcgcttgcttatgctaccttgcttattgaaggtaaccatgttcgattaagtggtcaggatgttgaaagaggaacttttagtcaccgccatgctgtagttcacgatcagacaacaggggagaaatattgtcccctggaccatgttataatgaaccaagacgaagagatgtttactgttagcaatagttcactttctgagtttggtgttcttggatttgaattgggttactcaatggaaaatcccaattcattgataatttgggaggctcagtttggtgattttgctaatggtgctcatgtgatatttgacaattttttggcttctggtgaggctaagtggcttcgtcagactgggcttgttgtgttacttcctcatggttatgatggccagggcccagagcattcaagtgcaagattggaacgctttcttcagatggctgatgacaaccctcatgttatccctgagatggatccaaccctccggaagcagattcaggagtgtaatttgcagattgtgaatgtcacaactcctgctaattttttccatgttctaaggaggcaggtacatagagattttcgcaaacctctcattgtaatgtcccctaagaacctgcttcgtagcaaggcttgcagatcaaatttatctgagtttgatgatgtccaaggccacccaggctttgacaaacagggaaccagattcaagcgcctcataaaagaccaaaatgcccacaaagatgttgaggagggtattagacgtttagtactttgctctggaaaagtttactatgaacttgatgaacaacgaacaaaggttgatgcaaatgatgttgcaatatgtagggtggaacagctttgtcctttcccttatgaccttgtccaacgagagcttaaacgatatccaaatgctgaggttgtttggtgtcaagaagagccaatgaacatgggtggatacacttatgttttaccccgacttatatcttcaatgaaagctgtgaataggggaggttacgacgatgtcaaatatattggtcgtgctccatccgcggccacagccactggcttcctcaaggttcaccagaaggagcagactgagattgctgaaaaagccgttcaacaagaaccaatcgacttcccattttgaaaaatcctttgcacatgcatccatcttttttgagagtgataataatgcatttagtttaatttatccaccacgtaagtggctatagttggaaggaaggcgacctcatacatttgctttcaagttttgacctttttttatgttcttttggttccttacaaaaagtatgttaagctgaatttcaacatacgtatgctgaaaatatttttatttccttgttgcgatacgcaaaggcgtggttggcttactagttgaattgatgccttgggaattaccatttttttttttaatttatgctgtgtaatttggaaaagcatcttccgtaatttgtgactatgtaattccattttccagaggcatgccttggcaatatagcctcaggatcatggccaagagttccccataatttttttctctcaaatatgccttttaataccatcaattcaaaatcaactttgatatggttcttgaatcaatctgagttcatcatcctatgtatctttgtctgataatgtagtcttgatcaatgtatttttgtttattgtattttgctaaaaa

SEQ ID NO: 6644 - DNA, 678 bp, Glycine max
  Clone ID: PAT_MRT3847_106008C.1
ttacggctgcgagaagacgacagaaggggacacacctttcccttcaatttaagaaataaaacactccttgttcttttttccccttatcattaatctttctcttccttttctagttctagctagcaaagtgcaacattacaatccctcttaggctcttagttgagagaagagaagaacctaaattatcattttttatcaatcattcatggcctcaagctctctcagcaaacaaaaggcttctgactcctcttggacgccaaaacagaacaagctgtttgaaaaagcacttgcaaaatatgacaaggatacccctgagcgctggcagaatgtagccaaagcagtaggtggaaaatctgcagatgaagttaagagacactatgaaatcctcttggaggatctcagacacatagagtctggccgtgttcctcttcccaagtacaagtccacaggaagcagcaccaatgttgatgaagaagagaggcttctgaagtatcttaaactgaattgatggaagcaacgtttatgttatcctgagctattggcagcatttatgtggtgttccttgaatctgcagaaatatcctccccgctgtctctctctatcttgtgtgtctctgttctatttcctgccattgtaatttagattgtttcaaattttcaatgaattatcctattttag

SEQ ID NO: 6645 - DNA, 244 bp, Glycine max
  Clone ID: PAT_MRT3847_106009C.1
cggacgcgtgggatgattttggagtggaaggctgtaaatgagactgttgagagatgtttgggtttcttttgtttttgagtgcaatttgttgttggaagcctcttaactggtcttttattgttgtggtgagtttgccaattgtttggttcttttggtgtagttggagttttagactctacgaaatgttggtggaattggtccttattatcacataatgaagggagaggttgcagaattggtactt

SEQ ID NO: 6646 - DNA, 178 bp, Glycine max
  Clone ID: PAT_MRT3847_10600C.1
gatgtatcctttttacataaattacggtcggacacgaaaagatatctatttcatttaaataaacccgcgccccatccaataaatgtgctgtttgacgccaaaaccataaaaggggtctgagagcaccaaaacaacttctgcgtttcctttgaggcatatccgaagaaaaacataaggg

SEQ ID NO: 6647 - DNA, 336 bp, Glycine max
  Clone ID: PAT_MRT3847_106010C.1
tgtttttttttttttattctttttttttttttttttttttttttggttccgggggaaacaattggatatatttttatttgcaaaacaatcccacttaggagacctaagcccctaaaaattaaataccccctttcccccggttacccggatcacctttcggtttatttaacaaaactagtctctccttattaaaaaaaaaacattttttttattttcctaaacaaagaaccttacttttaatttgagtttttgggaccacctacttttttctttttaaaaaactgggtattttcctaaaaaggatgcttataagggtgatcccttgggacaagagcc

SEQ ID NO: 6648 - DNA, 434 bp, Glycine max
  Clone ID: PAT_MRT3847_106011C.1
acaaaatatcccaaactctcactcgtcgacggccaccggatcgacctcaattcgccgtcgtccaatcgctctcagttccaccgcctccgccgccggcatccaattcagtttggccttgcatctctctcaggtattaagattctactaaaaaaaaggttgatcagcgtaaagatggagctcactattacacagcctgatgattggcatcttcacctccgtgatggttcccttcttgaagctgtcctccctcacagtgcgaagcattttggaagggccatagtaatgccaaatttgaaaccacccatcactaccacgtctgctgctgtcgcttatcgagagtccattttgaaagcaatacctaaagatagcaacttcactccttttatggcactttacctcacagacgtgactactcctgatgagattaaacttgc

SEQ ID NO: 6649 - DNA, 1826 bp, Glycine max
  unsure (1)..(1826): unsure at all n locations
  Clone ID: PAT_MRT3847_106012C.1
caaaatatcccaaactctcactcgtcgacggccaccggatcgacctcaattcgccgtcgtccaatcgctctcagttccaccgcctccgccgccggcatccaattcagtttggccttgcatctctctcaggtccctatcttcttccatccaattagtgtagttctgacgtttcgatgttgcggttgcgtgtttcatcggatccttctgttttgcggttgagcatttcgaattgcaattttcctttgagcttttcatttcactggtagatgaaaccacattcttcgactgaaatagtgttcaaggagtgtgtgtgcgcgcgcgcgtgtattaagattctactaaaaaaaaggttgatcagcgtaaagatggagctcactattacacagcctgatgattggcatcttcacctccgtgatggttcccttcttgaagctgtcctccctcacagtgcgaagcattttggaagggccatagtaatgccaaatttgaaaccacccatcactaccacgtctgctgctgtcgcttatcgagagtccattttgaaagcaatacctaaagatagcaacttcactcctctcatgtcactttacctcacagacgtgactacccctgatgagattaaacttgcaaaaaaaagtggacttgtttatggtgtgaagttgtatcctgctggtgctacaacaaactcccaanatggtngtacagatctttttggaaattgtttttctgttcttgaggaaatggctgagcaaaatttaccattattggttcacggagaggttacagattcaaacgttgatatttttgaccgagaaaaagtctttattgaaacaattttaatgcctttaattacaagacttccacagctcacactggtcgacggccaaccactactgcagatgctgttaaatttgtagagtcttgcaaagaaggttatgtagcagcaactgttacaccacagcatcttcttctgaatcgtaatgctttgttccaaggtggcttacagcctcacaattactgtcttccagtgctcaaaagagagatccatagacaggctattgtttcggctgtcactagtggaagtaaacgatttttccttggaactgatagtgctccacatgataggcgtaaaaaggaatgttcctgtggatgtgctggcatatacaactcaccggttgctctatcactatatgccaaagtttttgaagaggctggtgcacttgataagctagaggcttttacaagctttaacggacctgacttctatggcctccccagaaacaagtcaaagattaaactgaggaaagctccttggaaagtacctgattatttgtcatttccatttggagacatcgttcccatgtttgctggtgaaacccttgaatgggaggcattgccttgttgatttgctgtgtctatttgaaagtttggtatccttcagcttaaattattgattgctgagatgagaatttatgcagcgttcaagaactagagtcaagcaattttgttctaattttatcagtcagttctgcatttattttgcagattgttctcatttctatttcctaggtcaggtgaatttaagtatgaaccagaacacccactgtgactaataaattatgggaatttatatagtattcagagctatggtaattttgtagttctaatttaatcaatcaactatgcatgtatttttcgccaaaaaatctaataaaaaattttaaaatcttcaggtgtatattaaaacttttagtttacaatttgaaataatgattctttcaaaatgaaaaatgatttaaatttatgaattacaattctttgtttga

SEQ ID NO: 6650 - DNA, 434 bp, Glycine max
  Clone ID: PAT_MRT3847_106013C.1
aatatagttatttataaattttattttttaaaagtcacattttgttattgattaaaattaaattatttcttagatgtaaaaaagaggccggccaaacaaagaaaaaacttggagacaagaaaaaaaaacaatggataaagtggaaaaaacaactaaaaattaagaaagttgagataacaaaacaaatgaaaaagaaacaatagagggggtgggaggaactgctggcactccaaagaaaaaaaaggtggaaaaaaaaaaacatccaacctgcaaaaagggaggagaatttccagtaaaggaatatgaaccaaaatgcacggttgaaaaaaaaaaaactctgatcctcacaaaaaaacctttgatgtaaaaaaagaattttaaacaactccactccacatttctcccggaagaatacagggcctactgcggggggc

SEQ ID NO: 6651 - DNA, 2161 bp, Glycine max
  Clone ID: PAT_MRT3847_106014C.1
cgtcccataagaccacataaggggggtcgaaaaacattttttttacacacatgattgatgtgcaagcagatggcatccgaattaatcccattgatctgctctagcagattcgcaaaaattttttaatccccgagaagcaaaacaataaaaaaaaaaaacttatttgttgctcaatcaatcaacgcaaaaccattatttaactgccaaccctcgtcatgtctctctctctgacacgcactcctcctcctcctaggtggaattggaattggggatctactagatgggcctaatcagaagcatgagatcgcggtcacagcgtgtggtgcaggagcaagaagctgctgagtgtgtcggtgtcgtcgtcggcgacagcatgcgacagagttgttgggccaacatgccccaagagcttctccgagaggtcctcctccgaatcgaggcctccgaggacacgtggccgccgcggaagagcgtcgtctcctgcgccggcgtctgccgcagctggagacatatcaccaaagacattgtcaaaacgcccgaactctcctccaagatcaccttccccatttctgttaaacagcctggcccaagggagaatctcctacggtgctttataaagcgcaaccggtccacccaaacatactatttgtttctcagtttaaccagtacgctagctgaagatgggaagttccttcttgctgcacgcaaatgcagacgtccaacctgcacagattatatcatctctcttgacgcagatgatatgtcaaagggaagcaactcctatgttgggaaactaagatcaaactttcttggaacaaagttcacaatctatgatagccagctgcctcatacaggagcaaagattatgaaaagtcgctccacaaggctggtgaatctaaagcaagtttcacccaaggttcctacaggctaactatccagtggcccatatttcatatgaatttgaatgtgcttaggctcaaggggtcctaggagaatgcattgtgtcatggattccattcctgccactgcaattgaacctggaggtgtagctcctacacagactgagttttctcttaacaacatagacatgtttccttcattccccttttttcgatcaaaatcaaatcgtgcggaaaattccatgtctggaccattggttgatcaaaaggatgggatgctagtgttgaaaaacaaggcccctaggtggcatgagcagctgcaatgttggtgcctgaactttcatggacgggtgacaattgcctcagttaaaaactttcagctggtggcttctgcagaaaacggacctgctggaccagaacacgataagatcatcctccaatttggaaaagttgggaaggatttgtttacaatggattaccggtaccctatctcggcatttcaggcatttgcaatctgcctcagcagttttgataccaagattgcttgtgaatgacatgtttaaacagtttcaatccagattatatagctatatctcttgctgcttggagaagtatggcttgaatgtcacttgttgggaagcagaaagatgaaaaatgtttgtcaaggtaaagattggttggatgagcattgaactgaattcgaaaaaaccattcagtttctgggatcacaatttaccagctcttgggaagataacataaaattggaatgttacttgaaactcctccaccatatcccacaaaacaaaacacaaaaacgggaaaaatacatttattcagacccccgtgtacataaattctctatttctttcaacagtttggttgtttattgtaatgtagtagtggttgtttataacatgtccatgcaagacatgttttgttaatgtgactactagctttcaacttatcctttcatgagaacattttgtgttgggggggactcttgcaagaacacaagcagaagcaacttgctatgtgcaactcctttcgttccgtaatccactcttgacttggtctttccaaaacagtaacacactgttctaatacagtgcatgtcacgagggataaatgccacttgctgtattattctcttgactaaggaataaaccctccttggctttgtataacagattatgttatatttacaaattataaccactgtctttatagaaaaaaaaaaaaaaaaaaaaaaaaaataaaaaaaa

SEQ ID NO: 6652 - DNA, 869 bp, Glycine max
  Clone ID: PAT_MRT3847_106015C.1
tgcattgtgtcatggattcatttctgccgctgcaattgaacctggaggtgtagctcctgtacagactgagttttctcttaacaacatagacatgtttccttcattccccttttttcgatcaaaatcaaatcgtgtggaaaattccgtgtctggaccattggttgatcaaaaggatgggatgctagtgttgaaaaacaaggcccctaggtggcatgagcagctgcaatgttggtgcctgaactttcatggacgggtgacaattgcctcagttaaaaactttcagctggtggcttctgcagaaaacagacctgctggaccagaacatgataagatcatcctccaatttggaaaagttgggaaggatttgtttacaatggattaccggttccctatctcagcatttcaggcatttgcaatctgcctcagcagttttgataccaagattgcttgtgaatgacatgtttaaacagtttcaatccagattatataggtatgtctcttgctgccgggagaagtatggtttgaaggtcacttgttgggaagcagacagatgaaaaatgtttgtcagggtaaagattggttggatgggtgttgaactaaaatcaaaaggagcattcagtttctgggatcacaattcaccagctcttgggaatgttacttggaacttctccaccatcaccccacaaagcaaagcacaaaaacgggaaaaatacatttattcagacccccttgtacataaattctccattttttttctttcaacaatttggttgtttattgtaatatagaaatggttgtttaaaacatgtccccgctagacatgttttgttaatgagactactagctttcaacttatcctttcatgaaaa

SEQ ID NO: 6653 - DNA, 1393 bp, Glycine max
  unsure (1)..(1393): unsure at all n locations
  Clone ID: PAT_MRT3847_106016C.1
caagaccttcattatatattgtgcacaataaactagtctattttccaacttcaatatttgctgttgttgagtattctaattctaatgaggaacaggggtgtgtgggaagatgcaagcacagcaacagtgcttgtacttgtgctatgttcatcgtatggaattgcagaagtaaagtcacagtcacagaaggtatctggtttgtttgtttttggagattcattggttgaagtaggcaacaataacttcctaaacaccatagcaagggcaaattactttccttacggcatcgacttcggcaggggttccactggccgattttctaatggcaaatccctcattgacttcattggagacttgctgggcattccttctcctccaccttttgcagatccctccactgttggaaccagaatactttatggtgtcaattatgcatcagcttctgccggcattctggatgagtcagggagacactatggtgatcggtatagcctgagccagcaagtcctgaactttgagaacacactgaatcagtataggacaatgatgaatggaagtgcattgaatcagttcttagccaagtctatagcagttgtggtaactggaagcaatgactacatcaacaactacctcctgcctggcttatatggctccagtcgaaattatactgcccaagactttggcaatctacttgttaatagctatgtgcgacaaattttggcactacatagcgtaggattaaggaagttcttcctagcaggaattgggccactgggttgcatccctagtcttcgagccgctgctttagccccaacaggaagatgcgtggacttggttaatcagatggttggaacttttaatgaagggcttagatcaatggtggaccaactcaacagaaaccatcctaatgctatctttgtatacggtaacacttaccgtgtctttggtgatatcctaaataaccccgcggccttcgcgtttaatgttgtggatagagcatgttgtggaataggaaggaaccgaggtcaactaacatgcctcccattacaatttccatgcacaagcagaaaccagtatgtgttttgggatgccttccacccaacagaatctgcaacttatgtcttcgcatggagagttgttaatggagcgcccgatgatagttatccaattaatatgcaacaaatggctaccatttaatccactctatcttcctgtattctcctttcatttataaaccaaaaaagtgtaccaaaagtgaagccaaattctacatctattgttgggtataaaataattacttttgggctatttcatataattattctacatctttgaaatgtaatacctttttttgggtaatatgtgtaatacctttgnctctttactcttaata

SEQ ID NO: 6654 - DNA, 707 bp, Glycine max
  unsure (1)..(707): unsure at all n locations
  Clone ID: PAT_MRT3847_106017C.1
ccatctctctcttttttctgcatctctcctacactttctttctcttatcttcccaaacccaccaaaaaagaatcaattttttaattccccagaaggaaaaaacaggaacttttttctccctcaatccacccaccctcttctctctctctatttctcaacacacacaagcactcctcttcataaagccgtgaccttaggtggaattggaattggagatctagatgtgcctaatcagaagcatgagatcgcagtcgcagcgtgtggtgcaggaacaagaagaagcagagtgtgtcggcgacagcatgcgacagagttgttgggccaacatgccccaagagcttctccgagaggtcctcttcagaatcgaggcctccgaggacgcgtggccgccgcggaagagcgttgtcgcctgcgccggcgtttgccgcagctggagacaaatcaccatagacattgtcaaaacacccgaactctcctccaagatcaccttccccatttctgttaaacgacctggcccaagggagaatctcctacgatgctntataaagcgcaaccgttccagccaaacatactatttgtatctcagtttaaccaatacactagctgaagatgggaagttccttcttgctgcacgcanatgcagacgtccaacctgcacagattatatcatctctcttgatgcagatgatatgtcaaagggaaagcac

SEQ ID NO: 6655 - DNA, 470 bp, Glycine max
  Clone ID: PAT_MRT3847_106018C.1
aaacatccgaagggggattctgcttctgaagttgaacttgggaatggggagaaagggaattctcctgttgtatcaccattaaagacagcttctacagaagtttcgcttctaactgtaatagataaatcgaaggagaaagaaaatcacagggaaaaagttgttcctaaggatttcttttcaagcatgaaagatatagaattcctctttgttaaagcctctgaatctggtaaagaggttccaaaaatgcttgaagcaaataagtcacactttcgtcctctatttccggccaaagaaaatcgtttggtggcaccctcatttttgaaggcatgtttctcatgtggggaagaccctagtaaacttcctgaagaacctgctcaaaactctggtaagtacttaacttggcataggacaatgtcatctcgatcctattcatccgcaaaccctccgggagcaaactcaaaagctgatgt

SEQ ID NO: 6656 - DNA, 258 bp, Glycine max
  unsure (1)..(258): unsure at all n locations
  Clone ID: PAT_MRT3847_106019C.1
ggttactatctcacatatccacatgcaaatgcaacccgtggttcnctaatgatncattgcttctgttgaagaatcctatgggttctcactgtctctctctctctcccgacattatctctctttatatgagctgctcaangntgagtttctaaagngacagaaaaagagagcaaagggttggcattgatccctttgcacaaaggaaaagagggttgtgctgtgttaaaaaacatattgaacttggtcggttcagagttg

SEQ ID NO: 6657 - DNA, 685 bp, Glycine max
  Clone ID: PAT_MRT3847_10601C.1
gtctcgtggccacacgagctttaccactactagggcggcaaaaccactgttcttagcttctgcatgtgaagtgaattcttgcaatgcttccttttctccacggtgagcatgaataacaacaattgctggttcttgtaattattattattgcaattccattttgtgacttccctgttgcttgttaattagtgtgacccagatggtgttttgagtatttgtttggagattcattcagtattttgagagatttgtatgataaatatggatactttgctcaaaacacccaacaagcttgagtttttgcacccacttcacggttactcggaaaaattgagcaattcatgttcctctagggtgcaaaatcagtattttgggtttggttccaagaaaccaattgtgagatggggtaaatgtggtaacttgagggctagtagcagtgcccttttggagcttgttcctgaattcaagaaggagaatctggattttgaacttcctttgtatgattcttcaaagggtgctatggtagaccttgctgttgtgggagagggccctgcagggcttgctgttgcacttctgaactctggaaatgggctttctgtttgtgccattgatccaaaccctagattgatttggcccaataattatggggtttgggtggatgagtttgaggctatggatttgcttg

SEQ ID NO: 6658 - DNA, 202 bp, Glycine max
  Clone ID: PAT_MRT3847_106020C.1
gtttacctgtcatgtttgtttctgttgaatgatgaacttgttaatcctcgttgatcccattacttggtaaacaggattgctatgtggatttgacttttgtgggaatttgttttgtgtaagttatggaacttgatattttttttaattagtagatgttagcttttaattgttgttagcaaggagattcgaacttacggcaaaa

SEQ ID NO: 6659 - DNA, 408 bp, Glycine max
  Clone ID: PAT_MRT3847_106021C.1
ttttttttttttttttttttttttttttttttttgggtttttgttttttttttttttttttttttttttgggggcgcccccaaaaaaagcctttttttcccggaaaaattttatttaaacaaaatttacccccccctttaatggcccctgggcccccccaattaatttggaaaaatttttacaattcccccaacattggaacaaattttcccacggggccaaaaacccgcaggaaattttcctgaattatttttgacaacaactccttgagggccatttggggtaattactgtgtttgccttttaaaaaaatcccctttttgggggaaaaaacacccccccccaagggccaaaatttaaaaaaaaagcggggaataacctaaaatttttcggcccggaacaaggattt

SEQ ID NO: 6660 - DNA, 1294 bp, Glycine max
  unsure (1)..(1294): unsure at all n locations
  Clone ID: PAT_MRT3847_106022C.1
gcgcatggaagcagtgaaacgacggctcgaggtgaaacgacgctaaaaaaacaaaagaaaggcacaagcgaaaaacgaaagacagatcgtgtaaactctcattctcaaaaaaatacctttgaagtccaccgtcgtgtaaccctagcataccaccctgccgtcaacggtcatcactctccgtccaccgtcgcagtcggagcagccaccaggtccgtcgaagctcgtactctgaagtctgttcttcacttcttcccctctgtacttgatttctcagaaaggagtttagggagaaaccttggcaagtagaaaattagaattttaaatggccatgagaggaggaaggaagaatttgaagagggcaacagaggaaaaacatataacccttcaagatggccaaggcatcatgcaggtcgtgtctcttcgaggtgctaatatcattgaggtcatggatgcaagtggcaacaaattgctagctctattccctgctaaaattcagaaaagcatgtggattaaacgagggagctttgttgttgttgatgaaagtggaaaggaaaaggctcttgaatcgggtagcaaggttgcatgccttgtttctcaagttcttttctcaaaacaagttcgagaactagagaaatctccagaatggcctgaaagttttaaatctgcaatggtagatgattcaatagaaagtacaacctcccaacaagagcatgagctggaggggagtgatgatgatggactacctccattggaagccaatacaaacaggataagacctgctgagttgcaagctgatgatgaagattcagaatccagttcagatacagatgatgattgaaccatatagttaggctttcatgcctgcatatgaattattacattcaagctaaaccgacaatgtatgttatagaatgttcttgtcctatctttatgtgttgattctgctgaacatttgtgtttcagctctctcaactaaaagagtgtttcagtctcattttctttcctttttttggggggaggagaatattggttcgaattctctcagtttatattttattaacttaataagaaaattacagcacataacttattccctttantgagggttaattatagcttggcactggccgtcgttttacaacgtcgtgactgggaaaaccctggcgttacccaacttaattcgcttgcagcacatccccctttcgccagctggcgtaatagcgaagaggcccgcaccgatcgcccttcccaacagttgcgcagccctgatggcgaatgggacgcccccctgagc

SEQ ID NO: 6661 - DNA, 165 bp, Glycine max
  Clone ID: PAT_MRT3847_106023C.1
acccaccaaccccttatcattcactcccacctatcttcaactctaaacccaatatacccacttaccaccatcacataccctattatccaaatttaccaatctctttcaattcattaaaacatcacccttcccaaaactattcactactaccatcatcttaatcta

SEQ ID NO: 6662 - DNA, 356 bp, Glycine max
  Clone ID: PAT_MRT3847_106024C.1
gtctctgcacaacacttttgtgtgagacaaccctttgccgcacagaaaattagtgttagtaaattctgaggcttctgtacatttcctatgtcagggtctcacgcgactccgctgtgaaaccttcactgcatggctccctcactgccctttgaagctcgaactttgataaccatcgtgacttgggctgatcctggaaatgagttctcgtattcggcgttctgggtatacgcttgtggctgcacctgacatgcttcaccttcatttttggcaacatagtgagtgcatgaggcgatgcagctttgcaagggactgttgccattgatgacaaggatgtgattggaaccatcgctgatgat

SEQ ID NO: 6663 - DNA, 252 bp, Glycine max
  Clone ID: PAT_MRT3847_106025C.1
caacgtgtcgctgatgaagagctcaaggctcaaaatgctgctgttgacaagatgtgttctactgaggatcataagttcgcagaaattatgaaccctagacaaagtgttgtaggtgatcttaaacatggtacatgatgggaaggagctggaggacaccatgtctcctgttgtaacagtactgcatgggaaaattatgtgattgaaatacccctaatggcacaagatgaaattctgttttctagagcaagttat

SEQ ID NO: 6664 - DNA, 251 bp, Glycine max
  Clone ID: PAT_MRT3847_106026C.1
cggccgggccggaaccgctggaccgacccggcgctgctccaggcgccggccgcaaaccgagacaaggaagcgacccggggccagaacacccaaaaaagacacgcaggagccgaactccagagggaagagaatgactcactgggctggccacagacgtcgtgaatcacatactatgccacagctaggacctgagacgaacactgtcacatcagacgacagacctcgaggcaaaagaaaaccgtgtcagatgg

SEQ ID NO: 6665 - DNA, 503 bp, Glycine max
  Clone ID: PAT_MRT3847_106027C.1
tttttcctttattttttttctttttttttcctctttttttttttttggttttttggggttttttttttttttttaaaaaccccaaattttttcccaaaaataaaaggccccccccccaatcaaaaaaataaagggggaaaagggggacccccccaattggggggaccccacccataaccaaaacccccccttcccaagaaaaacccccccgaaaaaggggctttcaaaatttttgcccccccccattttctaatcaaaccgcccccttgaaccccggggacaaaaacaacaaaacacctttgaaccccgggggaaggaaatatgaaccctttcggggcctccccctattgtcttgaattccaaagggggggtctccaaagccttcccccctttttattgggggccggatatgcaaaaccgcccgcccttttacccattttgggggacgccaaaagaagggcccctccgggggggggacaaccccccgggtatgaggggccccc

SEQ ID NO: 6666 - DNA, 2026 bp, Glycine max
  unsure (1)..(2026): unsure at all n locations
  Clone ID: PAT_MRT3847_106028C.1
gaaatttacgaattacgagaagagaaaaagagtttctgagttgacattaaagatatcgttgaggtaaaggaccaacaccaaccaaaaccaaattataatagaacgcggaagaagaagaagaagtaaccgacgcttgaataaaccgaccctattccgttgttttattccaattgacttgattttctcggaaaattcttattttccgagaaagttcgtgtttttactgttgaatcgggaattcccaaatcggggtgtctgaaattttgagctgtcggaaccgttcttcgattcgggttcaagttcgaagaagaaaagcgatgagttcgggtagtagcagcagccacagcagtgagaaggagaaggagaagcagagagtgagtcgcacgtcgctgatactctggcacgcgcaccaaaacgacgccgcagctgtgcggaagctcctccaggaggatccctcgctcgtcaaggccagagactacgacaaccgcacgccgctccacgtggcgtcgctccacggctggatcgacgtcgccacctgtctcatcgagttcggcgccgacgtcaacgcgcaagatcgctggaaaaacacccctctggcggatgcggaaggagctaagaagagtaatgtgatcgagcttttgcaatcgcatggaggcttgtcttttgggcaaaatggaagccatttcgagccgaagccggtggcgccgccgttgccaaacaagtgtgattgggaagtcgagccgaccgagcttgacttctccaactcggtgcgaatcgggaaggggtcttttggtgagattttaaaagcccattggcgtggaacaccagttgctgttaaacgtattcttccatctctttcagaagatagattggtgattcaggacttcaggcatgaggttaatttgttggtgaagcttcggcaccccaatattgttcagtttcttggagctgttactgacaggaaaccccttcatgttattactgagtatctaagagggggtgatcttcatcagtacctcaaggaaaaaggcgcacttagtcctgcaacagctatcaacttttccatggatattgtcagaggaatggcctatcttcacaatgaaccaaatgttataattcatcgagacctaaagccaaggaatgttcttttagtcaattctagtgccgaccatttaaaagttggagattttggatttgagtaagcttatcacggtccagagttctcatgatgtatacaagatgactggtgaaactgggagctaccgctacatggctcctgaagttttcaaacatcggagatatgataagaaggttgatgtgtactcctttgcaatgattttatatgagatgcttgaaggtgaaccaccttttgcaagtcgtgaaccttatgaaggagcaaaatacgctgcagagggacacaggcctcattttcgggcaaagggttatacccctgaattgcaagagttaacggagcagtgttgggctcatgacatgagtcagagaccatccttcatagagatccttaaacggcttgaaaagatcaaggagaatttacctacagagaatcactggcacttgtttacctcataaatgtctaatagcattaatttgttcagaaattaagatgatttatttaacattaccattctctggtttggtgccggatttatggataggttgagcaaacaaacctgcaaagtcaatacttgttttcaactgtttggattaatgagcagaaaaggtgatgttgattgccctgacattagattctgacatgaataaagcctttggttgctattttttatatcatgttacagttactttaaccaaatagagacatatagcagcaaattctgtcgttactgttctatttttctactcttggcatctttgtgtccttttagttgcatgatgattgcttctggctcggggctggcctcaggtaccgtaaccaaatananacatanagcagcaagtctgtcattactgtttnatntctactcttngnctctgcgtgccccttcac

SEQ ID NO: 6667 - DNA, 160 bp, Glycine max
  Clone ID: PAT_MRT3847_106029C.1
tcgcaagcgcggttatgttgcctcgaactcaaaggatgatcctgtcaagggcgctgatagctcgactgcccaggacgtcatgattgagaaaacaggtcagattggaaatggctatgcccctgttcttgactgccacacttcccacatttttttactattt

SEQ ID NO: 6668 - DNA, 493 bp, Glycine max
  Clone ID: PAT_MRT3847_10602C.1
ctcgagccgattcggctcgagaagattcttattaatcttgatcttgtggctctgcagcccaggcgatcacgtctatgacgttgctggtactggtggtgctggtggtggtgattggcgcgatcgccgacgatgccaaacacgacgaccacaaggatcacaagtctgactactgcaattacccctttcacttgttgaaagtggagagctgggtgaactgtgaggaagggcatgtacgccatggcctcagtgccagatttggctctgtggtgcctgacaaacctgacaagactgacaaaactgccacaattttcgctaattccattgactgctgatactgttgaactcataagatttctgagtcatctgctctatgtgctctctggggccgtgacttctctgactaagctgattaagctcattctggagctgctactgccatttctgtcatttacgactttcaagatctctttgatatggtttgcttcgatatgct

SEQ ID NO: 6669 - DNA, 630 bp, Glycine max
  Clone ID: PAT_MRT3847_106030C.1
ctcgagccgaatcggctcgagtacggctgcgagaagacgacagaaggggggggcagcaaatgcaaagcataaaagtataatataccccacgcgctttaatcccccgacgaaatttacgagcaagaataaaaaaaaataaaaattatgaggtgacattcaaaatatcgttgagcaaaggaccaaccaaaaccaaaaccagaagataacaattaaaccgttcttcttcgattcaagttcgaagaagaagcgatgagttcgggtagcagccacagcagtgagaaggagaaggagaaacagagggtgagtcgcacgtcgctgatactgtggcacgcgcaccaaaacgacgccggatcggtgcgcaagctcctccaggaggatccctcgctcgtcaaggccagggactacgacaaccgaacgccgctccatgtggcgtccctccacggctggatcgacgtcgccacgtgcctcatcgagttcggcgccgacgtcaacgcgcaagatcgctggaaaaacacccctctggcggatgcggaaagagctaagaagagtaatgtgatcgagctcttgcaatcgcatggaagattgtcttttgggcaaaatggaagccatttcgagccgaagccggtagcg

SEQ ID NO: 6670 - DNA, 434 bp, Glycine max
  Clone ID: PAT_MRT3847_106031C.1
gttgtaagcatcaataatatacctttgggatattacatgaaattccacattttgtagctaacccccatttcttgtttctcctttaaaattaaaaattatttgctagagttgcatttctttgcttttctcctcccaattctgttacctctaaactttggttacttcctaatcagaattcttagtatatgagataccttagtggggggattcgagatggagatagacttgttatagccccacacaaacatcccctgtttgtctcattttgcttgcaatgcatattattttgattgattactgtctgaatatgcctcatatttgtgtgtgtgcttgtttgaattggttgagtttttccataattgatggcaaaacctattttgttgaaaagagtaaagatggtctgatgcataaatgtgttacttgctttgaaatct

SEQ ID NO: 6671 - DNA, 124 bp, Glycine max
  Clone ID: PAT_MRT3847_106032C.1
tatcactgtggtgtcaattcgcaatgagctcgaccaaggtattggaacaatcatcttgctcccatatagaatccgtattatagtcgcaggccatcctttgagccttaacttcgattcatttgca

SEQ ID NO: 6672 - DNA, 465 bp, Glycine max
  Clone ID: PAT_MRT3847_106033C.1
ctattgcaaagagcttgaggattatatagattgttattgtactgcacaacaaaacttattctggtcatgactgaggatttccaatacaacattgaggttgctacaatgcctaacgcgggaatggaatccacacattcagagaactacctttgtcacatattagaaccatccaagaaggggcctcccatatttccactaacatggtttgaacaaagacagacccaaccctactaagaaatgcctatcagatccttaccatcccaagggagaaaacaagcaggttacggtcatggctatcacaaaagggttgcgtcagcaatcaagcatgcccccacgcctgggaccctgttgtaagctgcccttgtgaactaaaaaaatagatatcctgcatttattgtgtttctcccaacctataaaaaagcaccaccgtttgtatctccatataacaaagtgctgccttccccc

SEQ ID NO: 6673 - DNA, 310 bp, Glycine max
  Clone ID: PAT_MRT3847_106034C.1
ggctcgagggattgtgacagtttgtctggaaggccttgaaaacatctttcaggaataattgggagacgtattttaatgaagttagaccattggaagcagagagatttaaggcacttcgcatacagtgggcacaatattatctaaaagttagaaatcaaacataggatgttaggcaactatgtaactttaggttaataaattagtttacgtactttgcattatattttttacaattgttgtttcatcttaacattgaacaacctttgttgatagctagttttttgctaaaatctatttgaaaactgaatgc

SEQ ID NO: 6674 - DNA, 530 bp, Glycine max
  Clone ID: PAT_MRT3847_106035C.1
gggaacaagatatattctttcgcccaaaagcttaagacattaatatgcctatattttcgatttagcaaaataccctgacggtttttgatacactcgggttgaagaactgagaacgattatcacacaaatggggacaccgccgatgaccattttcacatcttgaaaagggcacaatgttcataagtgtaaaagacatctgagggactctccaggggtcataagatcgaaggcctggtttatctccttgacaggaagctcgtgagtgatagaaatcatataacttcaccactccattcatgcattctttggcaaaatgtggcaattgagtcttacctcagatgcctccgaaagttgaacctactattctgcgaccatggagcaacgccattgggtggatcggaagcatttttcgagagggatgaatccgtactagcacagtcaatccccaaccctcatgaacagacaagaaagcatgccttactacgttcaaatttgcagcacattgcataatatagtgcacgcccccacca

SEQ ID NO: 6675 - DNA, 369 bp, Glycine max
  Clone ID: PAT_MRT3847_106036C.1
gggacgatatgtttttttcgtggacggacacgcgggctaaccaaagggggggtggctcagacccgtccatgggtgaaattgcacaggacaccgaattaccaagggaacgtcctgagctgacggacaaactcggaatagcacaaccaacaggtgtcctcgctctatgggccacctagaacaggaagaacattgctggctaaggaagaggatgattgtactgcctggacagtacataagggtgtcggaacctgaataagggcaaaatgacactgaacaaggacttagaaaggccattgaactttctgttggggcgaggcaacaggcagcatcaaatatcttcgaggacgatggtgacagagattgcccccg

SEQ ID NO: 6676 - DNA, 530 bp, Glycine max
  unsure (1)..(530): unsure at all n locations
  Clone ID: PAT_MRT3847_106037C.1
cttcaattcaattttcccaataaaatgatttcccccaaagctggaagtttaaaagaaatttttgtatttatttcaatattttcttatgaactgtttttaaaaacactccaacatattaaaaaatttatagtaatatattgcaagttttaggttttaggtttggatcttaatgtctcaacattgtaatttttaaaaatagttggacaaattacagtttttgcaaaagcaacacttgggcacagtaagtttttaacattcatgagtaaggtgatgcaaaaagattataaaaaacatgggactatgaaaaattgttataaataagaaaaacttgcatggtagagcgattagctttatgggactgcaaatcttcttcaaactcccatttgatgctttacatcataaaatctctcattttaatttactgcataaaattaaaatatgaacttattaaatactaattattaccttgagcgtttttcttgcaatggaaatatatacgactaanatgaaatacaatttataaaattatt

SEQ ID NO: 6677 - DNA, 184 bp, Glycine max
  Clone ID: PAT_MRT3847_106038C.1
ggttaaaggggtggcctccacttcttaaaccagcgtgggtactgttgaacctgatttagaattgcttgctgtgctggaaaaaaatccatagttggcgtttgccttaacttgtggacaaggtggtagcataccgatcgaacaaaccgtgaagctgattggcatgaccagagaagggagtgggaac

SEQ ID NO: 6678 - DNA, 658 bp, Glycine max
  unsure (1)..(658): unsure at all n locations
  Clone ID: PAT_MRT3847_106039C.1
ccacgcgtccgtacggtcttgcgaaaaaacgacagaaggggggtcattgtgtacataatgcttcctttcacagacctttctccctcccccaacgttcatgctttttttctccccttttcttctcttccctctctcctgaccttccttcttcctttcatcttcttttttttccctgccactccccctcccctccaccttcttccttctcctcccttcctccttcaccctgcgcagccctccgccgcgaccgtctgcgtccctcagccgcgactattcgcagtcacctccaaatatgttagagatcttcagggttttgtaccctagagatctctgattcccccttattgaaagatctacacaaggccaaatcttgagctcaagatctagcactaaagttgctcttatgcgtttatgaggtgttgcaggggttgttttgttttggggagtggggaagggattaattaaaggtgtttgcggcggggtttatagtcctcgtgagctgagcaggaaaaaagcangagtgggaggagattattaggattaagaatgagatgggaggggaaagatggtgcattgttggggacttcaatgctngttgtagtgaggaggaaaagaaaggggtggagacgaatccgagaaggatggaatgatgtaattt

SEQ ID NO: 6679 - DNA, 289 bp, Glycine max
  Clone ID: PAT_MRT3847_10603C.1
ataaacgatcctttccttatataaacaacgcttattattttgacaccactggttcctaattggccaaaaagctaatgacccaacaggaaaagccaaaaagaaaaaaacccttagaagatatagtgaccaaattggaccaccaatccaaaagcccgacggtcgccttccaaacggaaggggaaaacccaaactttcgcaaaaaaaaaaaaagggggggcctcttactaaaaatcaacgcccatcccccaaaaaagtaggaaaccctttataaaaaaaatgggacgccacc

SEQ ID NO: 6680 - DNA, 2636 bp, Glycine max
  Clone ID: PAT_MRT3847_106040C.1
tggacgcctgcgccccgtccgccctccccacccaaaccgcgtccggccccttctgccctcccaacccatatacttaaaaaaaaaccaaaaaaccaaaaataccataaaatttttcagtttctccgccgccgtacagccaccacctccccgttcggatctccggcggacctactatccctactactctatttacacggaagaacaaaaaactatcccccaccccaaaaaaattccaaaagcggttcggttagggtttagttttttttttatattatttcgtgtatctaatttttcatcagtaatattatttttgaggcggcgagatggcgcagattcaggtgcagcatcagagtccggtgtcggcgctcctcctccgaacggcgcgtggctaacgcgccgaacaacccgaaccagttcgttacgacgtcgttgtacgtcggcgatcttgagcagaatgtcaacgacgcacagctatacgatctgttcaaccaggtcgtccaagtcgtttcggtgcgcgtttgcagggaccttacgacgcgtcgttcactcggttatggctatgttaatttcagtaaccctcaggatgcggcgagggcattggatgtgctgaatttcactccactcaacaacagacctattaggatcatgtattctcatcgggatcctagtcttaggaagagtggtactgcgaatatttttatcaagaatttggataaggctattgaccacaaggccttacatgatactttttcttcttttggactcattctttcttgcaaaatagcaactgatgcttctggcctgtctaagggctatggttttgttcaatttgacagtgaagagtctgcacagaatgctattgacaagttaaatggcatgttgatcaatgataagcaggtctatgtaggccattttctgcgaaagcaagatagagagaatgctctcagtaagacaaaatttaataatgtctatgtgaaaaacttatcagagtcaaccacggatgaagagttgatgaaattttttggagaatatggtaccattactagtgctgtaataatgagggacgcagacggtaaatcaaggtgttttggctttgtcaattttgaaaacccagatgatgctgccaaagctgttgaaggacttaatgggaagaaagttgatgataaggagtggtatgttggaaaagcccagaaaaaatctgagcgtgaacaagaactgaaaggacggtttgagcagagtataaaggaatctgctgacaaatatcaaggtgtgaacctgtatctcaagaacttggatgatactatcagtgatgaaaaacttaaggaaatgtttgctgaatatggtacaataacttcatgcaaggttatgcgagaccccactggaatcggtagaggatcaggatttgttgcattttcaactcctgaggaagcatctcgtgctctcggtgagatgaatggtaaaatgattgctggaaaacctctgtacgttgcccttgcacagagaaaagaagacagaagagcaaggttacaggctcagttttcacagatgaggcctgttgcaataacgcctacttgttgcgccccgaatgcccccctccatgatgcctccacctggtcttggacaacaatttttgtatgggcaaggacccccagccatgatgcctccacaagctggatttggataccagcagcaactagttcctggaatgagacctggtggtggtcccatgccaagcttctttgttcctatggttcagcaaggccaacaagggcagcgcccagggggccgccgaggaacaggtcctgtgcaacaaccccaacagccaatgccaatgatgcagcagcagatgcttccaagggggcgtgtctatcgttaccctcctggccgcaacatgcaagatgtcccacttcaaggtgtagctggtggaatgatgtcagtcccttatgacatgggtggtctgccaatccgcgatgctgtgggacagccaatgcccattcaagctttggccacggctcttgcaaatgctccccctgaacagcagaggactatgctcggtgaagctttatacccgcttgtggatcagctggaacacgatgctgcagcaaaggttactggcatgcttctggagatggaccagcctgaagttttacatctgattgagtcaccagatgctctgaaggcaaaagttgctgaagccatggatgtgttaagaaatgttgctcaacagcaaactaacccagctgatcaactagcttcactctctctcaatgacaatcttgtgtcttagattcctttagtcttttgactggaatctgctttccagttattcctattccgtatgcttccccccagtttatttgcaggtgtcttagatgttttgttttagtcagagtactaaggaagtttatgttcttggtacttttggtttcactttttttcgtatctgaattgctgtaggatggattagcataacttgttggatttattagatatgcatttgcggtttggattattttcctccattgttctattatattgttcgtgtgaacttctttaattaataatttgttgctaagaattgtgtacattgtgaaggaacaatagaaataaaatataaccatatataaagtatattt

SEQ ID NO: 6681 - DNA, 473 bp, Glycine max
  Clone ID: PAT_MRT3847_106041C.1
gagagagaagttgagagaggagaaggcggacttaagggagggaattggtgatgataattaagcgtaactttagtattgcagaccagaataccctagctgatattgcctatcagcatgagctctacttaaagccatgcttatagtaaggggaaggttctcattgctagcaaagttccattgcctgattatcgcgcagatcttgatgagcgtcatggatcaacacagaaagagattaaaatgtccacagacattgagagaagggtaggaaatcttttgaatagctcacagacaactggggcaacactgtctagtcttccttctatatcagctgaccttggacaaaaacaatctgcagcccctataaaatatgtttgtgtacgacagactgattcttgtaaagaagaacctagtgttgcactcaatgaaaggcaagaacttgtacaggccagcgataatttgaggaaatgaaatca

SEQ ID NO: 6682 - DNA, 1048 bp, Glycine max
  Clone ID: PAT_MRT3847_106042C.1
gagcgtgaacaagaactgaaaggacgatttgagcagagcataaaggaagctgctgacaaatatccaggtttgaacttgtatctcaagaacttggatgatacaatcagtgatgaaaaacttaaggaaatgtttgccgactatggtacaaggccttcttgcaaggttatgcgagacccgactggaatcagcagaggatcaggatttgttgcattttcaactcctgaggaagcaactcgagctcttggtgagatgaatggtaaaatgtttgctggaaaacctctgtatgttgcccttgcacagagaaaagaagagagaagagcaaggttacaggcacaattttcacagatgaggcctgttgcaataacgccttctgttgcgccccgtatgcctctctaccctcctggtgctcctggtcttggacaacaatttttgtatgggcaaggacccccagccatgatgcctccacaagctggatttggttaccagcagcaactagttccgggaatgagacctggtggtggtcccatgccaagcttctttgttcccatggttcagcagggccaacaagggcagcgcccagtgggccgccgaggaacaggtcctgtgcaacaaccccagcagccaatgccaatgatgcagcagcagatgcttccaaggggacgtgtctatcgttaccctcctggccgcaacatgcaagatgtcccacttcaagttgcagctggtggaatgctgtcggtcccttatgacatgggaggtctgccaatgcgcgatgctgtgggacagccaatgcccattcaagctttggctacagccctcgcaaatgctccaccagaacagcagaggactatgctcggtgaagctttatacccacttgtggatcagctggaacatgattctgctgcaaaggttacaggcatgcttctggagatggaccagcctgaagttttacatctgattgagtcaccagatgctctgaaggcaaagttgctgaaccatggatgtgttgaaaaatgttgctcaacagcaaaccaacccagctgatcaacta

SEQ ID NO: 6683 - DNA, 404 bp, Glycine max
  Clone ID: PAT_MRT3847_106043C.1
ttttttttttaattttattttttttttttgttttgggtttcagcatattcaaaataactataaaacccccattcattacatatccaaaagctggaaccgcccaataaattcagaacagccccaaactaattattctgcattttcaggaaacaaaacacaattaccaaagctcctacaaagtttcattccattctttgtggcccaaaataccacaagagaaaaaaaaattggtttccgttggtgcaacccagcagtgagagaggttcattattagcgccgcccccctttccatgcgaagaaaaacccacatttcagtctttcactattccctcttttgcttcacaaaaaaaaaaaaaaaaaaaaaaacatttttaggagttctaaaaaatgccaaagaattttcc

SEQ ID NO: 6684 - DNA, 555 bp, Glycine max
  Clone ID: PAT_MRT3847_106044C.1
ctgtttcttgttggaatttataataatacctaattcgaagccatgaaggttactagtgcatttttttgaatgctagccttcgtattaataaatggtggcattattaccaattgaagtgagagggaaaataataacaacacgctatcaatacccattaaacttttgcggccaggccattggatggaatgtctctctcaagcattatttagcctttggctataattttcaactgactaatgaccaatgactaatgatatgtttaaattaggataggctatttaatttaaccattttaactttattgtgccctatgctttgtatgcatcacgattttaagaagggaagggggtacaataatgtttttttaaaaattgtcaactttggagaaggagaagtggaactggatccctgcagttggaaactgcaccttgtgcagttattatctcaggttttgtactaatttttttagttgttttctttattttctaagggtcttgctaatatctacttggttaataaaaaaattcacttttaaatatccaactagtatcctag

SEQ ID NO: 6685 - DNA, 230 bp, Glycine max
  Clone ID: PAT_MRT3847_106045C.1
attttggtatgggtgagggttgtgacagttgcagaaacagaaagagttgttgttgtgtcccgccatgtcactagttaccaaacaaaaagcttttcattccgctgctcattctcagcctcttattactccacaaccttagcttaagcttttcatacactaaactaactctccctcaaataccatttcccaacaaaacacatttcaattccctttccttcataccagcccac

SEQ ID NO: 6686 - DNA, 379 bp, Glycine max
  Clone ID: PAT_MRT3847_106046C.1
ggggacaaagaaaggttaccccccttttttttttttccccccacccccaagaaaaaagaaacccctccccaaatttaaaaaaaaaaggggaaaaaaaaaaaaattaaggggggggttgacaaaaaaaaaagaaagggccgggcccaaaggggaaaaaccaaacgggggggcaccaaaaggtttaaaagggcctaaaacgggggccccccaagggtaaccccccttccgggcccaaaattatttggagggggatttggtctttttggggcggcctaaaaaaagttgcccctaccgcttttgggaaaatctgccaaaatggagggggcctaaactggggcccctttgggtttaaaaaaaaccgggggaagaaacccccttg

SEQ ID NO: 6687 - DNA, 492 bp, Glycine max
  Clone ID: PAT_MRT3847_106047C.1
gccacaactacctcgcaccaaaacatgttcaacagtcctagatctattcataacctggtggcacattgttgggcgcaatatcttcaaggaaaatggcagcaccgcctgccggtgaccgttggggggcgatggaaaggaaatctcatattgacaccattgatttgacgaattcatctcccgagccagatcagcattatcgcatgccattgaaacagcagcgacttccaaactacttcaaggaagagccacggaatgaatctcgtagcacacccagggttaagaccgaacggaaggcggcggaaatgagaccgctcaattctcaacgacgtgcgcgtcagatcgaccctcaacaccttgcccgaatcattgatacaagcagtccgcatactgtcaaagcggtattgctggatctttgcaagctctcacctgcattatctggagcccttgcgcgtggccttgcgccccactcaactttcgcgcagagcctcaaca

SEQ ID NO: 6688 - DNA, 469 bp, Glycine max
  Clone ID: PAT_MRT3847_106048C.1
gaattggatttaggtgacactatagaatacgaattctaaaataaatggaaattgtactaacaagattcaacaccattggtttgattttttaaacatgttgatagaggttttgactctctataagtatgaaaaaaacaaaattacttcaacgtctcgaattgataccaattcattcagtcaaagtgtccacggcgttttcatgccccttaactgagaggtgcactgtgttgatggggaatcggcaaagaccttcatgtacacgtcctcgagggcagcaatcatggcaatcagaacgtcttagctttcaattatatatgggaatatatacctttttggcaaaactaaaaaaataaaatgaatattataaatcttggtcttataattatatatcaatgatcaaaattaaaaattagttagtaattatatcaacactcagaaaaagttattttcataacactaaccagacact

SEQ ID NO: 6689 - DNA, 268 bp, Glycine max
  Clone ID: PAT_MRT3847_106049C.1
gaattggcagcggctcaagtatggagtggacctcaatggggatggtcttacactaaaattcaacaaagaactttttaatacggttattcaacaacagatatcttatattaaaaacaaactgcggacagagaagttcaataacaaaatatccaataatactttcaagatcttcactctccaatacacatcaccaatccttaataattttctcactctcaatacttataatcacattctcacacatcaccccaaacaaacatcaaacctg

SEQ ID NO: 6690 - DNA, 405 bp, Glycine max
  Clone ID: PAT_MRT3847_10604C.1
ctggtacgcccgcaggtcccaattcccgaattccaccgacgccccacgcgttcaattttacaacaaaagcagaaagccctaacactcgcggatttaatagtgctcgcatgtagttaacacgtgagaacataaaatagttgtttaagttactgaggttccattgatgtaaacgaaccctcacctagagaaagtggtaatcatgccagacaacgtgggatgaaaagtgttgtacaaataatcacagttcgatggcaacttttaattgatatagccaccttaataggttacccactctatggaccaagcaggaactgatgaacagggcattcttatatattgagctctgaggaggtgatgttaatttgctccttgaaaagacacacctgctgttggcttgttgttggg

SEQ ID NO: 6691 - DNA, 180 bp, Glycine max
  unsure (1)..(180): unsure at all n locations
  Clone ID: PAT_MRT3847_106050C.1
ccttggaaacagaaattttattngccggttctggaaatctgtcaaggaatcatataattcattgggcgtttaaaagactaattagaggggctggaggcacttcaacctaggtggaaggttataacacctaaaacattgtttccacaggggaaatgtgaaacttaccttttatgggagacc

SEQ ID NO: 6692 - DNA, 814 bp, Glycine max
  unsure (1)..(814): unsure at all n locations
  Clone ID: PAT_MRT3847_106051C.1
ccacgcgtccgcaactacatcgtcgtccgaaacccatattggcgcgttggcgttccaacgtttcggtctggttaacccatgaccgggccctccggtcgatccggtccgagcacaagggtttggtcgaaaccgcttaccggttcctgctggagcacggttacattaacttcggcctcgcgcaggagatccaaaccctaaagctgaaacctttcgatgggtccgaccgaggaacggtgattgtgatcggtgctgggttcgcgggtttggttgcggcgagacaattggtgttcatggggtttaaagttgtgattttggaaggtaggacccgacccggtgggagggttaagactaagaagatgagtggtgatggggttgaggctgcagcggatttcggtggaagtgtcctcactggaataaacgggaaccctcttggggttcttgctagacaattgggtttgcctttgcataaggttagggatatttgtcctctctatttgcctgatgggaggagtgttgactctgaggttgactctagggttgaggtttcgtttaacaagctgctggagagggtttgtaagcttaggcaggcgatgatcgaggaggtgaagtcggtggacgtgcccttggggaccgcgttggaggctttccgaagggtttatatggtggctgangataaggaggagaggatgttgctgaattggcacctcgcgaatttggagtatgcgaatgcgacgcttatgtcannattgtcaatggcgtactgggatcaggatgatccctatgagatggggtggggatcattgcttcattcctg

SEQ ID NO: 6693 - DNA, 514 bp, Glycine max
  Clone ID: PAT_MRT3847_106052C.1
cattgacagcagaagtcacttttattctttttaccagcacatttcaagagaacctatgacgcaaaaattcctatacccagtctctcattatgtgctccgaagacaaaaagccggagtggtcatgcatttcaggggaaaatcatatcgtcgtagaagcgagtacaaaactttcccgacaccagaagtcattgaagccatccaggtcgaggggtcatgccaactcattcgcttatttcttggcagccttggcagcggacttggtaaccttaccggaaccagcagcggccttctcaacggacttgatgacaccgacggcgacggtctgacgcatgtcacggacggcgaaacggcccaaaggagggtagtcggtgaaagcctcaacgcacatgggcttggagggaaccatcttgacgatggcggagtcaccagacttgatgaacttggggttggcctcagtagccttaccagttcggcggtcgatcttctcgagaagctcggagaacttgcaagcaat

SEQ ID NO: 6694 - DNA, 322 bp, Glycine max
  Clone ID: PAT_MRT3847_106053C.1
gggcttactctactctactcttagctagatgttaatctggcagtcgacttgagctcttgcccctagaggaaaggtgggggctttcgtagttcaggactgtattttgggccttcatctcttaccatatttctactacctgggagagactgatgaagtctataacctaaagacatgatagaaggaaaagataaacgttaacagagatcataaagatggctgttaccgtctagccctgatgtgtggatcggacgtgactataaagccgatttaagtattgctgtttcgatgactgaatcacaaaacgatatgcagagtgacccct

SEQ ID NO: 6695 - DNA, 661 bp, Glycine max
  Clone ID: PAT_MRT3847_106054C.1
gcgctctaccaccccctttggctctctattgacggccgcctccctgtaccctccattctccactttacaaccttttaagcaactccttttgctttattgatgtattcttcattttaagcaccatcattcttcctattttgttttccaatattgctgtttgttgtggtaaatttttctgtagttcatcatcatgctagaaggcaaggctgtgattggtgagactgacatgcttcagaccatgcagcaagatgctatggatttagcatccaaagcactcgatttctttgatgtcactgaagccattaagattgctcgatttataaagaaggagtttgataggatgcatggacctggttggcagtgtattgtaggcactgattttggttcgtttgtgactcactgttgtggctgtttcatctatttctgcttaggcaacttggcaattttgctattcagaggctcggctgctccagaggcacatgaaaatcggttctcagcactagatgcagccaaagcataatttcattgcctaattaattttccctctcttttgacttttctgcatatttgtctgtgctctccatgtcatccattgatattgcagcttgctctggggggtttttatatgtatatatagtaacccggactataattaaaactt

SEQ ID NO: 6696 - DNA, 295 bp, Glycine max
  unsure (1)..(295): unsure at all n locations
  Clone ID: PAT_MRT3847_106055C.1
caattttccaaacttgaaacacttagatgtatcgttcaaccattttgtgtctctcccagcacacattaaacaatctactaagttgacaagtncttgacgtgagtnattgtgataaggcttcaagaaattaccagaaactttccatacaaactgttncaggaaagttatatggcaaggcgcaatggcaaactncctttaaactacccgganaancattcaaaancattctttattgggtnctccagggttgncggtaaaaaggangaatttaagggnggggantttaaggaaaggt

SEQ ID NO: 6697 - DNA, 134 bp, Glycine max
  unsure (1)..(134): unsure at all n locations
  Clone ID: PAT_MRT3847_106056C.1
tataaaacatgccgctgcttaacggnagcgcaccagagggggcnaggttcagttttggggaagtccttccccgcccagcaaggcggtgatgaggaatcggttgagagtactgaggtaggttctgtttcgagcca

SEQ ID NO: 6698 - DNA, 417 bp, Glycine max
  Clone ID: PAT_MRT3847_106057C.1
cccacgcgtccgcccacgcgtccggtgaaaccagcaggagctggagccagttggggagaaactttaacatcccaatcatacccatccctatcagtcaatagacctcacagtatgaacctgattagcaactacatgccagatttctacatggcccaccaacaacagcagcagcaacaacaacaacaacaacttcagtcttttgactgcttgatttcagctaccaacagcaacacagacatcacttctgttgaagatgatgatgggatctcaatgattttatctgactgtggaaacctgtggaacaacttcagttatggcagtgctgcgtccacaggtgagtctgagagcaatgcttccaatggtagaaacaaagacatgcagtgtagtccagacaatattggagtttgatgaaacagt

SEQ ID NO: 6699 - DNA, 474 bp, Glycine max
  Clone ID: PAT_MRT3847_106058C.1
gttccaaggagaggtttcccgtcatcactgtatgacgtcctccttctttgggggggggggggggggggggggggggggggggggggggggggggggggggggggccagtttgtaagaaaacagggtaggccaggtaaaaccacccaggaatatcccaagggcctcgttaacccccggcgataaaaaaatggccggccccaaaataaaacctttgcgtaaggcaagggacttaggcccagcccgtagggcttaaatgggccgccccgtgaatttataggtcaaagtaggtgttcccagtagaggggtaaagatgataggatcaggggagctccccgaagattcggcgccttcaatatttgtacgggtagaaaagggggcccatgggcccttaaccgaacccctgggtacagatgcggccttaaggaggtaacggcatcatatttagggcgatcctaaaaattcccccatttgggg

SEQ ID NO: 6700 - DNA, 724 bp, Glycine max
  unsure (1)..(724): unsure at all n locations
  Clone ID: PAT_MRT3847_106059C.1
tccggnattcccgggtcgacccacgcgtccgattttcattttccccggtcctttcttcctcccaacctctctgcaacctcattgcctcaactcatccattttcgttttccccattctgccctttccatttcttcaccgtttcctctaccagggtttgaaatggaggcgaagaacaaagtgaagatcgatgattctacagcggagtctccaacttcggtccttgaagacgaggctgtctgtgccccaaaagaagaagttaagttggaggaagaagtgactgcagacatcaaagatgatgggacctctcttatatcgaaaacaatggtggaggaggaagagaatttaattgaagctaggatgaaggaagaggaggtacagtgtgaggaggtacctgaccttaatgacacacagtttaacaaattggatgagcttttgactcaaaccaaactgtactctgagtttctgctggagaaaatggacgacatcacacttgctgtgggtgaacaagagaatagggaagagcaagagagcaatccttctgcaaagaagaagggctgtggatcaaaaagaaaagctgcttcccagtacaatactaggaaggccaaaaaggcagtcactgccatgctgacaagatcagaagaaagtgagaagactgangatacgaacatgactgangaagaaagagttgagaaagagcaaanagagctcatgccctttactgaca

SEQ ID NO: 6701 - DNA, 367 bp, Glycine max
  Clone ID: PAT_MRT3847_10605C.1
agatggaaaaggagagcgcttagaacatgataggatctatgataataatgtctacaatgatacgggcaattcacatcacggtaagtattctgctcgccctattcttgaagggtctatcactcatgcttaccctcgtatgggaagaactggtcaatctccaacaaggaaagatctgaaatctgtgataccgtgcgacattcaatgtacctagaagattgagcatattggtcactagaagtcctcggacattcttgcgtatggaatgaaatgctttatgtaatatgtgttactggcgctacagtttgttatcgatttgaactgcactcttaatgaatctgatcgtattcaagatgtgcatgacttccac

SEQ ID NO: 6702 - DNA, 388 bp, Glycine max
  Clone ID: PAT_MRT3847_106060C.1
tgattttaaaaaacctaagaactgcagtatttctactacaaatcacactgcctgcaagccactgtaatgcataaaatgaaaatctgatcatcctacttacaaccatttattaatccttgttttaacatgttatgataaagaaattaaaccaagaaagcaacagcatatatcctgacactgctcaacttccttttccatgctggatttggtgaaaaagaaccgccgccagctgcagtgttgcctgtagacgtctctgtggatctatatcagcatcatcttcctgcaagctactatccagctgatttccattggcctctctttgttgttgttccctttgaaccatctgtgataactgaggcacatttgagatctgttgttgcttttgcat

SEQ ID NO: 6703 - DNA, 236 bp, Glycine max
  Clone ID: PAT_MRT3847_106061C.1
caaacaaccccaatataggacttcggaaaacacagtccaggggttcatttcttgaacccgaaaaaaaattcaaaaaagatcatctttttagaattgtaatcttttgaaaacgctaaccataatatgaatatcccagcccaccacttcctaagataggttgcggacccaatgctctttatcttaaagaaaagtatgtttttaagtggatcgtgtaaaaacttatttttttgattaaa

SEQ ID NO: 6704 - DNA, 284 bp, Glycine max
  Clone ID: PAT_MRT3847_106062C.1
ggaaggggaggttttaaattattataatcacaatcatgtcaattggaactgatataactattgagggataatataaattagaattcgacagtgagtatgtataagactttaaaagatttatacaatattatctaccctaaacggagttaaaagaaggaacagatctgctttaatgtgggttattcaaaaagagaacagttttccagaagagagaataggatgaagataaaatgactttgaacctcagctagattttgcggaactaaaaacgtaagtggatagga

SEQ ID NO: 6705 - DNA, 523 bp, Glycine max
  Clone ID: PAT_MRT3847_106063C.1
atataattgatgtactgcataaaagaaaactaccgaaacattgatcaaaatacattacgagaatttgaggcacttgattaaatatcccaaacaaattacattattcccatacggtagcgtgcaccatcacttcttgttaaaattaaacatatatatataacatgcatgaacaatttatttcacaactttctagtagaacacatcttcaagaaattgaccaaagcatttatgaaggcacacttcgacaaaataaaaccactgtctccgccaatgaggattgatccaaaggattatcaccaacactatttgtaccatgacatagcatgaagcaaaactccaacagaaagcagtgaaatcaattgcagtgtcattttcctctccatcatgcaatgcagtacttggtggtggcagcgctcttagactgcctctattactgttattccaagtaagatatggatttcctttgtagttggcctcatcaaaattagcaaactggcccttatcaggtgctttgtctgacaaa

SEQ ID NO: 6706 - DNA, 342 bp, Glycine max
  Clone ID: PAT_MRT3847_106064C.1
cgggtgcaacatacatttaaaagtttgaggctatggacatcttgaatagtgtccatctagagtgtagtaattaaggtcattcggaagagttggtggtaaggagacaaaagtctcaatcctccttgtagcaacttatgattatgaatgatatgttctgggaaggagagatctaggataaagtggcacaagaatggcgaccaaaacaggagtttcttccagacgatgacgaagatcaggaagaaaacatagcatatatttcttcttcatgccgagacacgtcccatctctgatacgtcgggcagtaagagtcgtttcctatcggtcgatacagaggagtttgcc

SEQ ID NO: 6707 - DNA, 739 bp, Glycine max
  unsure (1)..(739): unsure at all n locations
  Clone ID: PAT_MRT3847_106065C.1
attcgagctctttacccggggatcctctagagtcgacctgcaggacaactgttatatccaacgaaagtatccccaattatatgtaataagtaaacagcagaattttctaattaattctatgggagaatttgtggacggcagatgggaatggaagttatcttggagaagggacttttttgactatgaaatacaaatggcagctgactttgtagatgagattcattctggtcacatacatgttatttgcaactctacaatgacaaggagactttggtgggagcctttgagatgggtaatagagtgggtcctttttccacagacccaaagaaccactttttgcaattcactcaatggaacaacaaagctagtataaacaacagatggaaatnttgtgtggttagctctatccttcttcgtctggcatcatagaaatgctatgattttcaagaaccacccgtnttgatcctgaaaaggttatcgatgataccttgttccacacttggtctttgttaaaatgtgcagagaaggactacaccagggactacaccatccatatgtagcagttgcatgtggaggtcacaccaggtttgtctcatgaacgacaactccattagccatcttccagcggtcaatgacatgggtgttgcatgcaacggggactcgaggaaatttgaacaccttgcaatacatgttctggggggtggtcgggtaaaggcataaaaaggcggagatgaagaga

SEQ ID NO: 6708 - DNA, 419 bp, Glycine max
  Clone ID: PAT_MRT3847_106066C.1
taaaaaccttaaaaaccaaaaaaaattccccttgggatatatcattctctccaataaagctgataaaccatccatcatttgggcctcattcccaatttaaaacctaaccctttaaaaccaaaaaaggaaaggaattttaaaccttctttttatttacccggtgggggcggcttcatcatcattaacctatttatcacatttttctttttcttttccccttaaaccaaaaactaaaaaaaaacccgttagccccaacattccccccaccatagggattaccactgggattttaagggggatcttcacccccattcgaaaaaaataaggtttttgtccttggggaaataatgggggtggtaaccctgggcggggtttctgtttcatgttccggggattttgctgcactgggagtggggggg

SEQ ID NO: 6709 - DNA, 1533 bp, Glycine max
  Clone ID: PAT_MRT3847_106067C.1
ggctcgagctcgtttcatatgtctcattcttctctggttttgttttttggcaaaatcattcggattaattcaatttctctgtgtaaatactttaacgtttccaattctcaccttcgcccagtgatttgtagtcagcttttttcttgttcaaagatgcactagtagaagagggaattaccaagtttccaagctttcctttagagtagaagcaaagaggtaaagtgtcataaaaagctgtaggcttccttcaatgggtgctcctaagcagaaatggactgcggaagaagaagcggcactgaaagctggtgtactcaagcatggggcaggaaaatggcgcaccatacttacagatcctgagttcagtgccattttgcatatgcgttcgaatgtagatcttaaggataaatggaggaatataaacgtgacagcgatatggggatcccggcagaaggcaaagcttgctcttaaaaggaacctgccagcccccaaaattgacaataaccatatggccttgagtacctagttcgacatgatgagttcttgatactaaacccatagcagtttctggtggaccattgcaatcccccaatttgaaagaacaaatatcaaggttggtggataatcatatattagaggccattgtcaatatgaaggagcagaagggttctgacaaggttgccattgcttctttcatagagcttctttcatagaggaaaaatatcggtttccaccaaatctcagtaaactactgccagccaaactgaagcatatggtggcaagtggcaaaataatcaaggaaaagcataagtacaggattgcgccaagttcaacagtgattgacatcagaagtacttcttcaagagaagcccaaagagacagcagaagtacataagaatgatgatgtcagcatgattttaaaatcccaattttatgcagagatttcgaaagtgaagggcttgacagctcaagaggcagctgctgcagctgcaaaagcagttgcagaggcagaggctgcaattgcacaggctgaggcagcagctagggaggctgaggctgcagaagctgaggctgaggctgctcaagtgtttgcaaaagcagcaatgaaggcgctaaaatgcaaaatgcttcatatttgatggtgtggacttactcatgttcatcatcagcagagttggcttgagatgatagttctgctgctgtgcttcctgccagtttttttcgtaactgtacataattttcggcttgtaaatctggaatatgcaggatgattcatgaaatattctgtcaggaatcaataacagcttttttttttttcaattcatttttattttaaccttttcttataaaggaagacaatgaggggaaagctacaaagcagtaacggaagagtggaaatagcgatgtttttttgtaatggaatgattgacatccgcgtagagtaaatgaaggaaacaatttttagtggtgttcaaatagcaatatggattgtcattgacatgcagatcatatattcaaggatgcttgttctaagac

SEQ ID NO: 6710 - DNA, 489 bp, Glycine max
  unsure (1)..(489): unsure at all n locations
  Clone ID: PAT_MRT3847_106068C.1
ttccgttccaaggaaggtttcccgtcatcactgtatgacgtcctccttctttgggggggggggggggctggtggtaaaactggtgggggtacttgtgtgaggaggacttagaaaggtagttataagggctgggctagatgcgcccgtagtataaaggaacagaggcgtcgaaatggaattgcttggtattgcttatatggtaagctttatagatgggaggccgggcacaatagaaacagtaccagtagttgtaaaggtgcccggagtaagttagccaagtggttatgggttgggcgacggccccaggtggcaggggtgcgtcgggttagccgttgggcgagcgtgccaggcccaagtggtccccgtggttagangttagtagtggtagtagtttaggtaatacgtggtggcctggggccagtacccagggtactgccaaggcaagtagagtttgtccgggcatagtaggacccgtggtaagcgatgtgt

SEQ ID NO: 6711 - DNA, 1695 bp, Glycine max
  Clone ID: PAT_MRT3847_106069C.1
acggacttcgctctgaagttttcttcttcataattcggcgctaatctctctctaattctagggttttaatcttcccccttcctctgttttcagtgtcttcggtaaaaattcactccctttcggtggtatcgcataatttaagataccctattcggatttattacaaatcccgggttattattcgatttctgttgaagaacacccggagctattagggaaccttcacaatggcagatctcaaggagaggctactaccaccaaagcctgcatcagctctaaacgtaagagaggctaccaatcgccaatcctgcaccagctcttaagctaagagagggtgtcaatcgaccatcgccctcggggcggcgccctggcctccgggcgggggttttggggctaaagaagcggggccaaggtctccgttcatggattcgggtcgacacatctggaaactctcaggctattgagggagacaagtttaccctgatgcgacgttctgttctccctgcaactaaccttggtatgggaggtttggtaattgtacagttctgacaagaatcgaaggagaggaaatatgaatttcgaaaatgtatttagttactcttcccctgattatttaccttttgagttctgggctcttgaagttgccctggaggcggcatgcacatttctggattcccaggcggcagagttagaaatagaggcttatccgttgttggatgaactgacatcaaagatcagtacactaaatttagaacgtgttcgtcggttgaagagcagacttgttgccctgaccaggagggttcagaaggttagagatgaaatagagcagcttatggatgatgatggagatatggccgaaatgtatcttaccgagaagaaaaggcgaatggagttgtcattttatggagaccagtctatggttggatataaatcagttgatggtgcatccatttctgctccagtctctcctgtttcatcacctcttgattctcggaagcttgaaaagtgtttcagcattgctaggagtcgacatgagagcatgaggagttctgaaagtactacggaaagtatagaggagcttgagatgttgctggaagcatactttgttgtcattgatagcactctaaataagttgacatcgttgaaagaatacattgatgacacagaagatttcatcaacattcaactggataatgtgcgaaatcagcttattcagtttgagcttttactcacaactgcaacatttgtggttgccatctttggagtggtagcaggaatatttgggatgaattttgaaattgaattatttgatgtcccctctgctttccagtgggtccttataataacaggagtttgtggagtcttcatattttctgcatttgtgtggttcttcaagtacagaagactcatgcccctataggaaggtacaccaccatgaagaagattaagcaatcgtgtcctttcgtttgggatacaatcataaaattcaaatggaaaggtggctcatataaagagcaattctttcaattcaattttgtatagtttttaggtgatttcagatgatattctgattcaacaatgtctatatttatagacaacattgattgatagttagaatactttcatccaatatagtatgatagatataggatccgtttatttaaacttttttaataaaataaatagttttttttc

SEQ ID NO: 6712 - DNA, 265 bp, Glycine max
  Clone ID: PAT_MRT3847_10606C.1
gatagatgtcattggggccatcgagcctgtagcttcgaatggtcaccgcttcattcttgtggcaatagacaccttccaccaaatgggtccaagcagatcttataatactgtcacgagaagtgtggtggtcagattcacaaagagggagctgatttgtcgatacggactccctaagaagatcataactgacaatggcacccatctgattcacacaatgcatcaagaaatgtgcgacgatttcaagatccaacatcataattccaca

SEQ ID NO: 6713 - DNA, 192 bp, Glycine max
  Clone ID: PAT_MRT3847_106070C.1
ttaattcttttttttttaaattttttttttttttaaaaaaaacccggaattaaagggccataaaccttaggcctaagggcttaaaccttattgccttccccaggcattaaccacctttttggggggtaaaaggaaaggaccaaccgtttttttcgtggggggttccttgcccactaggaaaaaacccctttt

SEQ ID NO: 6714 - DNA, 360 bp, Glycine max
  Clone ID: PAT_MRT3847_106071C.1
tcaagaggagggtagacactgagtggtaagttatctagaagaaggaggtagttttgattacaaatttataacatgtgatttgtatcatctgtattaatctcctcatctaaaagtcataaagatcccagttggccggtttatttaaatttttttgaaggaaaatcccctacatattttttatgaacctagggtatctaaccgtgagataaggattaatctctcaaaatactaaaatttatttaattaagcgactaatctctcttaatatatgtttttcttccctacacgcaaacttggagattaaatccctgatcatgctgacatattctcattatatatatgtcttcacttgtagtagtg

SEQ ID NO: 6715 - DNA, 142 bp, Glycine max
  Clone ID: PAT_MRT3847_106072C.1
ttacaaaacatagcactgtttgtgttgaaaacttttatttcgcataaacatgacgcctttgcgaacaaaaacactatgtttgggcgtatgcactattaaaggaacacgctcgcaaattacgttgttaggccgagaacattaa

SEQ ID NO: 6716 - DNA, 365 bp, Glycine max
  Clone ID: PAT_MRT3847_106073C.1
gggacttgcgtcgcactcgcaggcaacattttactgcgaggtacggaatccgtgaggtttccggcgaggtaagattccgttgaaattttgctttggtccgagggggagggtggaactttgtggaattaggatcgatttggctccagatctgggaattagggtttagttttggttgcgggtgatgttaattttgggggagaggctttggtagatggaatccggcttgagatcgggtggttctggggttgtggtgaagagcagaaactcatctggttgtttaattgtgcgaaagaaaggggatgggttgggtgctactgcttccacctctcgcagctctatgaatccagaaaaggccaaacatcaac

SEQ ID NO: 6717 - DNA, 366 bp, Glycine max
  Clone ID: PAT_MRT3847_106074C.1
ttattatttggtgagccgcctcgcctgcccggaccggtccggcatttccggcccgccccacttttcttttcccgcgtacgaaagtattagcctggcggctatatcgacggtagatgaaaattgacatgtttcaatatagtagacttacttcatgggtacatactcgttactagcacaagctggcattagtatctattaccaaaattcacttaagcccttatgattatcatattatgtgataccagtcacatgcattaatctgactatctcgctagggtttgggcactggcccgcgctgtcagatggagggaagtgctttggtgcttttgccactacgcttctcacagtacggtcagaattttggac

SEQ ID NO: 6718 - DNA, 952 bp, Glycine max
  Clone ID: PAT_MRT3847_106075C.1
tacggctgcgagaagacgacagaagggtacggctgcgagagacgacagaaggggaagagacgcagacataggaggttttccgccaaattcgaaaatggtgaaagaaatcgaaactctgacagaagatgaaagacgcgcacttcgtggaagcaaattcgcccctcttccccgcccttccaattccaaacctaggttggctcatccaggtggacccttggcgacgaataaagcagcggctttggccaagtttctggagagaaagctgaaagacccaaatggattggcgtctattaaccctgatatccttgaacttgctgtcaataatgccaaagaaactgtctatgcaagtggtacttctaattcacgaagaaatgttcggcatgtggactcctttggtgactctgattctaaggattctagtgatgaagagcagaatgaactatctgaggtaaaggaatgcaagaagaagaagaagaagaagaaaaagaagaaagagaaaaacaaaaacaaaaagccaaagaatacagaggaccctggatgtgccgtgatgaaaaagcctaaacagaagtttaaattctgatcttatttgtactggcaaaattttgaaagaggattggagctcaaaatttttagccatggtttctttccttgcccaaatttgctacttacaagtaacatggagtttagatgcaatattgtgcaggagcttttgattcgatcgacctttccaacaagctacaacatagattacgaacctttatatatatatattgttagattctttcatgttgtgaaggtggagggaattattgttgaaacaagtccaatttccaaatattaaatggcaaaaatgcaggtcgggcgatgggatttcaaatcgttgttgtaatttgtaaacattcaatttcaatcgggataaacactttcatttgtccaaaaaaaaaaaaaaaaa

SEQ ID NO: 6719 - DNA, 153 bp, Glycine max
  Clone ID: PAT_MRT3847_106076C.1
gaaagcaacgtcgtagaacgcatcaatctcaagtcctcagttccatcccgtgggagcagcctacctctccacatcgacacatgtcctcaacatgatgcatcagcgtacagcactgatccaaccatcagcaccatgggaaacaacgatcgagtt

SEQ ID NO: 6720 - DNA, 503 bp, Glycine max
  Clone ID: PAT_MRT3847_106077C.1
cattcgtgctttcattaaatcttatccatccagactgctttaaatattgtcttgtttggtagaatgtcaaacaaacttgctgtgttaataatattggcttatatgaagtcatattcttttgtgcttttttgaaagtaagttgggactttagttgggtcttccttttatatgagattctgttatttgttatctgtacattccagttgaattagagaattgattatcttacatgcactttattattgtcgtcatttgtagatcaatgtagatggtttacaatattaatttcataggtttccatttctcattactgattactgattaatgtcacttatctgcagcatggaattggtcacgcagggctccagttccttggtcatcctaatggcatgacccatggttctgatatgaagaagaatccatctcaaagtccccgttccatatttggaacaaagaatggtcacttctgtgaggtatcccttctgtcgtcttctcgcagccgt

SEQ ID NO: 6721 - DNA, 692 bp, Glycine max
  Clone ID: PAT_MRT3847_106078C.1
ggtggtggtccttatggagctgaagatcccaataatccgtacggagttccttcatcgcccccaggattttggatttcttttatgcgtgtgatgcaaggtgtggttaactttttttggccggatttcaatgctcatagaccagaacacgcaggctttccatatgttcatgactgcacttcttcagctttttgatcgttctggtgtactgtatggagagctagctagatttgtgttgcggttgcttggaatcagaactaaaccaaagaagattaaccctccaggtccagatggacttccactacctgggcaacacaattcctctgtaaatcagaacttcattgagggaacaaagcctgctccaagtggttcttgggacaatgtatgggaaaatgacgccaaaaaatgatgatgcaaatttgttttgctgatagagcaagtccaaatacaaaccaaggaattgaggaacagatgaagcaatacaagtgaatatactgaagctgtgaaatcgatgcttaatctggaagtttaagttcattattgctttgcttagattgctctgataagagagaacaaactagcaatacagttgccttctaagcatttgttctgaatcttgtaggatgctatttgtatagatagttgtattactttgtatttcaaatgtttcttaatcttttgggggcgacaaattg

SEQ ID NO: 6722 - DNA, 332 bp, Glycine max
  Clone ID: PAT_MRT3847_106079C.1
aaaaaaaaaaaataggcctccctgccccccgttttttaaaaaagcctttcttgcccatgggggccatcaaagcttaaaccatgaaagaagccgatatggccctttcacttatatttagggggcccacatttgactcccccccttcaaaaacaaaaataattcccaacattggaaagttcattcggtaatcccacaaatagtcaaacaggaaccgttggtgggggaagttttttcaaaggccggggaatgccatagttcatggattgggccctttttcaactggattaacgcctttttacacggaatttatttttttaatcaaaatccttttt

SEQ ID NO: 6723 - DNA, 356 bp, Glycine max
  Clone ID: PAT_MRT3847_10607C.1
gcaacgcgtgtgatgacgcattcagcaagatgtgcagtggaggctgtaccacttcttcggcaggaggaggtcgagcacaggcgtgaagctgtgaaatgcacccccacagcattgggtcagtttcttccaggactcatttacagtgctgagacttccaacgcctgatgcacggtcctgatgtatcacatatcatgcctgtgtggctacctcaaagaggctagcgtgacgcagtatgttaactctccgaacgcccgattcaccgttgcttcttgtgggattcccattccaacgtgttacttcattaagccttcgtacaattaacgtgtgcgagatatctagatctatagatccacagt

SEQ ID NO: 6724 - DNA, 508 bp, Glycine max
  Clone ID: PAT_MRT3847_106080C.1
gagcggccgaacaaacttttggttgcccacccaaacgcccgcacaccagggggggaacaaaaaaaaaaccggccgcccgccacaacaaacgcaggaaaacaaccaagaaaccaagaaccacggaccggcacccagaccccgaaaccaaacaaggggggcaaggacaacaagccccagaacacaagcacacggacaccaggggaaccacaaagccaccacaaagaaaagaaccacaagacgaacaagacaggacgaccacaggaacaacacccagacaccagaggcacaaaacaaagagcacaccagaagacccaccagagcagaagccagacaccgccagagacggaacccaacccaaaggcccacaaaagcaagaacaacacacaaaacaacaaagagaagaagccgcccaaaacaacaacgccggcgcccccgaagggcgcgcaaagggaaacaaagggaaaggacaccacgaaaggcaagggcaaaccccgaggaaaaccaggcc

SEQ ID NO: 6725 - DNA, 496 bp, Glycine max
  Clone ID: PAT_MRT3847_106081C.1
ggacctcccaatggtttattctcttttcgactgccaggccgagtttttgaaccggaaagggcaccccgaattggcgttggaaatagcgaaaagaagtgtcatctcagccccaagcgagtttggcacctgggcaagattagcagagatctacgttagcctggaacagtgggatatggctctcttaacgctcaattcttgtcccatgtttacttaccaggacaaggacgcaccccgcatgccggagccgctccgtgttgccctccccgtgatgccggaaagcgtttgcgatgagattgatgacactgcgggtgtctcggatgcggacatggtgcatccaacgctgcgcaagctgcatgcggctggcttcaagggcacttttttgaaggcttacatgcttctgaccaagatcacaaagaagattggttgggatcagctgctcaggatacgaaagcaagttttcgtcatggaggaggaatacaggcatgaaaagaacatg

SEQ ID NO: 6726 - DNA, 269 bp, Glycine max
  Clone ID: PAT_MRT3847_106082C.1
cgatcctgtgcgctcacgcagccgtcaacgcgcaggaaatttttaccatcctaggaatgggcctattatttcgaaaaaggtctaccacccagagaaagtgctccaaagtagggctgtacgtgaaaagaggtctgctttcgaacatatgatagctaagctagagatgttgtggcctgaccaaaccgtgatactgcacatgctacacgagactacacacttaacttcatagggtgactggaactgggaatgggatgacacgggctagaatc

SEQ ID NO: 6727 - DNA, 423 bp, Glycine max
  Clone ID: PAT_MRT3847_106083C.1
gttttgagtttcatattcatatgtaataatttactaaataaccaaattaatgtactaaattactaaattaatgcttgtaacttaattctgtatagccagcatgtgttgcggattagccatttgaaagctagtcactaggaacaatggattcttccttcggaagtgaattgtttttaatgatcgttagcctgaactgaataagtgaattgcatatatgtagtttgtataatgccaattgactcattttgtttctaagtgaacactgctcactaaataaaaatgaaaattatcttgacattgtttagttctattgtgccaatcatttagaaattgtcttgagattatgagataacaagttatcttaagttctgagattatgtagtggattttattcctaatagcgctccctagttagagattaat

SEQ ID NO: 6728 - DNA, 267 bp, Glycine max
  Clone ID: PAT_MRT3847_106084C.1
gagcagtcaatggggatgaataataataacactatattctaaggccggtacaatagacaaggaataatcagagatgtctggaaaggtaagtatctcggttgtttctctcatcctactggttggagtggccataggtgtggtggtgtgtgtctacaagaagtgcaaagatcccacagttcaatgtcaacaaagatcactatgggttatctgccaaaacactgacgagcaaaagctctgccacgataccctaagctccgtgtacggcat

SEQ ID NO: 6729 - DNA, 244 bp, Glycine max
  Clone ID: PAT_MRT3847_106085C.1
accaggcgttcgaatcaatggcaaaggggttgattctgttgatgacacacaagaacatttgaagagtgaccaacaagacgaggttgtgtgcacagggtaagaagcatgcactgaatacattaaatgcttcttggccgcaggtacatattagagaactgcacgctgatgtgcaagaaagcggtaatataatcaactcaaacaccatgtgatcataagctacaaagtgagtgtcactgcacttatg

SEQ ID NO: 6730 - DNA, 951 bp, Glycine max
  Clone ID: PAT_MRT3847_106086C.1
ccattcatcaagttcctagaggaaaagaagctgccgccgcattactcctcaactgatctgggaaaataaggcgtctcttcttaccagctgctgctaatgtttttcctgcctgcaattttccatcttccctgcagaaatttccaaaacaaatagttgttggtgatttgtcaacatgaagaagttgttagattttgggaagaaagccctcttttatgttagggtgctttctggatatgaagagcgaagaatacgatcttataggctgcagcttgagcaacgtgtacaacaggctgagataataatggaaatgctaaataaagggccaagagaggaaatacagagcattatgatgcaggtactggagaaacaagctacgcttcaacaagctgaagctgaaaaaaatgctagtaagcatcaagttaacaatgctgaaaccaatatgaatgaatctgagatgatggaagaagagaaaactttgacggagatgttgaaagcactgcaacaagaagttttgcttgagaaagctgatactgaaagtgatgttaatgcgcatcaagcagacaattctcctatcaacttgagctcagcatctacaaccacttctaaatgaagttgagattattttgaaacattggtgattcctgatttttattgtctagctatgaattgcatttcagcttgcctcctgaaatgtcaatcatccttggcgaattcaactaaccaaggcaggactagggcatatttgtagtttatttgttttactaattttattcaacaatgttttcatcttttttaggaatgatcaaaattatcagttttttcatgagatatggttattaataaacttttaaaatgaacacaacttacgaaaaatatgtttatgctagtctgcacatcttcaatcatcttagcagagggtgcattctgtcaattaatgtagataaatattga

SEQ ID NO: 6731 - DNA, 146 bp, Glycine max
  Clone ID: PAT_MRT3847_106087C.1
ctgttccatcgtcaaccctacctatccatcttcgtatgaccttcatgtttgaagacctaaggacggatactatatttctgacagcgtaatcatgtcctgcttcgtatggctaacggttacttatcacactccgtcttcttggtttc

SEQ ID NO: 6732 - DNA, 308 bp, Glycine max
  Clone ID: PAT_MRT3847_106088C.1
atcattcattagcttattcctctaattcttttttacattaatatcaactctcaacgtaggagaatctcttaaaacgtaccaccctccccttaacatcccctaactaatatctcattcaatgacatattcatcaatcacaacccctacatctacactctcatcttacttcccaaatcccaccaaacttacaacaaactccctctcttactatactttcactgtacccccttttacctcaaatcctccttctacttttttatccactcctatctaaacatctttcccttataaaccaactttatttccat

SEQ ID NO: 6733 - DNA, 533 bp, Glycine max
  Clone ID: PAT_MRT3847_106089C.1
ctgagcatcggctagctatctcgatcgaacatgtcccaagcgtccatggtaacacccagccaacgtaccagccaaccagccaaccagccgttacccaccagtcaccactagctccagccgacagccaccagcaacctgtattcaccagcgagttgccgatggtatacgtacacccaggcgccaccatggggcgtgacccgtatcgggtcctacaacgaccaattaacccataactgttatcgtttgtctatggtagtctaattcgacaaaaggttaagcaaaccggcaaagtccatccgcatccgcatcggcaggccaggaaggtgtgggacgccggtccgggtgcctgggacagatccggtgtagaggggctgagacgtggcgcggatggggggaaggcggagtgccgcagcgggccagcagcggcaagctgccaaatggcagatggcccgggaacaagcccgaaacgccccgggactagggcgaaggtgtgcgtgtagagggtggatgtatacagggctgatgtagacgga

SEQ ID NO: 6734 - DNA, 388 bp, Glycine max
  Clone ID: PAT_MRT3847_10608C.1
cctatattctatcttggatctctatacatggtgtcattttgtttggaagatcgatccaaattccatttttttttctgcctataaaaaactacatcctatctttctttttaaccaccaggaattaggaaaatttcggtttgaatagaccaagagagcggggggataaaagaaaaaagagttttaaaattttatatccaggtcttccacccccccttttttttattccattagggcaatttcgttggtggatgggagctatgttccataaaaccaccagccttttttaaaacgtcctgaccagtccttgtaggtcgaccccctcgctcagggaaatatagaaccccgggattttttaagggggttggattctttatgggatcataaaccc

SEQ ID NO: 6735 - DNA, 527 bp, Glycine max
  unsure (1)..(527): unsure at all n locations
  Clone ID: PAT_MRT3847_106090C.1
aacccccccgcgacatctactatattcggcccccctcttccgtgcggcctttttgtggacacccttttgccctttgctaccctgtgggtccgtttccacagcacttgaagaagccctggtatgtataaaaccgtgtgacctctctgcaggagaatcaaaatttcctcattttactctnataagtggtttgtgccagggcttgatccatatcctttattctggggccaattgctgcgggaggtaaaaaacactacattacccgaaatagacctcgcttctcttgtccatgccgactttgctaatgatcccccccatcatttttcagggctaaccctccgcaacgttgtcgacccactaatggctacaggttgctactcaaacctagaaaaattacgcgtgcacaaaacgggggggggtgaactcctttcacgtaccctgcttatgcctgttgggccttcccgagtccaccgtactgccaataccccgctttgctcacatcctggttctgaacccaacgacttagactg

SEQ ID NO: 6736 - DNA, 337 bp, Glycine max
  Clone ID: PAT_MRT3847_106091C.1
gccggaattccggctcgcccagcgtccgttgtttatattcttctcccctgacatggacctcttgtcactgcacacccaaccgccggcgctagatagacctgtttctcttgtatgggctggaccgatcttcggttatactccaacgctatctggtatcaggcagagagtgcctgcttagcctctctcatcactgggccgaactggaaagtgtgaactggcttggactttacatgtaacataatggcaagattcttgcacacgatggatcagaccctatgtgcctggctgtggtaccatagaacgagaggtggagcgcacaagagggagcttgagaatg

SEQ ID NO: 6737 - DNA, 330 bp, Glycine max
  unsure (1)..(330): unsure at all n locations
  Clone ID: PAT_MRT3847_106092C.1
tanggtccggcccggccaacagaccgccgagggagggcaacgatatactgcgcggcgatcacgccagcaccgacggatcgattaccaagcaagccacgagcaagatggcagaaatgacaaacagcctccgcggcggtgatgaaaaaacgatgcgagaaaggacacacctgccgcaggctcgccgctcaagaatggcaacccgcaagaaagacgtctggagagccgaacgtggaatccctactggatctccgctcacagcaattcgcaatagcactaccaatgagacgcccactagaaatagccatgaaaaaccaccgcgccaggctaaag

SEQ ID NO: 6738 - DNA, 963 bp, Glycine max
  Clone ID: PAT_MRT3847_106093C.1
aaaaaataaaaaaggaaggcccgcccgccccccccatatattattttttaatctgaaaaaaaaataataaaataggagatctgcccttttttttttttttttttaggtcaacaacaccactttaacttccattatatggttttttattagtagtaggtcaacaacaccactttaactttcattatatggaacaatatacatattccatctttaaaaagaagggctcagttaacaacatagtcaatctcattcctgcaaaggaggaaaaacccttctctgccgccccttcatacacggcatcatcacaattcataaccccttcccttaaaaaacccacttccaaaatatttaacaacaacaacttaggcaacaaaaaaaaatcaagaaaaagaaaaaaaaaaacagagactgagaacactacgaatgaaggggccataaaaacaaaagcgacgatcgattgcgatcacgatcacttcttgaggcttccgcgaacaccggggcgaggcttggaggattcaggaacgtgcgtcgcgtgaagattgacgactttgtcctcctcaaagggaatcttggggtgacgcgcgtcgtggtgaatttgcattgatttcacgtccggcgccgtcactttgcagtgagggcactcgtatttcgcgtgcccgcccttctccaacccggatcggtccttcaggccggccttcccgccgccgcggttagtggtggcggcgtccaccttcgcggcgatttccttcgccgtgtgcttcttgggcttcgccttcccggtcatcgggccgttcctctctctcttctcaccgagcaatgaatgattatttttcttcttttcttgtttttgtaatcgtttgtttcggttttgattaggctagtttcgaacaagggaagagggttgggaaaaccctaatttgttcgaacaccaaaagagggcgtgcgggccggctcgagcggccg

SEQ ID NO: 6739 - DNA, 924 bp, Glycine max
  Clone ID: PAT_MRT3847_106094C.1
atgggcaacaaaccttatttccacattttcatcaataaacacaaaaccaatttacctaaaagaaaaagaaaacttgttaacacacacaattagggcgtagtagtaggtcaacaacaccactttaacttccattatatggaacaatatacatattccatccttaaaaagaagggttcagttaaaaatctcgttctcaattctcaataagagaatataaaaaaaaaaccttctctgccccttcatacacggcatcatcctcataaccccttcccttaaaaaacccacttccaaaatactcaacaacgtcaacttaggcaacaaaataaaaagaaaaagaaaaagaaagaaaaaaaagagattgagaactacgaatgaaggaggggccataacgattccaacgatcgattgagatcacttcttgaggcttccgcgaacaccggggcgaggcttggaggactcgggaacgctggtggtggcgtgaagattgacaactttgtcctcctcgaaggggatcttggggtgacgcgcgtcgtggtggatctgcatcgatttcacgtccggcgccgtcaccttgcagtgagggcactcgtatttcgcgtgcccgcccttctccaacccggttcggtccttcatacccgccttcccgccgccgcggttcgtggtcgccgcgtccaccttcgccgcgatctccttcgccgtgtgcttcttcggcttcgccttccctgtcatcgtatcgtttcagcgatcaatgaatgattgattctttttcttcttttcttctttttgtagtcgtgtttctgttttgatttgcctaatttcgaacaggggaagagaaggtaaaccctagggttgagaaaaccctaattttgttcgaacgctaaaagagggggttgcggaatcttgagcttacgcacgggatgcatg

SEQ ID NO: 6740 - DNA, 155 bp, Glycine max
  Clone ID: PAT_MRT3847_106095C.1
agttcgctaggcggcagccgccctttatgctggagatgcgagaggatcctagagacatagaaggcgctcggatagacgaccaactcttcacattgctcaacgactgttgttgatatctgctatttatcaaggctaataaggttatctctaacact

SEQ ID NO: 6741 - DNA, 735 bp, Glycine max
  Clone ID: PAT_MRT3847_106096C.1
ggggaattggactcacccccactctcattgtcttcttctttttcttctcttgagcataccatttattttcttcatgcttttttctgcttatgggtacttcagtttcagtactttgatcacagtttcacactcaacttgtcttcttgcaacttgatggatgcagcatattactattacagaaaataacaatataatttccattggtggatatatgcatgcagttgcagcagatttagaaataagtgcaaaacatgaacaccagcgtcaggccgaggctgctgcataggaaaaaagcaacaacgctgttgtcacatgaaaaggcagagatgcggggaagctcgcgagggggagaaaataatgctgctaagggtggaaaagcatcgagcaaagacagaaaattggctttgcaacaagatgttgacaggttgaagaagaagcttagccgtgaggagaacatccacagagcattagagagagctttcaacagacctttgggagctttgcctcgtcttcctccctatctccctccttatacactaggacttctgctgaggtggcagtgctggaagaagaaatgttaggcttgaagagcaggttgtgcatttcaggcaggacttgtaccaggaagctgtctacatgtcatcctctaagatgaaacttgagcaatctgcaggtatgaacaatgcaaacccaactagtattcccaaactgggtaaattgaagtccctatccgag

SEQ ID NO: 6742 - DNA, 333 bp, Glycine max
  Clone ID: PAT_MRT3847_106097C.1
gtacgtaagctcggaattcggcttaggtgtaccagctcgagtcaatgcagatgaatgcatggctttggataacgaagttttctatgacatctgcttacgaacgcttaagctcaccactgcaagctttggggatctgcaccatgtaataccagccaccatgagtggagtgacatgttgtcttcgtgtgcctgggcatctcaactcagatcttcggaaactcgctgagaattttattcccttacttggactgcactttgtcatggaggggcttgccccactcacatgtcgaggataccaacagtacagagctattactgagccccaattgaccca

SEQ ID NO: 6743 - DNA, 148 bp, Glycine max
  unsure (1)..(148): unsure at all n locations
  Clone ID: PAT_MRT3847_106098C.1
ctgcttcccgagnnnggttgggnggttgntctngctgttgtngnngctcttgctgatcagaacnctgttgctttggtgattatnnntcctgggnctccttgtgggaatgtgtatngttaccntcatttggagcagattgatgaanctg

SEQ ID NO: 6744 - DNA, 224 bp, Glycine max
  Clone ID: PAT_MRT3847_106099C.1
gaaggtgcaagagtttgttgtgagctataagctagtttatcgtgaggagaatatgaagttgtttgttttctttgttgctgcagtagttctggtagcatggccatgctatggcgcaggctaccatgcgttccctctccgactgaacattggctatggtgagcgttcttcggacgtagcatgctcacgttctaagcttgctgtggatgcacatgttatccgagccc

SEQ ID NO: 6745 - DNA, 164 bp, Glycine max
  Clone ID: PAT_MRT3847_10609C.1
agaaactagttttttcagagagaaagtgtttatggcaagaagggtatacagaagcgacagatagcttcatagggtgccgagaggcccgagtgtaaagtgcaggcgtgaatagcacgaggcacgatgagtccgtaatgtctcaggcaaaaaatggctgcaagagg

SEQ ID NO: 6746 - DNA, 406 bp, Glycine max
  unsure (1)..(406): unsure at all n locations
  Clone ID: PAT_MRT3847_1060C.1
ttcttgcatttatgtgatctttaacactgtttttcaggggcaagtgactattgctgcaaaacctggcttgaaattggaaattcctgatggggtgacgattgagaataaggtataatactaacttcagtacgggctttggagtctctttattacaaaacttcaccttttcattggttttattttctctgttctgttggtgctgtttgtggggttgtgatttgtaggttggatgcgtgttgggagaatttgttttgtttggactgtttttttatcagcgtttggacttggtataatgggtaccttttgtttcttgtttgctgatcaaagcatggggatttgtaattgttnttgtcatcattgactgggagaccctttcagttggatagcctgactgtgcaagcttaag

SEQ ID NO: 6747 - DNA, 388 bp, Glycine max
  Clone ID: PAT_MRT3847_106100C.1
gcacaatgctggtgtgggattgaatcaaatctaatgtgcttgtgggacatttatactcgataagttttggcacgttggagatcctgacatcttgatttttcaagtgaccaaaattaaaatagataattcgatatattttttgtggtttgaatgggacttttctttcttttttaaaaaactcttggtgaaacatggtcaagggccatggtactattcactattaatggtgatttaacatgtttgtgctgctgccatgatagtaaaagatttcttattattatgtagcggtagatccttggattttggtggtgttcatgatttgttaagaatcctaacaagatttggttggtttggtactttccattggaaccctattttgggtctacat

SEQ ID NO: 6748 - DNA, 357 bp, Glycine max
  Clone ID: PAT_MRT3847_106101C.1
aacgggaacaccctctttttgattttgattttaaaaaacacattgggggggcttacttacaaacagagagtacctgtttttagtggatcccggtaaaaatttcaaaagaacattctattaacaaatttggggggagaggggagaaacccccagagttagagacgtggaaagttttggtttttagacatattttaagggcgacggtcaaaaaactttccacataaagcaggggaatgaatttcttaggccttttcccacttgagggggtgggccacttcccatgggaaggcagggttttttctttaaagtggccataggcagcagttttcaaaaacctggttttttccccccttttga

SEQ ID NO: 6749 - DNA, 244 bp, Glycine max
  Clone ID: PAT_MRT3847_106102C.1
gcaccatttagagtccaaggcatacgccggtgcctccaaaacctacgctcaccaagccgcgtccattcgcaagaacggctacatcctcatcaaaggacgcctcctgcagggtgtggaactgtcccctcccaacactggaaagcactggtactccaaaagacaatttgctcgccccgctcttctcactggtaactacccttttgatattttctcctctttccgcaactgtattgttcttcatgtg

SEQ ID NO: 6750 - DNA, 529 bp, Glycine max
  Clone ID: PAT_MRT3847_106103C.1
ggctgatggtaatacacaaaacataactatttactgtgctattctctctaccacatcacacgcaatttgacattgtcgtgttcctttgcttttaaccgataaaccctcctttcatgttctgtaactccaaatggctgcgttcgctaaaccctcccattcccaacttcgtgcccaaagggatcatcctcttcttccttctacttcaacttcaacttccagcaacttcaagctcaaaacattcactttctcccacaacttgcacacacttcacccgcgttttagaaaagctaaacatatttgtgtctcgaattctgccactaccaccacctccctcagcagcaaccacaacccaaactgtcatatttaccaactgtgccttcttgggaacttggaccgtgccatgagctacttagactccatgcacgagcttcgaattcccgttgaagatgatgcttacgttgccttgatacggatgtgtgagtggtagaggcaacgtaagaaggatctcgtggttactcctatgttccat

SEQ ID NO: 6751 - DNA, 2798 bp, Glycine max
  Clone ID: PAT_MRT3847_106104C.1
ccacgcgtccgatgcaatgtgggctatgcatttatcaacatgctgtcaccctttcttattattccattctatgaggtttttatgggaatatatctttggctcttttttttttcgctgttttctattattttgctgagtgaaaattttcttgtatattttctgttattttcttcatcttgttaaaattaatttagcagttattgatatcttggcatttatttaagaaagtgtaagtagtaaagcttaatgatatcttccccttaataattagtgaaaattaatttagcattgtgtctgattttgcagacattcaatgggaagaaatgggagaaatttaatagtgaaaaagttgcatctttggcatatgcctcgaattcaaggaaaatctgcccttgtgagccacttccaaaattcaagtttgatgaatgaagacctacgatgtcgcccttattctcatggaaatgtcaaagagatgagggaaactcctcacaagatgcatcacaagtttattgaattctatgatgttagagcggccgaagcagcacttaaatcattaaacaggagtgacatagctggtaaacgcataaagcttgaaccaagtaggcctggaggagctcgtagaaatttgatgctccaattaaatcaagagcttgaccaagatgaatctcggagtttccgataccaagtgggttctcctgtagctaactctcctccaggtaactggttacagttcaacagccctgttgagcagaattcaatgcagactatcaattattctcctggttctaggatcataagcccaacaacaggcaatcatttacctggattagcttcaattttgcaaccacaagtatctaacactgtgaaggctgctgctattggcaatgacttgggaaggagcagtcaaggagagcacatattttccggtatgaattcatcacacggagctacttttcagtcgcattcacttccagagcctaaattcagccaatatcgtggagcattgtcctcaattggtccatcaacatcaaatggatcctcagtggaaactttgtctgggccacagtttctatggggaagcccaactctctactcagagcataccaaaccttcagcttggccaagatcatctgtggggcatccatttgcatcgatggaaagagccatgccttcccatattcaactcagaatagttcttttgttggttcatcacagcatcttcaccaccatcatgtcggctccgccccatcaggtttgccttttgagaggcactttggtttccatcccgagtcatctgaaacttcattcatgaataatgttggctatggaggcattggtccagggcataatgatggaaatcacatggttaatgtgggtggatctgttaatcctaacattactatcccgagaaatatatctgataatggttcatcaaacttcagaatgagatcttctcctaggcttagccctgtctttttgggaaatggcccttttccaggactgccacctaccactttggagggtttggctgaccgtgctcggagtagatggatagagaacaatgggagccaagttgatagcaagaaacaatttcagctcaacttggataagattaaaagtggtgaagatacaaggactacattaatgataaagaatatcccgaacaaatacacctctaaaatgttattagctgccattgatgaaaatcacaggggtacttatgattttctctacttgccaattgactttaagaataaatgcaatgtgggctatgcatttatcaacatgctgtctccctctcttattattccattcttcgagacattcaatgggaagaaatgggagaaatttaatagtgaaaaagttgcttctttggcatatgctagaattcaaggaaagtctgccctcgtgagccattttcaaaattcaagtctgatgaatgaagataagcgatgtcgtcctattctctttcactccgagggttctgaagtttgtgatctgattgtacaagaccaccaccttccctccaactccaacaatctaaacattcaggcaccaaggccaagtgagttctattcaagtgattttgctgggagtcctccaaaggcaggcccttctgcaagcttggatgcaaattaacatttatattagacgcagagttgcttagccaaaaccggtcactgttaatgttaacattttgcaaatatgtctctctctctggtggtgctgcatatatttaggaaggataacagaaggatgtagattttgtaccatagccattttcccaagtattttgccagcaagctttagaagcttggagcattttgattgaattgctgcacaggtaactgatctgattatgtacacaaggtggttgtggtggtgatggtgggagcaaaggctgaagagttgattgagcaaaggtgtttgtttctcttcaatttttgctcatttttgcattttggtgtcttgtcattgagcattttttttttcctttctgaaaaatgttaatatgggggtagagttcagtttggttggagggttggaagttggtaagttcatcacgtgggggtacaaattgtatagagagaaaataaagacttatttctttctatgttttcctctaatgtactagtactactctggaaaaccaaaagtgtaaaacgcttatttaaatatgatggtgtacaagttgctcactatcttaatcaagacattgtttgttttggttggatgattgtagcctttgaaagtgcagctttgacacgtcaagtgaaaactcacgcctcattaaagtt

SEQ ID NO: 6752 - DNA, 767 bp, Glycine max
  unsure (1)..(767): unsure at all n locations
  Clone ID: PAT_MRT3847_106105C.1
gtacngcctgcaggtatcctggtccggnaatgtcccggnggtcgacgccacgcccgtccggnaaaaaaaaaaagaaaaaaaaaagaaaaattcctccgaagtccgaaggaagaaatagattgagaaaacctagatggatcaagaacaagaatttcttccgtttggccaatgcgatgtgatcgtagtcgcgcacttgtggtagaaccaaatcctctcttcactccgattccgttacctttcccgtcgtctcgcggttgccggcggcacttccctcgtcatcgccgccgcgtagttgttggcatcgcaaccctaatcatcgtccgtagtgaaatctgagattcgcgatggagttggcacaactagaagcattgtgtgagaggctgtataattcgcaggactcggtggaacgtgctcacgcggagaacacactgaaatgcttctccatgaacactgaatacatttcccaatgccaatacattcttgatcatgccttgacaccctatgcattgatgctggctagttccagtttgttgaaacaagtcactgaacatagccttgccatgaagcttcgccttgatatatggacgtaccttatcaactatctagcgaccagaggacccgagttacagccatttgtcgctgcttctttgatccacttttgtgtcgagtcacaaagttcggatggtttgatgatgatcgattccgggacctgggtaaagaatccatgaacttcttgagtcaggcaacaccgggtcattatgccattg

SEQ ID NO: 6753 - DNA, 829 bp, Glycine max
  Clone ID: PAT_MRT3847_106106C.1
ccaggcgtccgggttgttgaaatcggcaggggacggaaatatcgaaagagacagacagagcgacgtcggagaaagaaagaaaggaatgaatgaaagagggatggtaggagaaaaatgagaatggcgtgaatgtgaggagagaagagcctgaatattagaatcggatacccttaaagaagcggagataggagtgtgcgcctccaaacccaaggggcttcggaggggctcttcatcggaggcggtgctatattcccctccggattcccccaccatgaagagcctcttcaagcccaagccccgcactccttccgatatcgtcaaacaaacgcgagatcttcttctccgtctcacctcccgagatgacgataacatgcccgacttgaccaaaaacctcagggacttaaagtcaatcctctatggtaacagtgaatccgaacccgtccccgaagcttgtgcacagctcactcaggaattcttcgccgacaacaccttacgcctccttatccaatatcttcccaaactcaacttggaggctagaaaagatgccactcagattgttgcaaatttacagaggcagcaggttcagtccaagctcatcgcctctgattacttggatactaatttggatcttatggatgtcttggtatctggatatgaaaacacagacatggctttacactacggtgcaatgttgagggagtgcataagacaccagattgttgcaaaatatgttctggactcacctcatatgaagaaggtttttgactacattcagcttccaaattttgacatagctgcagatgccgcagcacttttaaagagctaatga

SEQ ID NO: 6754 - DNA, 1583 bp, Glycine max
  unsure (1)..(1583): unsure at all n locations
  Clone ID: PAT_MRT3847_106107C.1
gataagcagcatcaactaaacctaaaatcttctgccccaccctgcatttcagcagagtgattctgttcactacaatgccatcatcactatcctctttcctccatatggttcctattctctcccttcttgtactctcatgtgtgatttgttctagtagtgctcagggaccaccttcacctggctactaccccagttccaaaattagtcctgttagtttttatcaagggtttagaaacctatggggacctcagcatcagaggctagaccaaggctcattgacaatctggcttgactctaactcaggaagtggattcaagtcacttcactcttatcgatctggttacttcggtgctgccattaagcttcaacctggttacactgcaggagtcattacatcattatatctttcaaacaaccaagaccaccccggaaaccatgatgaaattgacattgagttccttggcaccacacctgataagccatatgtcttgcaaacaaatgtatacatcagaggaagtggagatgggaatattattggaagagagatgaaatttcatctttggtttgacccaacacaggattttcacaactatggcattctatggaaacccagtgagataatattttttgtggatgatgtccccataaggaggtatcctaggaaaagtgaagcaacatacccctcaaggtcaatgtatgtgtacgggtcaatatgggatgcatcttcttgggcaacagaggatggaaaatacaaagctaattataattaccaacccttcgttggtaggtacaaaaacttcaaactgcaaggttgcactagtgaaagctctgcctcgtgcaagccaccttctttctccccatctggctttggtagcctcagtcctcagcagtttagggccatgcaatgggtccaaaacaactacatggtctacaattattgccatgaccctaggagagaccacactcttatcccagagtgctaagctctagttcgtttcaaaactccttcagaagaaagaaatcgcctctaagatatcaaagctataattattaacttctgaagatcacattccagatgtgcaaaaatcacgtccgaaacgtgaaatcaattaagctatgatgttggtgtgcctcaattctaagttgccctatacactttgcatatttgaattgtaaaatggttttgattattcaggtggaggtggtttttgtgatggtcccacttgctaagggtaattgcaagagtagttgaacgtccaagccactccaatgattggaatgtttttgttgtttatgtaattgtgttgtagtattgtttgggtcctgtcttactgttcaaataaattgattcggatgctttcctcataaannnccnaaanaaaacccccaaaaataccaacccttggaaaaccancccttttggtcctcccgggcccccntaangttattnttttaaaanntttcctgggggggggcccgccaaccttccccaaagaggaatttcccgccgctctggggggttttttcaaaaggggggggaaaaaaagcgggcccaacatttattggggggagaaccccccttt

SEQ ID NO: 6755 - DNA, 796 bp, Glycine max
  Clone ID: PAT_MRT3847_106108C.1
gaatgagatgatattttttgtggatgatgtccccataaggaggtatcctaagaaaagtgatgccacatacccctcaaggccaatgtatgtgtatgggtcaatatgggatgcatcttcttgggcaacagaggatggaaaatacaaagctaattataattaccaacccttcgttggtaggtataaaaacttcaaacttcaaggttgcactagtgaaagctctgcctcatgcaagccaccttctttctcgccatctggctttggtagtctaagccctcagcagtttagggcaatgcaatgggtccaaaacaactacatggtctacaattattgccatgaccctaggagagaccacacatttatcccagagtgttagggtctatctagttcacgcctgtttggaaattcgttgagaagaaaataattacgtctaagatgtgaaagatataattattagtttctgaagatcacattcgagatgtgaaaaatgtgaaaccaattaagctatcatgttggtgtgtctcaattccaagttaccctatacactttgcatatttgaattgtaaaatggttttgtttattcaggtggtggtggtggtggtttttgtgatggacccatttgctaagtataattgcaagagtagttgagcgtccaagcccccgttcaagccactccaatgattggaatgtttttgttgtttatgtaatttgtgttgtagtattgtttgggtcctataatactgttcaaataaattgattcagatgctttcctcaaaaaaaaaaaaaaaaaaaaaaaaaa

SEQ ID NO: 6756 - DNA, 207 bp, Glycine max
  Clone ID: PAT_MRT3847_106109C.1
tttttctcatcatttttgtcttttttattgggtttttgtttttcgggggtgggggacccttactttctacatgcatacattttttattcttctacataaacgataaccatatactatatcctgcacatacatgacaagacactggtcgggcggaaggacatatgcggcaaattgagtcaaagacaacaacatccatatatatgcatg

SEQ ID NO: 6757 - DNA, 794 bp, Glycine max
  Clone ID: PAT_MRT3847_10610C.1
gggaagtgtattaacgcacttgcagagaatagtgcacatgtgccatttcgtgactcaaagcttactagattgctacgtgattcatttggaggtacagcgagaacttcactagtaatcactattgggccatctccacggcataggggagagactgccagtactataatgtttggacagagggctatgaaggtggaaaacatggtaaagctaaaggaggaatttgattacaaaagcttatctaggaggttagacatagaattagataaactcattgtggagcatgaaaggcagcagaaggcatttgaggatgagattgaaaggttatccactgaagcacaacatcggatatctgaggctgaaagaaactatgtagattcattggagaaggagagatcaaaatatcagaaagactatatggagtcaattaaaaagcttgaagagcagtttgtgatgaatcaacaaaagaatgaggaatctcatatgaaattgagtggagagattcccagagtgtctgctgaggaactggctgatttgaaaaaaatgcttcggaaagagactcatctaagaaaagctgctgaaggggaagtaaacaatctgaagattcaagtggctgaactaaaaaagtcagaggcatcaagaaagtcagagatcttaaaacttcataccatgttggaagataaggaacgccaaaaagagaaacttgaaggagaaatagcaatattacaaagtcaattgttgcagttaagtcttgaagctgattgagacaagacaacaacttgacagaggtggggttg

SEQ ID NO: 6758 - DNA, 681 bp, Glycine max
  unsure (1)..(681): unsure at all n locations
  Clone ID: PAT_MRT3847_106110C.1
cgtaagnctcggtaattcggcgctcgagggactctctagctagcacctttctctattctctccctaagtgactcctacttcataatcagagggcatgcctgaatgtccagagaaagggagagatttgatgagatagggaagaagatcaagagggaaggagatgtttcatctcaaatgggaagaagacacatgttaggccctccaggaaccctaaatactatcaccccttgtgcggcatgtaagttgttgagaagaagatgtgcccaagaatgtcccttttctccatatttctctccccatgagccccaaaaatttgcttctgtccacaaagtttttggtgccagcaacgtctcaaagatgctcatggaagtaccagagtgtcaaagagctgatgcagcaaatagtctagtatatgagggctaatgtggaggctaagagatcctgggtatggatgcatgggtgcaatttctgctttgcaacagcaaggtcaatcttttcaagcttgacttaatgcaatgaaaaggggaaatacttaaatacaaacttaagggaagctaacatgaatcccctctctcatgttgcaatgctcccttcatctgggggctgtttaattggttggtccaccggcggcaccaccaccaccacaacctttttnctcctccttttcttcctcttcctctt

SEQ ID NO: 6759 - DNA, 471 bp, Glycine max
  Clone ID: PAT_MRT3847_106111C.1
caacgacagtgggacatacacaacgtcgttgaaaatgatgaaaacaacgacagcctatgttaatggccgacgttgaagtcattactacaacgacggcgtttacccatgcacgatgttgatgagtaacctacaacgatggcatttatgtataaacgacgttgatatgctgaatacaacggcggcgtttatgacataaaaaaaaaaaaaaaaaaaaaaaaaaaaaaaaaaaaaaacaaaaaaagaaaaaagagagctagaaatgaaaaaaattttaattttgggagatgggaggagatgcttatttatgaaccaaaactggtgaacagtgcaaatgaattgcacgttcccaaattgggggggggccctttaagagccaaatatttaatttccccattggggcaatttaaatttttttttttgggggccctaaaattaattcacggggcgcggttttaaaccccgtgaaaggga

SEQ ID NO: 6760 - DNA, 417 bp, Glycine max
  Clone ID: PAT_MRT3847_106112C.1
cccacgcgtccgtacggctgcgagagacgacagaagggggagccacaagcttcgtacacaagaatgactcgcacacttgtctcaatgattttgctgaaattttttatctttgcagccatggtgattgttctattctcacttggtgtgagtagcaatcaggtttgtcctggacaatgcgatgatttttctgattgtaatgcctactgcgtggcccacaaccataagacagggaaatgcgtcgtcgcacctgaagtagggtttatttgttgttgcttctaagatggtgaacaaactttttagtaagagttctcttcatatggttgtaagcaagcaatgtaatttttgaataatcattagcttcattggcggaaataaaaagtatcgtgagaagctgagtttaattccaaaaaaaaaaaa

SEQ ID NO: 6761 - DNA, 473 bp, Glycine max
  Clone ID: PAT_MRT3847_106113C.1
gttttatgagtagaagaatcattgatgtcacagacagaacaattccatcaaccgagtattatttttccaagtgtttacaaaagcattaagataaatcatgagtcatgcccttattgaaggttgaactaaaatcattttgcagattgttaattgagttggcaacttggtcctacttaaaatgcttccttgatccctattgtttctttttccaaagtcagacctcatctcttccataagggaagtgcatctaaactttgaatttcagtgaagtaaagcaagagtatctaaacttgaattgagcaaaacaagagtattaagaatttaggaaattgtggagtgagttcaaccgtgcttcaccggtaccctcatttcccaaaggcaagcgtatgggtgaatatctttagcatgcattaaaacctgatgacaaggatgttgcaaatgtgctcatagcagctgcagtcttttcctagttt

SEQ ID NO: 6762 - DNA, 407 bp, Glycine max
  Clone ID: PAT_MRT3847_106114C.1
ccacgcgtccgggcggattcaagggttcgttggttagtttcagtttcttcgttcgttcttgtttttggcgatttttttttttctttctttcaacaaggtaagagaaggtggctggttctatgagtctggtggtattttgtttcacgcgctagtgtagggccgtgcattcaacgctctaggtgaagggaaaatgaagaagaagagataagtcgtggtcgatcaggatcgtggatttgggctttctactttcttccagtacacaaggctttactttattattaccaagaaaacagaaatataaaataaaggagaaatagtccaattcatctcaataaagtgatgaattgatacactgaaaatataaatttaatttttaaatatataaaaaatatgataaattaatctta

SEQ ID NO: 6763 - DNA, 961 bp, Glycine max
  Clone ID: PAT_MRT3847_106115C.1
taaaaaagaaacgaaaagaaataaaacgatttattacatctcttaataataaagacaacagcataagttcgctttcgtcagaagcagaattgaacaaaatatcaaagctaactcctaaaactacagatttaactaacctatttgatctgggcctaaacagttcaaaggagaagaagaagcaatgcatttacaaactgcaagctacagcaactacggttggctcctctatcagggggaagcatttatcaagcattccaatcacatcataccatggaagccagcagaatccgagagcaccgctttaatttgctcagggaggacatcctggccttctctgcattgctcagctttgaacacatctaaagcaaagccattaaaacagctaataacagcctgctgtacatccaatccgaggttatccaaagccttcatggtagaaagcaaaagacctggtcggcgggtgcagaacatatgaatgttgacagttctcccttcccttactctaacctcaacctttgcagcttggtttttagggcttggcaaggtgccaggatacagttcctccttgacccgacagggaagggttggcagggtgggtgttaatggctgaaagcttgtagaagaagaaggtgtcagcgacgagccaggtggagttgactccagctcgtgatgaagatcattaatccgctgcagcaactccttcaagtagtcaattgcatccccaagtattgaagccctatccatcttgctaatcttggggacaacagacctgagcatgtacaacctatcattgagcttcttccggcggcgcctctccgccatgagattcttggcgggcagccccttcttcttccccttgttatctccaccattctcactcagcttcaacccattgctctcattctgctcatcagactcatagttcaacccggacccacgcgtccgcggacgcgtgggtcga

SEQ ID NO: 6764 - DNA, 452 bp, Glycine max
  unsure (1)..(452): unsure at all n locations
  Clone ID: PAT_MRT3847_106116C.1
cgcaaaagaggaaaaggagcatccaactacgaagaggcccagctcaaggatgagactgtgaaagtggtagtggtcgagaaggccctcaaaaaggttaaaagccttccaaagccagttctgaatcacgaacacatcctcaagaagaactctcttttggggtaaacaatttaccctccactttttggagtactaagcctcagcaggaggatgttgccgtggacgcagaggaagctcaagtttaaaccttcacatattaacacttgcacttcacgtgacttcgtaatcttgttcttgttatttatttaccctataatagttgtcaaagaacaagtataagaataattatcactttagtttttcatagtaatattgattnttttttcagttatatttcttaaaatattaatgatagtaaaaaaaattacaaataacataatggtaataaagttaat

SEQ ID NO: 6765 - DNA, 483 bp, Glycine max
  Clone ID: PAT_MRT3847_106117C.1
tttttttttttttttttttttttttttttattttttgcttaatttatttttttttgggttttttttttcccaaacaacaaccttatttgaacccctttttggaagccataatctttacaagcccccccttttcctttttcaacaattggggaaccccaaaatacctttacaataaatggttaaatttgaaaacaatgcccccaaaccccaatttataaaaaaaggcaaaaaattggcatcccaacattggaagttttttttaaaaaaacaacaaatattggagcccatcggtcctagaaaataatttcttccatggtcagaaaaaatcatattttcctttggaagtcccctgaccagatatcccccccccctaaaacttttccagaaacctaaactttggtcaaaaaaaaatttttcaacgggtttttcttggcgaccctcaaaactccctgtaaggggcccccaagggggtccgggaatatt

SEQ ID NO: 6766 - DNA, 423 bp, Glycine max
  Clone ID: PAT_MRT3847_106118C.1
cacttccggtattgttctctattttggtgacatgttgttgcttactattaaaaagttacatgaattattgatgtcatcagagttagttactgcagaatatgaaataagtagaagtgagataagcattataattcaggggcttgtgcttggtcttctgctatatccaatagctttgaaatatattctccaaatatgggagtggtctataaatacaacttctgctgaagcaagaagatactatgagattgggaaatctcttatgtttgttgcttctcttggaattgtcctgatcatgattgtaccatcatggatgcagtttgtgcatgagtttcgaatgcatccttttttctgggtgctttcctttgttttctcggagccatccaaaagactgactttatgtatctattgggtgtgtataatttg

SEQ ID NO: 6767 - DNA, 361 bp, Glycine max
  unsure (1)..(361): unsure at all n locations
  Clone ID: PAT_MRT3847_106119C.1
gctggatcttaagggcgccttttnttgttttttgaaagccttttcaattaggagtttattcggatcaaactgtataaaacaaccgaagggttggagaaaaaatgtaatagaaaatagtaaattatgtctcgtgtacctattgcctgtaaacaaaactgctgttcttaatagcataaaggaaatatccagcctccgttaggtactatgcagtagcaaacagaaaccaaagaaggctgagcagggaatagctatctggcagctgatagcaccacctcataagctcatagctgctgatcaagaaaagattccttgggagttctggaggacataatcatctcagttacattttcagaaacattct

SEQ ID NO: 6768 - DNA, 247 bp, Glycine max
  Clone ID: PAT_MRT3847_10611C.1
cggacactgattttaaaaacattgaacgagagaggcatggctcgtcagaccttcatcatgatcaatccaaatggccttcaaagagggctgattgtcgaaattattaactaatgtgaaaggaagggtagttacttgactggttcgaaactcgttactgtggaccgtacttatgctgagaatacactatgctgatcagtttgcaaagccaagctttagctgtatggccgattacattgtccatggccct

SEQ ID NO: 6769 - DNA, 432 bp, Glycine max
  Clone ID: PAT_MRT3847_106120C.1
attcggctcgagcaaattgtcaaattcacattactctctcttcactctttctccgtcatgactacggaaccagacgttgaatccaagtatgcccacaacggcaagggcatggtgggcaccgccattctcctcttcattctcataataatcattattttcttccacacctacgtccgctcctgccgccgtcgccgccgcttctctcattcgcttccgaccaattcctccgccgccgcctctctcgacgacccgtgcctcgacccttccatcatcaagtcccttcccacttttactttttttcggcgacttccaccgctctctccaagactgcgccgtgtgcttatcggagttttccgaccgcgacgaaggccgcgtgctcccgaattggaagcactcttttcacgctcattgcatcgacacgtgggatcgggt

SEQ ID NO: 6770 - DNA, 455 bp, Glycine max
  Clone ID: PAT_MRT3847_106121C.1
gtaacttatcatatctcatacttatttcatgtaattcttttgaagaatatacagaacacaattaggaagtagggaaaaaactaactgctccatctccaaagtatattcggtcgtattaattaaaaaaatgaggaaagaaaagaattcaatctatatctccattgtgtgttttccatatacatttcgatggagttgattttattcttacaactttctgtcttcgttgtccctgcttctttgtcagattttcctgaggattactatttacttttaccacatcaactttcactatgtgatgatctgaagtccctttggaagataggactaagtaggatccagaaacgaatttatatggagaatctgaggaagaaaatatgtaatcaaccctagttccatacttacaggtcccttgtacacctgcctaatatttataatttttaggaacttaatataaa

SEQ ID NO: 6771 - DNA, 1199 bp, Glycine max
  Clone ID: PAT_MRT3847_106122C.1
gtccggattcccgggtcgacccacgcgtccgcagtcacacaaacatacgtcgtgcttggttaatggaagctccgagcatggcggcgacggagcgcacggtgttgcagttctcttcttcgcagagcctctcgacgaaagttcaccctctcgttgtcttcaacatctgcgattgctacgtccgtcgtctcgaccaagcggagcgcgtcatcggaacgctactcggctccattctccccgacggaaccgtcgatgtccgcaattcttacgccgttccgcacagcgagtccgtcgaccaggtcgctttggatattgagtatcaccatagtatgttattatcccaccagaaggtgaacccaaaggaagttatagttgggtggtattcaactggtcttggagtaactggtggtagtgcattaatccatgaattttattctcgagaagtacccaatcctatccatttgaccgttgacacaggattcacaaagggagcaggcaccataaaagcatatgtttcacacaatttatctcttggagatcatcaaattgctgcacagtttcaagaaattcctttagatcttcgtatggttgaagctgagcgcattggatttgatactctgaaggcaactgctgtcgacaaaatcccctctgatttagaagggatggaagcattaatgggacatctattggccttgatcgatgacattcacaaatatgttgatgatgttgtggaagggcgtattgatcctgacaacaaaattgggagatttatatcagatgctgtaggctccattcccaaattgccctcatcagcttttgagaagcttgtgaatgacagcttgcaggaccacttgctcttgctatatttatcaagcatcactaggacacagcttagcctggcagaaaagttgaatacggctgctcagattttgtgattctgtctattcatgaggaaatgcaattttgtttatggaagttaccttttgtgatttaccccaaaatcttggaatatcagtattttatttattgactctgtaaaatgctgggcataatattgcataagcaattaagtaggtttcttgtttgagcctttgaggccgttacgtattagactggttagttcacttgttatgtactcacgtaatctgtcgcgtctttaaaaacaatagtaacaaaagtgaaatccttttctccgctaaaaa

SEQ ID NO: 6772 - DNA, 702 bp, Glycine max
  Clone ID: PAT_MRT3847_106123C.1
aaacaaagcccctttttctttttggggtaaaaacaattttttttttttgcttaacccaagaaaattaaacaaaggtcccttttcatcctaacccccccccccctggggggcaaaaaacaaaattcttcaattttcaaaaaacaggttaaaaaaaaaaaatatggggccccaaggggcccaaaaatgggcccaaataaattatctccccctgggctcatcattcggggggggggggggctttcaaaaagccccttttggggaaggggcatttcccctttttttcctcttttttaaaccctatatcctttttaaaaaaaaaaatctttaattttccccccccggggagaattaattaaccccacatatttaggggggccttttccctccggggcaaaatctttttttttcctcttaacacccccaactgggccagggtttgaaaagcgctgcctgtgggagggggctaaaaggaccggttgtttccctggggcttttgggcccccttttaattaattaggggagcgcgggggcgtttggggggggggggccaaggggggggggggaacctggccgggggggggggggggggcctgggagagggctagggaacggggggcggggccttggcggggggggtggggagaacccggggggggccccggggtgggcggggggggggggggctaggggaggggggggggg

SEQ ID NO: 6773 - DNA, 585 bp, Glycine max
  Clone ID: PAT_MRT3847_106124C.1
cccacgcgttcgggcagtggcggtagcggtggcagaagcggtggtgatcagggtggtggcaatgtggaggatgtggctctgaagaagggtccttggacaactgcagaggatgctattctaacggattatgtgacaaaacatggtgaagggaattggaatgcagtgcagaggaacacggggttgaatagatgtggcaagagttgtaggctcagatgggctaaccatttgaggcccaatttgaaaaagggtgcattctcacctgaggaagaaaagatcattgttgatcttcattcacagtttggcaacaaatgggccagaatggctgctttgttacctgggagaacagacaatgaaataaagaactattggaacacaaggattaaacgccgccaaaggcagggtctccctctctattcagatgagcatgatcataaccatcgttccacaacaccaacctctaccaccacaccttccccatgcctgacaccaacaggatcaaaccccaacattgccacaagttttgagttcttcaatcaaaaccaacaacaacaacaacaataccaacaccaataccaataccaaaca

SEQ ID NO: 6774 - DNA, 213 bp, Glycine max
  Clone ID: PAT_MRT3847_106125C.1
agttgtgggtgggactcaacttagattccaatctgcttgctataaaccaattgtcgtgaatggagccagtctggaatcactaaaatcaaattcaatattatctgcccccccatgttgctggatctgtactatcaggataggtgcaactgaagacagccattgcaacaaggcatctcatgaacagacacatgatattcaccagctcacgcaaac

SEQ ID NO: 6775 - DNA, 294 bp, Glycine max
  unsure (1)..(294): unsure at all n locations
  Clone ID: PAT_MRT3847_106126C.1
gcaatgtttcctttaacaccattccaaaattatactgagatgacgcatcatccacatcctcttcaggaattagacgtagaaacttcctaaatcctgaagttcgaatactgatcatagcggtggcaaaggagaaaagtacctcaagaacacgaagggtgacctgtaaaaagcaactatataagtttagtgcttgatgcatctgtaatcgatgttattatgtacttcattttcaaaaaaaaaaaaaaaaaaaaaaaaaaaaaaaaaaaaaaaaaaaaaaaaaaaaaaaaaanaaaa

SEQ ID NO: 6776 - DNA, 487 bp, Glycine max
  unsure (1)..(487): unsure at all n locations
  Clone ID: PAT_MRT3847_106127C.1
ggaccacccacgcgtgcggccacgctgtccgcgcgagagttaccacattttggatgatcacccganacccaaacagaaaaggcgagagaaaaattcttaaatcataatttaattgattccatgatcttattgatctattccacatcataatgctctacatacattataataacttatctactcgagccgtacccatataaaacttcttatacctttctagacggcgggtgcattaattatctatctctatccccaagaacctattatcgaatccctgcaatccacgttagatctccaacacagacaatagatccttcgaaagtgcttctttatgatccaataaagatatcaacctatttaaatattccagttatactatatttactacaacgacgcgctcatcctacaggaacagctcaggacattacataaaaggcttgtgttttatggaacttatcctttatcaacacactaaattccttttatt

SEQ ID NO: 6777 - DNA, 204 bp, Glycine max
  Clone ID: PAT_MRT3847_106128C.1
gggcaacataaaggccattgtactctataataacaaacaccaagccagccattcacacgcaagacccccaacctatataacgcgacaaaacaacaacactgcacattgtactaagcaaaacagttcacgtctaatttaaaaaaggacaaaggaagcacagtccctagcaataagcgacccaaagtatgctaagctgctaagctt

SEQ ID NO: 6778 - DNA, 423 bp, Glycine max
  Clone ID: PAT_MRT3847_106129C.1
cttattaagagggatattaacctttactagacacccccacactttaagatatttcagatttggttctctttttctccatagctcataaagattttttttttgtttataagatactcttttaagaatactacatgcaaaatataaagttttaccaaagggtttattttattatttggggtgttatattttcacaagcttatcttttatcaatgagttataaataaagagacaatcagtcaacatgtaataacaaaatacttgcagtagtaataataacgttaaacaataaaaattaaaaaccaaacaacaaatgtcctgatttttaaagacttgtgttcacaggatcatttgaccaagtaaaagatgaatgaaattagaagtatgcttttagtttttcacataaactaattctaaaagcatttt

SEQ ID NO: 6779 - DNA, 769 bp, Glycine max
  unsure (1)..(769): unsure at all n locations
  Clone ID: PAT_MRT3847_10612C.1
cccacgcgtccgggtccccggatccgaaggcccggcgcgggccgggggcctggtcgccgatgtggtgtttgtgatcgaggggacagcaaacctggggccgtacttcgaggagctccgcaagcactacctgctgcctgccatagagtacttcaacgggggaccccctgcagagacggactttgggggagactatggtggaacccagtacagccttgtggtgttcaacaccgtggactgcgctccagagtcctatgtacaatgtcacgcacctaccagcagtgcctatgagtttgtcacctggctcgatggcatcaagtgctgagccatatcctgaccctgcgagaatgtccaacagcctttccctgctgcctgccaatggcatccctagaaagttatcttcaggcattgtcaagtgtcgatgtcttctaagaacgtctgggaggaacccccatctggagttctgggaagccccaaggccctcgttgctgcacatcagggatggtgcatatgaggattccaccacatttggtcagatgttcatgggncggtggtggcgagagctgtagtctcatcgctgaaggtctgagcactgccctgcagctgttcgatgactttaagaagatgcgtgaacagattggccagacccaccgagtctgtctcctcatctgcaactcacccccgtaccttctgcccgccgtggagagcaccacctactcangctgcactaccgagagcctggtgcagaaaataggagagcgaggcatccact

SEQ ID NO: 6780 - DNA, 136 bp, Glycine max
  Clone ID: PAT_MRT3847_106130C.1
ctcacgcaccttgaccacacccagcctaattacatctccatgcctttgcccattagacgggaatcgtcactgacctatttggaatccatctatactcactggtttaaaggctaacgagcctcgagaccctagcttg

SEQ ID NO: 6781 - DNA, 189 bp, Glycine max
  Clone ID: PAT_MRT3847_106131C.1
ggcttactttgttggggtacttgggatggcccatgggtttagtgggtttttggctgttttgttggaggttggaacattggaaagagttaaactagaggcttacttatgctggttttgttctgtgaatagggtccttgattatgaaaccgcttgtgccttcagtgcacctcaacaattaatccatgccaa

SEQ ID NO: 6782 - DNA, 1273 bp, Glycine max
  Clone ID: PAT_MRT3847_106132C.1
cttaccttttctcttaatccaaatacgatggcagccatggcaaccacaaccctctcttcaaaccccaaactctcattcttcaacggaaagcccgtcacatattcttcccgcgtcgcgcccaccaccaaattatcctcatccaaacaaagaatccatcgtgtcacgggaaatgacgcgccgctacatgaccgacatgataacctacgccgacaccgacgtcgtaatcgtcggagccggttcggccgggctctcctgcgcgtacgagctcagcaagaaccccgccgtgagcgtggccatagtcgagcagtcagtgagccccggcggcggcgcgtggctcggcgggcagctcttctccgcgatggtggtccgcaagccggcgcacctcttcctcgacgagctcggcgtggcgtacgacgagcaagaggactacgttgtcataaagcacgcggctttgttcacgtccaccatcatgagcaggctcctcgcgaggcccaacgtgaagctcttcaacgcggtggcggcggaggacttgatcgtgaaggaagggagggttgccggggttgtgaccaattgggctctggtttcgatgaaccatgacacgcagtcatgcatggaccccaacgtgatggaggcgaaggttgtggtgagctcttgtgggcacgatggaccctttggcgccactggggttaagaggttgaagagtattgggatgattgatagcgttcctggaatgaaggctttggatatgaatgctgctgaggacgctattgtcaggctcactagggagattgtgcctggcatgattgtcactggcatggaggttgcagaaattgatggctccccgagaatgggtccgacgtttggggcgatgatgatatcagggcagaaggcggctcatttggcgttgaaggctttgggtaggaacaatgcaattgatggaacgtgtggagttggaagggaagaaccccagcttattttggcttctgcggacactgaggaaattgttgatgcttaaattaagtttcaaattatataccttttcttttctgttttgtctctgcttatgatttgaattttagaataaatttttaaaaatgtgaatgatgaaggagacaatacctgttgttacttctttgaatttggactcacctatagcagatgaaaccaaattatcaaggatgggagagatagacgccacttaatacatttttaatacttactgtatgaattaaattcaagcgctagatgataatgccaagtgactacttaacac

SEQ ID NO: 6783 - DNA, 270 bp, Glycine max
  Clone ID: PAT_MRT3847_106133C.1
gaaaaattttcaccgtccaccactgtaagatgttttattcttttatattctgtatggatatttggctaatttatcattgattcatcattccaggaaatgaagtaaaattctttaatgaaatataggcaaatctttggagaaactttctgacagtatggcttgatgtttgagagtaataatcataatgttgtgaaagcaacacagcatgttgaatctcatggcaattgggtttgtctgaggatatatattagctatctagaagaatgttgt

SEQ ID NO: 6784 - DNA, 1309 bp, Glycine max
  Clone ID: PAT_MRT3847_106134C.1
tctatctccaccccaaaaaagcatacagttttctagatttttcagtcagatatttcattcttcactcccccgtctcagtttataaaaccccactccgctcccctaacaataacatcttaaagtcccaactttttctacttaccttttctcttaatccaaatacgatggcagccatggcaaccacaaccctctcttcaaaccccaaactctcattcttcaacggaaagcccgtcacatattcttcccgcgtcgcgcccaccaccaaattatcctcatccaaacaaggcacaatttccatgtccctaaccccacccccctacgacctccagtccttcaaattccagcccatcaaagaatccatcgtgtcacgggaaatgacgcgccgctacatgaccgacatgataacctacgccgacaccgacgtcgtaatcgtcggagccggttcggccgggctctcctgcgcgtacgagctcagcaagaaccccgccgtgagcgtggccatagtcgagcagtcagtgagccccggcggcggcgcgtggctcggcgggcagctcttctccgcgatggtggtccgcaagccggcgcacctcttcctcgacgagctcggcgtggcgtacgacgagcaagaggactacgttgtcataaagcacgcggctttgttcacgtccaccatcatgagcaggctcctcgcgaggcccaacgtgaagctcttcaacgcggtggcggcggaggacttgatcgtgaaggaagggagggttgccggggttgtgaccaattgggctctggtttcgatgaaccatgacacgcagtcatgcatggaccccaacgtgatggaggcgaaggttgtggtgagctcttgtgggcacgatggaccctttggcgccactggggttaagaggttgaagagtattgggatgattgatagcgttcctggaatgaaggctttggatatgaatgctgctgaggacgctattgtcaggctcactagggagattgtgcctggcatgattgtcactggcatggaggttgcaaaaattgatggctccccgagaatggtatgcactttctattttaattttcgtcctaattactctagtatattgttattattattatgttaatcacaagacaaaaacactgggggtgtgaaaaagtatagtcaaactttgaaaaaaaaaaatattatttttagagagaaaattgaatcaaactattttataatacgaacgaattacatctaaaaatttaatttgtttaaagaaacaaatcaatttactttattaaagcggttcgattaatttggattttt

SEQ ID NO: 6785 - DNA, 546 bp, Glycine max
  unsure (1)..(546): unsure at all n locations
  Clone ID: PAT_MRT3847_106135C.1
ggctcgaggttgttcatctcgtacagcgaaagagtaaccacacagcatatacaaatacggataaaaatatacagagttcagcaacctaactcttttgcttccctttctctgccttctgcgtttatctgtttcagactaaataagcaataagtggcccaatcccggaatatccacgtcaatgtgggacacgtatcccccatacgggtcccacttttgcttctcatgcccccgcgaagattctgctatttctctacttaagtaaaatggccacaagcctttggattatggaccgtgctgggtattttagtcaaattcaccacacgcctcttttctcatgtcatttaaattaagttacattttaatttggcgcattccaattgaaactcgtatatatatatatatggcccatatgcatcgatcatcgtcacgaatttagtaatgagggggaaaacacgagagaaaagtccaacgtgtcgcagatctgtgtgctgcaatgaggcgatattttgtttgttgaagcgcgtgtgagacntttgagcagcggtg

SEQ ID NO: 6786 - DNA, 1512 bp, Glycine max
  Clone ID: PAT_MRT3847_106136C.1
ccacgcgttcgcccacgcgtccgcttttctcttaatccaaatatcatcatctgaaacgatggctgccatggcaaccacaaccctctcttcaaacccgaaactctcatttttccacggaaagcccgttacatattcttcccgcgtcgcacccaccaccaagttattctcatccaaacaaggcacaatctccatgtccctaacccaacccccatacgacctccaatccttcaaattccaacccatcaaagaatccatcgtctcacgcgaaatgacgcgccgctacatgaccgacatgataacctacgccgacaccgacgtcgtaatcgtcggagccggctcggcggggctctcctgtgcgtacgagatcagcaagaaccccgccgtgagcgtcgccataatcgagcagtccgtgagccccggcggcggcgcgtggctcggcggacaactcttctccgccatggtggttcgcaagccggcgcacctcttcctggacgagctcggcgtggcgtacgacgagcaagaggactacgttgtgataaagcacgcggctttgttcacgtccaccatcatgagcaggcttctagcgaggcccaacgtgaagctcttcaacgcggtggcggcggaggacttgatcgtgaaggaagggagggttgcaggggttgtgaccaactgggctctggtttcgatgaaccatgacacgcagtcttgcatggaccccaacgtgatggaggctaaggttgttgtgagctcttgtgggcacgatggaccttttggcgccaccggggttaagaggttgaagagtattggcatgattgatagcgttcctggaatgaaggctttggatatgaatgctgcagaggatgctattgtgaggctcacgagggagattgtgcccggcatgattgtcaccggcatggaggtggcagaaattgatggctccccaaggatgggtccgacgtttggggcgatgatgatatcagggcagaaggcggctcatttggcgttgaaggcgttggggaggaacaatgcaattgatggaacgtgtggagttggaagggaagaaccccagcttattttcgcttctgcagacactgaggaaattgttgatgcttaaacttactttcaaattagctagatatatagcttttcttttcttttctttctgtttggtccctacttaattatgattttaattttggaataaatgaacaacatgtgaattatgaaggagacaatacttgttgttacattgtatttggacagcacgtgccacgtatagcggaggaaaccatatattatcaaggatgggagagatagacgccacttaatttttttcatctattctcaatcgatgaaaagtgaccagtatatttctttctataaggtatctgcttgtctacgggatagtatccactcaattgttatgtaaattgtaagaaagtgacgttaataaaggctatgttaacatattttggggctaaaaaaaaaaaaaaaaaaaaaaaaactcgagac

SEQ ID NO: 6787 - DNA, 169 bp, Glycine max
  Clone ID: PAT_MRT3847_106137C.1
cacgaatttcattgcagagtgtgattttgagtatcaggatcaatggttgcaattgtattgggaaacgtgcttcgagatggcatcttggattacttggatgaagagaacaaaccccaaactgtctccattcactctctcacagcggcaagactagtcagcatctaggggg

SEQ ID NO: 6788 - DNA, 400 bp, Glycine max
  Clone ID: PAT_MRT3847_106138C.1
ggctcgaggtcttaagattttttgggggatctgttccatagcctcgagggcttggacctgacttgccacgggttcaaggtacaatggtctcattttggacttgcttgttgctctgtctggtggtttagttcacggcgtgtgtcttttgattcctggaggagactgacatcgggaggcccgtgagtcggctacggtagcatccttcagactaccttctgctattggtgatgttgcttgtaaggttttggcagagatataactataaatatatgacttcaatgtcaatcttttatgcggaaataaaggttgtcgtgttttgcgtgagctttaattaactggtgcgactggggtcatctcatttgctatggggcatgaagtggaccgaaattgtggactagtg

SEQ ID NO: 6789 - DNA, 368 bp, Glycine max
  Clone ID: PAT_MRT3847_106139C.1
ccttagcgattgagtttgtttgaggtgactatgtctatgtacaatggttgttattacaatcatcgatgtagtggggttcgagggttttgttgttgtgtgtctaaccgtctgagtctgcgcgtgcggtgttgattcaatgtccttgacgctcacgcgctagtgttggccgttgattgtgacggatttgggttcccatggctcttcctcttcttcatccatatattcggtttgagagttttggttttcactgggggggcttggaggccacttcttgcttttgcttagggtgctgctttgcttcatgaaggacgattgggtctggtttggaggcgcttgtgggacactttgaccttgcgcggacgcgtggg

SEQ ID NO: 6790 - DNA, 257 bp, Glycine max
  Clone ID: PAT_MRT3847_10613C.1
gagggggcccctaaccaaacctaatatctttagatgacccatctattccacccaccatgcttccgccaccattggttgtattataggaaacatgagttctctcaccactaactagactcccatgccaacttctaaccagatatacaaaaagaactgctcttcctttttccactctctgccacacttgttttcatatatgatttccctaatctttcaccatactactccttcttaaaaattcattataattcttttcc

SEQ ID NO: 6791 - DNA, 259 bp, Glycine max
  unsure (1)..(259): unsure at all n locations
  Clone ID: PAT_MRT3847_106140C.1
atgaaaactatacgattcgattccttgttttnaatggacaccttcttgaattctnnntcttctttcttcttcgagnngccgctggagttangatnctctnnagaatttncgtgagatntntcngntggttnngaatcagatnaaangggtttattttatgttatgttgcgctgtggtggctgctgctgttggagttttcttcntgttctgtggaaattgggggttttctnancagttggcttccttggaagctggtttg

SEQ ID NO: 6792 - DNA, 450 bp, Glycine max
  Clone ID: PAT_MRT3847_106141C.1
aattctgctcgagcctctctatacatagagtggataagccgatgtaattgtgacttaacttccagacaatactcccaaaaagcacaaataactctgtgcaccgatccactttgctgatcagttgaatcttccttttctcttctgaactctcttactgaatggctctaattacagaaatatatgccaaattgacatactagctgggccatttggatatgttctcttgaactcaagcaatatggtgcctgtcctcaaactaaccattctgtgccgagccttttgcttctagccatgtgcaaaacctactacggcctcaccaattactgttaaaggattctggaacattgatgtactcattaatgatgcgatcttagatctgtatgtcaaccgacttcatgagtacttcatcggtagctttaggcttcaacaatagctctcagctaaggattg

SEQ ID NO: 6793 - DNA, 453 bp, Glycine max
  Clone ID: PAT_MRT3847_106142C.1
tctttctaccaatatatccgaattgagttaatctgtcgtagtttgccattgaaagatgggttcaaagacgaagatagcaagggttatcctaggaatgttggccgtgatccttcttatctcctcagaggtggcagccagggatttaaaagagggtgaggttgtcaaagagactaatgaagagaatgatgccaaattagttggtggtggggatgacatctatgaaaatatcaattgtgagcgttacaaatttgtggatttaaacccgaccattggttgcccctgtggctgttgtaagttgtatatagtactgcagttagtttgcgtacattgctgcccaaaaactcggaattgagacggtgtagtccatcaataaaactaatctcatgttgtacgtgagatgcatgcatgatagacaagaatgacggtgtctttcttaccactagagatatttca

SEQ ID NO: 6794 - DNA, 421 bp, Glycine max
  unsure (1)..(421): unsure at all n locations
  Clone ID: PAT_MRT3847_106143C.1
ccacgcgtccgacttgaggttcaaatatgatgagcttgtaacaagaaccatagatttctttggagaaggatcagatagtgaatatgttagtcgatctttgtggcctgaacttggaagatgaagggattgatcaaatctcttccagcacctctatgatcattgatttatgctttaaagttatcaaaggacagggtggtcccttgtctagagcatcccatattgatgctgagttgtttgaaaggattcaaagtctcttgtatgttagagatcagggattaatactctatgaagatatactggaagaggagatgctaattagatcagatgagaataagctgtcaaatgagttgaaagtggcatctgaggaaattatagcactgaaagaggaaaggagttctctgctgcnngatcttgaacgatc

SEQ ID NO: 6795 - DNA, 333 bp, Glycine max
  Clone ID: PAT_MRT3847_106144C.1
gttgagcctattatcaacatgaacattcaacacaaacaatttcagtgaatcagcacaagtttttatttttttttgtcttcgtgattatgattattgggatcatgctcttcgcttcaattgtccttttcaaagcccactgacttttttttctctctgaatcacatcagattcaatggaattataccccctgaatgcaatggtggtctgctaatgtcgcgcggctactaaaggatgttggtttgtgccacagggcctctggctgtgatgcatggtatatgcttcccggatcaccaaatatgagagggccggacttattatggatgggatatagat

SEQ ID NO: 6796 - DNA, 147 bp, Glycine max
  Clone ID: PAT_MRT3847_106145C.1
cgtgacagggtgagacctgtcgcttttagagagaattctccgatccgcttgcttttgcttattcagattaagttcccaaaggccaaaaatatgtgaactcagaataggggtatcaaagtgatgtagtctgccgggccgggttgttct

SEQ ID NO: 6797 - DNA, 292 bp, Glycine max
  Clone ID: PAT_MRT3847_106146C.1
gcaccagactaactttacaattccattcatgattcatatatatattttcaccctttttagggctaataaaagggtgattcatatgataccattaatatccaatgtagaacaaatataggaatgttgatgtatctgtgttatagccagtagatttatgactttctttgctagatgttatactcaagctcattattttttttaaagataaaaaaaaaaaaaaaaaaaaaaaaaaaaaaaaaaaaaaaaaaaaaaaaaaaaaaaaaaaaaaaaaaaaaaaaaaaaaaaaaaaaaa

SEQ ID NO: 6798 - DNA, 464 bp, Glycine max
  Clone ID: PAT_MRT3847_106147C.1
ctccaaacttctacttgaaacttcttccttttctttccccccaaaaaaattctgcttcgaatcccatggttccagcaagagccactcaaatggttcagccgaggagaggtcgaatcaagattatggtgttcaagagcgtcgccgcggtgttgtcgtgttccggtcgtcggaaggagaaggacaaggagactctcgccgctcctctcagctcaacttccagtggctatagttcttctgaatctctcaactctcacaccgggtcccacagattctcgatttcaaccacttcttattagagacaccttcactttattatactactactgtatatatatgtatatagttttgtccaatttaatttttaatggcttgatgtcttggttctttttttattctaatgttaatgtggatatagttgttgatgttgtaaataaaatttcgcagcttctgagttttatctccac

SEQ ID NO: 6799 - DNA, 337 bp, Glycine max
  Clone ID: PAT_MRT3847_106148C.1
actttctctcgttcggagattggtaggcacagaacatgagggatatgatccttctgttggtggaattcaaaaatatgccactccgatggtgcccctagatgaacaaattctttctacggatgcacatgatgtggatgcgtgaatgggaagcatgtgttgatgaggaggatccctatgaggaagaaactcctagagcagcactgaatggtgttgagggttcggactatatggaaggacttcctatagacacatctgggggaaccactcttgtgcttgcactcttgactggtgatttgggcaaaggcagatttggagctggggatggtgaacagatcac

SEQ ID NO: 6800 - DNA, 291 bp, Glycine max
  Clone ID: PAT_MRT3847_106149C.1
ttgtcttttatgaacaatccagcgagaacccggaggctgttgtattcgacgccttgtagccaattgtgttggtgactaacagtgatggcgtttaattccctggccttacgcacctagttgaagctctcgttcaacaaggccttttcaatgttcacgtctgcgttccttaatcggacaaataggattcggctctctccgttacgctccgagatactattgtagctgcttctgccaaaatatgtggcgccaccgtctttgagatttcaagaacctcctgtgggattgagtttt

SEQ ID NO: 6801 - DNA, 110 bp, Glycine max
  Clone ID: PAT_MRT3847_10614C.1
tcgccttgaactggacgagaattataggagcttgaaggggtcgctcactttgaacacgcacgtagtcctccttactgctattaatgtatccatatcgttttgtgtccatc

SEQ ID NO: 6802 - DNA, 322 bp, Glycine max
  unsure (1)..(322): unsure at all n locations
  Clone ID: PAT_MRT3847_106150C.1
ccaaattgaaactctgcaaaagaatataggttcccgcatttactacacaagcttcctcgtttattgtataaactagttcacatgttacatagtcttggtcctgttcactgttcacatttctggtcatcatagagtcattcatggatttgtcacgggttgcacaaagccttgacactctctggttctacaccaacatcttgacctgtagagatcagcctgaacccgaagcctcattgattgatcaatttgcacctttagtccatttcaaagagtgtcccaagagagatttgctgaaacccattaccccantgcaacatgagtc

SEQ ID NO: 6803 - DNA, 730 bp, Glycine max
  unsure (1)..(730): unsure at all n locations
  Clone ID: PAT_MRT3847_106151C.1
ccacgcgtccgcggactcgtgggatttgagtcgcgctgcggagctttggcagagactggtttgggtgtagtagtagaagtagccgcctagacacagcactccattctgctctcactcagtcaggagaggagaattgctgaattgaattttccttttctttgttattatctcaccaatcccactctcatcttcctctcattgattcagttcccaaggttgtcgtcatcatcgacgattccgcgctgatttctccattgatcaatgcttataacaaaatacaacaacacataaaactcattactccaaatccttttcccgattctgttgtctcgccaagatgcaagggtttacagcagcaactacagatttcactgaacttcagtctactatgcgagccatcgagcatgcctgcacttccattcagatgcatatcaatccaggagcttctgaggcagttatattgtcattaggccagtcttctcagccatataagacttgccaattcattcttgaaaattcccaggtggcaactgcaaggtttcaagcggctgcagcaatccgagaagcagctattagagaatggggttttcttagtgctgatgacaagaaaggcttgataagnttttgtctatgctatgtcatgcaacatactagttctcctgatggctatgtccaagcaaaggttcttctgtggctcctcacttgatgaaaaggggttggcttgagtttg

SEQ ID NO: 6804 - DNA, 394 bp, Glycine max
  Clone ID: PAT_MRT3847_106152C.1
cgatttcaaatatgtttagacagtgggcctagctcatctaatagcaagggtaaagctgtattaaaacctgctcaagaggaagcacggggaccctaaacacggaatgccgagcgcataagagcatctctagataaagacgctcacatgaaacctagccaaggacacataactttctgtggatgaagaaatggatattatctcctgtgggaattgatgaggcttcggtgattgaagatgatgactttcttgatgaagaggatgaaaaccgtgaagatccactgggggattattatatttgctgtctacttggcttgaaaaaattcgtgacgagaaagtgggggactcattctgatgaagagtcatgttgctgctgctgcaagaggaatgtcagact

SEQ ID NO: 6805 - DNA, 397 bp, Glycine max
  unsure (1)..(397): unsure at all n locations
  Clone ID: PAT_MRT3847_106153C.1
ctctacctcccgcttttcgatgagtgctgactggagggctggtcagtctacacccccctaccttgatggttcagcacctgatgactttggattcgacccaaaaaaacttgttcttttaccaaagaatcgggagaggtttttttagtcaaaactcattcactgcagatgggtcatgcttgctgttccagggattatggaagcagagggattggggttaggnaactaaaaaaaggctcaagaatgggctgggggggggggggggccacgcaccccacctagggaatttatttctatttttttttcttctcaccnttgggggggtggaatgggcgagagaaaacaaaaaaagaaaaaacaatggagcatggagaaggatcctgaaaataacacatacccc

SEQ ID NO: 6806 - DNA, 354 bp, Glycine max
  Clone ID: PAT_MRT3847_106154C.1
ttccttttcttgtcctgagtttcttgctttctcattttcgttcacaaacgtcttcattcatgccattttgcaaccacgatgacgcctccgtcttgcttagcttcaagagctcatttactctcgatagctcttctctctctaatccttggtgtgagtcttgtcatccaaagacagaatcatgggaaaatggtacgaattgctgcctgtgggaaggggtgagttgtgacaccaagtcaggtcacgtaattggcatagaccttagctgcagttgccttcaaggtgaatttcatcccaacaccactctcttcaaactcattcatcttcaaaaactcaaccttgccttcaattattttt

SEQ ID NO: 6807 - DNA, 810 bp, Glycine max
  unsure (1)..(810): unsure at all n locations
  Clone ID: PAT_MRT3847_106155C.1
ctcgagccgcctcgcctcgcgaccaaaccaaactaacaaggatcattcatggcttggttaagaaacctctcaaagtttgccaccatgaaaagagcatcatcatcatcatctcaaagacccaaaaacactgacccattttgtctattaccctccttcacttttttttccaacttcagcactaacaccattgaggagaagccctgtgtgaagccagttgagtataataattattcgggcttgcagccaacaaggcctcatgagaagccacgtgtggtggtgctgggctcaggttgggccgggtgcaggctcatgaagggcttggaccctcgtgtgtatgacattgtttgtgtctcacctcgcaaccacatggtcttcacccctctattagcctctacttgtgttggaactcttgagtttagatccgttgctgaacccattgggaggatccaaccagctatttctagagagcctggttcttatttcttcctcgccaattgtactcaaattgatgcacataaccatatggtgcactgtgagactgtaaccgaaggagtagagacaatagctccctggaaattcacaatctcatatgacaagctggtaattgcattagggtcacagccttccacttttggaattcaaggagtcaaagaacatgccatctttcttcgtgaagttcaccatgcacaggaaattcgtaggaagctgctcctgaacttgatgctgtctgatgttccaggtatttcagaagaggagaagcaaaggcttttacattgtgtggttgtggngggtggtcctactggagtagaa

SEQ ID NO: 6808 - DNA, 344 bp, Glycine max
  Clone ID: PAT_MRT3847_106156C.1
gtcgtcaacccctggcaggacgcataggtggcggcctttttgagaaaataccttttgtctcaagggcaccatttctaaggccatgatacagcaaactgacgggaatcaaatggtaacagtgagaacaccattgaaatccgatcctagcaagcagagcggtcgccaataacatattgaccccatcgggggaggaatctgagaggacaggactggagattggagcacacttacacaaaactctacaataagaaactggctgagagcagccgcttggaagaaaggctgcataaaggccaagaccgcgcaagctgggaatgccgcaatcaaaaggagagattgcgcct

SEQ ID NO: 6809 - DNA, 406 bp, Glycine max
  Clone ID: PAT_MRT3847_106157C.1
cgacacacggaagcttcctatggacatgtaaagtgaacctacgagtgcacgaacttcagcctctgaccactcactactgctatctaccggctcaactcgtccgggactcaacggagacatagctcgcctctgaccctaagctttactagatgacaggcatacgaaccgtcagtgatcctggtgacagcacctccgatcgtctcagcaacgcgaccggcgcatcgtacatcgccgtctgctatgtcaaattcgatgaggccacaggcgcccgtgacgttacagtgatctataccgagcctccgtagaagcttgtcaggaagctcgactggtcaaatgacgttctctttactggtggatgggctaaaagtggtttatattatgaaactgtcacaaaaatatttaagaa

SEQ ID NO: 6810 - DNA, 321 bp, Glycine max
  Clone ID: PAT_MRT3847_106158C.1
cggctcgagcagaaaccgtctttttgtttttcctgctggatgcggcacaacaatggagcctggtcggtgacaagagctgcctcggaagagtctggttccttcacaacgcattctgtgcagctaccttccttcctttgtgtatcagttgacgccaccatgccgtcagtggaacagcgaagctgctacaatcgacaaacccaattctgccagcggaggcagaagattatacaacagacgaagtctctttcgattgctgcaggtgagaaaagacgggttgaagacgttcggaagcacgatgtgttgaatatcggtggcgaaact

SEQ ID NO: 6811 - DNA, 1741 bp, Glycine max
  Clone ID: PAT_MRT3847_106159C.1
tacggctgcgagaagacgacagaaggggattttattcggcgagtgtcatttccttcccttccctcacgatctgaggaagacaccaatcttctctccacgcccttcttgggtaaccgtctgaagtgcagcaatggcagatggattgcattcgcagcatccatcggtagttcagaagttatctggacagtcttatcttgtgtccaggcttgctcctaatcactccagaaactgttctaccactggtagttacttcaatggaggtttgcagtcttcaggtttggttccagtcacggcacacgcgccggctgagaaaggggtgtctggatttttgttggatttcctgatgggcggagtgtcggcggctgtgtccaagacagctgcggctccaatcgaacgagttaagttgctcatccaaaaccaggatgaaatgatcaagagtggtcggttgtctgaaccatacaaaggaattggcgattgtttcactcgaaccatgaaggatgaaggggtgattgctctttggagaggaaacactgctaatgttatcagatacttccctactcaggctctgaattttgcttttaaggattatttcaagaggcttttcaacttcaaaaaggataaagatgggtacctggaaatggtttgctgggaatttagcatctggtggggctgctggggcttccctctctgttgtttgtctattctttggactatgcccgaacacgtttagcaaatgatgcaaaggctgcaaagaagggtggtgagaggcagttcaatggcttggttgatgtttacaggaaaactatcaagtctgatggtattgctggcctttatcgtggtttcaacatctcatgtgttggaatcatagtgtaccgtggtctttactttggaatgtatgattctctgaaaccagtggtcttggttggtggattgcaggatagtttctttgctagttttcttttgggatgggggatcacaataggtgccggcttggcctcttaccccattgatactgtgcgtagaagaatgatgatgacatctggagaagctgtaaaatacaagagctctttggaagcattcaagataatcgtcgcaaaagagggtactaagtcactctttaaaggtgctggtgcaaacatattacgtgctgttgcaggtgctggagtgcttgctggttatgataagctacagctcatcttgttcggaaagaaatacggttctggtggtggaggttaatatacagataatgacgacgacaactatctgaggcaatgatgttgcttcccctttgcattgaataatttggatgaaaaatagtggttttgaagtttccccgaatgtagggtaggggctttataataagaaatcatagttttgcaaacttgaattttagttggttattacttgccttaagcttataatcgtgtagtttgttagaccttttggttgaagtaattgaagactactgttttatttgttcaaaaaaaaaaaaaaaaaaaaaaaaaaaaaaaaaaaaaaaaaaaaaaaaaaaaaaaaaaaaaaaaaagaatccgaagaaacccaaaaagagacgtgggtcccacacgggccttattaccgaagaccttgtcattcttgttcggcgcgtgcgataggtacaactgcttgccgatctttggtagacagactatacaaccccgatggtactgatccttccatcgatccttcatttgttacatttctgcgacaaatctgcccacac

SEQ ID NO: 6812 - DNA, 187 bp, Glycine max
  Clone ID: PAT_MRT3847_10615C.1
ggcttccttagtatccttcctaaagctgcttgttgcggaacttatcctcatgccttcacggtttgctactgactacaaaccaattaaaacgccaccagtggacgatcctccatcgaacaagccaccaaagcacaaaacaccgccattataatgcaaaaccaccgagtatacaaaaccgaaaccaccg

SEQ ID NO: 6813 - DNA, 298 bp, Glycine max
  unsure (1)..(298): unsure at all n locations
  Clone ID: PAT_MRT3847_106160C.1
gnaagagtcgcangcacgcgtacgtaagctcggaattcggctcgaggtaaattgcnttttacattttaaaaaaaaaaaaaaaaaggggggcngccgannagtgagctcgtngaccngggaattaattcnggacnggnacctgnaggngnacnagntttcccnanagtgagtngtatnagagnttggggnaatcatggtnanagctgtttcctgngtgaaattgtnatnngntnaaaattncananaacataggantnnaaaaagnnnnnngnggggnnnnnannagnnnnnnggnann

SEQ ID NO: 6814 - DNA, 1086 bp, Glycine max
  Clone ID: PAT_MRT3847_106161C.1
agagtagaatgcggctttttctgctacgcacccgcctttttttatctgctgccgttaatgaattaaataaaggcctatctacaccactatatataccctccaccctttatttctccctccactctttatttctcgttttctctctctacactcctttcagcacagcacaacacaacacaaaaccctttcccaaaaaaataaaaaataaaaaatggaggaatccaaattcggccaaaccgacaagcgaaagcgagttcgcgacgagtcggactcggtcctcaactcgcccgactcgttaaagcatccccgagccgagtctaacttgtccgagtctctccgagttgactcggacgagtttgaactcgcgcggctcgacccggttcttctcaacatgctgaatgacgcggagaatgtggcggagcgtgaacccaccgtgcttgactctgttattaagagtttcgaagaagaaatactttctccggttccgaacccgaacctagcatccgaggcagatgtgtttaagccgaacctagggtacttattggaagcatccgacgacgagctagggttgccgccgacggtggcgccaagcgaggatgtgttgaaacccgaaacagttgattcggatcgtgttggaccagaaggaatggatctgactgggtttttggggtttgaagatgatattcgtagctacgaaggttttgggtttgtggggtatgatgtgggagataacggtggtggttatgtgacgatagatgggttgtttgactatgcggaacccggtgccgatattttgtggcggtcggagtcgttgcaggctttgtagttggttgggaagattaattaattaattaattaattaacgttttggctaatgaaggtgtataaagagccccagataacgtaggtgggttagatgtgaagttattttaagattctgaaaatttgttgtttcggttggccttgactgaaaacatgttctttaacctctttagcaaaaatgttgtttaaatgtgaatctgggaatcgttaaaattaaaatccttggtaaaactggagtatgatctatttgaacccaggttttcc

SEQ ID NO: 6815 - DNA, 304 bp, Glycine max
  Clone ID: PAT_MRT3847_106162C.1
ctcgagccggttacatatttaacttgatgacccaaatgctttaccggatttaatattaaaaaattccatgcttggttaataataccggtggggccaggggtattctttaatgcttgaataacttttttttgctaaaccatggggttccctgaacccttaatcatccatcggaattaaaatggttccatggaccaaattgaaccgggtctaatggaaatttccttacctttttgccttgtaccccaaataaccattgccatatcctttttttgttaaaaaaaaaaccaccagaggaggagaccaa

SEQ ID NO: 6816 - DNA, 459 bp, Glycine max
  unsure (1)..(459): unsure at all n locations
  Clone ID: PAT_MRT3847_106163C.1
cgtaagcttttatgctctagggggggggcgttttttttttttttattgaaggatggatgatcttattaagagggggcagggggggggagctaaatcattgggtacaatagagtaagcgccagcgcaaatatgaggaggctcttaccgggagcaatttccatgggacaaaaagtgattaaacgggggtgagggggggggggaatcagtgctgggggttccatgggggggtattgagtaaaccaagggggggaacagtggggttccaaggaaatgagcgggtangggtccaaggggaangggcacccatggggggtccaggttctattgggcgacttcccagatggggggacaagacaacattttcaaggccaaataggtcttctggggcagtggnggtcattttcaaacacatctagcgcagcaccacccaaacgagcttctaggagagggtgggctaac

SEQ ID NO: 6817 - DNA, 326 bp, Glycine max
  Clone ID: PAT_MRT3847_106164C.1
ctagatcgcgagcggccccctttctttttggttttttctttcttttttttttctgtttttttttttttttttttttttacgaacaaaaaggacctcgaaaaaaaggaaccaaacccccccccgaccatgagaggagggccaaaacatggaccacaaaccaaaacgaggcacatggggaacccccccaaagcccacccgagggcccacaccgaggggatgtcccagccccccacacaaatgatgcaaccaaaaaactgagccgcaacgccggtccggaaacgacaacagcagtcaagcccagcaccccaacaacaggggtccaaccc

SEQ ID NO: 6818 - DNA, 283 bp, Glycine max
  Clone ID: PAT_MRT3847_106165C.1
catgcctatatgaccagcgatacagaaccctaatgagttccaatattaaatatatacatcctttagaggagaccaccgaaaacatgtacttgacacgagagatgtctaactaaattactattggcgcttctgaattagatacatcgccacttgctgagtaagtcacacttgatatttcgaaggcccaagagtttcgactatgggtcgatagctcctgtttgataaagtggcatctacgtttgagatgatgattgggagagaactttcactataagaggactat

SEQ ID NO: 6819 - DNA, 743 bp, Glycine max
  Clone ID: PAT_MRT3847_106166C.1
ccacgcgtccggtaaaacaccaattgcccgtacgtccgtttgtttcttccccttttcttccttccctcgtctttctggcttgtgtttcagtctcagtgcgactcacgccatggtggattcatctcaactcctcgaagcagcttctgatttcgctcactacacaggggcgcacagcgatgattccgccagggactttcttaatcgcttccctctcccagtcatcttcagtgcattacagactcagtttgatgtgcctggcctagaaaatactcttgttacatgccttgaaaggttattcaatacgaagttgggtgcttctctgatcccgcagtatatgccttttgttcaagttggtctgcaggcagattctcaagcagtcagatccttagcttgcaaaacagttacatgccttattgagaatctagacaatgatcacaaagttgcagctagtgttcgtctaattaaagacttcaatatgtatcctcttttgcttgattgctttataaaggggtaagtagagaagtactacgggtttgttatcattcttgcttcgccaaagtgtttatttcaatatcatgattgtgccgatgattgaattacctacaactaagggatttggttagattgagtgatttattgccaattagggtaagctgaattagttaagaattcattccaaggaggtgcttgatattcattcctttttcatttctaaattgttaagaagacagtataaaatacat

SEQ ID NO: 6820 - DNA, 132 bp, Glycine max
  Clone ID: PAT_MRT3847_106167C.1
atggttatttgtttcaaatttgagtgttctgctcttgtatttgtcaataatgaagagtcaaatattaaaagaaaaactgttattgtcttaagaaaaatccattcacataatcaattgttaatttgttattga

SEQ ID NO: 6821 - DNA, 528 bp, Glycine max
  Clone ID: PAT_MRT3847_106168C.1
cttactgtagggcaagctggtacacctgtacggattgtgccggtaatcccagctcgggccacccatcggccatccggcgcgtaagttaaccttgtttcattcgctcttgtttaggctgcgggatgaccctaatgaggaacgatccatacaactgagtaataatggccatacgaggccgttgtttgttcacgaagttgtccatgacgatgattaccatgaaggccgcgtcgattcgctagggtgaacacttgatcctggtggtcagactgccggtctcgaacagacacctgcctctccaagtggcaaaccttatacacgcccttgattactcaaggcctaacctttggcactagcccgaacatctaacttcattgtgactgagaaaaccctgtcattaccaaactcagtcccctgtggaagcatcatctttagaccacctggggtatcatctaataaggcggaaccgatcgccctacacaccagttgctcagcctaaatggcgaacggcacctaatgcggaatgatgtc

SEQ ID NO: 6822 - DNA, 154 bp, Glycine max
  Clone ID: PAT_MRT3847_106169C.1
attcttctctatcacacttactatttacaacacttacttacaatcaaaagcaagaacaactatatcattttgtggaaatcactactatgatcaatatctcaaggttaacaaatatatcaacatttataatcatacctactaatacagctactct

SEQ ID NO: 6823 - DNA, 371 bp, Glycine max
  Clone ID: PAT_MRT3847_10616C.1
ggaattatgggtgacccacgcgtccgccgctcctcgtacacctgctaggggaacacctcctagggggcttcagggggcgtctgcatattgcatgatagagcgcgcttcgaattctgtttggagacgaatttaaacttgattcgcacgcccaccggcttttaattcgtggctggctctgtgttaacacaccacgtgaggagcattcttagcaacaaaagccgccgttctagaggatacaagctgacgttctcggccttgccacttgatgagctttctatagtatcacgaatatctaatctatcggcacggctcttactatgactctactgaaagaaccatgtaagcccctaattttatcccttttcagcaca

SEQ ID NO: 6824 - DNA, 728 bp, Glycine max
  Clone ID: PAT_MRT3847_106170C.1
ccacgcgtccgctcacactcctagacttcccttcttcaaaccccctttcaatttcagataaccctctttgcacaacgattctcagactctgagctctctcgtcggtggtggtcagagaaggaaaatagtcgcaaacaaaggagaaaaagaccccattgacaagcggcacatcgtttggagctctttctactaccaacaaggatcgcggcaggatgcatggcgtctatggaacaccacgttctcgaactcggcaaccccgatctctgagaaaatgctctccatgaactctcaaggaaatagtttcaatattccctgttatttcacctccaaaccttactccagcacaatcaactcgagtgtgcaatgctcttgctctttttcaggtgagaattgatatgaccttgtcctattaagttttatatcatgtgttcaacatatagacactttcaatttgccacaaatattattttacatctgaaaatcaattggtttggagatgagtccagtccatggttctaaattgctgctccaatacagttctattgtggctaggtggcagcagatgcgttgcgaaattttgagtgattgaaattcacactgcaattgcggattgttgcggttgcggacagcactgcaacaacaatatttcagctacaatttagaaccatgggccagttacatatactttggcggggtcttttttttctttttcctctgctgcctagtag

SEQ ID NO: 6825 - DNA, 190 bp, Glycine max
  Clone ID: PAT_MRT3847_106171C.1
taaagaaaacaatgagttatggaagaagagagtagcatactacaagaccctggactatcagctagcagagcgcgggagataccgcaatctgcttgatatgaatgcttacttgggacgctttgcagctgcactgattgatgatcctgtgtggctgatcaacactgctacccgccaagctgcagacaacact

SEQ ID NO: 6826 - DNA, 526 bp, Glycine max
  Clone ID: PAT_MRT3847_106172C.1
ggtgacttccctgattcatgtccagatttgaatcatgccgaagatgtgacccaaactcctagttgttgtgctcatttgacaagcaatgttgggcatggagacagtgaacacaatttatgtggaactgctggaaagaaagggatgccaacagagactgtggaaattctgggaaatcagaagtctttcctcaacggttatcttgaagatgttttcatggctagattatcaaatctttctaaggatattgattggcgtgaatttacgtgccctcaatgcacgtctctccttggagcctacccatgtcgtgagggacagacacctgtagatgggggagtacgatttttcaaatgttatatttcaacttgtgtgccagttggaggatcaggggatatgttcagggtgtttgcgatgggcaaaatgtttgcaaatcagttgatggagtgtgcaaatgatgaatcatcatttcggtttgtcattagagatctgacaaccaaatcccccgtcctgcaaatcattctcttaaatc

SEQ ID NO: 6827 - DNA, 174 bp, Glycine max
  Clone ID: PAT_MRT3847_106173C.1
ttcatcaacttagcgatgtgtataattagaattcgtgtatgtaacataaaaaataaaatctctgaatagatagagggttcgtgacgtgtgactccagctgaggcatatgatcgccagagagtggttttcgggaagatggcacatttgcagaagttgttggatcggttttttttt

SEQ ID NO: 6828 - DNA, 295 bp, Glycine max
  Clone ID: PAT_MRT3847_106174C.1
caataatcactatatatatattttaaattggcagatcaacagtgtttaagtgtttttttaacaacacaatccatggtttaaaaattgcatgttccccccaacagttcaagggaagataatattcataaatttcctctttggaaaggcccccccccctttttttgaagggccattagggctgtgtgcaacgctcaataaccacccacttggttcttcccttatctgcttaaaataatttccgaataattctgcttccttaagtgattgaggaagggggaaaaggccccgaattgga

SEQ ID NO: 6829 - DNA, 213 bp, Glycine max
  Clone ID: PAT_MRT3847_106175C.1
gtgcttggaagaaaagcatggcgcattggtccgttatttctttgtaacatagataccgaagagaaagcgcatataggtcaagaagcgttaattgctgagcatgagtgtctaaaatggcttgacaacaagaaacctggtttagttgtctacgtatgctactgaagcgtagcaaaggtctctgattcacagcttagagaaattgcaataggtcta

SEQ ID NO: 6830 - DNA, 251 bp, Glycine max
  Clone ID: PAT_MRT3847_106176C.1
cgtcggaagctccctctctaagtggccgcgaccgcgggcgtgcacggcgttggttccccttctacactcctctcaactcggaactctccaggacatgtgaaacttgttcaaattcaggatgagcaatgaacaatatttgaatagacagttgttagcagagaagttggtgaaaatcaacaattcacaacaaagcattgaaatcacttcccattggtgtatttctcaccggaagagagccaaagaaatagttg

SEQ ID NO: 6831 - DNA, 386 bp, Glycine max
  Clone ID: PAT_MRT3847_106177C.1
ctacactccattagaaccactctatccaatctagctcttccccttaaatttcggctattcacaggctggtgctgcggtctcaattacagagagcaaactcagcaaaaccagtgccacatccaaaaactcattgccctcaaaccggataaccgcatacactcaaaaggagggctcattgttacatggaaccctaacaacaagccattccagtgtgcctgagatgccctatttcactgcacactcaacctcaactccctttgtagaccttcctacaccaacaaaccccaagaaatctacatccaacaatgtaagggtatttttggcatgatatacccggattgtcctaacacattttaagagcctcaacaacctcaacaaataggaca

SEQ ID NO: 6832 - DNA, 305 bp, Glycine max
  unsure (1)..(305): unsure at all n locations
  Clone ID: PAT_MRT3847_106178C.1
ggnctngtgnannagtacgtnagctcggaattcggctcgagnnantttcatngcagagtgtnattttgantntcagcatnactggcnccanttcgcagtgcngnccngtgattngngangnngntnagngcnnncgctgnagaacaacaanacnccanactgtntccactgactcnctncgcnaccggaaagnaagtcctcatctttctgggntccangtagcttnagtccnacttgcnntgaatgcaccatntgtggtgaantcntggcncnnaaacattccccagagaacangcatgttgagt

SEQ ID NO: 6833 - DNA, 447 bp, Glycine max
  Clone ID: PAT_MRT3847_106179C.1
ttctttgcgtacgatggaattttgatcctagcaagcagagcttatgacaatattctattgaccttctcggaggaggaattatagtggacaaaactggagattggatcacacttatacaaaaattttcagtaagtaacttgttgcgagttgctgctcggaagaaaggctgcttaatggttaagattgtgatgtctgtgaatgcagcaatcaaaaggagtgattgggcctcattggtacaagtgctgttaacacacagcaacagtacagagcatctagatgcatgtaagtgtgcaaaatcggaaccacattcctgggaatagatctttccaatagaggtgagtggtcctaacaatggtttcgaaacgtggagctctgagtgggcaaatcaaactctatggtacttgaggtagcttgtagacatttcaaaacagcctacaattttgacat

SEQ ID NO: 6834 - DNA, 1075 bp, Glycine max
  Clone ID: PAT_MRT3847_10617C.1
aattgagtatttgctcgcacgtccacaataaactacactgctgccatctgtcaccatggcggctcttattaaacacctaccccttctcctctctcactctcactctcaccatttttctctcctcaacccattgcccactcatctattcactatttctatcatattatagttatataattaaacatagcaatagcaaattatatatatatatacatcatccaccacccagatttaatttcactccaacccatcatgcatcaccgcagattcagcaaattaatacatgtggctgacccagatgagcccgagtcagggcccgagcccgcctcagaagctgggcctgcttctccttcttccggtgaagacactaaaactgaagcaccgtcacccaagaaaaggagggagatgaagaagagggtggtgacgataccgatcggtgacgtggatggatctaagagcaaaggagagaattatccaccgtctgattcatgggcctggaggaagtacggccaaaagcccatcaaaggctccccttacccaaggggatactaccgatgcagcagttcaaaggggtgtcccgcaaggaagcaagttgagcgaagccgtgtggaccccacaaagctcatagtcacctacgcttatgaacacaaccactcccttccttttccaaaatcaaattcttccgccgcttccgccgccgtaagcgacggcgcagccgtctcgccgatagagtccgccgccaggttcccgccggaggaggagatgacggtgttcgcgacagactccgacctcgaactcgccggcgacgcggcggttctgctcagccaccaccaccaccacttcggctggttcgatgacgtagcgtccaccggcgtcctagagagcccgatctgcggcgaggtggatgacgtggcggtgccgatgagagaagaggacgagtcgctcttcgccgatctcggcgagttgccggagtgctcggcagttttccggcggaggaatattccggcgaccagcgcgatccggtgcggcggcatcacaggataacgcgggtggaccctttttttgtagtcccgcg

SEQ ID NO: 6835 - DNA, 488 bp, Glycine max
  unsure (1)..(488): unsure at all n locations
  Clone ID: PAT_MRT3847_106180C.1
gattccataagtgtgtgcaaatatgctaagcgaactacttcaatccaaaaattcttgttttcttgttgatgcatcaaactctgtaaaagtacaccaccaaaactacattattcctaagttttattcacgatgggttaagaactaagaagaattataaatcttaacaaaaggctcaagctaagtatcaattaagggataattaagatgaagtgctatgtaaaattaatgaaaagtaatgattcacacacttatcagtgttcacgtccagagtgcttaaagtgtgtattttttcttttgagtatttatgtgttcaagaaggaaaaaataatatatattgtgagtgagagagtctagaatgtttaaaaatattaaagaaaggtttaaaaaatgactacatttgaggctaataatggaatctgattgaatntttaatttatagtaagacaaaattgaacaaaataaatagtgaaaccaaaaatataataaag

SEQ ID NO: 6836 - DNA, 258 bp, Glycine max
  Clone ID: PAT_MRT3847_106181C.1
gggatctgatgggtttgtcttccatgaacatcatgagaaatagacccatagcatgctcacaggcgcatgatataagaggaggttgcagcagcagctgcagtgggatctggtgggtttgccttccatgaacatcatgagaaaaaggaagcaaaggatctagatgaggaagctcatggaaagaagcaccaccatctctttggctgatgcatatgcaaccatttatgagcatattccttataacttgttttatatatatat

SEQ ID NO: 6837 - DNA, 209 bp, Glycine max
  Clone ID: PAT_MRT3847_106182C.1
aaagagcaactcagtctgctggacaggttcacggaggatgccaagaggctgtatggctccgaggcctttgccactgactttcaggactcagctgcagctaagaagctcatcaacgactacgtgaagaatggagctagggggaaaatcacagatctgatcaaggaccttgactcgcagacaatgatagtcctggtgaattacctcttctt

SEQ ID NO: 6838 - DNA, 350 bp, Glycine max
  Clone ID: PAT_MRT3847_106183C.1
caaatgtcctgtactttggatattaatgtattcatagttaaaaaatgaaagagattagaaatgaaagagataggcttcaaagtagagttgcaaacattgagtggcttgcctagcataacaatgcattgattcgagaattgatggaaagtatgaacaagccatctacaatagatgaaagtcaagatgaggatgggagtaactgagtgaaccataatgactcattgatgctgatttacctttaatgtgattatgtctaaaggcaaatgtcctgtactttggatattaatgtattcatagttaaaaaattgctaatttagtgactgatttacctttaatgtgtttatcaaaaa

SEQ ID NO: 6839 - DNA, 669 bp, Glycine max
  Clone ID: PAT_MRT3847_106184C.1
gcttttcactgagtttttttttttattatttatttcaacagaggttcgcgtaccttctcgcatctttctcttcttcctaatcctcttcctttcatcttcagatctggatttttttcatttattttcttacgattttcctataatcaatcgtgattattttttgttgggttaggaaacgcgatctagaacttgccaaacggtgttggaatttgtgatctggtgaatcatgaatgctaggagagatggtcgtaacaacagagttgctctttttgatggtattgaggagggtggcatcagagcatcatctctttactcctcaacttcttctcatgaaattgatgaacatgataatgaacagcattggatggattgcaagatagagtcaatctgctgaaaagattgaaggaatcaggtgatataaatgaggaggtggatagccataaccgcatgctggatcgaatggggaacgatatggattcatcaagaggggtcctttcgggcactatggacaaatttaaaatggtattcgagaccaaatccaaccagagaatgttcacgcttgtagcatcctttgttgtgctctttcttataatatactacctcactaggtttgatgttttaaacaggtattgaatccaacgagtaatgtccatatccgatttgcggtat

SEQ ID NO: 6840 - DNA, 394 bp, Glycine max
  Clone ID: PAT_MRT3847_106185C.1
aggaaaggcagccttagacggctgaggaaaaagtaccagtcagtagagtctgatgatgatggccgtcacgaagaaaagataattgctgatgacagtatggatgaccaaacccaggaaatcaaagatgatgaagatatcctacctatttcatctctttacaagaataaagcctctcaaagggtcttggacgaggaaatggatgctagtgttgacagacaggcaggtgatgccagcaacaagaatggtgaagatggtggaaatagtattgttgaaacaaatttaaaagctgaccatgaccttgtagatagtcagacgctcagggaagctcaaccctcaaaccacttggtagatccttgcattgttctggatgttggggatattaaaaatttaaaaa

SEQ ID NO: 6841 - DNA, 912 bp, Glycine max
  Clone ID: PAT_MRT3847_106186C.1
aattcggctcgagcttcgcatctgattttttgttttgtgcactttcttcgcttctatagtttccgtgttcatctattggaatgatccgttaattaattgctataattttgctcctggaaacagagactggacgatctcgcgagccatgaatgctagacgagacaatcgtaacaatagagtttccctttttgatggtattgaggagggtggcatcagagcatcatctgtttactcctcttctcatgaaattgatgaacatgataatgagcacttcgcatctgattttttgttttgtgcactttcttcgcttctatagtttccgtgttcatctatttgaatgatccgttaattaattgctataattttgttcctggaaacagagactggacgatctcgcgagccatgaatgctagacgagacaatcgtaacaatagagtttccctttttgatggtattgaggagggtggcatcagagcatcatctgtttactcctcttctcatgaaattgatgaacatgataatgagcaggcattggatggattgcaagatagagtcaatctgctgaaaagattatcaggtgatataaatgaggaggtggatagccataaccgcatgctggatcgaatggggaatgatatggattcatcaagaggggtcctttcgggcactatggacaaatttaaaatggtattcgagaccaaatccaaccagagaatgttcacgcttgtagcatccctttgttgtgctctttcttataatatactacctcactaggtaattttgatctttcattcaactgccagctttatgtttaagtccaagaggacgctatttcctctattactgtaattaatgctactacctctggctctgtaagaatactgttctgtataaagttttggatgtttaaac

SEQ ID NO: 6842 - DNA, 460 bp, Glycine max
  Clone ID: PAT_MRT3847_106187C.1
attgaatcctacacccactctgtcagtgcctgcaattccatcagtttcactattgtcttcttcacatgataagccagtgactgcatcggttccattgtccaggcccgttcctggtatgccagtaactccctcagtttcaatgcttactcatcatacacctgcacctgatatgcacaggcccgtcagcaaaaattttcaccatgtgtcgagtggaatgccccctgctttaaataaccagtctcagcaagagacagctatggcatccgggccaaagcgagccaactactataaaaacctcatcaggcaacatggtgcagacaagcaagacatccaggactcgcacataggtatccgccatagtaacttccaagatatgaaaccgctacataacattaaacatagagaagtgaaacccaaaatcctgaaaccatgcatatattttacaagcccaagggggtgc

SEQ ID NO: 6843 - DNA, 1395 bp, Glycine max
  Clone ID: PAT_MRT3847_106188C.1
ggatttactgggtaaaatatttactgacccaaaaatactggggcagttgatgaatgaacatggaactgcagctaccacagcaagtgcttcctcaaatactgtgcgatatacccacttctgggttgaagcctgctattccatcagttctggtgtctacacctacacctgatgtgacagcttcatggactacacccacaagtgcagcgggttcattaccttctgggtttgggttgaagccttcaaatccatcagtttctttattgaatcctacacccactctgtcagtgcctgcaattccatcagtttcactattgtcttcttcacatgataagccagtgactgcatcggttccattgtccaggcccgttcctggtatgccagtaactccctcagtttcaatgcttactcatcatacacctgcacctgatatgcacaggcccgtcagcaaaaattttcaccatgtgtcgagtggaatgccccctgctttaaataaccagtctcagcaagagacagctatggcatccgggccagtcgagtggaatgccccctgctttaaataaccagtctcagcaagagacagctatggcatccgggccaaagcgagccaactactataaaaacctcatcaagatatgaaaccggtacataacattaaacaaagagaagtgaaacccaaaatcctgaaaccatgcatatattttaaaagcccaagggggtgccgaaatggttccaattgctcctaccagcatgatgtttcagctcaggagggagctggtaacgtcttaagggcacagagtgcaaaaagattgaaattgggaggggagaactaaatcttaaagaggcatatcttgacggtaaaaaatataatgtttctttttgtttcaccgtacagaacttgaacataagaaagtgggggttggaaagagggaggaggagtaaaaagtgggacattgattaattggtggtttactaagttttctggaagtgtttttggtggcgggatttcgggcttgcagtaattttcctacaattgggtcgagggttttatggtcctccaggggcagtactcagtagttggtttgagaatttgacattagtgtttttgtcagagttgtattttcgattttgcaggttggggagatttgtgcggtttcggtcaagtgttggccatcgtgggcggatggtacccagccatataaataattcattttcagtgcataataagaaatcatgaaaaaaaatgataaaataatggaaagataccaacaagatccggcttagttgatagatgatcggtttttttaagtatgctgatagatttttgggtcgtacatataaaaatattttgttgagagaaatataatttactttgataatctctatactttcaagatt

SEQ ID NO: 6844 - DNA, 243 bp, Glycine max
  Clone ID: PAT_MRT3847_106189C.1
gatttgtacatgttgattgactatcatacagtggcaactgaatttagaaaatttctaccgtattacattaggtggcatcagtatacctcgaagatctacattctaccatctacactcactgctgaaactaaatataagcggaattggcgtaatattcatataaccggcttattttacgacggctgatacaaattctggactaaacaccagacaaatctcgctttgacagaagacgaaaagatg

SEQ ID NO: 6845 - DNA, 1338 bp, Glycine max
  Clone ID: PAT_MRT3847_10618C.1
ctcactctcaccatttttctctcctcaacccattgcccactcacctattcactatttctatcatattatagttatagttatagttataacatagcaatagcaaattatatatatacatcgaccacccagatttaatttcactccaacccatcatgcatcaccgtagattcagcaaattaatacatgtggctgacccagatgagcctgagtcggggcccgagcccgcctccgaagctgggcctgcttctccttctgcccgtgaagacacaaaaactgaagcaccgttacccaagaaccggtgattattcaaattttcaattttagtttgcctagatgagaatggggaagttaaagagtgagggggtgaatctgtgttcatgaaaccatacgtaggagggagatgaagaagagggtggtgacgataccgatcggtgacgtggatggatctaagagcaaaggagaaaattatccaccgtcggattcatgggcctggaggaagtacggccaaaagcccatcaaaggctccccttacccaaggggatattaccgatgcagcagttcaaaggggtgtcccgcaaggaagcaagttgagcgaagccgtgtggaccccacaaagctaatagtcacctacgcatatgaacacaaccactccctccctctcccaaaatcaaattcctccgcggcttccgccgctgtaagcgacggcgccacctcctcctcaccggcagattccgccgccaggtacccgccggaggaggagatgaaggtgttcgcgacggactcagacctcgaactcgccggcgacgcggcggttctgctcagccaccaccaccaccaccacttcgggtggttcgatgacgtgacgtccaccggcgtcctcgaaagcccgatctgcggcgaggtggatgacgtggcggtgccgatgagggaggaggacgagtcgctcttcgccgatctcggcgagttgccggagtgctcggcggttttccggcggaggaatattccggcgaccagcgcgatccggtgcggcggcatcacaggataacgcgggtggacccgtttttcttttgtgtcgcgttgttgcgtagtgatttatattatattagccgcctgaaagtcgtgcgctattaaaaaaaaagttggaaaagtaaagaaataattaattaaataaattaatttataattcatggatttttttttctttttcttgcgttgtacatttgaataaacaattgattacagcaagctaccttcttttgcagaaaaatttttaacaaacaaaaaaaaaaaaaaaaaaaaaaaaaaaaaaaaaaagaaaaaaaaaaaaaaaaaaaaaaa

SEQ ID NO: 6846 - DNA, 283 bp, Glycine max
  Clone ID: PAT_MRT3847_106190C.1
tgtgcacgtctgcggtgtggtttgttttccttggcgcccttttggtcgtcgaggcgacgctgccgttttggagcggcagcgtccgcagtgagcttctcggttctctctcttcctctgttttcggcgcagttcgcggcaggtccgcgcgtgcccggatgtcgaagctgcgtcttgctcgtctgctccttgtttctgagcgccttctcgctcttccttcgttgccctcggttccgaagccggaggttaacgatgatgggtatgtttcataggtacataagttctc

SEQ ID NO: 6847 - DNA, 456 bp, Glycine max
  Clone ID: PAT_MRT3847_106191C.1
gtacgtaagctcggaattcggctcgatgtttatgagcgccctaaatcaattgcgaactagtatgtaatattttatgcacttaaataaagcgcattactatgtgcaatgagtgtgtttaaatataaaaaaaaaaaaaaaaaaaaaaaaaaaaaaaaaaaaaaaaaaaaaaaaaaaaaaaaaaaaaaaaaaaaaaaaaaaaaaaaggggggggcccccaccaaggaagctcgccaacccggaaaaaaattccgaaccggaccctgaaggcgaccaagtttccccaaaaggaagccgaataaaacctgggcaaaaaaagggcaaaagctggtaccggggaaaaatggtaatccgtaaaaaatccaaaaaaaaaaacaacccgaaagcaaaaagggaaaacccgggggtcccaaatgagggagcaacctaaaaaaaatggggtggcgcccactgcccctt

SEQ ID NO: 6848 - DNA, 131 bp, Glycine max
  Clone ID: PAT_MRT3847_106192C.1
gaatggattcccggggccgcccacacccgtcctaaaggtggcggaatgaattatttttttctttttgcctaatgcctaccccctccagagagcaatttcctttgcataacctcctctcccaaagtcttaac

SEQ ID NO: 6849 - DNA, 400 bp, Glycine max
  Clone ID: PAT_MRT3847_106193C.1
cacctctccactcactcttctgtcgtccgttccatcgccgtcaccatgtccaccgctcctccccccactgccaccggctccagcaaggtcgacgccgccaaggccaagcttgctgccatgcccgcgcctgacgcgcccactggtctcggtctctactcgcgcttcgctttcgctggtgccgtctgctgctccgtcacccacggtgctctgacccccgtcgatgtcgtcaagacccgcatccagcttgaccccgtcacctacaacagcggtctcatcggtggcttccgcaaggtcatcgccaacgagggtgctggcgccgactggactggtttcggccccaccgccggtgggtactttcttcaaggtgccttcaagttcggtggattcgagttcttcaagc

SEQ ID NO: 6850 - DNA, 304 bp, Glycine max
  unsure (1)..(304): unsure at all n locations
  Clone ID: PAT_MRT3847_106194C.1
aagcaagctcatcctagagttttaanantggcagcagcctcctccatggctctctcttccccatccttggctggcaaggccgtgaagctgggcccatcagcccccgaagttcgggagggtcagcatgaggaagaccgtcaccaagcagggcctcctcccggaagcccatggtaacgggcccagaaccgcgtcaagtaacttggggcccattctctggncgagcccccgttcctaccttcactgggcgagtttcccaggtgactacgngctggggacnctggctggggcttttcgggccgaaccc

SEQ ID NO: 6851 - DNA, 322 bp, Glycine max
  Clone ID: PAT_MRT3847_106195C.1
gccgtggcaagctttgaccaacggaatgcaaatgacttactcagccagattaggcaacactcttcagcttttggggatggactccagcgtttggctcattactttgccaatggccttgagacaaggttggctgctgggaccccatcatacatgcccctagaaggaacaacttccgctgatatgttgaaagcttacaaactatatgttacatcctctcctttgcagaggttgacaaattatttggcaacccagacattgttagtcttgtggaaaatgagggcagtgttcatattattgattttggcatttgctatggttttca

SEQ ID NO: 6852 - DNA, 198 bp, Glycine max
  Clone ID: PAT_MRT3847_106196C.1
tcggaatttttgaagaaaaatgaggttcaaggaagaaagaaagtaatagcaattggagcataagttggacaaacaatgagtcataacatcattacctataaaaggataactcgtaggtaataataggctagcctagctaaatggatgttaccattaaaattaattgggactataaaaaggggactattcttatttacc

SEQ ID NO: 6853 - DNA, 232 bp, Glycine max
  Clone ID: PAT_MRT3847_106197C.1
gaaacaatagggccaggtggcaaaaatgtttaaaaaatgggtgtataaaaaaaagtgtcaaagaaaaatgaataattttttgggggggagagtgaaacctttaacaatggaatatcacacaaggtttaagtagaaggaccatcggaattagttggaaatctggtttattaaaagtgggtggcccaaactgggaaatttgatttaggggtaaattattagtcttatatactaa

SEQ ID NO: 6854 - DNA, 2325 bp, Glycine max
  unsure (1)..(2325): unsure at all n locations
  Clone ID: PAT_MRT3847_106198C.1
ggctcgagaacaaggttccattaattccatttactgctgcatcatcagttgttggtgaatccccttttctgaaatttggtgcttcttttgactcaaagctgggaagttcaattagctctactactgttgctggtgtgactggttctatgccaaaagttcgtgaatctgataatggcaatactgaaactaataaagatactggatcttctgttagggcatcagaactagctattacatctgctgcatcaacattgttgacatcatccaagagtatattcaattttggccacaattcgaatcaaaataacgggtctcttctttcaagcacttcattttcttcttttccacctcctgtatcaaataatgcctccatatgatatatatctatgtcatcatctgctctgacaagccaactgattagtgaaagaaagaatcctactctgacaatgactataagaatggtcaatattctaagttctggaatgagtttggtaaccccattaaacttggtatcatcgaggatgcttttaactgaaatcgtttggcaaaactgctcagatttcaacgcaccaagtctgagggtaaattgacatctctggatcagtaaatatctagaatgaaaaattcggctcgagctcgagccggttctactttatttggatctagttggcagcccagcaagtctccatttggttccacatttagtacatcattgtcatctgggtttttgttcggaacatccactgcttctgttacttctgccagttcaccctcaatgtttttatcaacctccagtgcatcaattcctcaattctcattcactccggcagcagcagcctctacctccacacaacctgcttttgtaagtcctaatcctgccttcacattcggttcagctactgttaataatggtcagatgagtatggaggacagtatggctgaggatacaggtcaagcaactccacctgcgacttctgtatatagtcagcaacctgccccagttcaatcaaattttgtatttggagcatcaactccatcaggaggcagtcctttccagtttggtagtcaacagaatattgctccacagaacccttctccttttcaggcttctggcagtctaggagggagtttctcattgggcacaggtggaggtgacaaatctgctagaagaattgtgaaagttaaacatanaccaggctcgaggtactacttaaaatgatgaaagagtggaagcactaaactgctgcatgctcttggtgattgtgccacaataaaccagcgaaaagtcatggaagatatcgcggcaatatttaagaaggctgacaaagacaattcaggaactcttactgtcaaagaatttcaggaggtattggctgatatctgtgagagataccctcaggtggagctatatctaaagagtcaacagatgcacaacattgctgatttgttgaaaggatccaaggaagatgttgaaaaagaatctattgaactgaatatcgaagaactcaaaaccatactctctaaagtggattcccagatgaaatttcttcctgctacagcgcaggttgcatctcagcaaggcacctacctggccaagtgctttaaccggatggaagagtgtgagaaaaatccagagggtcctatcaggttcaggggagaagggcgccatcgcttcaaaccctttaggtacaagcatttaggtcaattcgctcctctaggaggagagcaaacagctgcacagcttcctggggattgggtttcaattggacacagctctcaatggttgtggtattctgtctatgcaagcaagcaagtcagctggcgcacaagggcattagtagtatcagactggacaagacgctttatttttgggagggattcaagtcaaatctgaaagagtttcaacatttttcaaagtcttgcagagctcgtcaatcttgaatttatactgatgtagggaattttgttactgattcctgattctttgaataacacaagcagactcctagcggggttgtccaagatgggatttgttatcatgctcttgctagattcaactttatgtatgaattttttacataccccttccccttttctttcatgcttctggtattggaattgcggcattagtgaatcccggagttttgcagattcatttcggagatgcttggtgatgttagcttctcgcgcctaatcattcaagttatatatgttgaatactttttataatttctgctcaaggaaataattgtaatttgtcaatacagtatgacatgaatggaagataaggatgtcgtttaagcacgtaatcaaagacttaataga

SEQ ID NO: 6855 - DNA, 1196 bp, Glycine max
  unsure (1)..(1196): unsure at all n locations
  Clone ID: PAT_MRT3847_106199C.1
tccccgccccctaattttcctaaaataaacaaattggaacgagggcccaaaattttcccagagcccatgtcaccgaacccaaagacgacgaactgaaacttgaggaagaagagaaaaacaagaccctctcttcttgtgtctgatcgaagaaaccaaccagtcagtcatgaattcgtgttcgtgatttgcgccacgctacacacacttacttcgatttgaatcatcactctcttcactcctctctccaagtgcttcccacaatgatgtccccgaaccgcgtctcagaggatcggggcaccccaccacaacatttcagacacacaccctttcagataatccatattgttgcaaatttcatgaggatatgatcaatatacgggatgtagggcgacatcgcttcaaaccctttaggtacaagcatttaggtcaatttgctcctctaggaggagagcaaacagctgcacagcttcctggggattgggtttcaattggacacagctctcaatggctgtggtattctgtctatgcaagtaaacaagtcagctggcgcacaagggcgttagtagtatcagactggacaagacgctttatttttgggagggattcaagtcaaatctgaaagagtttcaacattttccagagtcttgcagtggcaatgttgcagagcttgtcgatcttgaatttatactgatgtagggaattttgttactgattcctgattctttgaataacacaaacagactccttgaggggatgtccaagatgggatttggtatcatgcttttgctggattcaactccaagcatgaaatttttacataccccttccccttttctttcatgcttctggtattggaattgcggcattagtgaatctccgagttttgcagattcatttcggagatgctcggtgatgttagcttctcacgttatatcattcgagctatatatgttgattctgtttcttcttttcttctacctggccatactgtacggccagtagaagaaaagaaactacatatgtctgtcaactttttagtgcttaatagtagaaattttttgttatgcaactgagggcttcaaatcatggttgttggacacatggtgtgagttctgcttgcttcatatgtacttatttacataatattaatttatttatatgatgcttaattatatgtacttatgataattagtnaa

SEQ ID NO: 6856 - DNA, 392 bp, Glycine max
  Clone ID: PAT_MRT3847_10619C.1
cttagagatacacatgagggtagtataaagttcccacacaatagggtccagatgcagaaaccacgtctattgcagaagtcttaaatgaattaatgctggatcggaagcacatgttgcaaatctcttggtgcaaaacaaagataacagtccaaagaagatacttgtgtttatgatcaactagacaatgttgcaaatcaaatagagcacccttctaccaccacatatgccaaacctattgcgaccatagagggtgtagaaagcttaaataggaggaccaaagtgattattgagaagcctgatgagaccttatttgtagatcctgtgaaaatatgtgcatgaaggttttgatgatgccaagacaaaaataatacaagttttattttaagtccaaa

SEQ ID NO: 6857 - DNA, 359 bp, Glycine max
  Clone ID: PAT_MRT3847_1061C.1
ctttctttttttttttcaagagattgataccgcttttaattaagcatcaagatcatcgtgcccaacagtgtaaagaaatcattctttttttgatcggccaatctagtataataattggcattggaaaacagatacaaggtttccaaacccttgcatctattaaaagagcccattcggtttgggactcaaaaaaactttcgctgaagacttaatttaaaaaggacacttcaaagaaatttcaagccgaagacccctagaagcatccccttgtgcaactcaagggactcattctcagagaacccagaaaaaaccctatactttgagtggaaagtgggaaatccccagaactttacaagttt

SEQ ID NO: 6858 - DNA, 267 bp, Glycine max
  Clone ID: PAT_MRT3847_106200C.1
ggggaagacaaatcatttaagataaatttctttcacgaatgttatatgacaactactacaactgtggttcaaaaaggctgcacagtcatgtttaagttaaccccacccccgggttaatttatacattccccagctgtcactacatcacttagggaagctgataaataaaccttccatatgtattccaagagatataatgttaaaggggggatatcaatgtttgggggtaacaaccggcgggaacaagataatccccacccctttttt

SEQ ID NO: 6859 - DNA, 274 bp, Glycine max
  Clone ID: PAT_MRT3847_106201C.1
caaaaacaaagaaaaaaaaaaacccttacccaacacaaccatcatggccacctctgctattcaggaaatcagattcactggacaaactgttttgaagcagatcaatgagttcgtccgccacaccagaggctcccgtaaagggcgcactaacatgcgccaaaccgttaaaaatgctcctcaaagcatttggtatggccctgaacgccccaagtacttgggtccattctcgggggagatttcatcatacctgaccggagaattgcctaatgactac

SEQ ID NO: 6860 - DNA, 249 bp, Glycine max
  Clone ID: PAT_MRT3847_106202C.1
atcagattgaaggttttagtcctgagggccaaggtctgcaattttcccccttaatcagcaagcatgcaatgatgcattgtaaatgaaagtcaatcatctgaaagcttgagaaaaaattatttgattgagctaaccatgcacaattttcttttcaaagttcatgtttaataataaacttaggcattacattagctaaaacatttcaaagttcatttgggcattagatcaaacacataacttgcaactcat

SEQ ID NO: 6861 - DNA, 688 bp, Glycine max
  Clone ID: PAT_MRT3847_106203C.1
cccacgcgtccgctttcatgaagagtcgtgtattttcatccttatactcatccacaaagagttttaactattaagtatttcttatttctatttcacccatcataataacaaaaataagatttatggtatctacacattatatatagttgaccacaccaaatgagatgttatatatcccaataaatttatccttataagatcactttcataaggacaataaaatcttatagatagcattaatacataatttaatattatatgtagactcacatattaaaaatatctaacaatctctcacttaagtcacttgtatctttattcatgtattataaaaataactttatgagctcaaaattattatatttactgaataacatcttcaatcaatctcatccattaattatattaatataggatcaaagtgacttttgttatctttattaatataactaagtccatcaatggtcacatatacaatataaccaattacatagatcaagtgtggatgtgtagcatgaaaattacatgtaatgtgatcaaacatgtctatttacaactagtcctactttaattactttagtgagaccgttactatattataatctaacagagtgaagcataatatccggaaactaaataactttatttctaataagctaaatatcataaagcataagcatcttacatt

SEQ ID NO: 6862 - DNA, 420 bp, Glycine max
  Clone ID: PAT_MRT3847_106204C.1
aaaatgaaagaaaatatataaatataagcttgtatcttaaaaaatgttatttcaaatagcatttcaaaaatattagaaactattaaggttatgtttcacaacattaaccaaaagttggctggttataatgagaaacaacaaagattcgaaatcatttagaaaatgaaggttgtacttacttggtataacacttcatctgccacccaatttccaatacttgaaatatagctctacaaagattgaaatttcagatcttttataactgaatgtagacctgcaatcaagtctacttagactgccaagaaaaagaaaattcaagtatatagaaattgacacggcacaattcaacatattgaagaaaaaaagttattactcttatttttcacaagtagagatattgaaaacaaaaaaataatgatc

SEQ ID NO: 6863 - DNA, 570 bp, Glycine max
  Clone ID: PAT_MRT3847_106205C.1
ttttttttttttattatagaagctatatatatatatattgattcttctagatatatataaaaaaacaaacaaaaaaaaagaagcaaaaacactcgtaggtgttggaagtattgcatggttacatggcgtgtaaataaaataaaacatgtatcctatagtttatgtgagtaaaacttgcgagtcctaacatgtagaacaaaagccaaaaaggtgccaaagaaacacagggaaccccatatgacgaaagtgcttctgtagcattccatgcccaagcattttccatgtccatgatgccctcccttatggtaaacaaaagcagccaagtagccaaacaataaggaccccactggaatgttggccaccaccacattatggttcacagagaaattcttggttccaaataactctgtggtggtggacacagaaattgaagtgattgctccagtgcaaactccaattatggcagtgctgacgtagagggcaaggtgagttttgttaagaagtaggaaaaatgctccagcagtaggagccattaatgccaccataattgctggtcttgatattgtaaac

SEQ ID NO: 6864 - DNA, 333 bp, Glycine max
  Clone ID: PAT_MRT3847_106206C.1
ttaccgcgccaccggcggggcttgttggggggaggcggctgctaccccggaacgagtggtggctgggggggacgcggaagagggtcgaatagatctgctacaaccgttgcagcgtcatggccgataggtgggcgcgcccgattggtgctaggttccaaggcgcgtgatagaatatggagaggctcgggttactctcgtggacccatatgttcattcattaccgcagccagaagcgcagggcctgtacgctacttggtaatgatttaagagagcggccccggaaggagcttaaacgtcacctacctggcgcatctcatattcgctctgccattg

SEQ ID NO: 6865 - DNA, 207 bp, Glycine max
  unsure (1)..(207): unsure at all n locations
  Clone ID: PAT_MRT3847_106207C.1
acgtaagctggtatcctctagagcgcccgcttttttttttttttttttttttttttttngggtgaaaaacaaataaacattacactctcggcggcattaggcgaacacgagtcgccctttacttcataaaacatattttcattgttccaacttacaccccctaaatataataaatttactccattgggttaacatatttcaataaaa

SEQ ID NO: 6866 - DNA, 167 bp, Glycine max
  unsure (1)..(167): unsure at all n locations
  Clone ID: PAT_MRT3847_106208C.1
tactgatcctaagcctttttcgcatacttcttaaagcctcctgtcatgttacattcactaatacaaaanattaatcaaatttagttgattattccaaatatccctgnttaaactatgtagggtcttacccaagtcatgngcagttctgttatccttgccatagcttt

SEQ ID NO: 6867 - DNA, 306 bp, Glycine max
  Clone ID: PAT_MRT3847_106209C.1
ccgttcgagttttctttttttattaacctaaacattttactttaatttaccattgcacataaaggaccggggtttctcaaccataattcccaccggatcttatcactaccacctttactgtatttgaatcacacaacttccttataacttgagaaaccacttccactgacacattaaaggctaatttcactggcgtgatcttgcttcaatatatgaatatttcctttccaaaaattttaaacataggatcaccccaatatagtgtttttcacccctcgaagcgaggaatggactaaacaacttctt

SEQ ID NO: 6868 - DNA, 192 bp, Glycine max
  Clone ID: PAT_MRT3847_10620C.1
tgacaactcaaacacgagtgtctcacataacaccaaatctcatcaccatcaccatagcactctttttctctctctaatatccctctccttcgatctgccaattatcacagattccgattgagataattaaaattcaaccaatcaatttggatcctcgcggcggggaatgggagcgtcgtcgtcatcctccca

SEQ ID NO: 6869 - DNA, 291 bp, Glycine max
  Clone ID: PAT_MRT3847_106210C.1
gcttgcaggcgaaagagaagatggccaccgttccaagggcaactcctgttggaaattgtgaagaaaaacaactcctttttggtcaagcaattccgaaaggggaaccaaaacgtctaattctaaaaagagagcacaaatctctataaactcaattcgctcaagtataccgggttttgaaacacaaaaactgttacagtgacaacccaaggggaaaattaagggctgttttttgggacaacaaagaccaagaaaccaaacaaacccgctggaatgcctcacaaatctctgtat

SEQ ID NO: 6870 - DNA, 493 bp, Glycine max
  Clone ID: PAT_MRT3847_106211C.1
aattgattgctttgtggttctaagtttttatatccataattgaaccaagcattgaacatataaaccattgcaatacatcttaccttgggctacgaagaatttattcaaacactctggtatgagatgatctgtagcccattcatgggacccgtaattctagaaccaatattttggctaaccaacacagaaggggaccccgacaacaaaatgtttggaactcctaggaaagaccacctctgaacggggagccgacccgcattaatgtgtagtgtcctataacgctctgggccccatcctttacccaagccctggtcatggtagaggcttgagttcgacctctagcacatatgaaaatgagcaattgcctgataaaaactgctgggagaaacaaagctagcatatcctttccttacctgaaaaactattttgttaaaaaaaaaagaacaggggtggtcctcaaccccaaaccttaatcttgagaacacttccatgt

SEQ ID NO: 6871 - DNA, 683 bp, Glycine max
  Clone ID: PAT_MRT3847_106212C.1
caatcaacataatgtcttaaacaattcaactattaattacatctttggcacccacacaacgttgtgggtctacaaccagcaatcaaatgatgttacacattaaagactaatactgcacagttctgtcttgataaactactaaaccccagtagctatagacgtgcattgcccacaaccatcaagctgtcaataaaacatactactagctagtaatttctaagttctaacaagataatgggtctttaaatccacaccgttgaaaaaattgcttgattcgagatgactaatagaattgcaatgaaacttagactgatgtttgtatgtattgctataatttttacatatctgcaaacaaattatatgttttggcatcaataactatttgtctaatagatgctattcctccaatcacaactaaaattgaggatgctgctgcaatcacattgttcacccaaaacattatggtgttttttgagggcttgaaagtcatattataaaaaaccataggcaaaatgaaatcaagaggaatgcatccaaatgccccaaacaaagccattatatctggaaagaatggcaacatagctgctaaaaccgtggctgctgccactgatagtgaccgaagtaccacccttggcacaacattgcgcatggagaattgtcccatttttgggtctccaaaagtt

SEQ ID NO: 6872 - DNA, 330 bp, Glycine max
  Clone ID: PAT_MRT3847_106213C.1
gctttacgtacgaccacacgggcggtataagtggggcgcgtttgttgccctaagtgcaacgcagtgcctaggcgagaatccggaggaagatctgaccgacctgctcctccagcggctgctggtgctggtacaatgcaccaggatcctcctacagcccctgctcagagtgggggcgggcatatgctgggtggcattggtccaaccatagcaaacgggagggatgtacgcaccgggagggcaatggcacacatggctgtggatgcagcgatgggtacgcgtacactacgacatgaaacagtagatacagaggagtgagctgctgcccctgca

SEQ ID NO: 6873 - DNA, 335 bp, Glycine max
  Clone ID: PAT_MRT3847_106214C.1
tcctttattaagcacaccttcggcatgacccataccgtccctaccatcaccctttgagcggtatgctttaacaataaccacatctcatagggccgcaagtcaaaacatgcatggaacaccttctatactgaatcggcacactgtctttctatggacacttgatgacagtcgttctacaagatgactccaacctgcaggatgacagtacatttgtattgcatatcagattcataggtgcatttcttatgcttagttaaacgctcaccgttatgttcctactcatggatggattacgcgtcttctgcaatgaaaacttcactgccttcatccacgac

SEQ ID NO: 6874 - DNA, 159 bp, Glycine max
  Clone ID: PAT_MRT3847_106215C.1
ggctcgtggcacctcccatcgctgactcactaattttctggccgttttactcgctccctacctgtggcaacctgagggggaccaacctcctgtgatggccaagatgtgctagaataagatacatgctcctagtcatagacctggcagagagcagtctga

SEQ ID NO: 6875 - DNA, 930 bp, Glycine max
  Clone ID: PAT_MRT3847_106216C.1
aattcggctcgagcaaaatttgaatctttattttctatctctgtgtgccataggcaattttatgcagttttcccatatgttttttttgctttatgccaaagttttttggttgaggaaagagattttttaacttctaacatgttttcagtgtttaaatagcttttacatggaagaagcacacttgtaaaacaattgtctgcttgttgaatttcagaatccacgttgacccatattgaaagcatggatggtgaaagagaaaccctagaggagcctatagaaaaggagggatctttggttggggatgggaaggacctaaaggtgggggttttgggttctgatttgtgcatagaaggtgttgtttgcactcgtgagcgtgatgctgagctgaatggtgatgtgggttttgatggatcaaaagaggagggtaaaggtgtggatccttcaggtggagaagctgctgaggctcttggtgaggattctcaagttttgagatccttagaaagtaagagcgtgaatgagattgctgagttagatggaaatgaagctaccttgaaaacattggatgagcagaagaacattgatgacaaggaggtcaataagttagtggagaaagaagcaattagtgatgttattcaggctgagccagatgttacgcaaagcattaaagaacatgctggggatcttggtgaaggttctcaagttgtgaggtccttagaaggtaagagtgagaatgagactgctgagttggatggaaatgatgtcaccttgaaaacattggatgagcagaagaacattgatattcaggttgagtcggatattagtcaaagcattgaagggcaagctggcattgctgagcaaggttggttcacaaggagagcaggaaattgaggtgaaaaacttgatgatgctaaacagcgaaaaccacacatg

SEQ ID NO: 6876 - DNA, 443 bp, Glycine max
  Clone ID: PAT_MRT3847_106217C.1
ttcacccagagcactcttcacaaaaagctgaaatttttttatgttcacaacctggcatcagtggcagctcctactgcagataacgggcaacatacacaagcatcagcattggcacctgttgacgcacttaggggttggcatcaaaatgacaggtgctaatatgcaaaaccaaggtgtgtgatagcacaactcctatgctgaaaacacaaggggagggagttcctgcctggggttcccaaagcacagtaccaactgtccctggggaggtgcattatctcaaaggatagaaccaaagaatcctgctaccatgcctgcccagccagcttcccatgccccctggggtgatgcccctgcctgtgcaggaaccactggctccttttaacatcgggaaatccaaatgcgagttaacccacacctggatatctgggcatgactgcacctga

SEQ ID NO: 6877 - DNA, 568 bp, Glycine max
  Clone ID: PAT_MRT3847_106218C.1
ccacgcgtccgtgcacttattgaagatgcgatggcaagaagactacaggggtcatgggggaatggtgtgataagagtgccttaaatggttcagctctttatagctagccagccacactcattcatttcatcccatttaaaaccaacaaaacgacgttgcgcttgcatctccaatctccgatcagcttctcccgtgtttccatctcaatctgaatcaaagccgttgctcgatcatgtgttgttgtgaatttgtttgatcgagtgagaagatgaatcctctgtgctgcattgctccggtttctatcgatcgggaccgggcgaaccctgtggtggccaaatcgccgagtcagtgtcagctagggctcgatgcgtccatcaggaccgtcaactacgcctccaaatcgagcttctccactcaggattcctccgtcggcgccgattccgtcaaggacaccgccgccgcggatctcgaagaggaagaggagccgcgcgattccagggccttcgccggagggaacggtggcggagtggccgtgtgtgtggccctgttactgggtgatagggtgaat

SEQ ID NO: 6878 - DNA, 218 bp, Glycine max
  Clone ID: PAT_MRT3847_106219C.1
agcatcttactacacatcgattctttaatcaactacatctttacctttacagaatataaacccttgagtgatgcaatcttctccctgttgaatacttcttaaactaaaccaccttcaatgaccttatacactattcacctacatcaccaattcctatataacataccttttcatattaaaaccttacaaacacctattcttttatatcaacactacca

SEQ ID NO: 6879 - DNA, 167 bp, Glycine max
  Clone ID: PAT_MRT3847_10621C.1
aaaatgaattgacccatttatgagaagggttgaaatatgctggacccaacagtaatttctttttccagccagatacatattttatccactttgacaaccattattcctttccagattctctctggacttgcattctacttatgaatataaacccccaaatggttttt

SEQ ID NO: 6880 - DNA, 614 bp, Glycine max
  Clone ID: PAT_MRT3847_106220C.1
ggctcgagttttgttgctgcagaaagtttgcgatagttccttaaatttgatttagtttcatctgatctagacatccgttgtcgaaattttggtgttatttataaaaaatcttcaattctcatgagcgaaaaatgtaattttgcaaaatgtgggatttccttattcaggcttttagtttgtgagctttttttctaaaactgggcactttgcctttttattcgtgtccttttgtgagtattggtaatttgtttttgtgtttggaactatctggttttatttgagcaactgggttgtttggactagcagcgggaatgccccactttctaaactgttgcagaatattatataatttatgtcccacattttaacacaacttaattgagtttatccatttggtggaagcgtcttgtgcaccaagttgtgaatttattggtgtttaatgaagatagtgagttactcatattgtccaattgtgaaaattagctatgtagatatccggaagggaataagaagtagatatatcatgatctgatatgaaaactatttgcctgtattctattgtcttactataatattttttgggggtggggtgtgtttggatcctttgcctaccc

SEQ ID NO: 6881 - DNA, 157 bp, Glycine max
  Clone ID: PAT_MRT3847_106221C.1
gtcttttctcggttgctacctctctttcttctatatagtatagttctttgtgcttgggagtccgcatttcttgcttgtgagtgctgcaccttatttgattgcctgaggctcttctatgtgtaacttcgctggtcaatcatgtagtgcttgttcacat

SEQ ID NO: 6882 - DNA, 1841 bp, Glycine max
  Clone ID: PAT_MRT3847_106222C.1
aagtcaggagcatgcacattattttgcaataatattccaaaagtcgtagatatggctgaaactgacatccaagactatctccaactcttcttcctctggttactctccatcatcgccgttagagccatactcaccaaactccgccacaagcctcgccgtccaccgggcccacggtccctccccatcatcggccacctccatctcatctccgccctgcctcaccagtctttccacgcgctctccacgcgctacggccccgccgtgcaagtcttcctcggctccgtccccgccgtggtcgtttcgtgcccggaactcgcgaaggagttcctgaaaacgcacgagcccagcttctcgaaccggttcgtgagtgcagcggttcaccacctgtcctatgggtccaaggggttcctcttcgcgccctacggaagctactggaggttcttgaagaagatttgcatgtcggagcttctcggtggccgcaccctcgaccagttccggcacttgagggagcaagaaactttgaggtttctgcgcgtgttgagggcgaaaggggaggcgcatgaggccgtggatgttagtggggagttgatgactttgaccaacagtgtaatatcgaggatggttttgagtcgaacatgttgcgagagcgatggtgacgtggagcacgtgaggaagatggtggcggacactgctgagctggcggggaagttcaacttggcggattttgtgtggttgtgtaaggggttggatttgcatgggataaagaagaggcttgtgggtattttggagaggtttgatggcatgatggacagggtgataagggagcatgaggaggagagggagagaaggaaggaaagaggggaaggggaggagattagggatttgctagatattttgttggaaattcatcaagatgagagcagggagatcaagttatctagagagaatgtcaaggctttcatcttggacatatatatggcaggaaccgacacatcagctataaccatggagtgggccctagcagagttaatcaacaaccatcatgtgatggagaaagcaagacaagagatagattcagtgacagggaacaaaaggctaatacaagaatcagatcttcccaaccttccatacctacaagccatagtcaaagaaacactaaggattcaccctacagcgccactgctagggagagaatcatcagaaagctgcaatgtatgtggctatgacattccagcaaagtccttagtgtttgttaatctgtggtctatgggaagggaccccaaaatttgggaggaccctcttgagttcaagccagagaggtttatgaacaataatgaagacaaacaaattgatgtgaggggacagaatttccagctattgccatttgggactgggagaaggttgtgccctggtgcatcacttgcacttcagactgtgcctactaacgttgctgctatgattcaatgctttgaatttagggttgatgggactgttagcatggaagaaaaaccagccatgacacttcctagggcacatcctttgatttgtgtccctgtgccacgcatgaaccttcccttctagtgtatattttgagaaaattaatggtagaatgcatttagtgtataataatatgttctctatctcatcaccaatagtccaataaagcagctttcactttttctttagaaaaagaaattcaaggtgatcatatttttaattacaaagatgaaaacttattgtttgggttaataaataatgaaatgtcgtcttgattttgatataaagaaaataagcattttcttaaaaaaaaaaaaaaaaaaaacaaaaaaaaaaaaaaaaaa

SEQ ID NO: 6883 - DNA, 432 bp, Glycine max
  Clone ID: PAT_MRT3847_106223C.1
gtgatgatgttattggcccatgctcaacagctccacttttcatgtgcatgcacatgagcatgataccagaggatggccaacatggagcggatgattcgatctttcatgtctttgttttttattctttggatattcgtggtgcttgacttagttctcaaggtttatggccacgcagaaggtgatgccctgattgtattgaagaacagtatgattgatcctaacaatgctcttcataattgggatgcttcccttgtcagtccttgcacatggtttcatgttacttgtagtgaaaatagcgtaattcgtgttgagcttggaaatgcaaacctttcgggtaaacttgttccagagcttggtcagctcccaaatttgcaatacttggaactttatagtaataatataactggggaaatcccagtctagcctggaaat

SEQ ID NO: 6884 - DNA, 108 bp, Glycine max
  Clone ID: PAT_MRT3847_106224C.1
ggaatcggtaacacctctcagaggttcatttcttcagcatcacctggctctcaattattttcctttggcagccatttcagaagttactcaatgtcagcattacctcaa

SEQ ID NO: 6885 - DNA, 401 bp, Glycine max
  Clone ID: PAT_MRT3847_106225C.1
tatataacatatttctaatatagatttataatatgtatattaacagatcgatcaggaatcacgaaaacacatctaataatatgacttctcttttcgcagtaacgggatcgagtgctaaacatttttttttattatgcgtgcatgtgttccagattccttttcttcttctccttctatttaatattgcagattcctatcaatccacaattcttattcttaaatccaccgacaggacaaactacaggatcattattgctcgttaatgtcatatcacatattgacaaaacaatctcattaataatatgatatttcaaatgaaatcacatgaaatccatggcttctataccccaagaatgggaatgggatctcatgcatcaataatagattgatgtcgtgctaca

SEQ ID NO: 6886 - DNA, 316 bp, Glycine max
  Clone ID: PAT_MRT3847_106226C.1
atcctatgaacactcattatcctcttctctaacaaagccatagtacgacacttttagttcattagttctgcttatcctatggataccattcgtaccaccaccatcacccgcgtgcaacaaacaaccccaacaaagaaaaccaagcccaaaaaataaagcctcaccccttccatacgcaacacaaacaccaaaagtgggctacatactaaaatagtgtatttgctgaaataaaatgtactatagatacagattactcgccatacagtcaacaaatgttacattattctattaaaattatgactgttaattatttttc

SEQ ID NO: 6887 - DNA, 889 bp, Glycine max
  Clone ID: PAT_MRT3847_106227C.1
aacggctgcgagaagacgacagaaggggattcacgcagctgaataaagaaaaaagcctttcatagtgagatagccctagaaatgtttcgtgaatctttgtttgctctctttctactttctgccttctcctcctcactcctacctttaaccactgctcaagattacgttctcgacacggacggtcacgcggttgaaaatcacggtacatactatttgttgccagcgaaatcaggaagcggcggtggtggaatagaggtagccgcaactggcaaagaaagttgcgctctcactgtagtgcaatctctgaacgaggactccatggggctaccattgaagctttcaagcccatccatcactacgtctcacttcaccgaatacacttcgttgagcatcgagttcacttcggcgccggcgccgtgttcgtccgcttcggagtggaccgttgtcaagggattacccgaaggacgcgccgttaaacttaacgattacgggaacaccgtagagggtgactttgcttttgtatgtgctaagagagaattttaccgttgcaataaatcgtatcagcttattttctgtccatatggtcttatgaggtgtgaagatgttgggatctctattgacgatgatggaaacaggcgtttggtgatctccgacgggaatccattcctgtttaagcttcagaaagttggttcatcttcttctgcatgaagcacctccgtgtagtttctcctagtgagagacgtgtgcaagatgatgcttgataaataaatgatttggttgtaactaccgaaggattagataaaactaatcaaagcttatatatgctacgttttcggttgcttacaaaaaaaaaaaaaaaaaaaaaaagaaaaaaaaacaaaaagggggg

SEQ ID NO: 6888 - DNA, 194 bp, Glycine max
  Clone ID: PAT_MRT3847_106228C.1
ccaataaccttctcatcgggttcgggtcgatctggaaatcaattatccgctttcctaacggtcatggtccaaacaaaaacgaacccccctgcacccttttctttttctctggtattttacttcacccatttctactggacacggactcccctctcctatttcccccccccaaccctgtcgttcaccacatcttc

SEQ ID NO: 6889 - DNA, 236 bp, Glycine max
  Clone ID: PAT_MRT3847_106229C.1
aaaaggatagcgatcgtaacggatatatgggagggattaacttccaatagtacattgatgctgctatgcaccttcctttgtatgttcatatactcaactcgacatatatatgttttatttatttataaaaatacaaaagctcaggcaaaatcatatcatgggtcttatgtttgaaagcctattatatcaaacatagttttttggctatcaatcttatttatggctttatttccact

SEQ ID NO: 6890 - DNA, 775 bp, Glycine max
  Clone ID: PAT_MRT3847_10622C.1
tcccactccacctaagaagccatattactaccactcgccaccaccacctccaccaaagaagaagccatactactatcactctccaccaccaccttcacctccgtatgtggcaacaacaactcctcccgtcccttcttcatattctacctcataccggccacctccttctgctacttcctacccaccacctccttcttaccatacaactggatcttattcttacccaccgccaccgccaccagtagcatccacagtttcatatccactacctccaacagcttatcctccctattcctcacatcccccatcatcataccctccacagccctcttcatatcctcctcccccatcatacccaccgcctgcttcagcttatcctccacctccatacccaccacctgcaggctatcctcctggaatataccctccaccgccatactgactgggatcttctacattctccaccaaggaaaaggaagcaacatcaacatgccttgtacatcacaattcactatccctgcttttctatgtttcttactatatttttacttcaccacttttctgggttttcatgctccatatccaacgctgctgttttgtctttaattgcaacctatccaaatatatatgcagggctattagatggatttgtggaacacaattttgatgcaacactacacttaacacccttctttgttttcatttactcttcaacgcactctcagcctttcaatgcttgttcaaacaccctgtaactcgctttgtttttactttt

SEQ ID NO: 6891 - DNA, 279 bp, Glycine max
  unsure (1)..(279): unsure at all n locations
  Clone ID: PAT_MRT3847_106230C.1
caganaatncgangcgaagaggcagagaaaaattaagatggacgggaangagcangatnngtcgttggggagccnaacaagttcccggagagacagcccattgggacggcggcgcanannccaagaccaacgggcaaggacnaccangagncggcgccgngccactggttgacccgacggagtttacgtcatngtcntttacagaggcagggatancagagtttgtgggccantttctgtttctatacatcaangtcntaaacgtcatngggagtcgcc

SEQ ID NO: 6892 - DNA, 503 bp, Glycine max
  Clone ID: PAT_MRT3847_106231C.1
caaactcaaacagaaggtgtctgttaatgagagagtgatgcccatctgcctaccttcaaaggattatgcagaagtagggcgtgtgggttatgtactcggctgggggcgaaatgccaattttaaatttactgaccatctgaagtatgtcatgctgcctgtggctgaccaagaccaatgcataaggcattatgaaggcagcacagtccccgaaaagaagacaccgaagagccctgtaggggtgcagcccatactgaatgaacacaccttctgtgctggcatgtctaagtaccaagaagacacctgctatggcgatgcgggcagtgcctttgccgttcacgacctggaggaggacacctggtatgcgactgggatcttaagctttgataagagctgtgctgtggctgagtatggtgtgtatgtgaaggtgacttccatccaggactgggttcagaagaccatagctgagaactaatgcaaggctggccggaagcccttgcctgaaa

SEQ ID NO: 6893 - DNA, 231 bp, Glycine max
  Clone ID: PAT_MRT3847_106232C.1
tttttcaacaacaaacaaaaaaaaaaagataaggcgacatcttcgaagaactacatcttctttctcaacttgttttacttgctccttttccatctgcccacatctaacagagcctacttaaaactgaacaatcatgaccttctcatgaagatgaatcatcataaacactcaaatatttctgaatgtgcacacccttactgccatctaaatgcatgtacaaagatataactt

SEQ ID NO: 6894 - DNA, 497 bp, Glycine max
  Clone ID: PAT_MRT3847_106233C.1
atcccatctcctgcaatccaaataatcgtcaactagtttgagtttaaatccccttacatttgaaaagaaagacaaaacaatgataacttctgagagttttctttgacaagaacatttaaagatagcaacgtttgattttgggtgtgtgtgggtggtggggggagagcatttaaaaattatattaaagtgataccaaagctcaacaaaaatgatggcacaggaaacatgtacaaaaaaaaaagcattgtagttagatataaatacgtcaaccaaaagtgacaccccccacccaacttggcaatattaaccatttagcgtgttctcttgacttgccgccaattattcatttctttccttacagcttcctagcagctgggtttgagtatgacaatattagccatttagcatgttacctgacctgacaatcagtcatttcttctcttgccgccgccaccaggatgctgctcagtaagcatttttaaaacgtttactaatgc

SEQ ID NO: 6895 - DNA, 488 bp, Glycine max
  unsure (1)..(488): unsure at all n locations
  Clone ID: PAT_MRT3847_106234C.1
caccacgacactattctcttctcttcgctccttcacttcaacttcaacgccgacttttgagtctcttcccgcccatcatggcgacggtgctagcaccgccaccgtcgctcaccgtgcgcgcctcctcgtgccgccggcatagcaagaagaagcagcagcagaagcgagcattgggagacttcagcctcttcgcacaagtggttcgcaaggacgtggaattcctcaagagaggaatcgataacggtgttgcctgggccaaggagaccttccgtattcccgaggttgccaagaaaatcgacgacgttgtttggctccgcaatctggatgaccctacctntgcttctcttgcttctgcttgctggccccaaccttgttacccagggctaactggagtggatttgctcatgtacgatctcaaggcttttgaagcttatgctactgacttctactatttctctaagctctggaccaggccgatccctcaagat

SEQ ID NO: 6896 - DNA, 434 bp, Glycine max
  Clone ID: PAT_MRT3847_106235C.1
cccgcgtccgccagccgtgagcgttaaagggctgggagacactctgagcgggcattgagatagacccttgcttaaccctaattggcggatgtagaggaggcgacaggtaagccggcgagtgtggactcactgatcagacaagagtgtctcgaacactctttctcctactgactcttccttaccagctgatgaccatgaagcaactcaggatcctcagtcttctcttgagagggtgaacgccacttggaagccctgccaatcctgagtgcaggtatgaacctctagatcggctatgtcaagagcagctgaatatctgggagtgagcaaggcggagacagagccggaccttgctgccagctggagcgagaataacaccaaggatccctagtatcgatccacaaacaacatgctgctggctatgcaaaaccctgggg

SEQ ID NO: 6897 - DNA, 313 bp, Glycine max
  Clone ID: PAT_MRT3847_106236C.1
aatagaaacacctcacataccattaagcaatgtaaatagcaagacatatggtcgaatttaagcacagcaggtgcgaaagatcctgaacacttattgatcattattctatcacgggctaagacttccaaagtgttcgaaagataaatttaccacatgaaagatgtagttgaaaactctagcactgcagggccattatatgctgcccaagtatatgctgaagcatcctaaaaagcactgcatgtgacaaaatatccggattaaccatcactgcttatgcataatgtggcatctaaaaacagggcagtggtcttgc

SEQ ID NO: 6898 - DNA, 347 bp, Glycine max
  Clone ID: PAT_MRT3847_106237C.1
cccataaaagaaaataaaggttatttttaaccgaagtcgggcaaagggttgggtaaaaccggcgtctccggtacatttttttttttttttaaaccccgtttccatacgggctaattcatctcctttttattcaggaccatgactttttggcccaatgggtggggggggctaaaacgggaacgggaacggggggaagccaaaggcattccctagactcatttaccaaaatcctcaagggaagggggatgttcccccgaaagaagtttaatcggggggttctcaacatccttatcaaacggacttttttccccctgaacgggaaccttttgggccctggggacaacccc

SEQ ID NO: 6899 - DNA, 489 bp, Glycine max
  Clone ID: PAT_MRT3847_106238C.1
atctcaagagccagatacattcattacgtatgggtttcacgaaaattttcaagcgccgccagaaactttgtactatgctatatctcctactttatccaccatgatacctatacatgggcctcttaatttaacatctctttatagcaaacttgggggggacaaattggtggacaccctcccgatttttcagggaaactgaaacctactggatccaattttggtatattaattggtccctctctgttgctttggactattccattgaacccgttgctggtgcaaccgtggccaataccgcgattgatcatccttgcctctaaaacatgtagattacgctgggttctttgaccattcgatcggtctttagccgtgaccggaaggtatgggcttgaagacgctcgccaaggctgccccctcctgcaggcctcccagaagaaggccgatagaggaacctgctttgcccatgtggagaatgaggactggcactag

SEQ ID NO: 6900 - DNA, 289 bp, Glycine max
  Clone ID: PAT_MRT3847_106239C.1
gattaaaggactgcttaagaagttccacattctcatgctagctgctcgaaaaaaaaaaaaaaaaaaaaaaaaaaaaaagaaaaaaaacaaaaaaaaaaaaataaaaaaaaaaggggggaccttctagagggaacgggtttaggtgaacctacatgtaaagaaaaaggtcgggcattatgtacactaaataaaagaaactggacgttaatgcaaaggcttttgattacaaaaaccacagcgtaaccaacttaatgacccaaagaaaaaccccttttgacagctcacttta

SEQ ID NO: 6901 - DNA, 528 bp, Glycine max
  Clone ID: PAT_MRT3847_10623C.1
ggctcgagccgcattttgggacaggaagccttagttttcattggaatctggagagctgttggttgaggcgcaacagttgcttatggtaacagctggatctgatttgcaagagattggctgatgaaattaaaggattttatcaacttgagagatctgaccaaatgcatacatgtactgtgagaaatttaaagagttcccattaccatcattagaacttgtgatcagcggaacaacactgttaactggctcaactatgatggaatcattgtgagctctcttgaagccaatagcgccttatatcgaccttagcatgaacctttcaagtctatccctcttatatggactgagcatgaaaatgctcttgcttatcgatgcagacaatatactactaatgggcacattgagctttcgaatgatcggggcagagttatcaatcgttcaacagatgttgactttccagactatgccttgccgatgattcacttcaaattagatgctgggaatttttatgccattcctggttaccct

SEQ ID NO: 6902 - DNA, 379 bp, Glycine max
  Clone ID: PAT_MRT3847_106240C.1
ggggctgaataagttcattcgcttgcattactacactatacacgctatcaagactatcttcaactaaacggcgaggtaggaacgttgccctgccgggagacgttatgtctactggaagcgcttttcagcggccttccagttgatgacgttccagatggccttgaagtactcggccttgcggttctggtagtcgaggtagtaggggggctcccaggcgtcaacacccaaaataggacggaattgaccgacgacggggtcctgggtggcatacgtcctgatctggatagctccagggtgcgtgtcctggaccaaccaagcccagatcgtgccctggacaccccgaagcgcaatggttgaacctttacttgaaggcatccag

SEQ ID NO: 6903 - DNA, 829 bp, Glycine max
  unsure (1)..(829): unsure at all n locations
  Clone ID: PAT_MRT3847_106241C.1
agtcaagtgtaattttttaagtatactaaagaagttaacttgcctttgctcggtttgttcgatgacgaacacattgactacgaggtagatcgcaacaaggacgaaactcctaacttggctgaattgacccgccgtggtttggaaatcatggaaagagcatcgaacggttttatcatggtggtgagcggtcacggcattcaatccgcctgcttgcaaggtgaccctggtgctctctacggcgagttgctctcttgggacgctgctgtcgctgaggccgttaacttcatcaaggagaagagcattgaaactttattgctcgtcctttccgacttgaacactgccggcctgaccctcgcttaccccggagaaagcacttgggaccctcgcgccgtcttggaccaacgcggctcgatcgagtccatcgtgcaaaagattgctgagagacattacaacgagactgaactcgaacaacttgtcgagcaacgcttgggcattactttggttagccaagagcgtgatcttgtcgaggctaatcaggacaatgctacaagcttgtatcctgtcttgagtaccatggtcactaagcgtgctaaaatcacttggtcctccaccagtaacactggccaagatgtcaatatgttcgttcatggtcgtggtgctgaagagttcaaaggcaacctcgacaacgcccagatctcgcgcatgctcgacggattgatgacgatgaaagtcgaagaaattaccgcccacttgaacggtcaagattcgactgtgaaaaatagcccgggaagcgccaccggtttattgncataattttggctttactgtt

SEQ ID NO: 6904 - DNA, 1535 bp, Glycine max
  unsure (1)..(1535): unsure at all n locations
  Clone ID: PAT_MRT3847_106242C.1
tttntttagcagcaaaagattttattctatttttctcatttagttcttttccttctaagtacttcaacaacagattgtgctgtgcaataagcaatagcttgaacagtaaccattggattcacacccaatgctgttgggaagacactcgcatctgccacataaaggccctccacttcccatgtctcccctgtcggattcaccactgattgctttggattagaacccatccggcaactccccatttgatgtgctgagcacaatggtgttgtaaggtctgtcaatgaccttgaactttcctctttaacaaatttctcaaactcatgatagctcacctgctttacatttaaggtcctccccttattatgatgtgttccaatttcttcagcaccagctgctgccagaattctcagcaccttctcaattcctttctttaaattctcttcatctacatctgcaggcttataactgatacggtctggtgcttttacagtccctgatccttgatcccttgccagtgcaaatatatgagctgttctagaaaacttccgcattcggtctcttatatcaattccagaagtccatggtgtgacaattgagaacataccaggatgcaatgaaggtgtttggatcactgcaccatatccagattgttcaaactctgcaacaacagttgacattgctgtcattatccctccttcatagctcttcttatatgcctctggccacacctcagattcaggtgcatctgggaagtagccccatgccattgccactggatgaagatgcaagttcctccctatgttctgattcctcaagccactttttttaagcaatgctggagtactcagtgctccacatgctacaattgtgactttggactccaccacacaaatgtctttagtccctttatattcaaattcaaaagccactccacgcgcaatctttctatccctcccttcctttttcttgtgcaagacttttattgcctcacaacctggaagaattgctccattgccagatttcaccaagtccactaaccatgtttctgaggtacccttcttcctcccatccttacaacccatgcaacaccagccacagtagtgatctgacgcagaattcctaggaatgttactaacaggataccccatttcttgacacccttttcttagtattgcattgttgaatccttcatcttcaatctcagattgaacttccatcttctcacaaacagcattcaaggcttctctatacagttcactctcaaacagctctagaccatgtttatcactccactccttgcacacatgctgaggggttttaatgcacgcagaccagttgattgctgaccctccaccaacagtggatcctgatagaatgaacacacccatatcatcacttgcaaccagaccaccattgaggtacatttgatccatggttggtccttcaagaagagaaagattgttcctagcaaaataacctcctttctccaacaccaacactttgtaaccagcttttgcaagaacaccagctatcac

SEQ ID NO: 6905 - DNA, 495 bp, Glycine max
  Clone ID: PAT_MRT3847_106243C.1
acggctgcgagaagacgacagaagggccttatggtgacatactcaaggtcaaagagactagctgggtaagaaggttctggggattaattagattaggtattgtttggtgaccataactaaaagcaattttacattgagaatttagaagcgatgcctatctcataagttcatcgtgtagtactataccgtccatctgaatccaacaaacttaggacttttttttttggggaattaaacttaaggacttatttgacacactatattgagcgagacaaggctaaattcatgtaagttttctttaataagatatttaagtaatcttttatctttaagattaaattaaatatatttaataatgttaagcttaaatataatgtattttttaatatataatatattacaaaataaattagtaaaaataataacttttttttcaatttaaccaaccatagaaatatatagaacattctctcaaaaataaaaaatgtatagaac

SEQ ID NO: 6906 - DNA, 448 bp, Glycine max
  Clone ID: PAT_MRT3847_106244C.1
cgcgggaagggaatttcccccttcataagcggcttcctattttggcccaattcccacccgagttttcttttccctttcaagataccgatacccgaacgatttttccgcctcggaatgtgagcaatgtggtaccccaaactcgggcccaggataggaacattggatgagaaagcgccaaaggctttgtttggttgataacgcatgataatgtcaagggattttcaatggcctcgtggttccattggttgtccttttcttcttttacaaccgggatgacattatcagcaacccgattctcatgacaatccttgtatgtcacgaatcattggaggggcctcaaaaggcgattttgatagatagttcttctttgtcaccgtcgaatggtagaaattagcgccaacactttcaggggtagctgggtgaaaatggatttaaggcgtaagttagt

SEQ ID NO: 6907 - DNA, 381 bp, Glycine max
  Clone ID: PAT_MRT3847_106245C.1
ctttcactttcgacctcacacaccgacctgttggggggggttcaaaagaaaatacctggatgttaaataacgacatctcacctccacatacaacttggccctcctgtaacatactccgctggctataaatagtcccacttaaccgtcgtcaactaatgcaccatccatctctaccgcttctactaaaagctacctcttcacaagaccttaaccatgtaactgttcagggtataagcctcctcacgaaaaaccaccattgcacactcccacagtcgagaaaccaccagcgtacaagcgccccgaggaaaatcctccattcaacaagcctatagatgaaaaaccccctaatgacaagctcccggctgaaaaaccaccacagta

SEQ ID NO: 6908 - DNA, 452 bp, Glycine max
  Clone ID: PAT_MRT3847_106246C.1
gaaagcttgctagctttctaggcattatagctagaaatccagagttagcacctttaaacatagacgattggagatgttttgacaaagaagaaaaaaataaattggtggatcttgtgaggaagaagttctcgatcccggaacgtggtgtggaatttgtcaaaaaatcacttggaaagaaatggaaagactacaaatgtgatttaaggagtatgtatttcacaaagtataagactaaacataccttattgaaacacagaccgaatcatataccaagggatcaatggattggtcttgtctcctattggatttctgataaaggaaagaggcgtagtcaagcaaataaaagcaatagagcaaagcaaaagatgcctcatacaggaggatctaaaagtatcggtacattaatgaatgaaaaggcaaaagatgggatagagcctacacgagctgaagtt

SEQ ID NO: 6909 - DNA, 184 bp, Glycine max
  Clone ID: PAT_MRT3847_106247C.1
gagcaaaaacttatatcattgttcaagtagaaacggggaaaagtacattaaaaaaaaaagagaaaaataaaatcgcaataaaaacatactgacccgctgttaatctaacttgaaaaggggctttagacaaatcaaagaacaaccccatgaaaacttttggctaaacgaccttcccaaatttggg

SEQ ID NO: 6910 - DNA, 428 bp, Glycine max
  Clone ID: PAT_MRT3847_106248C.1
ggatcttgtgatggtggatgcatggtgtgttggatatcatagtgaagcggatgctcctagccgccggcttgctaaaccgctaatcttttgtagaactgagagtgactgcccaatggaaaatggctatgcacgtccagttgaaggaatccatatacttgtagacatgcaaaatatggaaattcttgagtttgaagaccgtaaactaattccccttccacctgctgatccattgagaaattatacttctggtgaaactaggggaggagttgatagaagtgatgtgaaaccattacagattattcagcctgaaggtccaagttttcgtgtcaatgggcacttcattcaatggcagaagtggaactttcgtattggattcactcctaaggagggtttggtaattcattcagtagcctatattgatggaagtc

SEQ ID NO: 6911 - DNA, 275 bp, Glycine max
  Clone ID: PAT_MRT3847_106249C.1
agcaagaatggcaccactgaaggcagtcttcaaccacaagattgcggtccacgttgcgaggagagatgctccaaaacacaccacaagaagccgtgtttgttcttctgcaataaatgttgtgccaaatgcttgtgtgtgccacctggaacttatggtaacaaggaggtctgcccatgctacaacaactggaagaccaaaaggggaggacccaaatgcccttgaatgttgaaacttctgcaagcagtccctagttaaatttattgctgccaccttaa

SEQ ID NO: 6912 - DNA, 1138 bp, Glycine max
  unsure (1)..(1138): unsure at all n locations
  Clone ID: PAT_MRT3847_10624C.1
ctctctctttctcgcgcgcgctacttattgtagatttctggttacatcaatttgtaagtgtatatgttggtgatcttcacgatcccgagtgtgggtttcagatactatctagtttttcttttaatttcaacagaagaatggaagtactcgaaggatttcttttcgctttcagtttttggatctacacgacgatacccatacatacccctatgctaatgcaagatcttgctctttcatcttttcaaatctgtcgccttgacttccctttgctaaaacacaccatccgctatggctgagcaaaataacaatcgggtgagttcggtcggttgatcgggttacattgggcgggctcggtttggacatttgtttccgtcgaaaaccaaacccgcctgtaataaaatattaaaaagttcaagtgaacgtcagaatttcagaaagtgagttgtagcagtcccgtcccctcatgtctccatttttgtactattataataccaatcgatgcaatgcaactcccatgttttataaactaataatatatttgaaaaggaagtcttacttttacattgaaggatggaactgttgttgacacaaaaagaggcaccggaggaggatatgttttttcgtctgttgtgttgtattagcttatttagtttgttattttcattaacacgaagctatgcggtttcagaataacgaagcatgtcttcatgggtgattttctcctgtagccacaactcatccatgaaaacacgagacgatcactactagcgttagatccaaaccatagaggatgtctttaaatatgattgagctactccatttccttctttctacttcttctacttgttacttaaaagatctctacttttactgaacggctcanacttgccatatccgctcaagctgacagtccattagggcagaaacggacctgtattgcaagctaatggtttgagccttttgggctcgaatctggatgaaacaagcctgatgaacaggcctaccatctgccactactgtcccttcctccacctcatccgcatcctaatccgacccaaacagagttctagcctcattgcatcgacatgtgaaaggggcaaaaataatgagataggtgttctgtgtttcttgattcgtg

SEQ ID NO: 6913 - DNA, 459 bp, Glycine max
  Clone ID: PAT_MRT3847_106250C.1
gcgtccgagctgcggggcgtgttcttttgtgccgaaccatggatcctccaaggaagaagaagaaaggacgatacggcgtcgcagagctgaaaaccctagggaaccagcttctctcttccgcctcgcacatcaacaacctccctctcctcctcaccttcgtttccccttcttcccctcctcaccacgtcctcgaatccctcctctcgctccactccttcttcctccctctcctccccaagcttccttcctcctccgccccctcctccgccgacgaccaatccgagttcatctacctcgcctggctccgttccaagtttgacgagttcctcaagtccctcctcgacgtcctcgcctcgccgcaaggagatgagacgctcaaggaactcgggctggacacgctcatggagtttgtcaaggtcgccaatggcggtgccttccactcttctctgtaccacaagc

SEQ ID NO: 6914 - DNA, 386 bp, Glycine max
  unsure (1)..(386): unsure at all n locations
  Clone ID: PAT_MRT3847_106251C.1
tattcaatgatacccattatttacaggactttcaataaatccaaaatgattaaaaatccaatttacaactatatttataggagtaaatattacatttttcccacaacacttccttggattaggaggtataccacgacgatactcagactatcctgatatattcactacgtgaaatattgtatcatctttaggaagatcaatatcagttataagaattattatatttattataattatttgagaaagaatcgtgtcaaaacgaaaaattatatttaagcaaaatataacatctaatatcgaatgacttcaaaagttaccaccagaagaacattcatacaatgaattacctattatttctaagtaannnnnnnnnnannnnaanaaaa

SEQ ID NO: 6915 - DNA, 1062 bp, Glycine max
  Clone ID: PAT_MRT3847_106252C.1
ccacgcgtccggtgcgtattgtggcgtagcatggatcctccaaggaagaagaaaaaaggacgatacggcgtcgcagagctgaaaaccctagggaaccagcttctctcttccgcctcgcacatcaacaatctgcctcttctcctctccttcgtttccccttcttcccctcctcaccacgtcctcgaatccctcctctcgctccactccttcttcctccctctcctccccaagctcccctcctcctcctccgccgccgccgcctccctccgccggcgacgaccaatccgagttcatctacctctcctggctccgttccaagttcgacgagttcctcaagtccctcctcgacgtcctcgcttcgccgcagggagatgagacgctcaaggaactcgtgctggacacgctcatggagttcgtaaaggtctccaatggcggcgccttccactcttctctgtaccacaagcttctttgtagtattgtttactctactagtccccctacttttttggtggatttactggcgtcgaagtatttcaagtatatcgatgtccggtattttacgtttataagtctaaaaaagctcgctagtactttggagggaaaagatgtctcagatgataaaattgcaaatgctgatggttccagtgaaagtcaaatgagctcaaatatggaatgtgtcatccacaacatgtattacactatatcacatgttcccccacatcaaggctcggataatacatctgaattggaaatgtggagcagctcagaaagtgaccataagcagctttatggagataagggtgctgatgataagccacagaagttccagaagcctaacaaaaatgtattgtcagcagccaaaattgccaaaaagatgaagctaaaatttactaaagcatggattgcgtatcttagattgcctcttccaattgatgtttacaaagaggttcttgttaatcttcaccaagcagttattcctcatctttctaatcccatcatgttatgtgatttcttaacaagatcatatgatgttggtgggtggtggtcagtgtgatggctctt

SEQ ID NO: 6916 - DNA, 768 bp, Glycine max
  Clone ID: PAT_MRT3847_106253C.1
cggaaattccggcttcgaagagcctgttagcgctgttgcaaacaagggtgctggtggaaggtccagtgcaaagagggagcaaaacatggctggaaaaaatgcctccacagaaagagaggatccttcagagttcatcacacacagagctaaagattttctctctagcataaaggatatagagcataggttcattcgagcttctgaatctggtagggaggtcttgaggttgttagaggctaacaaaatcaaggtgggatattctgaggcaaaagggaagtcgtctaccactgctttgttgtctgctgtccagcctgtttgttgcggtagaaaggcttcacctgttttccaggaacctgcccaaaaaattattagttggaaaaggacagcatcttctcgatcatcctcgtccaggaatgctttggctacaaaaacaaaggaagatattgatgatagtggaagtgactttgtagaagaattctgtatgattgctggaagccattcatccactcttgacagactatatgcctgggagcgaaaactctatgatgaagtaaaggctagtgaattcataaggaaggactatgatcgaaaatgtcaccagcttaggcatcaatttgcaaaagatcaaggcactcatgtgattgacaagacccggtcagttgtgaaaggatctgcattcacggttaacagtggctatatattctgttgattcaatatctaaacgaattgagagaatgagggatgaagaattgctaccacaattttttg

SEQ ID NO: 6917 - DNA, 540 bp, Glycine max
  Clone ID: PAT_MRT3847_106254C.1
tcacactggtcgtcctttttttttgtttcggagtttttggagccaaacgcgggaaaaacaatacatgacgttgtaatgggagtgcatctatacattataagactaacaatcgagacctatttgagcgtatattgccttaatgatgctgaacagaaatcactaatattgggggtcacacaaagaccccccaatgtaagacaacagactgcccattccgcaaacggaggagaaaatccattgggaaatgatgaaaacaacccatacaagccgaatagattttaaatcatggcaacaaggtgcgcatgaacacggaactatgcaaatgctagcgaaagtatatctgtccaaaccaccgcactagcctcattggcatgaaaccatggcctccatgaactagagataggtaacgcacgataggttgcactgtaccttggggaaagcacggcgactctaccaggtgaatctgcacgataaaccccaagtctaagtcctgcaaaaataagcgtccttgaaaagggcacaccagagggcttttaaatg

SEQ ID NO: 6918 - DNA, 455 bp, Glycine max
  unsure (1)..(455): unsure at all n locations
  Clone ID: PAT_MRT3847_106255C.1
antcgcatgcacgcgtacgtaagctcggaattnggctcgagnnntaaatnnnantctntccantnctcnantccnaattncatacacaaacatcannctacatcaancacttncactcacnatctccaactctacngactcatgtcacatcacnantctccntncggatattcttgatnnctgngcataatcagnacatnanancatcanncacaaagacnttccacaattnctccnaactccctcttnccatctaccctgnnanagctcaaganngtngaaantatnaaagcntctaaatanaggtnnttcccnaaagngantgnctcaccacaccaacatttnagcaantnctancctcntgcncnaanggcctnacaaagnanngntgnctnttgngtnttnaactanntnnagnnaancaaaaantanncatttnaaagtaannacccccc

SEQ ID NO: 6919 - DNA, 171 bp, Glycine max
  Clone ID: PAT_MRT3847_106256C.1
ctctctctctaaaccacgcctagagagagaatactcgccgccggagcccctccggcgatggcaggaccggcgtttccctcactcccgtcgtacacctgatgtgcgtccgatcgagttcagcagacgaagtggtggctctcatatcggcaacatccgcgaatgaaggtagcc

SEQ ID NO: 6920 - DNA, 766 bp, Glycine max
  Clone ID: PAT_MRT3847_106257C.1
gaattcgagcctcttacccggggatcctctagagtcgacctgcaggggcagtatgtggaggaaaactcttgatatgcgagaccaagcaatttgtgtggataacatctacatacaaaatttataatatgtaaccagtgcaagctcagccaaatttatttcaaaggaatacataagcaaaatacataaggcgttgttgttgttgttgttacataagcaaaatcacatacgcaagcaacccagtcgagttgtttgagatccatccccctcttccaaaacagactggcattggcagcattttgggggccaatcatactccccatctataacccattccgaataagtccggacctgtgaaaatgacaaaacagacaaagcttaaccctggaaactctacggctccatacatcaatatttggacaaattacaaatccgcatgatccccaataaaactcaagctaaaactagaatctgaagtatcggaccaagaaacaatgacaaaaagtaatatattaaacgaaaaacaaaaatcaacaatactgaaagaggaaatgaaggaaaggtcgagagaacaaacgaggcaaggttagcataaattgaaaatgaataataataataataataatagtaataataattataataataaagatccgaattgaagaaaaacaaattaccacgcagatttgggtgctccgggaagcagatacattccccacagacaggaactttgtgcacgaagcaatatacttagtagcctaaaacacca

SEQ ID NO: 6921 - DNA, 385 bp, Glycine max
  Clone ID: PAT_MRT3847_106258C.1
acggctgcgagaagcgacagaaggggtctcaccaactgcattagcggaactgtggaaaaaaaaaagacatcccgccaactacattagcggaactgcggaaaaataaaaaagacatacatctcgccatctccagtggcgacaccaacgtgcatcctccagctcagcatcgttctcgccatctgcaatggctgaacttctgacggcatccatgcaggaagagaccccctattaaaagtttgaaaacagccctcattaataaatagttcttaaaactaacccctgtagtaaatttggctggcttattatatgctgaacaagtctattggaaaacatctcttaaggcccattctctctccctgctagggcgcttttcttggggaggttt

SEQ ID NO: 6922 - DNA, 184 bp, Glycine max
  Clone ID: PAT_MRT3847_106259C.1
acggctgcgagaagactacagaagggctatatataataagagtttaataggctcaaacgccaaaagaaagagggcgaggcctaccaagttttggtttaaagccatagtttaattccttcaaaccaaagaccccttcatccttgaccttaccatgttttcaaggaatatatccttattttttttt

SEQ ID NO: 6923 - DNA, 393 bp, Glycine max
  unsure (1)..(393): unsure at all n locations
  Clone ID: PAT_MRT3847_10625C.1
tgctaattaagatggagtaggattgttagtgtcaacatttaagaggtaattgacaacagatcttccaaaggtctttcttttagaggcatcttgtgtagtggacatgtaataaatttcctgctttgttgttgctgccattagagaatgtttatgtaacttcctcctcacatcaacagtcttctgttttcacatgattctgcggatttgaatttatgatgagtttttttagtttttactgtagagaaaaggaaaagaaaattcagttcccacttcccaagtaacttctatttacttaatcagtngtttattttaaagatgaaatgcactggagactaaaaatgcttggtgcatctggagtggtttttgcgaacacctggggagattttacgcaaa

SEQ ID NO: 6924 - DNA, 401 bp, Glycine max
  Clone ID: PAT_MRT3847_106260C.1
gtggccgaccacaacggggcggggatagaaaatttatggggggccaaaggaaagcggtttattcaacccacggggggggggggattttttttaaatttttttgggggggttttaatgaataagtttaaaaaatgggttggaaaaaataaaaaaaagggggtttgcatttgtttttgggggggaaaaaaaattttagggaaatgctttaaaaaaacctttaaggggtcatagggattgtgcctttcattaaaaaaacttttaaaaagtgaatttgcaccccaaaatgaaggggccagaatcctgtttcctgaggggggcgggggggaaagcttaaacccgtggggaggatgactcaaaaaaaatggctgggcaaaaaaaaaaaaaaaagagttgggccgaat

SEQ ID NO: 6925 - DNA, 755 bp, Glycine max
  unsure (1)..(755): unsure at all n locations
  Clone ID: PAT_MRT3847_106261C.1
cgacaaaataacccaacaagtaggttctagagttttattctttgtcaattttggaacaactgaattcatcacataatcatcacttttggttactactactaattcacaccacaatgaatcacaaaaaaaaaaaaaagataacagatttacccaaaaatcctatgttaaagcaaacaaaccggggggggtaaaaaaaaaagaagtttgattaaaaaaatttctgaagacagtaaattaacttaaatgtgagtgggaaagcgagcaaactgaaagattgtgcaaaaatattgggtcatggcgcatattcatgttcaagggttggttgggttcttgttactgctgcaacaggagcttttgtatccccaattgaagacatttgaagaggctttcccacctttgcagccctttccagctggggcattttcatcttctgtattagcttgctcatccacaaaactagaacggacaacaacacaagcaatactactctgaccacaactttccctacaatgaccttcactttctcattattagtattcccctctgcaccttcccctttaggtgctatacctgccgtggatggaacagctactaaaggatgactctgtttaaccgtagaagatgtgtgaccacctgtcacattgctgaaattggtgccaccttgcaaatcaaagaaaacacattttcctcgccaccatgaggggcttgttcttgtccctgaactngaccaananaggcccttanngnntctanng

SEQ ID NO: 6926 - DNA, 232 bp, Glycine max
  unsure (1)..(232): unsure at all n locations
  Clone ID: PAT_MRT3847_106262C.1
gcgacgcaagctaggaattcggctcgagctctcagtagaaaaagtagaaaggagaagatattcttgagcaattcgaagcttctagttcttgtgagccggaggcttctataactcaagaaacagaaagagaaaatgaggatgctggggaatgtaagggaagtgaaaatgatgagataatcaaagaactgaagaagncgaagaggccgaacttcgtgactcatagtcttctttc

SEQ ID NO: 6927 - DNA, 461 bp, Glycine max
  unsure (1)..(461): unsure at all n locations
  Clone ID: PAT_MRT3847_106263C.1
cggtccggnaattccccgggtcgacccacgcgtccgtgacaaacaggatttccaatgaagcacgtagtgctgactcctggtctcgtgactcttttgctgctcacgggatctccttgcttgcgtggatatggaaggcgtattggagagcgtaggataaagtctcttcgtcggtgcattgtcatgccagacctctctgtttgaaactcggtaattctgaagaaaggggaaaatgattgaccaggattgactgatgttgaaaagccaaggatgataggcccaaagagagcatccaacatgcttatactgttcaacctgtctcaggaggatgttgtttggaagagtgtaacacacctaccgacatacatctaccacaaatgctgggaaaaaggagagctaagctcccagaatacataaactggccactcctcttacactccaaacaactcggacgaacactgctg

SEQ ID NO: 6928 - DNA, 409 bp, Glycine max
  Clone ID: PAT_MRT3847_106264C.1
ggctcgaggacctgtcctcttcaataagaaatgcacattattgagccaacagagaagattgcatgtaggattgactgagagcccttccagcactatataaggaaaggtggagatggaaagtggtgaactgagagtggcaagtggaccccttagggagctccagcgtgtggaggagcagtggtggcgttgatgtgttttcagggtcttcaagaagggatgatgatgaacaagagcttaaatgggctgcaattgagaaactccccacttatctacgtatgactaggggcattctcaccgaggctgaaggccaacctacagagattgatataaacaaactctgtccacttcagaagaagaacttggtggaaaggctcgtcaagattgcagaacaagacaatgagaagttctt

SEQ ID NO: 6929 - DNA, 430 bp, Glycine max
  Clone ID: PAT_MRT3847_106265C.1
gggacaacaaaacggaatcccacccccgctttttcttctcggataagaccaaacaaacaaaggggttttttaaaaaaaaaaattgcgtaacttcccaaaaacaagggacaaaaaaacatgaaaaagaggggaatgggggaaaacatgaaaaaaaaaaaaaaaggaggattttgaggaagaaaaaacccaattgggcgggggggcccgaccgaaaaatggaaaaaaattaggggagggtcaattcctaagcttttgcagctacgggaggcccaaccttgggggctataaacggcccaaaaaaaacccttaacttcaaaccaactatgggtgggaaaaaacccgttccattgggggtgccgggaaaaaaacaggcttcaacatcgggggagaaacccctccaaaaaactttgaagaaagggggctaaagggg

SEQ ID NO: 6930 - DNA, 762 bp, Glycine max
  unsure (1)..(762): unsure at all n locations
  Clone ID: PAT_MRT3847_106266C.1
aatagattcgttatcatgttgtgctatttatggcatgtacaatgataaataatactacgtacaacaaaattaaattattttacattgtatcattaatatcatatacacaacatattcgttgactagctctaatttacagaccctaccaaaatctgtccttgttaacgcttaaatagccagccataacctttcccccagtatttctcattccatctatgaggaagcaccaagtagatcccaacgctccaacgaaaaaatcagagtcagcagccatcatgaaattaaccagtgggtaattagtgctgctctccctccccaagctagcttcatacttcgccattgacacattagtcctaccttggcgtcttaccttattatagtgaaagttccaaccagaatattctttgattttgtctatgacttcctgcatctctgtggacagccatatgctattaaggtttgggaaatgcctcctgatccggtctgcaagttgcatgtattcttcgaactcaaccactttcatttcacacgctttgtctcccatccttacatggatgcttaaaaaaggcctagggatccatggcttgtgattggaccacacatattcttcaatgccagaccctgacttgttcctattttcctcaggccatacttcagccgatctttcaagaaccatttcccaagcaatctcatgctagggagcatgccgggcttcattcaataaattgcannnnnnctcagttggaaacctcattaagtaac

SEQ ID NO: 6931 - DNA, 497 bp, Glycine max
  Clone ID: PAT_MRT3847_106267C.1
catgaaaccaacatatttgttaccagggacaatatgcagaaaaagaagataaacaaaaaaaccttaaaaaatcaaaaagaaggcccagccaaaagcaaaagaatttcaggagagatgctaggaggaacaaatttgacaagctctgcatctaaaccatgttgacaaaaccacataaacctgcccatgaaaaaaaaccacttgcactaaaaacccaaagcagaaaggggatctgcttgcatgcccgagagaatttttacaactccatttgcacaatcatcacctagctcctttattgaaagcaaatgggaggtacaaacacgagaaaaaagaagaactgaaccatgactaacatctactgcccaggggggaaaccatgtaaaggcatgaaattcttcctaagacaaccccaaatccagaaaaaaccgtttattcatatagtgtttccattggcaaaggcggcgaccacatgttgctatagctagacctccaaacttact

SEQ ID NO: 6932 - DNA, 465 bp, Glycine max
  Clone ID: PAT_MRT3847_106268C.1
gaaactcactaaaacaaaaagaaatccaattacgaagaataaggggtttgagtagcagtgggagttcgagagtttgccaaattggttctcttccatcatctccgtgcagtgcagttctgtgcaggttttggggtttgaacaaaaatggaatcggtgccaaacccaaacggggaggaacccacttcgtgggatgagctatacaacatcaatttaatgccttcagagttatttctcaagttccgaaaagaacttcagggcattcgagttggtctcaacatggagttctataatgccccagtcaatgaatatcaagcaaagcttgtattgaagcctttaacacctgaatggaagtggaagataatctatgagccccttcatcaagatgttcgtgttctttcaaaaaagatccccatcactaaatttcttaatctttaggttggtgtaggacacaattttcaaatgcat

SEQ ID NO: 6933 - DNA, 384 bp, Glycine max
  Clone ID: PAT_MRT3847_106269C.1
cactctccaaatacgtagttgagggaggatctgagaccgtgacagacaagtccaacaatagttgaaacaaaaccaacaaatctccataccgctacctgagtcagccatctagtcattttgatggccaaaagcgtcatgttttttatgtaatgagtaagagttgctttaacagataatatatacagactacagagcaatcatttctggcttaggatgagaaacccacctgtatcttcagatgaaatttcaaggaaagggacaaaaaccttatatgctataataaattataggataaagatccgtccacatccatgctattaattagacactctttaaactcatatgatatatgattagaagaaagatatataaaatgaacttaaa

SEQ ID NO: 6934 - DNA, 2484 bp, Glycine max
  Clone ID: PAT_MRT3847_10626C.1
gcgcgacagcgaacgcgctttcaagtctctttgggtccattcaccaatctctcttgcattgtagttgtcacaactcacaacaatcttagaacttagaaccagtccatgttttattgcttcaccttagatatcacacttaagctccttccactctacatgttctacaacttgtcttctttttaatatgtttacaacttcaaactttgcttccttgggctattaagctccatccaaggtttgtttttttgcagtaagaatggacaagaacaggaaactcagtcggttcaaggatctttctatagctttttgctttgtggcagtttttttcttgtttcaccacttgggtttgtgctgttctttgaatgaagaaggtaatgctcttttgaagttgaggcagagaatagtgagtgacccttttgatgctttgtcaaattgggttgatgatgaggcttctgttgacccttgtaactggtttggagttgagtgctcagatggaagagttgtggtcttgaatttgaaggatctctgccttggaggaactctggcacctgagcttgtgaaacttgtcaacataaagtccatagggtgaatatgctacagtattttgcggaacaactctttctctgggaccatccctgaaggatttgtacagttaaaagaactggaggttttggatttgggatacaacaacttcagtggacatctacctgctgatctagggagtaatatctcactaacaatccttttgctggataacaatgaatttcttggttggtttatctcccgaaataaatgaactgaggatgctttccgaatgtcaagtagatgaaaatcagctgactaatgctgctaaaatgccagcttgtacagaaagagctaccacttctttgaaggcatattggtcaaggtaaaggtactcgtggctcacaacattctaatacttctcctgctgctaatcattaccagtttaatcgtgtggctgctccacctcttgagagcccttcttctccttctgcttccccatcaggctcagcaaaaccaccagtgccaaagctagctcctcataggaaaaatgcttctgattcttctcctccccactctacatcaggttctggaacactatctaaaactaaaagcacctcatcaaaggttcatacagttcctattttggctggagttataggtggtgctgtgtttcttattttttcaagcattggcatatatctttgtaaaacaaaggtagctaatgtcagaccttgggccatgggactaagtggacagcttcagaaggcatttgtaactggtgcgcaaaagttaaagagatcagatcttgaagcagcatgtgaagattttagcaatgtaattggtaattcacccattggtatactgtacaaaggaactttgtctggtggcgttgaaatagctgtagcttttgtttccataacatcatccaagaattggtcaaaaactttagaagctcaatttagaagcaagatagataaattgtcgaaagtgaaccacaagaattttgtgaatcttattggatactgtgaagaagaggagcctttcaccagaatgttggtttttgaatatgccccaaacggaacactatttgagcatctacacataaaagaggctgagcacttggattggggaacaagacttagagttgcaacgggtgtggcttattgcctgcaacatatgcaccaattagatcctcctatggccctaatcaagctgaattcttcagccgtttacctcaccgatgactacgctgccaaactctcagatttaagtttctccaatgacatagcctcagctgagacaagagctatggacaagccactagcaactccagaaagtaatgtttatagcttgggtgttctactatttgaaatggtcacgggtcgtcttccttattcagtagaacataaggattcacttgaaaactgggcatcacactatttagaagttgaccaacccctcaaagaaatagtggatccaattctagtatcttaccaagaagatcagctggaacaagttgcatcattgattacatcttgtgtccaccctgatccacagaagagaccaacaatgaaagatgtgagtgagagactgagagagataacaaaaataacacctgaatctgcggttccaaaactttctccactttggtgggcagagattgagattgcatctgcagaagcacgttgagatcagtgtagcagatttttaaaagtctttgagagctcttagcattgtgatcctttttttccttagctgaaggcataaaaaacttcttacttgaagtatctattgttgtaggacatggtcaaaagtgacgtgtgggggaccaaaatggtgtggtgaagttcttttgggtgctgttttttttaaaaaagaaattgtagcctatggaaatgcacctagaaaatagctttttgtatatcacttaatcaagatatttccaaatcttctcatccc

SEQ ID NO: 6935 - DNA, 774 bp, Glycine max
  Clone ID: PAT_MRT3847_106270C.1
gtcagattctggagtgaatattttaccactgatagatcacttgaaaaagccatgctttccagacaacatgtacctgtggaatcaagtcatctcttcaaatttattaattggagttccctgctccctgagaggtttataaaaggacatgtttataacaatccaaattatggcagttctgagctggctaaaaaatatccagggttcctagatgtgagggcagcccctttgttggctgatgacaacaaattacgtggcttacccctgacctatgtcatcacctgtcaatatgatctcttaagagatgatggactcatgtatgtcacccgacttcgcaacactggggttcaggtgactcataaccatgttgaggatggattccatggagcattttcatttctgggacttaaaattagtcacagacttataaatcagtatattgagtggctaaaggaaaatctatagtaaaacatgtagctataacatattttaaaaataaaatctgaaaacctcagaaaatttgcattagaaattggtctttcttaaaatggtctagttaagttccacatgtagcataattcttaaataggcacttttctgttttttttttcttactgtgggatttcatttcaattttctacattgtctatctgctttttctgagattttccttcttacactgttaatcttattttaaaaaatattacattcttgtatactttatttttgtgagttggctactatttacgatgcaagagaataaatgtagcaaatatt

SEQ ID NO: 6936 - DNA, 396 bp, Glycine max
  Clone ID: PAT_MRT3847_106271C.1
gcttgacggttcagcacctactcgacggtgggcgtcctttttgtgtgctaatatgctcgagactggaggcatgctttatcattaatgccttattatgcggacataggtattctatgtctatcatatcaaccacgactagagtgattgtcatatcagcttactcgctctctttctcacttgaactatacattatgttgggacatgctgtgctttatcacacgttgttcgatgatagtgttctgtgtaaaaagatgatgcgaatgggaaaagagaattgattgcagagtggctgtgcagctgaattacttatgctactaaggggattctgctctttgactaatgatgcatcggatgtgatattcagttgatagaacatgcagactatggaaacatata

SEQ ID NO: 6937 - DNA, 569 bp, Glycine max
  Clone ID: PAT_MRT3847_106272C.1
caaaagcaagccctaagagaaccaaggtaattcattcatcatctaccttctaaatggagcttggagatatcagcaggaggagcagattttcctcttatgagagagagtggcagccataagcttggtggttctagctgtggcgtctcctctctatatagaccatagaccagagagtgagttggaagatgatgagcaatccctaagttttgctttttggttggccctgttgctctttgtattgataattgccatagctttatcagcttttctcaaccggaacttcaccaggttccatcgtaactggattcagagttggtggttcttttggtggattattttgattcttattgttctcttactggttttgaagtgtaaagcgtctgtgtaagacaagatggcatgctcaaactctctatagtaagatatgcaataactttttttttctgttgtgtttgtgaagaacatagcaaacaacttaatattgactgattaatcatcctctatatcattatttagtacatcttaggaagttttttgtttttcctattggtctagttttttttatttag

SEQ ID NO: 6938 - DNA, 252 bp, Glycine max
  unsure (1)..(252): unsure at all n locations
  Clone ID: PAT_MRT3847_106273C.1
gtgggaatgatgagtaacgaattcaggatagtgataacttctcggaaggcggcaggaaaagaaaccagacaggcgctgtgtggggtgtcacttgggtgggggtgggtccagtgtcttgagcttctgtttgtgtgcctgcagacctcaagctagctgctgtcactgaacccgacagaagcctttccttacctgcagccccgctctttgccaccttcacgtctattcncacggggttcctttggctgactctca

SEQ ID NO: 6939 - DNA, 471 bp, Glycine max
  Clone ID: PAT_MRT3847_106274C.1
gaggactctggctgtagcacattgccacttgttgccaatggcttctgcgatactggtcattccccacctctgctggcgctcttgcttgattctccggcagcgatgccctttgcaaagcccattcactctacagagacataactggatcgaaggtcctcagctgccgaggaactggaacgtccagaacatacgactttgtgaccttcgcctaagacaaacagtgaaagatgcgatcgaacgattgaacatccaggacctcgtcactcattacaccacttgtgaacggacccatcacatgcgccagccgcactgattgtacaggcgatggttacgtaagtggatgtacattcatcctcacacgctcaaaatataattatagaacaagcatgcatgtatacttacatcgtcgtgaaggtcagttccacctcaactcaaccgatgtggaggatccagatacagaaaccgtaggtg

SEQ ID NO: 6940 - DNA, 315 bp, Glycine max
  Clone ID: PAT_MRT3847_106275C.1
aaaaaaaaaaaaaaaaacggggcccggtgatttgattttgttttgacaaaaatttccttgggtgaaaataagaacaagaaacacgctgtcacattgttttaaaaaaaaaataggggaaaagaaattggaaagctttgaaacaattttttttgggatagccatggaaagcccacagcagggccctggaattaatttttttttaggttttatatgccactctgggaaaaagggggggcaaacaaacttggaaaaccatgtttaagggtttaaaattccccggggggcggggttcactaggaaataaaaaaacccttg

SEQ ID NO: 6941 - DNA, 417 bp, Glycine max
  Clone ID: PAT_MRT3847_106276C.1
gggttagggttttttattcttttttattttttttgttggccaaacccaactatatctatctgaccaaaaaaaacaaacgcgtacatagggttctctattgggctaaaaagaagaagttttagcttcttacacataccaaaggactatccctccgtaaagggggggtatacacaacaaaaacccactttttgatgaatcagcgatacctggggggtaaaggggcatcaaaaacgggaaaagaacggatgaattctcctaggagcaacaatgacatgaagctgggtgacacccccgaataacatcttccgggggggggaagctttatgattttttgtaaaaccacagccctagcccttataatgtctcggctacacgtttcagcttggaatcctaaatctccaacatggttcataaaaa

SEQ ID NO: 6942 - DNA, 936 bp, Glycine max
  Clone ID: PAT_MRT3847_106277C.1
tccaccacctcctcctccaaagaagaaaccatactactatcactccccaccacctcctcaccctatacctcacccccacccactattattattgtactacaacacaatcaagtccctgaatgctttttagagagagaaagagtcataataaagtgaaagaaaaagaaaaaggagagtagtgaaacaagaagaaaggagaagaagatggtgtttgaggaaactgagctgaggcttggactgagactaggactgcctggaaatggagccgcgccaacaactgaagctgctgcggaattaggagtgaggaagagagggttctctgaaactgaaaccgatgaaacaacctccgttgatttgatgcttaacctctctcccaaggaagcttctgctgctgctactactgatggagcagatccacgtgagaatccaaagacttcgccgaaggagaagaatcttcctcttctcgatcccgcaaagcctcctgccaaggcgcaagtggtgggatggccacctgtaaggtctttccggaagaacatgtttgcagcccaaaagagcagcggcggagaggaaagcgagaagaacagccctaatgcaagctttgtcaaagttagcatggatggagcaccttacctccgcaaagttgacttgaagatgtacaagagttaccctgagctctctgatgccttgggcaaaatgtttagctccttcaccattggaaattgtgaatcccaaggcttcaaggatttcatgaatgagagcaagttgatggatcttctgaacagctccgactatgtcccgacctatgaagacagggatggcgactggatgcttgtcggtgatgtgccatgggagatgtttgttgaatcatgcaagcgtttacgtatcatgaaaggaaaggaagcttttggactggcaccaagaaccggggaaaaatgc

SEQ ID NO: 6943 - DNA, 430 bp, Glycine max
  Clone ID: PAT_MRT3847_106278C.1
gtttcgttccatgaatgaagctatctcgaagtcatggaaaaaagtttgtctcctagaagcaaaacaaacggagggtggttttcatgttgggggcgtctcaaattgaagcttccatggtcgaagagaacaagcacttataaacccattggtggttttaactatgaccctttaagctatgctcaaaactttgacgagggatgggaggaggatgatgaagaatctttacatcgcgggttctctgctagatatgcagcaccttcctcacataataaattgctcaagcaatgatagggttgattgaagcttcatttaaggtcagctagtatatatgtactgaaaaactggtcttatatttcttgtcacattttactttaccctctaatgatcttgaatcttgattatataaattactcatgtttggtgcagcaaa

SEQ ID NO: 6944 - DNA, 1302 bp, Glycine max
  Clone ID: PAT_MRT3847_106279C.1
gagaagacgacagaaggggtccccacaaggctcgagcgtgcctgcccctatacctcaccccacttactattattattgtacaacacaaccaggtccctgaatgctttttagagagagaaagagtaataataataaagtggaagaaaaagaattaggagagtgaaacaagaagaagaagaagaagaagaagaagaagaagaattgagaagatggtgtttgaggaaactgagctgaggctgggactgggactatgtctccctggaaatggaaccacggcaacaactgaagctgctgctgcggaattaggagtgaggaagagagggttctctgagactgaaactgatgaaacagccaccgttgatttgatgcttaacctctcacccaaggaagctgctgctgctgatggtgcagatccacgtgagaagccaaagacttcgccgaaggagaagacccttctgcttcccgatcccgccaagcctcctgccaaggcgcaagtggtgggatggccacccgtgaggtctttccggaagaacatgttcgcagcccaaaagagcagcggcggagaggaaagcgaaaagagcagccctaatgcaagctttgtcaaagttagcatggatggagcaccttacctccgcaaagttgacttgaagatgtacaagagttacccagagctctctgatgccttgggcaaaatgtttagctccttcaccattggaaattgtgaatcccaaggcttcaaggatttcatgaatgagagcaagttgatggatcttttgaacagctccgactatgtcccgacctatgaagacagggatggcgactggatgcttgtcggtgatgtgccatgggagatgtttgttgaatcatgcaagcgtttacgtatcatgaaaggaaaggaagctattggactggcaccaagagccgtggagaaatgcaagaacaggagctagactagtagttaccagtccaaaatctgctccatcatcattagcggtgcctagttgacttagtaactgaagcaaggttaagctgcagcagacacagagggagagagcagggtgttaaaaaatatagttaagtaaatctgtgtatcattatggtttgttatataatatatatttcaaacaaagttgtgagatgtcgtaagtataaattatgaacacaaacgataatgactctaaattatgttgcaagactttcttatttctttacttgtgtgcttgcataataataagtttattaatttgcttgtcaaaaaaaaaaaaaaaaaagcggccggttttttttttttttttaaaaaca

SEQ ID NO: 6945 - DNA, 1044 bp, Glycine max
  Clone ID: PAT_MRT3847_10627C.1
atatgatggaagcagaaaaaaattgtgttgggggagaatttgctttgctatattcatcgagccgtcagaatcttgtccttgtatgccctatttctcttttcaaaggagcatgaggagttggtgggcatatatgcttctcagcttgcacgccaccgttgcattgatctctttgtgcacatgatggaacttaggctgcacaacagtgtacatgtcaaatacaagatattcctttccgctatggaatatttgccattttcttctatggatgattccaagggaaattttgaagacattattcagagaattttgttgagatcccgagagatcaaggttggcaaatacgataacctgtcagatgttgcagaacaacacagactgcagagtcttcaaaaagctaaagtcatccagtggctttgctttacaccaccatcaacaattactaatgtcaaagatgtcagtaaaaagctgcttctccgagcactgattcatagcaacatactcttccgggagttttctttgatttctatgtggagagtaccagcaatgcctataggtgcccacacagtacttggttttcttgctgaacccttaaaacagcttgcagaaactcttgagacctctgaggattataatgtttttgaggatctgagggagttccaagactggcgtgagtattactcctgtgatgcaacctaccgcaattggctaaaaactgaagtagagaatgcagaagttcctatctcggaactgtcactagaggaaaaggaaagggccatttcagctgccaaggaaacactgagtgcatccctttcactactaaaaagaaaagaaacaccttggttggcttcgactgattgtatgtatgaatcagctgaacctgttttccttgaacttcatgcaacagcaatgctctgcttgccatctggagagtgtttgtgtccagatgctactgtttgtactacactgacgagtgccctctactcttcggctggtgatgaggttgtcttaaatcgacaactaatggtgaatgtttccatatcttca

SEQ ID NO: 6946 - DNA, 708 bp, Glycine max
  unsure (1)..(708): unsure at all n locations
  Clone ID: PAT_MRT3847_106280C.1
aaacaacaaattactntttacattaccaaatacaaatngaaagaacangaacaaaaacaagagnntgatngnaagaaaaaaaaaatgaacagtttattactgnacacccataacccctcgttggtcgttactatatattatatttnacaaagcaataaaacatgaacaaaaatnataattntttgtnggtatatgattcctaattaaacttnctaattttgnannataaaagnactatatataaactatttgnaggcctttaanacaagnaaactggntaaccaatattanntnnttgacccgtttaaaccctggcccatcagatacaaaatgggaatttttttcattgtttttccatgatggacaaaacaagaaagagttgaaattaatgccctgtttttttatttttggtccttttacatgcaaagganattaangtataaccttttggggtttggttttttaaagaaggggagggggagagggaggggtggggccaattccttttnttttgattgaaaaacaaattattaatntggtttaatnggaanncanntttnttgnccaaaccttggctttattctnttnggggggggaagggnnntggggaagggggggggggacnaagntttaaaaaaaaaagtggggnnnnnnggaaagttnccnnnnttttttttttggggnaagattttntntttttaaatttaa

SEQ ID NO: 6947 - DNA, 1063 bp, Glycine max
  Clone ID: PAT_MRT3847_106281C.1
tcgctcgttttaagccacgccggtgaagaatcgtgcgattcgtctggaaatcgcgattcaagcacgattcaggaacaaaaacgagacaacctcggattcgtatcgaatcgtgcgatacgtatcgtgaatcgaagcaaatgaagattgtttcagttgcagttaggtcaatcagtgctaatttgccaaaccagtttcatcagagccacttgctcagaagtctttccacttggaaatttacagataatgcaactggtaatcggcagtttagcaattcagaatctcctgaggagtctgagcagtttggtggaaatcgtgggaaatatgcccaacttgattccatatttgaaaagtttaatcaacagggaatggcaagacaaagacctggttcagtaaatggtgctagttctgagaggatgcacgatctagaagaaacttatgacacattaactgatggaatggatggaaaactgatgaatgctgccacatactttgaattacagaggatgttttattattattttgttgttgaaagcagggtattgcctgtccaagagtcaacgactaattcctcgagcaagaaaggtgtatggtattgggattataacgaacaagaatatcctattcaagatactgatgtgatcaaattccgagttacaaacgtgagttatccccaaattccggttgagcaaccaaaagaatcaaagccatttgcccctatgttgatctctggagcgatggatgatgatggtctaggtcctgtttcttggtggtttgcagatgaggatgaggatgagtaaatgtgagtccaaaaatggtgaatttttcgtttaagtaatgatctcattccctaggttttgttcagtctagaagtaatttgtttggtcggatagaagaaattagtagtttgctgaaaacaaaattaacaactcatgttcaactcagcaacagtatacttttgtgcaattcctttgcttcgcaaagtattaaatttaatgaaacattgtttgactttttaatttctgcgtcctgaatacctacggttcaggaagagaaacctgtttat

SEQ ID NO: 6948 - DNA, 237 bp, Glycine max
  Clone ID: PAT_MRT3847_106282C.1
accaaaaacacatgctagaagaatgtggcccatgggtctttacagaagcgattatgacataacactcggtctccataatgatcgaattcagctcaggagcctcattggacaccaataaaacatggaaatacgattcgcctaaaaagaaatgttagaaagatcgagctacgagggctatcaatgtgcaaccattgcctgaaacggctactgggcggattctaaggaacccagaaccta

SEQ ID NO: 6949 - DNA, 241 bp, Glycine max
  unsure (1)..(241): unsure at all n locations
  Clone ID: PAT_MRT3847_106283C.1
ctttgtttttttttttttttttttttttttttttttggggcaccagaattttgacttgaacaaaaggaaacagtacacaaaacaaatttttgctacatcggatttgttggccacagatcgcctggcagaagattttttttatttttcttctccaaancttggggggggaggtattataataatcggtcttttgcagagaggcatttagggtgagggttttgggcccgtgggttgacccggg

SEQ ID NO: 6950 - DNA, 121 bp, Glycine max
  unsure (1)..(121): unsure at all n locations
  Clone ID: PAT_MRT3847_106284C.1
tcatcctcaaataagcnanatgtacccgtctgncanagctgtgtaaagtattagantctgatgctctagaaagatcctagtngcctttgtgtatantnactgcctgcttgagtgnntctat

SEQ ID NO: 6951 - DNA, 429 bp, Glycine max
  Clone ID: PAT_MRT3847_106285C.1
ggatcctctcttaaccctatgaaagccaaaagagaaccaaggactgcagccccacgataaccgtaccggactggattccaacgcgcaggtctcggagatcaaaattaccaccctgcctcactgacgcaatcataagcctttctccgtcggcgaaacgaaccaaacccaaagcgtcggcgcgcgttgaaaagacagcgtggtctgttacctgaccgactagagcgcttaccactgacggtggtccgcgcaaaactagatccgtcatggtgactctagtatgctgctatacgtaccggctacgaacgcactctatagtggcgactggtgctccatcaacctctcgatgaacaccgattcaaactacgactaggatgccgacagatccgacaactacagtatgaaccacaacaggacgcgcatgcttgagga

SEQ ID NO: 6952 - DNA, 1097 bp, Glycine max
  Clone ID: PAT_MRT3847_106286C.1
tctttgagggtaattatgagactaaccccacgcgtccgggtgtttaatcttaaatggggttagctagctaggttaaagccaagggcccatgggctcatgcttatgatttgcaagtgttgctttcaagggaaaaaagagagctttttcttcggttggcccttttagcagattgatgttctgagaggttttgcaatttgaaaccaaggtttgtcattatgtcatgctttattggtggggaggggatgtagtcatgttatgtatgtagatacaatattacattcatacattgaattttagtcacaagatattatccacattttcagtgcttgaattcagaatcagagggtaaaagttgagttgagagtactgttagttaattgctcagtaagctttccctgaacacttaaacatgtatcttctcttcgatgaaattggtttttgattttgtttttgtagtgcactggtctgtttgatgtgattttctggattctagagattaattagtttggacattgagtattttgggaggttgaacaagttcaagtgttttcaatgtgatttgaggacaaagatgaaatccttgagtagtgtaggtcttggtctcagtattatttttggttgcctcttgttggctctggtagctgaggtatactatttgctatggtggaagaagaggataaccaacagagagattgagaataattatggcaaccctgtgaaggagttattctacatgttttgttggaaaaggccatcatcatcttctttgaggcaaacaagtttcactcctcctgagctttgctcttccatgagaattggtgacacccttgttcataacccagaacaagttcagtctcaaagtggaaaggactttgttttcaaaccctttggggaagatggcatggatgcaggatacatgagcccccgttactgctaggctcttcaagattctttgtcaccatagttaaaaaatcaaaagaagatttagaatctgatgatggcaaatccaaatgtgacaagagtggaaaaggttcaaggggtagaagcttggggtgatttgcttagttgtggagacaccatatatgacacctactact

SEQ ID NO: 6953 - DNA, 463 bp, Glycine max
  Clone ID: PAT_MRT3847_106287C.1
gcaaattctgatatgcctgtatctgttgagcaaagtggtgaaactgagatgatggaggaagacagaaataagagggaagatgcaaagccttcccaagttagaacattggcaaatggactagttattcaagaactagaaaaggggaggcaagatggaaaaatagctgctttggggaaaaagatcagcatctattacaccggcaagatgaaggaagatggagtagtatttgcatcaaatgctggccaagctccttacaaatttcgccttggcaaaggaaaagttattgagggttgggatgttggccttgaaggcatgcaagttggagagaagagaagacttgtaattccaccatcattgacgtctgagagtgatgaacattgtgccaagataccaccaaattcatggttggtttatgactttgaactggttaaagttcattgaatttcatcgaggtgatggtggc

SEQ ID NO: 6954 - DNA, 545 bp, Glycine max
  Clone ID: PAT_MRT3847_106288C.1
tgtagcagtaccgcctgcttggggggggggggggggggggggggggctaaaataattacttagcaatggaagtgtaaatcacacgaaaacgtaagagacgtacacgagggcaatagttaaatgtgcaaagtaactaaactaaccgataagggaaataactagaggagaccgcgagcagatagcaaaagggacaaatagtaccacctagaaaaggcatgatcctatgaagtaggtagtagttttagccgcatcctgttggtgtgggttgcagggaggcatagtttgatttggttggcaagtaggagagttatggcaagtacgcgtacagcagcagcacctttgtggcggtgggtctggcgcttggtgaagcaaagtggtacaccaagtaccagtgcagacatcctggtgttggtgttgtggtgttggttgatgtgggtgagcttgctctggagatgtcgtcgtggtagtgcaacaaggcgtttgtggttgttgcccggtttcttggtgtggttggtgctggtgggtggtattgcaagtagttcaag

SEQ ID NO: 6955 - DNA, 421 bp, Glycine max
  Clone ID: PAT_MRT3847_106289C.1
aaaagaaaaccctttttcctttacccaaatggggggggaaaggggggcccaaattaccaaaggcggacctggggggattttaaagaaaccctaaccggggggccttgggtccctttaaaacaaagaaaaagggacccaaaaaaagacaggggaccgggggaaaaaccccccaaagaggggggggccaaacccttggggggggggggccaaaatatagaaggcaccaccggggccagggggcccccaacccaaaacataaacagggggaaacccaacggggccttgggtttgggggggggggacatccccctggggggggggggcccccccccaaaggggggggggcccgttctggtaaggcccttgttttgccacgttctcctttgggaaggggaaaaccacacccccccccaaaaagggg

SEQ ID NO: 6956 - DNA, 259 bp, Glycine max
  unsure (1)..(259): unsure at all n locations
  Clone ID: PAT_MRT3847_10628C.1
atggctgcctcatccacaatcaacaacttcttctctttcttcttacccacaaaaccaccacgggcctgttcaccggaggtgaagggcagcaccaccaccaccacttctatgaacccttcttcttagacccacaaacccttcttgcagcccctaatttgccaatacaacccttctncttcttncccttcttncctgtcttcttcttctgaattggccctctgtatatgcccctccatggcgtactccaacacgctctttt

SEQ ID NO: 6957 - DNA, 487 bp, Glycine max
  Clone ID: PAT_MRT3847_106290C.1
gacagctgcaagaagacgacagaaggggtgtactgctaatggcactcaatcactggccgtgcagaataacatatcgaagcacactattagcatcttcactgatgacacaaggagccatctatgtgaggatctatatctctgagggcacgacacagtagaatgaatccttggagatacttgatgcttacaatatagatcacagtgctagctacagtatgattgcaacacgcctgtggaagaccttctggtgcagaggcacgcgcgaacccagcactaggatgcacgctctctaaagatataaagtctatctgaacgcgcttgactatgaagctcttctcactgcatagggacggcgacgggctgacaatacgcgcaagcacgttcgcgactctggcctcagaaacgccatcggtctactccttggctctactttgaagatgactctacaaacaactggtggcggattagcaggagatgcctacccagc

SEQ ID NO: 6958 - DNA, 582 bp, Glycine max
  Clone ID: PAT_MRT3847_106291C.1
gggaaggataatcttatgaatgaataatgaggggccaaattttaataaataattaaaggcctcgcttccctcccccttgcataatgggaagccccaccaaacaaaaaactctccacggaaaaatatttgactaacgctctcaataaggggattggtttttaatccccgaacagatagaaaaaccttggaaaacatacttttccgggaataacaaaggggaaaggataactggaagttccattatgccttgcaaaaagcttggttgccaaaagcattctaaacccttacaactgggggttattaaaaaacttgtcccagacaaaaggcaccacccaaaaggaaccaccggctcaccaagggggattcctcttctttcccttgtgaatgtgtgacccttttactaactctttttttcattcccccatctaaagcaaaaaccacatttatgcctcaaaaagtcatgggttggttttctaatcctggtacccagatgcccttcccctccctccaaagaaatatggctctggggaggggttctcaccggacatgttcacaccctggtaaaatcgatttgccaaaaat

SEQ ID NO: 6959 - DNA, 356 bp, Glycine max
  Clone ID: PAT_MRT3847_106292C.1
ggttgttttttttttgttaaaaaatttcgcagtgtgttgaagtattgattggggtgagtggtggccttaagacactgacagggaagaccgacaccgtgtgtgggaggtcaccatgtgagaccgggaggaagacaaactttagcacaggtccccccggggggggggggctacccccttccaaaacctaaaagagtgatgagcgggaaaaaaaaaggaacatttccacgacatgagaggaacatcaacgctgaatcagcgccgggacctaggggaggcatgagcaactgtgcgagttatgtaaaggccagaccctagacttgacactggctaggatgagggagttgcgtacagcctta

SEQ ID NO: 6960 - DNA, 424 bp, Glycine max
  Clone ID: PAT_MRT3847_106293C.1
cctacgcgtttttagtctcttcaccgaaagtgaacacccttttatactatttattttcctacatagacaaggactaggattgtctgtaacgaagacgctgctgatgtgtagaaatcaatcccattaacacgaaagtcatgggtgctacgacggctttactatgaagacactctgtagatgacaaatatgacacctctgatgagagaaagctcatgtgtggatgaaaattgtatgcagatactgcaagagcgacatgctacagggattgctcggactgcactaatgagcctgtatgttctgtttgcctcaaccaccaattatatcacagaaccctacatattaagacgtagtcattacatgatgtgaacagggatgatgatattcagaatgggtgggacatgagtgatgaacatcactacattat

SEQ ID NO: 6961 - DNA, 483 bp, Glycine max
  unsure (1)..(483): unsure at all n locations
  Clone ID: PAT_MRT3847_106294C.1
cacgcgtccggtttcttcttaaaaaaaaaaaaaaaaaaaaaaaaaaaaaaaaaaaaaaaaaaaaaaaaaaaaaaaaaaaaaaaaaaaaaaaaaaaaaaaaaaanaaaaaaaaaaaaaaaaaaaaaaaaaaaaaaaaggggggggccgttttaaaaaacccaagtttacgaacccgggcaggcaaagaaaaaatttttttaaaggggccccaaaattaaattcccgggccggggtttaaaaacggggggaggggaaaaacccgggggtaccccaattaaatcgctttgaaaaaaacccccttttccccagggggggaaaaaaaaaaaagcccccccccgaccccccttccaaaaatgtgcccaccctaaaggggaaagggaaccccccctgaaccgggcaataaacccggggggggggggggggttccccccaagggaaccgttaaattggcaggcccctaagcgcccgcccttttggtttttt

SEQ ID NO: 6962 - DNA, 756 bp, Glycine max
  Clone ID: PAT_MRT3847_106295C.1
agaagaagaagaagaagaagcttgaattaatcaatcacaaatcttaattatactgtaacataatgctgattgcttttttgggtatatataaatcagacacatttacaatatcaaaagaaaattataaaaagaaaaaaaaatttacagcacacacctgcggtcagaactcacgacaaatttctgacctacttcacattggagttgtcggcatcttgctctcctctctctttggttgaggtttccacgtgttcagtgcctgaaaactactacagggtttgtccaaaagccactgaaaatctctgcagatctttggtatatatctccgaaggttgaaaattatgctggctgtggtgccaactcatggtacttgattcgtctgctatgaagcctgttgtttctggcttgacctcatcactactgtagagagagtttgtggtttgatgctgcactggcgtggttcccagatagaaaggggtgttgttgagatattcagaccatttaatgtcttcttgttctgccttggtggcagattctgcttgctgcagcccccatgctattgtgctgctgctttgtaattggatgctgcagctactgctcccattgcttttgcttgcgttggtgctgccgctgtggtttcggatgctgccgcctcccctcccctggcctccgcctgcggtgttggtagtacggttggtgctggtgtcccagtgctgacccccagcgggggttacgggtgttgggttcttggtgtggcac

SEQ ID NO: 6963 - DNA, 480 bp, Glycine max
  Clone ID: PAT_MRT3847_106296C.1
ccacgcgtccgcgttgtttgttttgacatgaccgatgggtgacgttcgataactctccactttgaacagcctgagtggatcgctctcatctccctaaagacagggaaccatactgtgctttttctatggcaacgatgtgaatagctcacgcacgcattctgaagggtgtgaagatattcatatgaataaagattgtgaacataacagttcgtcttagacaaaaaggcgtagcagtgtttcaggcggatacatggacagagaatgctcgtagagcaactaatgaggatcttgtgacgatcctaaagcatgctgtgtgatggcggaatgctagttgcaatagtgcgacacgtgaggaggagctgccagtgcttttgacattgtgagtagtcaggatggggggtattcgaagttgacatctcacttaattatcagaggtgacagtgacaagccttggaacgagcgaacggtagggtactgatt

SEQ ID NO: 6964 - DNA, 344 bp, Glycine max
  Clone ID: PAT_MRT3847_106297C.1
gtctcggaattcggctcgagctagcatctctgtagccctatagttaggacaaagcatgtgaggactgctgatcatcattggaacaagtactggctaccagagatgagtactatattacgtggatactacataaatgctcactctgcacaatctacgttgaaaattgatccggtatatgatattgcatcctgatgtctaggagagggtctctagaagccctaatgtgtaatggccatgccaaccctaatcttacttgcgctactcataaagtaatattcaattgtgcgcctactgggatactcgactctacatcatgctcaccaacactgagtagattcagagat

SEQ ID NO: 6965 - DNA, 312 bp, Glycine max
  Clone ID: PAT_MRT3847_106298C.1
atgtgtacacatttcatacaccacacactctttatacataaacctacttgcaaaaatgtcgggtaaggcgtataggagctacgacaactgatgctttatctccgactccgaatgccacacacaggccatgaagtctcttaacaatgattattgcgaccatcccgactgtcttaccatttgcgaaatttcgaagactcattggttgccatgctgaactccaaaggcgtcattactgcttacattcgcgaagttttacgtcataatatggcacgcaattgccttacatgaatcgtatctcgttgaccatggatc

SEQ ID NO: 6966 - DNA, 544 bp, Glycine max
  Clone ID: PAT_MRT3847_106299C.1
ggaaagcgcggaatgcggctcgaggcagcaattccaacaaatagttgaagttcaagagtcagctaggattctaatggatatttccaatggaaataaactctctggaaattcggtggttggtgtgcaaggaaacctttatgctgatctcaaggacatccttgagacgtggagactaagaactccaaatgaatgggataatatgtctgtttggtatgatttgctgcagtggaggaatgaaatgtacaactctgtcatagacgctttcaaagattttggcaccacaaattcagcacttcatcatcttggttaccgtgacaaagcatggactgtcaacaggcttgctcacattgctcgtaagcaaagcctttttgatgtttgtgtcaccatacttgaaaaattatatggccattcaaccatgtaagtgcaggaagcatacgttatgataactgaacaggcattggcctacctagaaaataatggagaacttacaaatggtattaatctgatcaacagcacaaatctatagtatttgcctgcacagcac

SEQ ID NO: 6967 - DNA, 341 bp, Glycine max
  Clone ID: PAT_MRT3847_10629C.1
gggtgtggggttttttttttttaggggaaaacaaccgccccaattcttttttttaagtccatataaacccctataacccaaaaatttaaagggtcatccctttattttgaatcaaaaattggaatcaccaactctaacccttttaaaattattgatttatagacatgggggtaatttttttcattaaaatgggctaatacaattggctttaaccccgcagatcattatttttgggggtaaaatatttaaattttgccataaggggaacaagaatttttcttgggacgggggacatttcacccacatttgggtggggccaaaaaatattaacggctgccttt

SEQ ID NO: 6968 - DNA, 364 bp, Glycine max
  Clone ID: PAT_MRT3847_1062C.1
aaaagttgtgagggtggctggaattttcagcttttcattttgcccccccccccttttcctttcatttcactatcataacttgagttgaacacgttcccgagacatctcaaatttcctctgctgagaatttcacgagtatcaggtggtttattcaaccaacagtggatcttcaatttgttggtttcagtgttcttgtatgtgtgttttcattttgatgagttcatgtttatgagccacaaatgcaagtgggaacgaagaatggggtttggagttagtttggacaagtggtgtggtgtggtgtcctatgtaatgagtgcacatatgtgaagtgaaaattcctcatccttttcctcttttttcacgc

SEQ ID NO: 6969 - DNA, 654 bp, Glycine max
  Clone ID: PAT_MRT3847_106300C.1
accatgcagagatttcatgtgaaaatcgttttacttttgccccaacctttataaaaactggactgcatgtattgaaacaggaaagtaacatggaggatattcgattctctgatccttgtagaaaaacaaaattggataatgatttcaatagttcagaaccaaaaaatcaaagatgggtgggcaatgaagttgccaaaaaacaggttgtgcagcagcaacaacttatgggctcttttttgtcactcatgtggcactgggcactagtgtttctcatttctttcctagtgtttctcatttcttgccgcatcagcaatcaatgattggataatgtgaaagaagattcaagttcaatggattcaatgcagataaaagacaacactgtaattaattttacttgccctactgcttacttgaaactgatttatgctttgtagtcaagtttgattttgatatttaactttgctttggtttcaagttcattattttatatttgagtcctttcatacattcatctgaatcagtgtttattgttccatattttattttgtatcctgaaatctctggttttaggtaggtagcagtctcaacttaatgctaggtaggtatagagtccggacctctctcaatcacattataatatttcattaatattgg

SEQ ID NO: 6970 - DNA, 3681 bp, Glycine max
  Clone ID: PAT_MRT3847_106301C.1
ggcacgaggcaaggtacattgccttcttgttctgactttgtagacccaacactccattgattccattcacaatcatagaatcatattaacctttcttcttagttctcatggctatgcaatcatcctcatcttcctttagttacagattcaccaacgatgtgttcctcagcttccgagggaaagatactcgtcacagttttaccggcaatctctataaagcactctctgaaagaggaattaacaccttcatcgatgacaagaagctccctagaggggacgaaatcacgtcagcacttgagaaggcaattgaagagtccagaatattcatcatcgtgctctctgaaaactatgcatggtcctccttctgcttaaacgaacttgattacatccttaagtttattaaggggaagggcctattggttttgccagttttttataaggttgatccttctgatgtgagaaaccacacaggtagttttggagagtcattggcttatcatgaaaagaagttcaaaagtactaataacatggagaagctggaaacatggaagatggctctgaaccaagtggctaatttatctggttaccatcatttcaaacatggggaagaatacgaatatcaatttattcagaggattgttgagttggtctctaagaagattaatcgtgctcctttgcatgttgcggattatccagttggactagagtcacgaatacaagaagtaaaaatgcttctggatgttggatctgatgatgttgtccacatgctggggatacatgggctcggtggagtaggtaaaacgacacttgctgctgcagtttataattccattgctgaccattttgaagctttgtgtttccttcaaaacgtgagagaaacttcaaagaaacatgggttacaacatctacaaagaaaccttctttctgaaatggccggagaggataagttaataggtgtcaaacaaggaatttccataatagagcataggctccggcaaaagaaggttcttttgattctcgatgatgttgacaaaagggaacagctacaggcgcttgctggaagacctgatttgtttggtcctggcagtagagtcatcatcacgactcgggacaaacaattgctagcatgtcacggtgttgaaagaacatatgaggtgaatgaattgaatgaggaatatgctcttgagttacttaattggaaagctttcaagttggaaaaagttgatccattttacaaggatgttttgaatcgagcagcaacttatgcttcaggccttccattggctttagaagtaataggttccaacttatccggaaaaaatatagaacaatggatatctgctttagatcgatacaaaagaatccctaataaagagatccaagagatacttaaagtgagttatgatgctttggaagaggatgagcaaagtatttttcttgacattgcttgttgcttcaaaaaatatgatttggcagaggtccaagatatacttcatgctcatcatggccattgcatgaaacatcatattggagtgttggttgaaaaatctctcataaagattagtttggatggctatgttacactacatgacttgatagaggacatgggtaaagaaattgtccggaaagaatctccccaagagcctgggaaacgtagtaggttatggctacctacagatatagttcaagttttagaagacaacaagggaactagtcatattggaatcatatgcatgaatttctactcctcatttgaagaagtagaaatacagtgggatggagatgccttcaaaaagatgaaaaatctcaagacacttattatcagaagtggtcatttctccaaaggtcccaaacattttcctaagagtttaagagtattggaatggtggagatatccttcacattattttccatatgattttcaaatggagaagcttgctatattcaacttacccgactgtgggtttacttcacgtgagttggctgccatgttaaaaaagaagtttgtgaatctgacaagtctaaattttgactcatgtcaacatttaacactgatacctgatgtatcttgtgtcccacatttgcaaaaattgtcatttaaagattgtgataatttatatgccattcacccgtcagtaggcttcttggaaaaactgagaatcttggacgcagaaggttgctccaggcttaagaatttcccccccatcaagttgacctctcttgagcaactcaaacttgggttttgtcacagccttgagaattttccagaaatattaggaaagatggaaaacataacagaacttgacttggaacaaactcctgtaaaaaaattccctctttcatttcaaaatcttactcggcttgaaactgtacttctgtgtttccctcgaaaccaggcaaacggttgtactggcattttcctttcgaacatttgcccgatgcaagaaagcccggaactgatcaatgtcataggtgtgggatgggaagggtgtctattccgtaaagaggatgagggtgcagagaatgtgagcttaaccacatcttcaaacgttcaatttcttgatctcagaaactgcaacctgtcagatgatttttttccgatagctctcccatgctttgctaatgtaatggagttaaacctatcagggaataatttcacagttattcccgaatgcatcaaagaatgccgctttttaacaacactttacttgaattattgtgagcgacttcgagaaattagagggattcctccaaacttgaaatatttctatgcagaagaatgcctatccttgacttcctcatgtagaagcatgttactcagtcaggaactgcatgaggctggaagaaccttcttctatttgccaggagccaagattccagagtggtttgatttccaaacatcggaatttccaatttctttctggtttcgtaacaaattcccagccattgctatttgtcatattatcaaacgggtggctgagttttcctcatcgagaggttggacatttagacccaacattagaaccaaggtgatcatcaatggcaatgcaaatttgtttaactctgtggtgttgggaagtgattgtacatgtctttttgatctgcggggtgaaagagtaacagataatttagatgaagcacttttagaaaatgaatggaaccatgcagaagttacatgtccaggttttacttttacttttgccccaacctttataaaaactggactacatgtattgaaacaggaaagtgacatggaggatattcgattctctgatccttgtagaaaaacaaaattggataatgatttcaatagttcaaaaccagaaaatcaaagatgggtgggcaatgatgttgccaagacacaagttgtgcagcagcaaaaacttatgggctcttttttgtcacgcatgtggcactgggcactagtgtttctcatttctttcctagtgtttctcatttcttgccgccgcaacaatcaatgattggataatgtgcaagaggattcaagttcaatggatttgatgcagataagagagaacacttacttgaaactgatttatgttttgtagtcaagtttggttttggatatttaacttttctttggtttcaatgaaaatatattgttcattattttatatttgagtcttttcatacattcctctgaaaaaaaaaaaaaaaaaa

SEQ ID NO: 6971 - DNA, 305 bp, Glycine max
  Clone ID: PAT_MRT3847_106302C.1
agcttgcctagtgaagacatcaatgcccccagctcacctactcttatgtatagcgagcggagccttaatcataacgttggtatgcattctgacgctgctaataacacaccttattatgacgataataaccacatttaagcaactttaactgatgagtttttaatcattcatttgggacccctatgataatagagacataactattgctattgcttcctttccaacaattgtcaactttgcatctgcaatgttgcaatctttagcacaagcacactggtgtttccttattgatgtattcaaatttc

SEQ ID NO: 6972 - DNA, 492 bp, Glycine max
  Clone ID: PAT_MRT3847_106303C.1
ggaaaaaaaacggaaaatttggattcaaaactttcaccaataagtttttggcccggaaaaaacaaactttttttaggcaggaaaggaaggaaaatgggcttaaacggaactgggttgggttttaacctggggaaaaaaaaaaaaaaggggctaacaaaacatttatcctttttttggggggctggaactttgaccctgggctaggggttgggggactttaaagggggcggacccacgaaatgaggagccgaaaaaaaaaacgttaaaaaagggtggggggggaaaaggattttagccatgccaacagaaaagcaggactccccctcttgggataaggaaaagccttccttttggctcttgggggaaccctccaagcctttggaaaaaaagttttttttttgaacctctaagggaatcttggccaatcttggaggcaaggccccttccttttttgggaaacaacttacacttttggagggcacaaaaaccggg

SEQ ID NO: 6973 - DNA, 868 bp, Glycine max
  Clone ID: PAT_MRT3847_106304C.1
atttgcctttcgttagggtacttacaattgtccctctctaccttgtgatgctctccaagtgtccccaatgcagaggttttcaaatactcccacatcaaaaatctacttcttgctaccttcatggtatcatcagcagttctagcaattgatgacccttactcagaggcactcctaagcctaaaagctgagcttgtagatgatgataacagcttgcagaattgggtggtgccctctggaggaaaattaactgggaaatcctatgcatgttcttggtcaggcatcaagtgtaacaatggctcaacaattgtaacttccatagacctttccatgaagaaactgggaggtgtggtttcagggaagcaattcagcatcttcacaaacctcactagtctcaacctgagccacaatttcttctctgggaatcttccagccaagattttcaaccttacaagcctaacaagcttggacataagcagaaacaacttttctggtcccttcccaggtggaattcctagactccaaaacttgattgtgcttgatgccttcagcaacagtttttctgggtcattgcctgctgaattctctcagctagcatcccttaaggttctcaatctagctgggagctacttcagaggttcaattccatctgaatatggttctttcaagagccttgagtttcttcatcttgcaggaaattctctttcaggaagcatacctccagaacttggtcatctcaacacagtgacccacatggaaattggctacaacctataccagggttttattccacctgaaatacgtaacatgagccagcttcagtatcttgacatagcaagagcaaatctttctggccttataccaaagcaac

SEQ ID NO: 6974 - DNA, 317 bp, Glycine max
  Clone ID: PAT_MRT3847_106305C.1
accagagcaaaagttgatctagtttaatctggcgccaccaccaaccaaccactctcagtctcacccaaaccaaaacatgccgaacctctgcactgttagttctaatgcttcttcaaacttcatattcggcgttcaacctcacaacttctacaatgtttttgggtcaaggagaacgagacctcggtgcagggtcagcatgtcctcctccgatcctcaaaacgccgtcgttgtggggggggggtcggtgaccatggatttcttggccacggttgcggcttaccctaagccggatgacaaaatcagaagcaccagcttga

SEQ ID NO: 6975 - DNA, 590 bp, Glycine max
  Clone ID: PAT_MRT3847_106306C.1
ggtggttcggcggggattcaagtttcggatgccgctgggtctgccggaggcggagacggtgaacatgcgccgacaatacgggggctgaagaacctttacatcattatcggcgaaagggatcaaatggtgcgtttgaactcgtcttcccttcggcttgccgttggcgacatggtgatggccaccgagaagaatgggaaaccctatctgaggaagaaggttttgccagcttgcaattgttcgccagtgcaagccatggtgccgaaaggacggcgtttacatgtatttcgaagataaatgctggtgtttttgccaaacccaaaggagaaatgaaaggttctcgctattcactggatccaattggaatagagtgtgctgttcttgcggccacggattgcaagtgcagccaaatgctttcgtttgagtggtgaatcttggtaaatgagtcttatgttaaggcttgaggactgatatttgctcaggtttttttaagcttgtaaatgaatactagtgatacacgtttttttatcttcgttactggtatcatccagagctttttgagggcacagatttatctattaagaattttgtct

SEQ ID NO: 6976 - DNA, 176 bp, Glycine max
  Clone ID: PAT_MRT3847_106307C.1
ggctcgagaaaaaaaaaaaaaaaaaaaaaataaaaaaaaaaaaaaaaaaaaaaaaaaaaaacaagggcgaactaactgtcgagcgccatcttaccccggtatttaacctgggaccgaattccggactgggtcacctggtgtcatttagtgagtgctatttacatgttcctaacacc

SEQ ID NO: 6977 - DNA, 192 bp, Glycine max
  Clone ID: PAT_MRT3847_106308C.1
cagtaagttagggtttaagaatttcatttttctgttcatctcttcactcacatagacagtgatttctcctcaggttcctttccctgattcgagaatgcgacagcattatcccacacgtggcaatggcttacgtagatgatgatgcttcttctggctctggagatgatgtgaacttgttggatggacacaagc

SEQ ID NO: 6978 - DNA, 344 bp, Glycine max
  Clone ID: PAT_MRT3847_106309C.1
gcccgctgtcacacttgtctccataccctgatacacactagcagggatcgggcagctagtcatcctcgcgcgaccctgagcccagctaacggctgaagaacagtcaacggggcttagtttctaccgcgatgtctatgaaggcgagatcctatcggtactaaaaatcatacgggccatgggaggagcgatgttgatgataacaacgaggatggggaaccgctacgctgctggacaagaacttccaccaatgctgcaaacctgagctaaaggcacgggcggagggctaaagacacgagaagcccctctctctgaagatgaccaaggactgcggccgctctgcaact

SEQ ID NO: 6979 - DNA, 747 bp, Glycine max
  unsure (1)..(747): unsure at all n locations
  Clone ID: PAT_MRT3847_10630C.1
ccacgcgtccgagctttggtgtgtggataattggttcattgttgtctgaacttgcaataggcccttcttctctcttcgaggccataaaccaggagccactcaatgaagattcaaactcttgctatacgagcattgcagaagagcaatggtgcaagagcaacccttttctcatgaagacccttctcttttgtttggagactttagagaaaactaaagctaaagggaacctcttggccataagaatgctgcttgtgagtggctggttttcccctgctcccatttcagacagtttattagccaatgcagcaaagagtatccctatggtcgaaaaccgccttaagaagtggaccaaatctctgagcctaacacctagttgtttatcattgcggacgtggaaaaatgaagaagattcagcaatgcttcttgtgaaaatgggactggctagaagggctaatcaacatgatggatgctggcttcatttccatcccataacacaagcatttgccaaaagaaaaggtggtttgcagtatgccaaggctgcaattcaaggagtgagaaaaatgggcagccaagtaaactcagatcacttatgggcctctgctttccttgtgttcgggttcaaatctgagcccccactagtgcagctgaaggcaattgatatgggttntgtacatcaagaagacagctctccccctagcaattcaagccttcaccactttctcaagatgcattcatccttggagctct

SEQ ID NO: 6980 - DNA, 1498 bp, Glycine max
  Clone ID: PAT_MRT3847_106310C.1
acaaaacatagagcaagtagaagagatagataaatggaaagcgagctaagcatggcggtggttggtggtggtgcctgccggaattgaattgaattgaagagagatgttgtttcaggtgggcgggcaaggcagtcgccccaccttcttcgagatggcggcggctcaacaactgccggcgagcctccgcgccgctttgacatactccatcggcgtcttggccttacggagacccttccttcacaaactcctcgacttcgaagacgaatccttcgccttactcatgctcgtcctcgaatcccacaccttacgaaccacagatgcttccttttcggaatctctctacggcctccgaagaaggcccgccaatatcgccctcaagaatgacgacgccactaccaccaccaccagcagcagcgcattacggaggcgccagagagttctttccgttgtttttttggttgtgttgccgtatttgaaatccaagttgcattcaatctacaacagagaaagggaagccaggcttcaagccactctatggggagatgaaacccaaggctttgatgatggccgaggagattattctccggtgtcaacgctaacttctgatgccgcagcctccatttcaatgcgcatcgcaaacagagttcagagaattgttgggttttgctacccgtggttacatgctagtactgagggcttgcaatttgcttaccaactcttatacctgttggatgctactggatactactcgctagcactgcacgcacttgggattcatgtttgccgagctacagggcaagagctgatggatacctcttctaggatttcaaagatgcgtaaccgtgaacgtgagaggcttcgtgggcctcaatggttgaagacattgcaaggagcattgctcagctgttcgtacactgtacttgactatgcacaaaccggattgattgcagcagtgttcttctttaaaatgatggaatggtggtaccagtctgccgaggagagaatgtcagctcctacagtatatcctccaccccctcctcctccaccaccaaaggtagcgaaagaagggataccactaccaccagacagaacaatttgccccttatgctcgcaaaagcgtgtaaatccatctgtagtttcagtttcagggtttgtcttctgctatgcttgcatatttaagtatattactcagtataagcgctgcccaattactttaatgccttcaacggttgaccagataaggagactctttcatgatgtctaggccagttggagcggaattggtagaaattacagttatcttgagtacataggcaaaagactcccaattattgttgtactactactactactactaatataaagtatatctttttcttttagtaagtggcttaataagaggtatcatttttgtttaaaaaataataataattcgtttatgagtactatatacgtatgcatcgcgaaagagcacattgatcgctcctggctgttttaa

SEQ ID NO: 6981 - DNA, 389 bp, Glycine max
  Clone ID: PAT_MRT3847_106311C.1
aaaaaaaagaaactttggatcatttggttagggaaaggcacaacatgcaaacatcaacaaaattgggcaaaaaacccttaaagaacaaaaactcaatggggtacatacattatataccaaaatattttcgaattatagaaaaaaaaggaaacatcaaaacccaaaatatttgggaaaggaatataatctttacacaaattaacaatgggggggggccactccaaactcatttcactttcatttgaaggccaaagggggggaaaaaagggggctacttgggggtttctttattaaaaattttttgaaaaattcaaaaatggaccggccaaaaatctcaaccaaggaatgctcaatttggggcaaaaaatggggagccaaagggcttaaaa

SEQ ID NO: 6982 - DNA, 312 bp, Glycine max
  Clone ID: PAT_MRT3847_106312C.1
ctcggtgagggttagcatattcctgtatctaatattagtgcaagggaaaatcatgtattcaaataccgctaatggcacaagatgaaactctgacttctagtgcttgtgaatctagaactgcaatggtgagtaacaatcgctagcctgctgctactgctgtgcatgctgtagctattgacattgtcattgatagttgcgcaagctctgactgcaacatagcaggggcaatgcttgaggctgatacttctcataccgatcctgcaaatgcaggtcgtagtattgctcgtgcaccattcagaagccccatgccca

SEQ ID NO: 6983 - DNA, 1602 bp, Glycine max
  unsure (1)..(1602): unsure at all n locations
  Clone ID: PAT_MRT3847_106313C.1
ttattcctttatcctccttgcttattagtactactcctactcctaagtttttttttctgagggcagatcaagctagcatgtatggaaattccaattccgacgctcctctcatttatgttcctctttctcttgccaaccttgaagatggctcttctttcttgtgggacggggaaccccattgatgattgttggagatgccaacccgattgggaaaagaaccggtagcgcagagcagattgttccattgggtttggtaagcatgccgttgggggaagggatggtaaaatatatgtggtgactgaccccggtgatcaccctgtgaaccccaagccaggaacactaagatatggtgtgatccaagaggagccattgtggatcatattcaagcgtgacatggtgatcaagctcaagcaagagcttatgatgaattctttcaagacaattgatggtagaggagcaagtgtgcacattgctggtggaccttgcattactatacagtatgtgaccaacattatcattcatgggattaacatccatgactgcaagcaaggagggaatgcctatgtgagggactctcctacacactatgggtggaggactctctcggatggtgatggagtgtcaatctttggtgggagtcatgtttgggtggaccactgttctctctccaattgccgtgatgggctaattgatgccatccatggatccacggccatcaccatatccaacaattacatgacccaccataacaaggttatgcttttgggtcacagtgacactttcactagggacaagaacatgcaagtcaccattgcctttaaccattttggagaagggctagtgcagagaatgccaagatgcaggcatggatacttccatgtggtgaacaatgactacacccattggagaatgtatgccataggggggagtgctgtcccaactatcaatagccaagggaatagatttcttgctcccaatgacaataccttcaaagaggtgacaaagagggagaattcagcacagagcaagtggaagaattggaattggaggtcaaatggagatttgatgttaaacggtgcgttttttacggcatcaggagcaggcgcatcttcaagttatgcaagagcatccagtttggcagcaaaatcatcttcacttgtgagttctataacagcatcagctggatcacttagatgcagaaagggttcacgctgctgagctgaatgaatgactcatcagaacacaccccaaattaatatgatatgatatattacatagtaataaaggcaaataatgcatgccaagtaactgtatctacttctgggggaaaaaaagtgattcaacttttttgtatatgcaactttttagacatttttttttttgtaacgacaaccttagcttgtgttcacaacacaaacgatccgttttgtggtatcgtacattactaaatagtaaggccaataccgagtgggttgatgagaacacaacacaagcgaaagagttgattgatataattgaatgttcaatgaatggagaaaattaagtaggttcaatgaaatgcttaattatcttatacttctgttctgtttctgcctcccnaac

SEQ ID NO: 6984 - DNA, 313 bp, Glycine max
  Clone ID: PAT_MRT3847_106314C.1
ggggaaaaccaacaatagtttgggggttttggaaggccccattggccttaaggcttttttgtcccggctttggcaacattggggggttcaacattagacccgggggtttgggcaactttgcaaacaacccccctggggggggtggggggggataaatccaaatccccgggggggggcaaacaattaaccttttccgcgaatttcccaaggtctaaattctaagggaaaacttttttgttttaggatggcttaacacacctccccggaagttaaattttttttgaaattttgccccctaacaatttttccccct

SEQ ID NO: 6985 - DNA, 466 bp, Glycine max
  Clone ID: PAT_MRT3847_106315C.1
ctcacgcgttttagttagtgttggtcaagaaattgttgaatgtttttgattctgtggtgaagagagaatttggtttcttgagaagatgtatttggtgttatttgtttcctactcattttaaaattcatcttgagttactgcaacatagtaataagcattctctagtctgcctttaaaagtaaaactcatttcagaagataagattaatattagaccatctgagtaaattgcccgtctaattttttggtaatttagatattcatgcctgtgtttcggctgttttgtgaattcaacatataactattccattcatcttcttagaacctgctcaaaactcggttaagtacttaacttggcataggacggcgtcatctcgatcctcctcatccagaaaccctttaggagcaaactcaattgacaatgctgaggaccatgcaaataatctctttgataattcttgtatgat

SEQ ID NO: 6986 - DNA, 217 bp, Glycine max
  Clone ID: PAT_MRT3847_106316C.1
gccttgtgacgtctttctgtcatgtagcttttagggtgtagctgtgaaaatcatcagaactcttcactgaagctaatgtttggaaaaaatatatacttgaagaaccaatccaagtgtgtgcccctacccccagctcagaagtagaaagggtttaagtttgcttgtattagctgtgccttcataattttgctatgtaaatgtgacatattaataataa

SEQ ID NO: 6987 - DNA, 325 bp, Glycine max
  unsure (1)..(325): unsure at all n locations
  Clone ID: PAT_MRT3847_106317C.1
aagtcgcangcacgcgtacgtaagctnggaanacggctcgagnngcgtcttcanaaacgacanttctnctcagttnncagtttcntcgtnacgaatnccgcnntcngatctagcnncnnatgagagagtgcatnnccgatncagattggtcaggctgntatccaggncggaaatgcttgcnggncagnncnantgactcgancacggcanccgggnnngatgggcaaatgccaagtganaagacagttggnggnggtgncgatgatttcaatacttanttnagngagatngtgctggaaagcagtggccacgtcagngtntgnnc

SEQ ID NO: 6988 - DNA, 515 bp, Glycine max
  Clone ID: PAT_MRT3847_106318C.1
atacaagtattactgaggtcatggggaatagatttggacttttattaatgacatttttggtccttgccggagtagtattttgctaggaagatgaacttctaatgacacaattctcattcttaaaacaaatgttataattctttaagaaattatcataaaaggaggaaataagacgtggccttcaaaattaacctagagaggacatatgataattttgattagatgtttcttaaaaattgttattgattttagtttttggcattactatgaatctaataatgcattatgggacttcatcatttttatgtatcacatgaaataggaagagattttctgatttttctccttctaaaggtttaagacaaattgatcctgcttggcatatctttttgttatatgcatgaagaagttaaactgaccatacctaaatcaatttattccaggagctagttaccttcgaaaactttgaaaaaaaaccttttgtatcgaatttttttcattataaataaaaattt

SEQ ID NO: 6989 - DNA, 284 bp, Glycine max
  Clone ID: PAT_MRT3847_106319C.1
tacacgcgtgcgttttatcttcatctctggcggctgatgtgcctcaagcaaagctgtctctcaaaaccttaatattattgtcttctttggatgatcttaaacatgcgcttggccgtaggagccccgccttcagggtcgccaactaaggtgttcttgaatcattacgtcatgacggcgtgtctgacttcacgaatgataggcgactgtgactctccataccatgctgtttactgcaagaaactccattttgtctgcgctctacttttgcttgtgagatttaaacc

SEQ ID NO: 6990 - DNA, 1082 bp, Glycine max
  unsure (1)..(1082): unsure at all n locations
  Clone ID: PAT_MRT3847_10631C.1
tggcagttacatcaaattttcacacactgatcccccaaaagcaccgctacatcatattctctctctcaccctgttcttctttcaagtttcaatggatcgaacccaaatccttctcgttggattaccaatcttcctcttcttctcagacattctcaacctcttctctcctcaaccctctcccaaaccaacccatcatcatctccctcccatccaccccaaaccgcaccctcaaccgcaccttcaacaacccctcgagttccccacgcagaaacaaagtggtattggccttattggaattggcaacaccgtgagcattgacttctgcacttcctgctcttacaagggaaatgcagtaacagttaaaaacatgctggaatctgaatttcctgggattaatgttgttttggctaactatccacctcctcttccaaagcggattcttggcaaagtagttccagtggtgcaaacaggaattattgtagctatagttgctggtgaccaaatattccctagattgggaattacaccaccaccatggtactattccttgcgtgccaataagtttagaagtattgcaagcacctggcttcttacaaattttcttcaatccttcctacaaagctctggtgcttttgaagtatattgcaatggcgacttggttttctccaaactgaaagagaacagatttcctggtgaaattgagttgagggaacttgttgggagaagattagctaatacaagatttgtcagtggtattgaaggtggtgttgggctctagttagaccctgagaagatacatcacacaaattgaagcctgcaaaatggatgttaaagaattaaatttttagttagtgtttgtgtaatttgttttgtacactgttaggtgagcaagcatttttctccggttctcactattgaatcccctttctttttctaattactagcataatacccgtgccttcataccggtgactcggctacttttgcacgttttatagacaactgaataatgtaatatacattcaatttattataaggttgttgttgttaaaggaatcattgttttatgtnncnnngtataa

SEQ ID NO: 6991 - DNA, 438 bp, Glycine max
  Clone ID: PAT_MRT3847_106320C.1
gaatttcctgtatatattcagttgtacttgtatcatatattgtagctgtgtttcacaggtatagagaatatggtaaaaaaaataatcaacatacgttttgggattttttaattttttttgtaattcttaatcttttaatcttagatactaaaccaaatttaatgtagccttatagctgatacttgttgaatagaattagctgatgcatctcagttatgattatttagaggaccttgggagcgtttcatgtgttagaaatgttgacagatatcaacacaactgcagtgatttcagttttaaaagtttaagttctcagttgaaaaatatatttgtttcctttatggcctttttctgttcaacatatcattaatacattattatttggaattcttcctaaatatatttggccatacaattgcaatgtgctttgatctttaa

SEQ ID NO: 6992 - DNA, 477 bp, Glycine max
  Clone ID: PAT_MRT3847_106321C.1
cttatttcttatataatataaaatcgtcgctcgtcacggttccggcagtgcttttccgccgccgtcgcggttcaaacttgaaaagaagttaaggatcttcagcagcagaaacaatggatgaagataaaacccaacaacttcccagaagaatgaccaggtcttcagcttcatcgtctccatccacttcaaataacatagttgcagcaaaagtaactagccttgaacctctaacaatcaatgaccttttagttgggggagatcccatcagcctagatgacataatttctagctttcctggtagaagtagccagattcttgaagttgtgcgtcatttgggacctttgaattcaccaatgcttcctttgttcgtatatggaagttcttctaccggaaaaaccagtatcattcttcaattattcaggcatctcaacaggcctattgttttttctagttgtaggacatgttataaccagaaca

SEQ ID NO: 6993 - DNA, 570 bp, Glycine max
  unsure (1)..(570): unsure at all n locations
  Clone ID: PAT_MRT3847_106322C.1
cattttcttggaggcttgatgagactactgcatagactgaccacaagacatactgaatgaaaggctcgcgaggctatcttgggggcagtgagctctacctcatcaactgatgtctgaatcataggtaggagcacaaactcctgtagaggcgaccgatgctcagactagaagtagaagatgctctagatgcagccaaggcttctttcttagaatgtgaagaggtcggtggaggctgtagcctttgaacactatctaacaacgtggatggcgtaaaaaaactactggacaatgtagaccatccgactggagctgaactcttcaagagagcattgagctatcctacaagaatgataacgaataatgctggcttaaacgtgcaatgtcgtcacagatactgctttatacaacaacaacgagaactttggttacgatgctgctagagacagttacgaggatctcatgaaggctgagatcatggatccaacagacgtagctaggcgatgtattgagcatncagcttctgtgcccaaggcatttctgacatctactgcaccaggccgtagagcgcat

SEQ ID NO: 6994 - DNA, 364 bp, Glycine max
  Clone ID: PAT_MRT3847_106323C.1
ggccacgttcacatttaaagtaattcaagtagctaccaacaatgagatctttaacgcagcctttttacatatctaccaatcgtctcgctcttgcactccaacaacgacgacccctttaggctataggtggatctttctactctatcgacaatagctacaactgatgggctcatatgcttgaggcagcttaccaactgaggcgccacgaataaccatgtttaagctcatatgtgcacatcgcgccactcttatcagggcatcgacagaactggaactccagaaaagcataccacatgcctgcagtggaggttgcataatggccttgataccggaggaaacattcatcccattgtccaaccaagaa

SEQ ID NO: 6995 - DNA, 1238 bp, Glycine max
  Clone ID: PAT_MRT3847_106324C.1
gccactagacacgatcgcccagatccaactgctccttctccataccctcgcacacttccaagccctccaatggaaaatgctttggtaaggagccatgtccccgacaattgaaccacctgtaagtcttgtcaagagaaatgttggtccaggtttgattccctttgaagcaccaaatttaaatcgattgaagattatccacttagaaagaactggaataccttgttctatatgtagagattatgatggatttcctttgacttccagtggcaatccacatgacagtatggtagtgttaaagcaagagtctcaatttgcaaaggcgaatgataatagcttttttcattttaatcttcaaatagaacaaggtattccagttctttctaagtggataatcttcaatcgatttaaatttgttgcttcaaagggaatcaaacttggaccagcatttctcttgacaagacttacaggtggttcaattgtcggggacatggctccttaccaagcattttccattggagggcttggaagtgtgcgagggtatggagaaggagcagttggatctgggcgatcgtgtttagtggctaatagcgaactgacactccccttgaataagatgctggaaggtgccattttcttggattgtggaacagacttgcggtctggtcaccttgtaccaggaaatccagcgttgaggcagagtaaaccaggatctggaattggattaggatatggacttcgatttaaatcacaatttggtcattttcaagttgattatgctgttaatgcatatcagcagagaactctctattttggcctcagcaaccttgcatcgtgagatctcaagaccctggatgttgcagatttctagtgcattcctctaatacacaggtcctatggaagattgaatggtgaagctaacgatgctggaatatttttgtcttaaattctaggcttgtcaagtttatgaaatgcatgctttctctctatttctaactccccggtatatttggcatgtggatagggaaattactactatattctttttcttacagtagttggaaatttagttgccatttttgtaaggcttttggtttttgttggtaaaatgggtgcagacaggttgattatttattgtaaattgctttcattcgaaaggaaataggattgtattcttccacatgaataaaaagcactcaatactattgttaaaaaaaaaaaaaaaaaaaaaaaaaaaagag

SEQ ID NO: 6996 - DNA, 741 bp, Glycine max
  Clone ID: PAT_MRT3847_106325C.1
aaataacataccgagtttgattgaggagacggtgaagagttgtttgtcgccggtgttgaaggaattgatggcaggggccatgggaggaggagcgtttggagggagagggttttcgttgaacttgaaccctatgccttttatgaatttgagttttggcggtggggaaatggtggatgagaaatggaggaagcaacagatattggagttggaagtgtattcgaagcggttggaactggtgcaggatcagatcaaggcagctatggaggagttgcggtcacatggaggaggaggattatagtttgtttttggttttgtagcgagtgattggagttcttcttgctcttcgtgttcacttcatcatacggatttgcttggtaatttatccatcaatggttggttcatactcatagcttagaagttagctagtagtagtaacttgtaagtggtaactagtgtttttcttttcggttttagctttcgctgattcggtagagcacttgtccattaaaataaaaatgttttattttatattttagccgtttttatgttcctttaaatttcaatggtctcatacatgtacagaacagattgaaataattggtgcggagtgatggctttgtaccattatatatatgttgtaaaagatgcgaaagtagtgggttctcaattgtgcaacgttcttcctgagcactttgttcttaaaagtatatctttcgtatttttatgattcaatggattgtt

SEQ ID NO: 6997 - DNA, 397 bp, Glycine max
  Clone ID: PAT_MRT3847_106326C.1
gtgatcacttcagcaggtactggaaaaattcttcctggtgtggagcactggactctacccttgctaaatctattaacaccctggatgatcccaacgaagtgcaactactaatctgttcaagctacaatgaaatgccaatggataactaggaacctaaatccttgcttgatttgatatactttgactagttagtgttatgcttttatattctaagactagtaaccaaatggttcgatactttcatggtgatagggttaagagaatgcctaaacctcttgttaccaaagtgtatgttaggcgccagcctggcagtaataggaataactaaccgaattctgttaggaataactaacagaattctgttagttaaagagtactataaataagagctttaact

SEQ ID NO: 6998 - DNA, 2438 bp, Glycine max
  unsure (1)..(2438): unsure at all n locations
  Clone ID: PAT_MRT3847_106327C.1
ggctcgagcttttgacagaaattaattattaaaataactaataaatattttatactaaaaaactatacgatagaagaatggcataatctatcaatcaataacaaagtttataatctatcttacagttttcaaatatacattaatattgatcaaacgcggaacgaacaccgtgaaagcaaaccaccccaccgcgctctttgcctaaccgactcactcccatggaatcccatctaaacgacgccgtttttccccaagaagatctcgacgaagccgctaaccaaaccaaagctctctcaatggcttcggagcaacacgacgccgttttccgcgaagaagacatggacgacgacgacgacgagtctcaggaggacggatactacgaagaagacgacgacgaagaaaacgtgccctctccctccacggctcttgctgtcaccgtcgccgtccccggttcctccgtctccaacgggcggcgagtgtctctccaatttcgaagcccaccggcactatccccgccgccaccatcgtcctcgcagagtcatccgatccggtagcggcggcgcccggagccggtcgaggtgaaaaagccgcgcccaccgccggccgaatcgtgcggctgtttcagctcggcttggaccggagaggactagatcgagctcttgcaaggctaacgagactacacctcgcagcgatgatccgcgtaccacacagacactggtatgtgctacgaacaatttcactctccgctcttactcttcttcgactagaagcagcacgtggccgtagatccaaaaggctgaagaggaagtaccggaacgtcctcaacaagattagctccggcaaggaattctccttcaagagcgctcacgatcaagccgccgccgaaatatcgcgcaggatctggcaacaacgtgacttcgatcggcgacaattcattggacgacgacgaaatcaaccctagccgtagccccaatacctaaccttaattttagccctgtagttcttaataatgaaacgattttgaagagacggtcggagaagaaaacaccgaaacgctctcggcctcgatcggtggtgaaaatcgagccaaatgacggatccgcgtcgaacagagatcataattgtattagcaatactacacctactgctactgctgctgctactaacactactgctgctgctgctggtactaacaataataactgtaacagtggttatggaaataacataccgagtatgattgaggagacggtgaggagttgtttgtcgccggtgttgaaggagttgatggcaggggccatgggaggaggagcgtttggagcgagagggttttcgttgaacttgaaccctatgcctttgatgaattggagttttggcggtggggaaatggtggatgagaaatggaggaaacaacagatattggagttggaagtgtactcaaagcggttggagctggttcaggatcagatcaaggctgctatggaggagttgcggtcacacggaggaggttgatcaaatcttttagtttgtttttggttttgtagtgagtgattggagttcttcttcctcttcatcatcaatggttggttcattctcatagcttagtggttagctagtagtaactagtaagtggtaactagtgtttttcttttcgattttagctttcgctgattcggtggagcacttgtcctttaaaataaaaatgtttttagtacattttagccgtttttatgttcctctaaatttcaatggtctcatacatgtacagaacagattgaagtaactggtgcggagtgatggctttgtaccattatatatgttgtaaaagatgcgaaagtagtgagttcttaattgtgcaacattcttcccgagtactttgctcttnnataatgagaattgtaatagtaggcttaacgtacagggtttgattgaagagacggtgaggagttgcgtgtcgccggtgttgaaggagttggcgtgtggtactggtggcatgggattgggaagagggttcgcattgaatcccttgcaaatgccaatgccaatgagtttaatgaatttggggattgttggggaaacggcgatggatgagaagtggaggaagcaacagattctggagctggaagtgtattccaaacgtttggaattggtgcagaatgagatcaaggttgctctcgaggaattgcgttcagctggtggaggatgacccaaaataaaactaagcttttaggtgtttacagtacttcataaggatttgcttgctaatttattgatccactaatggttgatagggtagctagacagtttgtatttttttcccctttttttctatagtttagctttttccttctttttttgcttttcagtatagcttttgattattgcaaacagtatttgttcaataaaatgttcttatttttgtcttaaaaggataatgt

SEQ ID NO: 6999 - DNA, 273 bp, Glycine max
  Clone ID: PAT_MRT3847_106328C.1
taaattttgataaacagcgatcacaggatgccgcatcttaaaaccggtaccaagagcaatcgttacttgttctcaagaatcttcaaactttcttctgttttctctgcactcggttcttcagcaaaagaaaatccatctcctgtattgattacagacttcgtgaatcattttcttttcaactttcagttcacttgatgaacactctcctctaaatatataggacttcgtgtccgatttgaattttcctggtgctttctcggttttctttcttat

SEQ ID NO: 7000 - DNA, 1206 bp, Glycine max
  unsure (1)..(1206): unsure at all n locations
  Clone ID: PAT_MRT3847_106329C.1
aaacaaaaataagaacgttttattgaacaaatactgtatgcaataatcaaaagctatactgaaaaaaagctaaactataaaaaaaaattacaaactgtctagctacccctatcaaccattagtggattatgagtacacctgaaagctcagttttattttgggttatactcctccagctgatcgcaactcctcgagagcaaccttgatctcattctgcaccaattccaaacgcttggaatacacttccagctccaaaatctgttgcttcctccacttctcatccatcgttgtttccccaatcctcaaattcaataaagtcattggcattgtcatttgagtttgcaaggaattcaatgcaagtcctcctccaactccaaactctcttcccaatcccatgccaccggtaccacacaccaactccttcaacaccggcgacacgcaactattaaccggcccttcaatcaaaccctgtaagttatgcctaccattacacttctcattattattattattactattgctattattatgaatattggcactacgacaatcatcttgattccgtttcggtacttcttcttcagccttcggatcttctcgacgagctggttcttgttgaaatcgagttggagcttcgacttgatttggtcgtagaacaaagccgtgtcgttgtggtgcgaggatcctcgctgcgaggtgtagtctaggaagccttgcaagagctcgatctcgtcctcgtcggtccacagccgctgaaacagccgccgcgagtcgtccggcgtcggcggcggctttttctcctcgactggctcgaggcgccgccgcttcggatcggaggagtctgcgacgacgatggtggtggcggtgggcgtcgaaattggagcggcaccgccgttggagacggaggaaccggggacggcgacggtgacggcaagagccgtggagggagagggctcgttttcttcgtcgtcggccaaaacgtcgtcgtcttcttcttcgtagtctccgtcctcctgagactcgtcgtcgtcgtcgtccatgtcttcttcgcggaaaacggcgtcgtgttgctgagaagccattgagacttgagaggtttggtttggttagtggttaggccaagcaaagcaaaagtgggctgagtcacgggttttcggttatagttggactgactctggacccgtgccccgagcttcgtanngcgtg

SEQ ID NO: 7001 - DNA, 1556 bp, Glycine max
  Clone ID: PAT_MRT3847_10632C.1
tgaggtgcaggaacctgaagagaagattgagagaaatgatgagaaaaacactaatatcgagggagtaactgaggaaggcattaaaagtgtcataaattttcttaaagaaaaaattccaggattgaaaatcaaagtcatgaatgttagcgttgaagaggaagcagcagaaaacaatgattctattaagcaattgatggaggaagatagcaataaaactggctccagtgagaatcatgaagaggaagttaataatcttgatgaacctgatgcggtcactctagaaagagatggagatgccacagaagaagaaaaggatttggaaatgaagcttttaattggtggggttgtacacaacaatgaagatactcctgtcaaggatgaatttatacgtcttccagctgaaataaaaaatatggaaaaggattcttttgtctttcattttgattgtggaaatgtagattatggtatcaaagaagataaaattcccaatatcaaagtagcagccctagcagcacaaggagtctccgagcttatgcctcctgatgttgctaatgcattttggagttctgacaaagtctcttctaagatctccaaaagcatgcgtgatattgtcagagttgctatgagtcaagcacagaaaagaactaaattatctggggatacaaattttagccggattatctgttcaagaggggattctgatccttttgatggactctatgttggtgcatttggcccttatggcatggaaatagtgcatttgaggcgaaaatttggacatttgaatgaagtggacaatgaaaacaaaacttcagatgtgggattctttgaatatgtagaggctgtccggttaactggggatcttaatgttcctgctggcctggtgacattccgtgctaaaattggaagaggcaatcgcaacaccaaccgagggatgtatcctgatgatttaggagtggtaatgcactatataagtgaatgtctctgtgtgtcggtgctcattcatgttgaagcatacttaatttcaaaattcactttagcccatcatgctggaccttttatattataacctctcacctgctgtcccacataactttgtgtcctcctgttcaggtcctattttttgccattgcagtatccagtgcccactataacaataatattaattactcaaatctcctaacttcttcagtattattctaacaaatgtgacacccaccttcactttttattgaatgtttgtcttgtattaacacaaatatatcttttgaattttgtttgtttccttgacttgtatttttatttagttattcgtgaatttttactatttttttttttaaatgagtatttatatgcatataggataaatttttaatctgtatattaaatttctgattagtgacctgctttagtgtttgaggtttgccgctactcattgttatctgagatagataactgtgggttgacaccactgtcaactgtatccaaagaaatagaagatattagtcactgtataggctctgctgggagaacaaaggctactcttagctgcctct

SEQ ID NO: 7002 - DNA, 454 bp, Glycine max
  Clone ID: PAT_MRT3847_106330C.1
ctctgtgcctggactaatcggatgcggaggccgaagcttatgcctaggcctaacgagtttgctgagctatgacgcgttgtcgcgcagtgtgatatgctggacgaggattcaaacgctggtcgggtgcgagatggactctactacaggcaccattacacgcaaaagccccccgcgcacttggcatagcggcaagctatgctcctcatttcgtagtgacggggtgggacggcataaatcagcgatacgagttagggccactcatggagtagccattgggctcccaccgggtacatgggttgagacatgcatcagctttatccacgtgccaacaaaaaggctgcatccagggatggaatctcaggcctcagagtgcagagcatcacactatctgtagacccgtggctctgtcaccttcgaagggagaaagagagaagacccaaaacatgccgatcgt

SEQ ID NO: 7003 - DNA, 355 bp, Glycine max
  Clone ID: PAT_MRT3847_106331C.1
aaaaaaaaaaaaaaatttaaatttaaaaaaaaaaaaaaaaaaagggcgaacaaaaaaaaaaaaaacaggctaacctacacaaaaaaagcaaagggggggccgctttaaaaggagccaactaaactaactctatgtgggcgcggtcatacatatgatatggggggacaaaccctgagtttaccggccgaaatcttatagcggcgcaaccggaaaaaccctgcgggcgccaaacttaaaaggctgggacggaaaacccttttggccagctggggaaatatgaaggaggacgggacccaccttctttccgaacattaaacccccctgaagggcgaatgaaacgccccttgaaaggggg

SEQ ID NO: 7004 - DNA, 403 bp, Glycine max
  Clone ID: PAT_MRT3847_106332C.1
cagctatgacgtatgactgcacgcgtcacgtcagctcgggcttcgcgagcttggatcgcgctctagcggtcgacgactagggagattgtcacacctgcgcattaattctctgtacgtatcctgaatgcgtaccacgatttcctacagagtgtagtccgaaagctcgaagtacccatggcaatagttagcaaatgcgagaactcgcacaccaatctaagatcatggacgccgactaacaacgctgcctactgcgaagagagaacagatgaccaagaactgaactacctgaaattcgtgcaattggggaccatgcaggctctgatgcgctgagacatgctgtactaatacgcctaggaacgcgcggatcctgcgaagccaggcgtctacaccgtggaggacgccg

SEQ ID NO: 7005 - DNA, 271 bp, Glycine max
  Clone ID: PAT_MRT3847_106333C.1
cagaatacgagttatatctcaaacatctagtaagttcgagtttcatatctttgtgagtattattttttaagtctcaaaacctacctagttcatctaaacttttgtaccataataacaaaaaactagtacttgaatgagaaaaagaaaaggtgagtgactgagtgtagctgaagccttttaacattgatgttaaaattgacatttgggtggtttttccccacagttcccctccagtcccacagagagaaccaaggtgagtgataatctagtg

SEQ ID NO: 7006 - DNA, 192 bp, Glycine max
  Clone ID: PAT_MRT3847_106334C.1
ccggggtgacccacgcgcggtgacacccgcgcgaagacaccacaggggggggggcaaggggaaaagaatcgccgcagaaccccagaaacagggcaacggaggggagcgcacgaggcgaaagaacgcagaagagcaacagggaaacagcaaggcccagcaagcaccgctgacaggaccccagaacaacaagag

SEQ ID NO: 7007 - DNA, 563 bp, Glycine max
  unsure (1)..(563): unsure at all n locations
  Clone ID: PAT_MRT3847_106335C.1
ataaaacacaaataaaacacactattattccattttcagtacatatttaatttctttttacttcaaagaaggaaacctacacaaacttttttttgtaaatggaagagataaatacacaataataaagtaaattaagtatgcatcaagaaacaccaaagaaacccacaaggctgtcatatgatgaaatgaaaacaaagcacaccacaatcatgcatctccaaccaacaaaaaagccttgtctcaatcttaaatatcaatgagcaccactctccttttccttttccttttcctcctctgtcttggagtgataaccaggaagcttctcttttatcttttctaatatacctttcttctccttggcctctccttcatgatgagcaccttcaccatgctccaatgatgcaacaagtggtggtggaggaggagtantaacctgggcctcctctgtcttcttgtgccctggtagcttctccttaatcttgtgatgatgatcaccctctattttctcctcgatcttctctttcaggcctttcttttccttcttcttcttcttgctttgctct

SEQ ID NO: 7008 - DNA, 424 bp, Glycine max
  Clone ID: PAT_MRT3847_106336C.1
aattcggctcgagttcggcataagctcaatcagggaacctctggaagagatgttctatagagtatatgggcattgaagaagagggtgaatgatggagtttttctgtagcacgatcatcatggattctccagtcagattgtatgcctagggagagtataaattaataggtccattgtttggacctgttgtgttgtttgtgttatcttctcatatagtgcagagttagtgttgtagaagcaacctgtgtcttggtattttttttattcatagatacttataaaaagggaagcaactgagataaatttcctgaatctgtttctcattgagaagatggtggtaatgcagcattttgttgagatgggttcaggtgaaaaaaaaaaaaaaaaaaaaaaaaaaaaaaaaaaaaaaaaaaaaaaaatattat

SEQ ID NO: 7009 - DNA, 732 bp, Glycine max
  Clone ID: PAT_MRT3847_106337C.1
gagaagaagaaacttaatcgatcatcacttcacttcactaatacatcatggcagacgagacccagaacaagtatgagagctctgaggttgaggtccaggatcgtggtgtttttgactttctcggtaagaaaaaggatgaagaagacaagcctcatcctcaggaggaggtcatcgccaccgagtttcaaaaagtcactgtctcagaccaaggagagaacaagcacagcctcttagaaaagcttcaccgatctgacagcagctctagctcttcaagtgaggaggaaggagaaaatagagggtgatcatcatcatcacaaggatgaggacacaagtgtccctgttgagaaagttgaggttgttgaaacagcacatgctgaggaaaagaaggggttcctcgacaagattaaggagaagctaccagggcccaagaagacagaggaggccccagctactactcctcctccaccaccacctgttgcatcattggagcatggtgaaggtgctcatcatgaaggagaggccaaggagaagaaaggtttattagaaaagataaaaaagaagctttctggttatccctccaaaaaaaaggaggaaaaggaaaaggaaaaggagagtggtgctccttgatatttaagattgagacaaggcttttttgttggttggagatgcatgaatgtggtgtgctttgttttcatttcaatcatatgacaagccctgtgggtttctttgggt

SEQ ID NO: 7010 - DNA, 1309 bp, Glycine max
  Clone ID: PAT_MRT3847_106338C.1
aagacgacagaaggggatccaatccaattgaattctccagagagaagaagaaacttaatcgatcatcacttcacttcactaatacatcatggcagacgagacccagaacaagtatgagagctctgaggttgaggtccaggatcgtggtgtttttgactttctcggtaagaaaaaggatgaagaagacaagcctcatcctcaggaggaggtcatcgccaccgagtttcaaaaagtcactgtctcagaccaaggagagaacaagcacagcctcttagaaaagcttcaccgatctgacagcagctctagctctgtaagcttcttttcctttattttctttgcatgcataaacattatatatatataacttgttcatcctgaaaggaataactttatattaacttgtcttttttttttaatatttattttataatttaaacaaaacttaattttatacgagattgttctagttgaatcagcgatcttgagtttggttctaggattgtcaacccttgatgaatgatttcggatctaaaaaataaaaaataaaaaatgttacttcaaggtgggttttgattggtatatatatgtttgcagtcaagtgaggaggaaggagaagatggagagaaaaggaagaagaagaagaaggaaaagaaagggctgaaagagaagatcgaggagaaaatagagggtgatcatcatcatcacaaggatgaggacacaagtgtccctgttgagaaagttgaggttgttgaaacagcacatgctgaggaaaagaaggggttcctcgacaagattaaggagaagctaccagggcacaagaagacagaggaggccacagctactactcctcctccaccaccacctgttgcatcattggagcatggtgaaggtgctcatcatgaaggagaggccaaggagaagaaaggtatattagaaaagataaaagagaagcttcctggttatcactccaagacagaggaggaaaaggaaaaggaaaaggagagtggtgctcattgatatttaagattgagacaaggcttttttgttggttggagatgcatgattgtggtgtgctttgttttcatttcatcatatgacagccttgtgggtttctttggtgtttcttgatgcatacttaatttactttattattgtgtatttatctcttccatttacaaaaaaaaaagtttgtgtaggtttccttctttgaagtaaaaagaaattaaatatgtactgaaaatggaataatagtgtgttttatttgtgttttataatttctttttttaaaaaaaaaaaaaaaaggacgaag

SEQ ID NO: 7011 - DNA, 217 bp, Glycine max
  Clone ID: PAT_MRT3847_106339C.1
acagaaacctgcccgtgagagtattggagaataacgcagcaccctcttcttaaggttcaagtgcccattcgggaaggaagtcctgcccatcctggtatcttcttagcggtgggccgaaatctttaaagattttatttaaaaaccacctttattagccagaattcaccacctttgcctggttggaaaccattgagtgggaaaatcttttgttaaatgc

SEQ ID NO: 7012 - DNA, 400 bp, Glycine max
  Clone ID: PAT_MRT3847_10633C.1
tttttttttttttttatggaaattaatatactttcattgcaatatacgacatgaaaaaatatatatatacaattgaagtatgattccattgtgcatgtatgcaattgaatcacacttctatttctatacttttgttttccaccccatacattgtaacagaatgtacgaaggaatcattattctgtaagaagagtatttttggaattcagtaaaaagtcactcacatgagtggtgaaaatagaaaattcggggatgagaatagcaacttctgttcgaaggcagctggggtgtaggtccacttttttgtcgtaacaagggtgatgtaataatcagcttggtcaaaatagcaaaattcggggatgagaatagcaacttctgttcgaaggcagctggctcgtgc

SEQ ID NO: 7013 - DNA, 1244 bp, Glycine max
  Clone ID: PAT_MRT3847_106340C.1
gccgaaattcatttcgagtgcatatgtaggcgcgtggaggaaagagagaatgaactctcttttttcccataacttaattcacacgtcggttaccaccttttgggttttggtatttcttaatcgcgggaagtgcgcgttatgtgaagtataaatggtgtcccagtcttgcaccttaaaaccatccaatccaattgaattctccagagagaagaagaaacttaatcgatcatcacttcacttcactaatacatcatggcagacgagacccagaacaagtatgagagctctgaggttgaggtccaggatcgtggtgtttttgactttctcggtaagaaaaaggatgaagaagacaagcctcatcctcaggaggaggtcatcgccaccgagtttcaaaaagtcactgtctcagaccaaggagagaacaagcacagcctcttagaaaagcttcaccgatctgacagcagctctagctcttcaagtgaggaggaaggagaagatggagagaaaaggaagaagaagaagaaggaaaagaaagggctgaaagagaagatcgaggagaaaatagagggtgatcatcatcatcacaaggatgaggacacaagtgtccctgttgagaaagttgaggttgttgaaacagcacatgctgaggaaaagaaggggttcctcgacaagattaaggagaagctaccagggcacaagaagacagaggaggccacagctactactcctcctccaccaccacctgttgcatcattggagcatggtgaaggtgctcatcatgaaggagaggccaaggagaagaaaggtatattagaaaagataaaagagaagcttcctggttatcactccaagacagaggaggaaaaggaaaaggaaaaggagagtggtgctcattgatatttaagattgagacaaggcttttttgttggttggagatgcatgattgtggtgtgctttgttttcatttcatcatatgacagccttgtgggtttctttggtgtttcttgatgcatacttaatttactttattattgtgtatttatctcttccatttacaaaaaaaaaagtttgtgtaggtttccttctttgaagtaaaaagaaattaaatatgtactgaaaatggaataatagtgtgttttatttgtgttttaaaaaaaaaaaaaaaaaaaaaaaaaaaaaaaaaaaaaaaaaaaaaaaaaaaaaaaaaaaaaaaaaaaaaaaaaaaaaaacctgggggggggccc

SEQ ID NO: 7014 - DNA, 241 bp, Glycine max
  unsure (1)..(241): unsure at all n locations
  Clone ID: PAT_MRT3847_106341C.1
aacagaanaaatgactgctacaaagtattctattatcagtaggaatggggttgggaccacaggaaaacactnacctttacttgtgaatctcttcgaagttgttgttaatgttccagacacagtattttttccagtatagtgtatgttgaccatttctgtctctgcaatttcacttatatcttatctggactttaggttattgaaggatttccaggtttctattaactttgaagataaacga

SEQ ID NO: 7015 - DNA, 358 bp, Glycine max
  Clone ID: PAT_MRT3847_106342C.1
aattcggctcgagcttcatcttcagcaacaccacttcccgtgaagaccatgacatgttccaccaccaccaccacttcctcttcttcctcttcctcttcttgggccatgttgaagtcagatgctgaggaagatgcagagaaaaaccattgcaaccgatacatgcatgaccaacttgatgcaactttgtcttccaccgcttccatggagatttctcaacagcaaaaccctgatcctggccttggtggcactgttggagagtgcatggatgatgttatggacacttttggttacatggagcttttggaggccaacgatttctttgaccctgcctctatctttttgaacgagggggacgaaa

SEQ ID NO: 7016 - DNA, 649 bp, Glycine max
  unsure (1)..(649): unsure at all n locations
  Clone ID: PAT_MRT3847_106343C.1
ccacgcgtccgcggacgcgtgggcggacgcgtgggctttcagacagctttgttgggagagaaaataaaatgcagggacgaatgaatgaatggaggaagatgatggccttcaacgacaaccattgaaattctaaaatacatgtttttttttggaaccttccattccattcctaatggtctgaggctgatcaggatctgttttccctctcccatttgagtttcagagccatgcatttaggtcagacagatactacttctgtgaaatgtctgatcaacagcatttctcgattcattcatctggtttcttgtcaaacaatgaaacctatgccctttcagaacatctgtaataatatggtntggggtgttaaagcgcttgaaaccggtgcttgatgacattatggattaccaaatcccttcaaatgtaaatctatgtaaagagtgtgaggaattggatatgcaggttaatgaagctagggatttcattgaaaaatggagtccaaagatgagcaagattcacnagtgttctacnaaggtggtacctttgnntgatcaagttacagagcacctctctagatatctgtcacatgatagttaaatccttacagtcacctccattgcatcagttntggctaatcttagcactattccag

SEQ ID NO: 7017 - DNA, 989 bp, Glycine max
  Clone ID: PAT_MRT3847_106344C.1
cttgatcgacaagcaaaaaaaaataaaaaaaaataaagaataaacaaaaggggtcctagaagttgctaacggtagatgcccacgcgtccgagcagcgcaagcacgcacgcattctgtgtgttgtggtttctctgagttccgagtggactcagttacggagcaataatgagtcaggaatcgtttatatatagcttcgtggctcgtgggacgatggtgttggctgagtacacggagttcactggaaacttccctgccattgcagctcagtgtcttcagaagcttccatcttccaacaacaagttcacttacaactgtgaccaccacaccttcaatttcctagttgaagatggttatgcttactgtgttgttgccaaggaatctgttagcaagcagatctctattgctttccttgaacgtgtcaaagctgacttcaagaaaagatatggtggtggaaaagcagatacagctattgccaagagtctgaacaaggagtttggaccagttatgaaagagcacatgaagtacatcatcgatcatgctgaagagatagtaaagctaataaaagtgaaggctcaagtttcagaagttaaaagtatcatgttagaaaatatagacaaggcccttgatagaggagaaaatctaactattcttgcggataagacggaggcattgcgttcacatgctcaagatttcagaaagcaaggaacacaagttcgtcggaagatgtggtatcagaacatgaaaattaaattggttgttctgggaatattgttggttttggtcttggttatctggctttctatttgtggtggatttgattgtacaaactggcagtgattgaaagtttccagatagttttttttttaaatgattaatgatgtataagggaacaatttagcaagacaatcaactgagaagggggagtttggcaattggaaaaaaaattctccccttctttggtggttgataatgacatatatgttcttggg

SEQ ID NO: 7018 - DNA, 330 bp, Glycine max
  Clone ID: PAT_MRT3847_106345C.1
ggagcttcagttctgagagtgatgaagagttttatccttcggaacagtttctcgagggtgacggaaacagcatcacaaaacacattgagtctgcaaataccatgctttcattcatatggtggattgttgggttctactgggtaactgctggtggccagagtttgacaagggattcacctcagctttactggctctgtatcacatttctttctttcgacgtcatgattgtactcatctgtgttgctgttgcatgtcttattggaatcgctgtttgctgttgtctgccgtgcatacttgccattctgtatgtggtggcagatcaggaagggg

SEQ ID NO: 7019 - DNA, 261 bp, Glycine max
  Clone ID: PAT_MRT3847_106346C.1
cgaaattcgatttcccccaatttctagggtttcgctgaaaccctaccctgcgattttgcgattcttccttcgaactttacttggttttcagttcccttttaaccatccagatcaccatgtcaagtttggacgagccagttggccttgacaagttgccaagcatgagtaccatagatagactccagaggttctcatccgctgcttgctgtcccagagtagataattttactttgggtctgggaaactgctggattgaaggac

SEQ ID NO: 7020 - DNA, 438 bp, Glycine max
  Clone ID: PAT_MRT3847_106347C.1
aatatatatatatatataaataaataaatgataaaattattaatttttataacaattactttaatttatcttatccaataacgaggtcgcgtaaattattttatgtcttgaaacctctcacctccgatccctctaattctcacccaaactgtagtcccattcttccgcaggtgaattgttccctttccttttgctcctttccacatgtgctgaacttatttccataaatcataattccacgcttccacctacatcttcagcaaccaattattttatttgctgaacttttcttttgtttccttttcttcactacccaacctttcataagggattaatgccaaacaataaacaacgttttaacatatgcgtaagtgaatcagaatggaagaggcaacggagcaagtacaaaccagagaacgtggtgtaacaaaacgtgtg

SEQ ID NO: 7021 - DNA, 395 bp, Glycine max
  Clone ID: PAT_MRT3847_106348C.1
cggtcgcgttttcatttcttgtgtttggaggtacccaacttgcgagattccatcatttttcatgtcttagatttcatttcacaagagtgagcaattaattcccaacaaagaaaaactttatttttctttttcttctccaatgccagaaaattaaagggtcgtgttcgtttgttgttgtagtaaactgtgtgggcgttatcttcgatttttttttccgctcaaaagggtagcgtttgttggtgtaataataaactgtgattgttgtctctagcatttgaagttccgagaaagttgcgaatttccctttttttgatttcctcttggtgtgggtattctaaggttcttatttagttattcttgtgtgttttcaagtgttgttgcggactctgaggagt

SEQ ID NO: 7022 - DNA, 354 bp, Glycine max
  unsure (1)..(354): unsure at all n locations
  Clone ID: PAT_MRT3847_106349C.1
tcgcaccancaacaaagaggcgggaccccacaagcagttgcagcccggaccgacccagcaaaaagcagaacngaaacaaacacaagaggaaccccacacagcncgggcaacccaggagcgaccagcaacaacacngacggccgacgggagcccacaccagaaagcaaaggcgcaagacagaacagcgccaacaacaccaggcgaacaagccaccggagcaaagccgacaaccaaaaacaacacgggggcacaagggcccaaaccagagaaaccagggacacgcacacagggcaaccaaaaaaaacccaccccacaccacaccgcgcggaancaaanggaaacagngagaacacc

SEQ ID NO: 7023 - DNA, 238 bp, Glycine max
  Clone ID: PAT_MRT3847_10634C.1
atagtttcaatcaaaaacaaatctcatctcactgtcatccaattccaagaatatatctttacaaggcattcccattctaaaagaggggaatattcaaaggaaaaaaaagagtatttttttaacaacaagagctctcctcaatcttatcttatatcacaaggaaggtacgtcataatcttaacttcctcaccgttgttactttctcactcaattcatttctgaattctattctcataaa

SEQ ID NO: 7024 - DNA, 2952 bp, Glycine max
  Clone ID: PAT_MRT3847_106350C.1
cccactcgtccggggaggtttgggattggggtggaggtttaccggctcacggaggagctcgaggtggtggaggtaaggaagagggtaggcgacaccgagttgaggggagtgtgggaagagagcccccccctacctaaccacgcgtccggtgcgaggcagcgagagaggtgaaagcgccaaggctgcaacacccactccctcccctcccttcaatccctaattccgccactcacttccgctctcagctcagggtattacgtagtacgtggagaatgggaagtactgaaaagatcccaatcagcgctgaaagttcagaaaccaccatcgagataaaaattaaaacattggattctcaaacttacaccctcagagtggataaacagatgccagtccctgctctgaaagaacagattgcttctgtaactggagtgttatctgaacgacaacgcttaatttgccaaggaaaagttctaaaggatgatcagctcctgtctgcctatcatgttgaagatggtcacaccttgcatctggttgtgaggcaacctgatctaccaccaccaggaagtgtgtccaatcattcagtgactgaactgaattcaagcacaggccttggtcacgcaagtcaagtagcccctggtgtttttattgaaactttcaatgtgcctgttcagggtgatggagttgctcctgaaatcaataggattgtttctgctattctaggatctattggacttccaaattttgcgagtggcagtgaaggagggattgatgtcagggagcatgattcccgcgactctgggtgaaggagggatttatgtcaggaagcatgatatctaaggctctggaagaactttggggtttagggatttatttttgtctaacacgctccgtcaaatgatgccaagcgccagtatctctaggatctttgcagcctcctgtcattcctgattctttgacaactttgtcccaatacttaaggcatataagccttgaatttgatgcaattgtcagagaagggagggataatgccgaagcagctgaggctcaaaggaatgaagaaactagatctgtttcttcacatttgggttcaactccagaagggctttcatcacccgcatccttggcagaagttttacgttctaccagacaaatgattgatcaacaagccggcgaatgcctacttcaactatcagggcagctggagaatcaagcaaatgtaacggatcccttgttgcggtcaagcattcagtctagggctttgagaactggagttttgttttataaccttggtgcctttttgcttgagcttggtcgcacaaccatgacactgcgtttgggtcaaacatcgtctgaagctgtagttaatggtgggcctgcagtttttatatccccaaatggtcctaaccatatcatggttcagccccttccttttcaacctggggcaagctttggtgctgtccctgtgggagctgcacagtctaactcaagtttaggtagtggacttggttcaagctttttcccaaggcgtatagatatacagatacgtcgaggtacctcaacaacctcatccaataccaatcaagaagaacgcaatgagacacaatctgcctcagtacaaagaaattcaggtgaaagttctgttaatcaggcaacctctaggcgtccagatgcatccattgctggggagccaggagtaaggttagtgccaattagaaccatggttgcagcagcagtgccaggcaccttagggcgtctgccttcagaatcatctggtaattctatagggctttactatccaattcttgggagatttcaacatgtttcttctggacattcaaatagtgaacaaggatctcaacaatcaagtcagcatcacactgtgttaccgtcgactcctgaatccatattgcaaaggcaaaacacagaagattctgccaggaatggatccttatcaactccaagcacaaggcaagagccttcaagttctcgtgttgtaaatatcaatattctggctgctagtggaccccaaaacaaccaagaatctgagagacaaataccaagcagtgtacttcagtttttaaggacattctttcctggtggagaaattcacgtggaagattcaagtgtacaaggaacaactgcaggttctgccttagatcatgctgcaacatcaaggggtgctgccccagttcctgaagcacaacctaatgtcagtgaagaaggaatatttttgtctaatatactccgtgaaatcatgccagtgatatctcaacaagtagggtctgagggaaatccttcagaagatcatatggctcaagattcttcaacccaggttgaaactgatgtcgggacatcacgcagacagagtgattctgatccaagccccccaaatgcaaaacgtcaaaagatggagtgatatagaggataatgttaagtttgcggtcgtggaagattgtgatcgtaagaaacagaattcggggtggatctcatgatgtcaatttggtattatgtgcttacgtagttttctatatcaagcgtgatttcattttctcctgctgtagacaaaccttaagaagactgctctccgaatgtgacattttgtacatcattggcattggaattgagcttcccttaagttcagtttatgcttggaattggtaatagaattcaacattacagtggagattagccatcttataaacttaatttggcgtccgtgaagttgaaacagaactaaatcaaacatttctgaatttttaatcaggaagcattttggtttttagaaagcaataattgagacgcaggtacattaattttgttgcttctgttactatcaattttgttgttcaagtattaacctttttaagtggttcttaaagtgaaaaaaattataaaaataatgttatgtaatcttttgaatattaaaaaatccgttaaatctgtgagatgact

SEQ ID NO: 7025 - DNA, 415 bp, Glycine max
  Clone ID: PAT_MRT3847_106351C.1
ggctcgagctcgagccgctcgagccgattttcagtggaacaatggcgggtagggtttcgacgtgcgggtcgttcgggttggctctttctctccttcctccttttcagatctccgctgacgaatcatcggagaaagacgacgtactcacatagcatcactctatctttcacgacactgtcagcaagcacgatggcatggacgccgagttctacgctccatgcagaggccactgttagatgctggctgccgcgtatgagaaagctgccactatcttgagtagtcatgatcctccggttgttttggctaaaagagacgccaatcaggagaagaacaaagacctagcatctcaatcgacaggaggggatacccatcaattcagaggctgagaaaggggggaaagaatggccaggaatac

SEQ ID NO: 7026 - DNA, 244 bp, Glycine max
  Clone ID: PAT_MRT3847_106352C.1
cccacgcgtccgcttaactttttatcacagaccttagttataacatgatcagtgggggtatttttttacgatggggggccattaccttagatgaactccatttaatggcaaacaaattgacacgtccatttccgactattgtcaatattatcacaaccctcagaaactataatatcgaaggaaatcaattatttggcaacattccatcggacattgggataatgactcaatttataaaaacata

SEQ ID NO: 7027 - DNA, 500 bp, Glycine max
  Clone ID: PAT_MRT3847_106353C.1
ccgattccggttccaaggaaggtttcccgtcatcactgtatgacgtcctcctgtctttgggggggggggggggctaagaacccaaacccggtggcggggagagaggctacgggcgtagcgtgtacgtaaggcgctgcctataataacaggaggatgagtctacactggggaaaagaatccaatccatacggtaccagtattaggagacaatagacaaataaagcacagggagaaagagaaaaagcgaaataaatgcaccaacctgacgaagggatggagggatcctaccgtagtaagtaggtgcgtgagttgacaaaagaaataatcgaggaaagaaaagccggaaagccggaaggtgacgtaaatgcgtggtgccatagtatgttacgcagggcgggtatgcgtgtcagggtgcaggttaatttaacaaacttgtacgtaggattacgtcacggacgcaagcgaaaccgtagaagccattggcaactaagcgtaataat

SEQ ID NO: 7028 - DNA, 582 bp, Glycine max
  Clone ID: PAT_MRT3847_106354C.1
tttgacgcttgggcggacgcgtgggcggacgcgtgggcgccgctagtggtggtgacggttctgttggtggagagggaagtgggaagcgcagctctgaattgtcaactacggagagacaagaaattcagatgaagaaagccaaactaatcgacatgcttgatgaggtggagcaaaggtacaggcagtaccaccagcagatgcagatagtgatttcctctttcgagcaagctgcggggataggctcagcgaggacgtacactgccctagcattgcaaacaatttcaaagcaatttcggtgtttgaaggatgcaattgcggggcaaattcgagctgcaaacaagagtttgggggaagaggattgctttggagggaaaatggaaggttctaggctcaaatatgttgatcatcatcttcggcaacagcgagcacttcaacaattgggaatgatccatcacaatgcttggagaccccagagaggattgcctgagagatcggtttctgttctgcgtgcttggctctttgaacactttctccacccttatcccaaggactcggacaaacacatgcttgcaaaacaaacag

SEQ ID NO: 7029 - DNA, 1866 bp, Glycine max
  Clone ID: PAT_MRT3847_106355C.1
cttgaactgccgaacctaacaaatcctttccaataatgaatgcaaacaaatcgacggcaggtacgctgccacgtgcctttttctctcagcgcgccctctccgccctccccgccgtctccgtttggtgcagctggacggggctcgtcttcctcggcctccgcagcaagtctctggacggcgccgccgggcttcggcgcccgccgcctacgccagcagagagaaacatagattgattaattgagaaagagagagggatctttcattttctcgggaaaatggaggattctttctttgacgtggttgagtttctgaagaaaccctcggtaccggaggcgtttgtcggcatgttgatcaccaaacatgcagtacaaagcttggcgtcacgatcctgagacaggtcctactgtttactgtagtagaactgtcttcgatgatgcaactccagagttggtgagggatttcttctgggatgatgactttcgtcctaaatgggatgctatgctggctcgccttcaccgccctctccgccttcacctattggttcaatttcaaaggcaagaccaaggccaaagctcaagatccctcgccttctcaacccgatactaccgactccaacgccatctcccgcgctgctcggtccagtgatagggctgaggagagggagcaggacactgttacacaggctgatttggaacattttcttcatcttcttgaagggaaggatggagtgatggactggcagagttttatggaaaggtcaacaccaaacatgcaatacaaagcttggcgttacgatcctgagacaggtcctacagtttaccgtagtagaactgtctttgatgatgcaactccagagttggtgagggatttcttctgggatgatgactttcgtcctaaatgggatgctatgcttgcatactgcaaagtattggaggaatgccctcataatgggacaatgatttctcactggattaaaaacatgcccttttcagagcctgcgtcttgcatggaagatagggtgcaagccatgagtaataccgcacaaaagggtaatggcatagactggaagtgggtggctgtaggtggcactgttgctctggttttgggtcttcatactagtgctgtggggagggcgttattgttgggagcagggcacagaattgcacggaggtgactgacatatgagctgcttaatgggaaggtccaagacatggggattcccaaagatgttgcgaagttgggagtccggcatggaatgtggggagctgtcaaaaaattgcattctggaatgagagcttaccagagtgctaggaaaacagaggcttctttatcaagatgtgcattgatggcaagtaaaacaaccaagattacttctgacgcaaacatgcattcctcagagccttcgtcttgcatggaagatagggtgcaagccatgaataatactgcacaaaagggtaatggcatagactggaagtgggtggctgttggtggcactgttgctctggttttgggtcttcatactggtgctgtggggagagcgttattattgggagcagggcacagaattgcacggaggtgagtgatctaggatctgctcaatgggaagggtccacttatcaccgttcggaatattcatcataaatatatttagactatcatttatcagtatcgaatgctaattttgcggttcttattattataaatattttcttcttttttgtattagattcagcctggttagattcatctcgctcttgcgttttagaatgcaaaggtgcaattacttgccattttttttcataaggaacggaatcctttcaacggcgctgttatcagattatggaccccaattttatttttagcagg

SEQ ID NO: 7030 - DNA, 460 bp, Glycine max
  Clone ID: PAT_MRT3847_106356C.1
aattcggctcgagcaagcgcacagctagcacctacattgatggtcaaggcaactggcacagaagcagcaagggtgcccctgagcaaattattgagctttgtgaactcaagggagaggttttgaaaaaggcccacaaggtcattgatgagtatgctaatcgtggtttacgttcattgggtgtttcacgccagactgtttcagaaaagaacaaggagagtgcaggggaatcatggcaattcgagggacgcttgcccctccttgatccgccaaggcacgacagtgctgagactattcggcgtgctcttgaccttggtgtcaacgttaagatgatcactctatgccaaccttgccatcgatatgaaaccgggcgtagacttggaatggtcaccaacatgtacccttcattctctctatttggtgatagcatggaccttgccattgcatcaatcccagttgttga

SEQ ID NO: 7031 - DNA, 321 bp, Glycine max
  Clone ID: PAT_MRT3847_106357C.1
acccacgcgtccggcacgcgtgagaagacgcctgaacggggtgaagacgatcgaacgcttatcttgaactaggggccgtgcggatctttcaccaatcagaccttgttcaatgaacgcaataaaaataatggctgatatttcttacccacactttacgccaaacctatgactatataaggaggagtccttcgaacacttgtttacatctggagcattctctcgcccattccatcattctatcgaatttgtatgaatgaataccatgaaggtttgcaaatactaccttccgtgatctcactgttgaccgtaatgctttggaca

SEQ ID NO: 7032 - DNA, 385 bp, Glycine max
  Clone ID: PAT_MRT3847_106358C.1
gcaaagttatagatataacatactcaaagggccgtggcaagaaagggttggaggaagccttggataggatatgtgcggaagcaatgctgcaattagtgatggctacactacccttgtgttgtctgatagagccttctcaaggaaacgtgttgctgtgagctccctgctggctgttggtgctgtccatcaacatctagtgaaaacacttgagcgtactagagttgccttagtaatagaatctgctgagccacgtgaagtgcaccatttctgcacacttgttggcttttggctgatgctatatgtccatatttggctgtagaggcaatttggcgactacaggttgatggaaagatcccaccaaaaacaaatggtgaattccacacaa

SEQ ID NO: 7033 - DNA, 483 bp, Glycine max
  Clone ID: PAT_MRT3847_106359C.1
atcttaaggtatctcaagggtaccttgtctcatggtttacttcttcagcctgcttctactgtgaaacccttggctttttatgcattctgtgatgctaattgggcatctgatgtggatgataggtgttccacctcaggggctgccatctttcttggcccaaacttgatatcatggtggtctcgcaaggagaaggtgacagccaggtccaatactgaagctgaatatctcagcttggctcaaacttctactaaattgacatggagtcgggctcttttaacagaattgaaaattcccttcactacactttattgtacaatcaaagtgctgtatcgattgctcataatcatgtgttccacagtcgcacgaagcatataaaaattgatgtcttttttgttagggaaagaaatccgaattaaaattactactccagctgtctactgtgatattctcagcactgttgctttgagtcacaatccggttctt

SEQ ID NO: 7034 - DNA, 352 bp, Glycine max
  Clone ID: PAT_MRT3847_10635C.1
ctcgaggcgaataagagcacagctccgtggaggagttacatgaactttacaagcctgtcatgcttaaatcttatactgtaacctagcaggcctataacccttgtcctcactgtcttactattcctctgcttaacccaaggccgtttcatcgcaagagaaacagctacagatgagtaagcatgcacatgctcacaccacctcacgatctattataaggaagaaccaacttaggaaagtgtgacaagtaccatgatgagaatcatccttcatacatataggcatgtgagagatctggtcggaagcccagagagggttctgcatgtccacgggggtactatacatgtagcagctc

SEQ ID NO: 7035 - DNA, 102 bp, Glycine max
  Clone ID: PAT_MRT3847_106360C.1
atttactgtttgattgttacagaaaatcctgataggttctgtctcccaatgtgccgagtgcattatcaaggggcaagggccaatcgatgataaattattatt

SEQ ID NO: 7036 - DNA, 320 bp, Glycine max
  Clone ID: PAT_MRT3847_106361C.1
aaaaattaataattaatatttgttgataaaataaaaagattaaaattctttgaaaaaaaaaaaaaaaaaaaaaaaaaaaaaaaaaaaaaaaaaaaaaaaaataaaggggaaaaacaaaaacccaaataaacccaaaaaagaaacaaaattacccgcgctacaatggccaaatcttttacaagggggggcactggaaaaacccttgcttaaccgaaattaatcgccttgcaccacatcccccttttttcaaatggcgaaataggaaaaaggcccggaccaaccgcccttcccaccaggtgcaaaacctcaatggcgaatgg

SEQ ID NO: 7037 - DNA, 540 bp, Glycine max
  Clone ID: PAT_MRT3847_106362C.1
ggggggtttggttttttttttttttttttttttttttttgcttttttttttttttgtgtttttggacaaaaaactcattggaattttttcttttattcccgcaaaagtttcgggcctctttttaacggggccttccattttttttttgcaggaaaaaaagggggggccaaaccctttgtttttttttccatgcttattattttaaagaacggggggctcgcccttttgccaaaaagaccaaaggggggtacaaaataaaaaaggggctttaaacaagaggtttttttggaaactcgcgggggggaaccagcaactcgaaagggcaggggttctttattggcctggcctgggggctttttagggtgaaggggcggtgaataacttcctctgggaaagcctcaaaaactattttccccttgggaagaggccgattgtgggtgttacctgggtctggattgacacatacttcgaatggcaattttgtgatgtcgaaacaccacaaaggtttgggagcttatgagcacccgcccttttgggggc

SEQ ID NO: 7038 - DNA, 401 bp, Glycine max
  Clone ID: PAT_MRT3847_106363C.1
aactcgaaattccttttgaaatttgaaaatttttttgatgatcccatcaattttcaggcttttgcccacaatctgatgcagtttggagacactcacttacaatagcgtatcgaaattgtacaacaggaatgtcttacagcttggacaactcatgtgcgtcctgcaacaactctgttggctgatgggtgtccatatttgtatgcaatggtgcatgatagttcactgtctacaataccatgtgattttgtcattggtgtcaagttgacaaccataaacaatatgtgtgcatatgggctcaatcctggtatttcacgatctcgtgtttttggcaccattcctcagtccatttcacagcaaactgtttggaatcaaatggcaacaggctgaacaccattgaattt

SEQ ID NO: 7039 - DNA, 523 bp, Glycine max
  Clone ID: PAT_MRT3847_106364C.1
ggttgttgttggattgcagtaagtaacagcgaacgaagaagaagaagaagaagaagaagaagaacgcagaagccacgatgagtggcagagccatgatctcctgtttctctcctccttcaacaactccatgctctgcccccattccactctggcgccgaaaccacctcctccatgcaactcctccaccttcgctacacctcctctcgcggcggagccacctcgttgccggcggaaggagggtgtgggtgaatgtgaagtccgagaagaacttatccgaatcccccaagtacgaggatgatgtcgtggttcagaagaagaagaagcgtggtttggataacgtggaagaggaagcgaggtggtggcaagtgtttcccaaaagatgggtcattgtggttctctgcttctcagcttttcttctatgtaacatgaataatattctgtcaaaatgggttcctgtgtcagagagaagtagatcactagcgctggtctacagtggcatgtatctgggatcagtcactggact

SEQ ID NO: 7040 - DNA, 510 bp, Glycine max
  Clone ID: PAT_MRT3847_106365C.1
ccacgcgtccggtagcacccatagaacataataacataggcaaaggttcctcagacccaccgaactcaccgtatcaccaaaccaccaccaccaccgtcaatccaaaaccaaaccaccaacaccagcctccaccatggactccatcgccggagctccgccacacgccgacgtcacccctccgccgcctcggcagtcgccgttccccggccgggaagactgctggtcggaggaagccacgtttacgctcatcgaggcgtggggccagcgccacctcgaactcaaccgcggcaacctccgccagcgccactggcaggaggtcgccgacgccgtcaacgcccgccacggccacgtcagcaccaaggcccgccgcaccgacgtccagtgcaagaaccgcatcgacacgcttaagaagaagtacaagatcgagaaggctagggtttccgattccggcgactccgccaccacctggcccttcttccgccgcctcgattttctcatcggcgacaattt

SEQ ID NO: 7041 - DNA, 2103 bp, Glycine max
  Clone ID: PAT_MRT3847_106366C.1
tacggctgcgagaagacgacagaaggggattgcagtaagtaacagcgaacgaagaagaagaagaagaagaagaagaagaacgcagaagccacgatgagtggcagagccatgatctcctgtttctctcctccttcaacaactccatgctctgcccccattccagtactctcgcgccgaaaccacctcctccatgcaactccaccttcgccacacctcctctcgcggcggagccacctcgttgttgccggcggcggcggcgggaagacgtgggcgaatgtgaagtccgagaagaacgtgtccgagtcccccaagtacgaggatgatgccgtggttcagaaggcacgtgatttggataacgtggaagaggaagccaggtggtggcaagtgttccccaagagatgggtcattgtggttctctgcttctcagcttttcttctatgtaacatggatagggtaaatatgagcattgctatacttcctatgtctgcagagtacaactggaacccgagcactgtaggtttaatacagtcttctttcttttggggatacctcctcactcagattgctggtggaatatgggctgacactgtgggaggaaagcaggtattgggatttggcgtggtttggtggtctgttgcgacagccctcactcctatagctgccaaacttggattgcctttcctactagttgctcgtgcattcatggggattggtgagggtgttgctatgccagccatgaataatattctgtcaaaatgggttcctgtgtcagagagaagtagatcactaggcgctggtctacagtggcatgtatcttggatcagatcactggactggccttttctcccttcctaattcatcagtttggatggccatcagtattttactcctttggttctctagggacagtctggtgttctgtgtggcttagtaaggcacatagttcacctcttgaagatcctgaactgcggcctgaagaaaagaagctcattactgcccaactgttcctccaaggaacctgtgaaaacaataccttggcgattaattttgtcaaagccaccagtctgggctctgatagtgtcccatttttgccacaactggggaactttcattctacttacatggatgccaacatactataaccaagtcttgaagtttaatcttacagaatctgggctattttgtgttttaccgtggttgataatggctatttctgcaaatgttggtggttggattgcagacactctagtgagcaagggtgtatcagttacaagggtccgcaagataatgcaaacaattggatttctcggaccagctttcttcttaactcaattgagccatgtcaattctccggtgatggctgttttgtgtatgacgtgcagccagggaactgatgctttctctcagtccggattgtattcaaaccatcaagatatcgcccctcgatattctggcatattgcttggtctatctaataccgctggagtattggctggtgtctttggaacagcagcaacaggttacattctacaacatggctcctgggatgatgttttcaaggtttcagttgtgttgtatttggttggaactgtggtgtttaatcttttttcaactggtgaaaaggtcttggaataacttactttcattgatcattggtacttgtcatgccacatgtatagataagtctcgcgtactttcccacagaatggtaaattttgtggatagaggagcattgagcatagatcagagggatggcaatgtgtccgtgaaaaatgaactggcataatttagtccctgatgtttttatcaagggaaaaggtttagatgattctactctcatgcttctgttttttttcccatttttggtgggaagatcatagtggttgcttagtttaaaatcatacttgtaaatattattttcataccaacacatcaattttgtaacaattcaacaagaaaagtgatttatgtgtattattcatcaagcttcttttctttccaatttctgatcaacctgttttccttgcatcctttggtcaaatatgttggtaatgtgagtgttgccataatgaaaagttgcagttggatgcttcaatttttttt

SEQ ID NO: 7042 - DNA, 113 bp, Glycine max
  Clone ID: PAT_MRT3847_106367C.1
acgagcttgcccccagatgatcctcttatcaagaaatgtattgatccaatggatgcattagccagatcaactatcaaatgggtaaaatcctctgggcaaaatacatgaacaac

SEQ ID NO: 7043 - DNA, 375 bp, Glycine max
  Clone ID: PAT_MRT3847_106368C.1
ggcagtcgcagattccaaggtaattttttctcaattgcacctttgcatcctttaattattctatatatttctcataaaatttgataataaatagtttaaaaattcaagggtatacttattacccatcaaccaaaagaacatgaattgttgcatggggaggagtttcaatgctttgtatctaacaaaacgatttgtttttcaataagagaacttgttggtgcaaactttaaaagtgggagaataaatggatgatggttaatttggagaattgtgtgaaaacaaatcattcaaaaggaataaaatcggaaatattttaacaaaatcacttaaaaaaaaaactcactcggatatgtcaattgaaattaaaatgaaaaa

SEQ ID NO: 7044 - DNA, 1550 bp, Glycine max
  Clone ID: PAT_MRT3847_106369C.1
cttcctttatcatcaagtttagagaagttccaaatcttattataaccccgttagtattcgggttcttcttactcacctacggaacacaggaaaagcctccaaaaccaacccaccgttggcgcgatggctttcccctccaaaggcgatgacgagcaggttctggtgcagcgtaaatcgaatgcgagagttttgacactaaacaggactaaacagttgaatgccctctctttttatatggtttctcggctacttgaaattttttctgaagatgagaaagattctgatattaaattggttgtcgtgaagggaaatggaagggctttttgtgctggtggtgatgttgcagctgttgctcgtgatggaagtaaaggtgactggaggtttggtgcaaatttttttcaaagtgaatttaaattgaattacttgatggcaacatatagtaagccccaggtttcaattcttaatggaattgtcatgggaggtggtgctggtgtttctgtacatggaagatttcgtgttgttactgagaatacggtctttgcaatgccagaaacagctttgggtttatttcctgatataggttcctcatacttcttgtctagactgcccggatttcttggagaatatgctggtcttacaggtgctaggttggatggtgcagaaatgcttgcttgtggtcttgcaacacattttgttccttcatcaaaattgtctttattggaagaagcattatgcaaggtggaaactagtgatccaaatgcggtgtctgcaatcatcaataagtattcagagcaacctttcctaaaagaggatagtgtttatcacaggatggatgtgatcaataagtgcttctctaaaaaggctgttgaggaaatattatcttctctcgaggtggaagctacgagaaaggctgatccttggatttctgcaactattcaatccttaaagaaagcatctccaacaagccttaaaatctttcttagatcgattagacaaggaaggctccaaggtgttggacaatgccttgtttctgattatagagttgtttgtcatattctaaaaggacactacagcaaggatttcttcgagggttgtagggctatactgatagataaagacagaaacccaaagtgggaaccttccaaattggagcttcttagtgatagcgatgttaatcgttacttctctaaacttgatgataaaggatggaaagatttggagcttcctaaaaggtttaataatctgcctacatatgctatttcaaagctgtaaagcatcatcattctcatattttcaagcccaaagtatggaagacacgtattgctccattcaattgattcttggatgtttcaatgtatggcagtttatgaattgctaccgttacaattgataagattttaaaactagtgaagtctaccgttgagaatcagagtatgatactctaataaatgtagtttccaggtatataatctctaatttagaggaaattgaatattctctaaatatgtgcaattaattcaataagcccataaaccctcaaccgttgtgta

SEQ ID NO: 7045 - DNA, 534 bp, Glycine max
  Clone ID: PAT_MRT3847_10636C.1
gcagtgtctgaaacgcctgctgctgctcctggtatgttttaccacttaccgtactctttttctactttgctgtatacaaattttgatgtgttttttcatgttagaatttcctttcaaattacgaaaagggtcacatgttttgtctttttctgccccataattgaacttcaataaataagagccatatctgattttgtggttttgtttatttcttttgctgtggataatttaaagtaaataataattatatcatagctgtttattttaacggtctgtttcttatcattatgctaatgatattgccggcttaaagaattctcgataatttacagagatatggacttattgccacgctgctatcgtttaaccgcttaggatttattttgtatgcatttgactatattgagagcgatctgattttctacgtatgtttctattatacggactttggagacaacaagacttatattttcttttttaattctgaaatgtaaggacttaaagatgatgcaaagaaatataaaatttgaaaac

SEQ ID NO: 7046 - DNA, 253 bp, Glycine max
  Clone ID: PAT_MRT3847_106370C.1
ctgacgcatagagtctcaccgtccatgggcagagtcataatgtaacttggaaagattgtgaggctggtatgagtgtgtagcatgtaaagatttctgcatgttctagcaaaatcaaaaggccactcttgtcctatcatgtgtatgtttaaccatgtcctaagggaattcatgtatggtggggattagacatcagtgtggttggtttgattcctagctttcacttttgagatcgatactaataagtatatttatt

SEQ ID NO: 7047 - DNA, 361 bp, Glycine max
  Clone ID: PAT_MRT3847_106371C.1
gatttttctgctgtgaaaacccgagagtgttgggggaaaacaatgaaaatcttgtgaaaacagttgaaaaatgttgttttgggagaagacagacattacaatttgcaacggctacattgttgggtggttgtctctctctcttcctttttttcccttacacggcaaatccaaacccaacaacagctttcaaaagtgttaggtgtaaagaaagtaaagagagtgagagagtgagagagaaaaaaaagcaaaggcccacctgtgttaattttgcaatggaatcacaaagagaatatgagaaagaagaagaagcactagtgttgaaaacaacaaaagtggtggagtatttggtgccaaagatgtc

SEQ ID NO: 7048 - DNA, 140 bp, Glycine max
  Clone ID: PAT_MRT3847_106372C.1
cggaattgggttcggggggagaccaaaaggaccaaatttatggtctgggaaccccatgttggtattgcgctgtggaaaccctcctttttcgagggaaaacccgaggcttgcctctgccttttgggaacatttttatccct

SEQ ID NO: 7049 - DNA, 407 bp, Glycine max
  Clone ID: PAT_MRT3847_106373C.1
ctatgacttaatctgtggtttgcaattttacaaggcatattctctcgggattagcttacttacatagtaacaaaaccatccacagagatatcaaaggtgcaaacttgctggtcaatgaatcaggcactgtcaagcttgcagattttgggctggcgaaaatactaatggggaattcatatgatctttcttttaagggtagtccttattggatggctccagaggtattttattgttcaaatcatctatagtattttggatgggtagacatgccccttttgactctaagttgtccatttgaaggtcgcgaaaggttccataaagaacgaatccaatcctgatgttgtcatggccattgattatggagcttaggggtgcaccattctagaaatgttgacagggaaacctcc

SEQ ID NO: 7050 - DNA, 592 bp, Glycine max
  Clone ID: PAT_MRT3847_106374C.1
tcgaagctttttttcggctcgagcagagttcttctcccgatggaactttcctcaaagaaagagttactatctcgaatagtatcaacactaacgcccaccatcacactcatcttcttcttccttgtgctttctccgagcctgtgcacatcactcggaagcaccaacacagttggatcggagttgctgaaggttgctccttctgaatttgaggggacagtgagaaccgtcgttgatgtgttgcaagaagtcacctctattctctccgagttcggttctggcttcggcgattcacgtctttctaacgccgtttctgactgtcttgatttgcttgacatgtcctctgatgaactcgattggtctgtctccgccacacagagtcccaaagggaagcacaacagcacagggaacacaagttcggatttgagaacatggctgagcgcagcacttgcaaatcaagatacatgcattgacggattcgacggcacgaacggcatggtgaagggtctagtattcactggtataggccaagtgatgttcttactccaacaacttctcacacggtgaaaccagttcggaccacttctctttctct

SEQ ID NO: 7051 - DNA, 323 bp, Glycine max
  Clone ID: PAT_MRT3847_106375C.1
ggtgactgctgcttgacaccatgatgcaccagcgctagagacactggactctgtggtgcgagagtgtgtgtccgagagcgacagacagccaccccaaccactggctgttttagtttgacgggggtgacatttactatatcttttaccccattactcgttccttctaaaaacttacgttgtagctctaacatgataattgcgtgtgcaacgttctatgctaattcactatggcatatggcgcttgcacgctttgtgatattgaatacagggcaactgaccttaaatacaaagaactcgcctaccctcacgtgtagaggctctta

SEQ ID NO: 7052 - DNA, 446 bp, Glycine max
  unsure (1)..(446): unsure at all n locations
  Clone ID: PAT_MRT3847_106376C.1
aaaattctctctctctctgttccgtgttccgcacccatggccaagtcctcctccaccaccactccacaaaaacctttcctcaacttagacccactcttcttgaaaactccttcttacacttccctcaaagacgtgcttcctttctccgccgctgcttgcaactcccccgccgcgagccaccaccagtacgtgtccatccgcaaccgcctcgtgaagcaggccgcctgggcctacctccagcccatgtccatttcccccagcggcccatcaggcccacacttcttccgccacttctacaacagattctcctnccccacccacaataacaacccttttaccacatgtctcagctttatataccgaaccctacaccgaatactccacgctatcccttgcttccttcatgtattcgaagaatagcacaataacacgtttttttttttttc

SEQ ID NO: 7053 - DNA, 311 bp, Glycine max
  Clone ID: PAT_MRT3847_106377C.1
cttttgcttaattagctagtggaaaaaccttcaaatctgatataattgttgctggttcacattctgcagaacactttcctgaaagggaggatcatgaaaaacccatactgatttatgccagattgagacaaccagtatatcctcaatataatgaggttcaggctcacatggaaacacatttgtttaaattgcctcttgatgatgtcgaaactcctaaaggttccatgtaggatcttaaaatttctcaatctaaaattgcactctccaaagacacagatgagaagaaccattctgcgttgggagctattggc

SEQ ID NO: 7054 - DNA, 205 bp, Glycine max
  Clone ID: PAT_MRT3847_106378C.1
cattggcaccacaaaaagtgtgtcccatattaccatctttcctaccaaattgaaagccctgtgctcctcacctcgttactatccgattatggttgcaaccatggaacccgacacttaaactgtcaactacaactgtgcggtctcagtgtttcctgcacaagcatgctaaatctgtggaggggaagcctgcatggcggatatgtac

SEQ ID NO: 7055 - DNA, 561 bp, Glycine max
  Clone ID: PAT_MRT3847_106379C.1
aaaatgggctatggtagatgcagagcatcctttgttttggacggtttcagtctaaagcccgtgccataccccgttctgctaatcttatcactgatccttctattcctcggcatttcatggtacttgtcgtatgaagaagtagttgaagccgctgaagaacaactggggtggatgctgttagccacaccagtggtgctaatactcgtagttcgttggttatcgtcagtggatacttcagaatggttcttctttaactcctcgccatgggagaggcgtaggagaacccaccacttcccatcagagggtagctccccttggggtgttgctgctttgatcctgcttgttctcgtgcttcttcattatcactccacttttcttgatgcctggtttgtttgattttatttcgtcctctgtttagagtttcttggtatctctatagttacgagctttgtttgtgtttattacttatttatagagaaagaacatagtaactttgatgcaagcctttgtgattatcgtagatatgtagatgattagattatgctgctctatgaatatgaa

SEQ ID NO: 7056 - DNA, 529 bp, Glycine max
  unsure (1)..(529): unsure at all n locations
  Clone ID: PAT_MRT3847_10637C.1
tcccacccgttgctacaggtccacaagacgacagaaggggccatgcgctacgactaagtaattccaggcttttctcataatgggggccaccaatgccatttgtgacacgcccgcagagattcccgagtggatccgcgtgttcaaggatggcaccgttgaacgcccacttgatcatgcgatcgtgccggctactatgaacactggactctcatccatagacataaccatcttacaccaccctgcaaatccaatttgtgcacgcatttaccttgcaaacatcaccaattcctagactaagatacttcccatgtacgtatactttcacggaggcggcttcttctttgaatccgatttcttcaaactcttcaatgaccatgttctcaagatggtccctcaagccaacattatagaggtttccgcagagtacagacttgcttcagaacacccttctcctgcagcttacgatgatngatgggacgctcttaatgggtcgcatccattctactaatgacaccaccccccacaacac

SEQ ID NO: 7057 - DNA, 519 bp, Glycine max
  Clone ID: PAT_MRT3847_106380C.1
atcgggggtttttttttttttttacgcgggctccacgggataaggcataaagtttttcattccaccggcaacgtcctaatttgaaagatatggttagacgcaaacccaattcatatgatactctacctgcgaatgcgacattcggggaaagctaaggcatagataacgggggggggaggtccctcttaagttgacggcatccacgtcccacagcactaagggggaaaggatgaagtatctttgtaaagtgaaaacacaaagcttccggccccaagctgctatgcctctttaatgagatcgaggggctaaccctctggggcaaacagcaaaaagggcgccccctccgagcatgggtaatgtgaccctacgcactggcagacagggggacttcctgtaacacagataccctcttgaaggatggattgatcactcgacaatattgcttaatagtgctcctacaaaggaataaccaattccattagtgataaatgtgctggattgaagagccttgcctgaccc

SEQ ID NO: 7058 - DNA, 710 bp, Glycine max
  Clone ID: PAT_MRT3847_106381C.1
aaaaaaaaaaattttttttttaaaaaaaaaaaaaaaaaaaaaaaaaaaaaaaaaaggaaaaaaaaaaaaaaaaaaaaaaaaggggggcgcggattaagagagaaaaggtgttttgtccctcggggctccccttttctgggggggggcccggtctgggggacccagttttccggggggggggtgggcaaggttatggccttttttggggccccccttttcccatttgcggggccggggtttcccccccccgcttggggaaacccccggggttccccaagctttcgccggggggggcccccccccttttcccaggtggtttaaatacagggggggccgccgcggggggccttccccaccattgggcccctgggttgggcccggggcccccccctttatgcggccttttaccccgggggggggggggggttccccccgggggccccgttccccttgccccccgccattccccccctgttttttgcgtgttttgccccttttttttccggccaggtggggcggggtttccccggcagggttttaaacggggggcgccctttggggggccccatttgtggggtggcgggcccccccccccccgggaacaccgggctctggggggggggggggccccccaggcggggggcccctccgcccctggtgtgagggcgggtgtttttgggccccctctgtggcggggggggggggacccc

SEQ ID NO: 7059 - DNA, 531 bp, Glycine max
  Clone ID: PAT_MRT3847_106382C.1
caattttctaatagagggttatggtgtgaggaggagtaactaatgaggagatgagttttgtttagtgacattgaagtattaagaatattggtgcattgtaataatttttaaggtgtatttatgtaggatgaactaaaaaatggtagaagcagagagttcacaaaatttagaaagaacctaagattctactaattggacaaatgatatatattcaaaactcaaatgaccttaaaaaagagagcctcagcattgtcttagcaaacttccacatcaagcaagttcatctcaaagcttttatgcagacaatagaattcaaaaattagacaatttgcttggaaaccttgttgctgcccttaaagtgcgatttgcagaagatccacaaattaatcgagtcttagaagctataggtcaacaggtatgaatttacaattcaacttattcaaagatttaactatgatatgatactttacaaagaaaaaacattattttaatttaggtacctacaaatggttctactagtaaaaatcatca

SEQ ID NO: 7060 - DNA, 893 bp, Glycine max
  Clone ID: PAT_MRT3847_106383C.1
gaatactctaacacattcatgtaatttatatatgtcaaacttgcttaaaaatacattgaacacatttgttcctcttgtttacatttactatacttcaaaagtcattattgatttccaatgcatataaacacagtagttactaatttacgttgagtcccaaggttcgctgcaacgtaattctaagagacataaactaatttgtctttttgtttggtatgtacagtataattacttaaaaactctttaaattaataattattaatttatcgataaattataactctctaaattaataaatttctctggtccagacattattaatttataaaattttatctgtagttgcagcttaaacacttttgtcggtagctttgcctaaggaggtgaagttcaacctgataagcggcttcttcattggtacaggtgcaggaggcccacttaacaatggtgctgttagctcagcaggctcaagctcctccaagctctcattggagcataaatgagttgaacaagtaatttccttagaaataactggctcttctggcactgcaggctttgagtctaaagattccatgttgtttttcatgttcccaccagaatctttgtcttgatttttatactgagtattatcttcaagctcttcaggttcttcttgaaaggcttgatgtgcatcatacggaccggacataatcttttcaatggctagcttttcttcttctttagaattagatgtatcagcagctgcaagtacggggttcacttgttggttgtttgtcactgatccattggtcccactatccccagaaggaatctcccctggagaattcagacaaggtttctcgctcttttgtcccccttctgtcgtcttgttcgtccgacgcgtgagtcgtccc

SEQ ID NO: 7061 - DNA, 363 bp, Glycine max
  Clone ID: PAT_MRT3847_106384C.1
ttcatatggagaagaaaccaagctaagccatggaaacgaatggggctttgacatttgcatttttccaatatttaacatactttattcattccaacatttataacaaacacacacacactacaattccaaaaaccaaaccatagcatgcaaagcaagccaaaaaagactgaccttcgtgttccaatcagaggatatagagagagaattatgagttggttgaataaaattcaacatgcttgctgtgacggtagcgccaattagtgaatctttttcaaggggaatcgttggagaaagggataaccattcttgaccatgaaattggacagcctcacaaaacttatgccacgttcctcacgagctttt

SEQ ID NO: 7062 - DNA, 572 bp, Glycine max
  Clone ID: PAT_MRT3847_106385C.1
tcttcttgtttccacatgctttttcgattcattcactttttattatttattattatatatttttttccatcttggtcccaacttttttcccttactccaaccaatcaatcgcttcttgaacccagacccacgtcgcaaatgacttaaagtttgatgctttcaagcatgagatagcattaatgggtttggtctgcattgaaaggaaggtgggtgagtgagagaaagttcgctccttttggggttcaggacttgtgggttttttttgcttttgctccactttccattgaagtgatgagtgatcatttggggtttaagtattattattattgctgcatcggttgctgctagtactagtactactccttatgtttcggagactcagatggtttgtgggtctaaatcagaagaattggtcaaccaaaaggttggtcaatgttgatcatcaacctggccctggaacgccaaataagttgttgcctgtgcttgatgctgtgcatgaggttgcaatttacattcataggttccataatcttgacctttttgaacaaggatggtacaaaatcaaggttacc

SEQ ID NO: 7063 - DNA, 3102 bp, Glycine max
  Clone ID: PAT_MRT3847_106386C.1
ctcggttctcccgcctatccaattcttgaatccgctaaccccaactccttcttccctcattttttcatttttcatttttcacacacaacacaacactttcgcatgttttgttgatgtttcctctctcgctctctgcaaacaataatggacacgccagataggagcaagatcaacacccctctttcccaatttgaggattcgcctgtgtttaagtatatcagtaatctatctcctatagagcccgttaaatctgttcacgttactcagacattcaactcatatagcttttcatcccctccatctgttttcacatcaccccatggcaactgtcacaaggaatccagattcctcaggaggcataaccttttggagacatccaaacctaaggtttcgtctgaagatgtaaataatgtttattcatgtgaagagactcctgcagattcagctcaagcatgtcatgaatcaagtgagcaacaggaaaatactgctcaaaagatttccgttgcagatgcctcaattgagccatgtaatgaaaataaaaacccaaatatctcaattgagcttccacaagtcttaaaatataatttgggtagcccagggtatgaacctctactctatggtgatgaggctaattctcttttggaattgcctggcaatggcaagccagcatcagatgttgcttctgttccagaaggctctgaaaaagattcaattgagggtgaaatgcatcttccgggattatgtcagattgaggaggcaaaagttgaagcccaagattgtggtgtggatagtttgattactgaagcctctgatcttgtaatgtttagtcccccggtgtcttttgctccattagctgtagatgtgaaggctgcaagaatgctttgggtagaaaggatggttctgctactgtaggcatagaaactgatccagaagaaacagaagcctctgacaagggtgtgtgagaaaaaacattacattgaagatcatccttctgaatcagcagctcatccagattctgctacggtgccaacaccattacggcttcccacttcattgcttccctttccatttgcataaaagggaaagcaaccaagatattttgttacaaccatctctggctctgcattttttgccatccaaaagcttgggaaaccaaaccctctttggtctcaagctaagcattttcaaactgacccagataaagaaataccggatattctgcaatgaaatagatctcctatcaataacaccaagtggggattcacggagatgtgttttgccaggaattggtttgcacttgaatgcacttgcaagcttaaaggattgcaaaaacataaaaattgacacattgtcatctggaaggcaacctaatctgctcagctctccttcatctgtgcaactctctccaagccaagaacatcaactatcattggtacctgcatcagtggaaagagatttggagccattggagaatgaggttcagcctggtgaagattgtacccagtcattggtattggttcagatggctggtgaagatttccagcagaatagtccgaaaaagaaaaggcgcaagttggaaccagctggggaaggggagtcttgcaagcgttgtaattgtaagaaatcaaaatgtttgaagctttattgtgagtgctttgctgctggagtctactgcatagaaccttgtgcatgccgcgattgcttcaataaacctattcatgttgagactgttcttcaaactcgccagcagattgagtctcgtaatccacttgcatttgctcctaaagtcatacgaagttctgattctgtatctgaaattggggatgaccttaacaaaactccagcctcagcacgacacaaaagaggatgtaattgcaagaaatcaagctgcctaaagaaatattgtgaatgctatcagggtggtgttggttgctccgtaagctgtagatgtgaaggatgcaagaacacatatggtagaaaggatggttctgttccttctggattagaagccgaacctgaagaagaaacagaagcatgcgaaaagggtgtggtggaaaatgcttcatggaaaactgaaactcagaataccgaagaccatcccgaccaatctcttgctacaacaccattaccgctttccagatcattgcttccattatccttttcatcaaagggtaagccaccaagatcttttgttactaccatctccagttctggattgtttgtgagccaaaagcttgggaaatcaaatgctccgcggtctcaacatcaacccaaatgtgtaaagcctttgcaaactgttccagatgatgactctcctgtcacctgcatcaaaacttcttctcccaacggcaagaggatctcctctcctaattgtgacgtgggatcatcacctactactcgcagaggtgggaggaagttgatattacaatctatctcttcatttccttctctcacccctcaccattagaatgaagatcttcttcttcggcttaagttagcctacccccacccctcttcccttggttcacgttttcagtttgttgcagttggagctgtatgcttagggtgaatgtacatgattgagtttcgttttactttcgtaatatgtttgttccgttcatttcataatgtacaacttcagttcagttgtataatatctatcttaactgatggttatcatcactcctaagagtacttggagaatgatttgttatcaagtccccattagtcatgttggactattcctttttaatgtgttacatgaagtaaatgtggttggtgctgtggaatttaatgatgctacgttggcagtgaaatcgatcaaattaagcatataatagcttttattaaaatttcaattgtattggtaaatgttgctccttcaggggttttttaatcacatgcttttagtttgttgctttaggtttatgtaaattcagttaagttttactttggtaataatatgttgcattcctttcataatgtactagttaagtaatagttataatcattaccgggattaatctttacgtttttctgttatgattttggacatttctttataaataagttcctgatggaacccgttggaggaattatctt

SEQ ID NO: 7064 - DNA, 790 bp, Glycine max
  Clone ID: PAT_MRT3847_106387C.1
ccacgcgtccgtagaacgggtggtagggtcggggccggaaactcgcttctcccgcctctccaattcttgaatccgctgaaacagtaaagtaaccaaaccacaacccttccttccctcattttcatttttcacacacagcacaacactctcgcatgttgttatgttgatgtttcctctctcgctctctgcaaacaacaatggacacgccagataggagcaagatcaacacccctctttcccaatttgaggattcgcctgtatttaactatatcagtaatctatctcctatagagcccgttaaatcagttcaccttactcatacattcaactcatatagcttttcatcacctccatcggttttcacatcaccccatggcaactgtcacaaggaatccagattcctcaagaggcataaccttttggagacatccaaacctaaggtttggtctgaagatgtaaatagtgtttattcatctgaagagactcttgcagattcaactcaagcatgtcatgaatcaagtgagcaacaggaaaatactgctcaaaagatttccattggagatgcctcaattgagccatgtaacgaaaacccaaatatctcaattgagcttccacaagtcttaaaatgtaatttgggtagccctgggtatgaacctctactctgctgtgatgaggctaactctcttttggaatacccggcatggcaagccagcatcagatgttgcttatgttccagaaggctctgaaaagattcaattgagggtgagatgcatcttctggggttatgtca

SEQ ID NO: 7065 - DNA, 361 bp, Glycine max
  Clone ID: PAT_MRT3847_106388C.1
aaaaactgaacataaactaataaaatgaaatgatattaacaaccaacaagcactaaaaaggttgggctatatataaaaacaaaaagataaatgaagccatgctcgttctgatggctcaatacttcattcacttattgacgacgtcaatttttaacattattgccccaaattgtcttttcacttagcatatgctttaaacacctttattcttgaaaaatgccttgtgctcataacttacacgtggtacagactgatccctttatcccagcttacgttgtttgaaaaaggctatcacaagatatactattgtcttaccttccaatgcaaagatcgaaagggttcacgctctgtactggacatt

SEQ ID NO: 7066 - DNA, 279 bp, Glycine max
  Clone ID: PAT_MRT3847_106389C.1
ctcagttctctttagacaccagtgtctgaagttccctgtgattctatggcttcagtgtgaagaactgtggagcccagcctgccctgcacttcaggaccctgtcccttcactgcccgctttcccttccacattcagccttgctggtccagcctgggggtggagggtggggacatctgcatcctgtccccctgtgctaccctgagcttcagcccctcacttccaccctgagaataagaatctgagtgtgaattgattgttcacatccttgacacaagtgta

SEQ ID NO: 7067 - DNA, 477 bp, Glycine max
  Clone ID: PAT_MRT3847_10638C.1
gggggcaagcttcaacatttatttatgctaccaaaagccatataataacatcaaaacaattgaaaaggtatggtacagggacaaatgagcactaccctagcccgtatactggaggggcacactccacagattttttttaaaggacaaaggtatagcttggatatcaacatttcagggaaacctccaatgcccttgcttggcctcaggcagcatatggaagcttgccaatctcctctggacactccaccataaccagtaaaaaaataatgccaaatatgagcttttttttagcttaggaaaatctagcctgacaatagtagaataataccatacaaaaacccaaactaacaaaatataattaaaccctttctccattggctgatctaagcatttcaccttgggcaacaaaggggctacaaggtactaaaatcagacaacagaaaagcataccttgatccttggcacatttgcttaaac

SEQ ID NO: 7068 - DNA, 338 bp, Glycine max
  Clone ID: PAT_MRT3847_106390C.1
ggcttgaagaatgcttaaaggtctggaaaggacaggtatacaacatgaaggtgtcgccaacttgcttgaccatatacgaagggctatcattcttattcatagaatttcccactaccacgctgacctaagttgcaaccttgatccctatgcttgatacgcaactaaatacttaataattccctatctcacttacccaagctttgacccttggttatcacatcgacactatgtatcatcgatggctatatactagatccaccacaagttccattacctatgcaatctggcactcattgccgaatcctgcgatggcatatccaaccagctgttgcacttca

SEQ ID NO: 7069 - DNA, 211 bp, Glycine max
  Clone ID: PAT_MRT3847_106391C.1
acctacaacgcctagaatccacacagttctactctacgctctataccctttatctcactctctccatctatcgtggctctgcccaatcagcaaacggtggaggaccctagcaataaactcgctattgccggtgaccgccgcacaggaacgacaacgttcttgaaaaggcatcgtacccgagaatcctataaaaaataccaaccgaccattg

SEQ ID NO: 7070 - DNA, 628 bp, Glycine max
  Clone ID: PAT_MRT3847_106392C.1
cccacgcgttcgtagtttcaaaaaaaaaaaaaaaaaaaaaaaaaaaaaaaaaaaaaaaaaaaaaaaaaaaaaaaaaaaaaaaaaaaaaaaaaaaaaaaaaaaaaaaaaaaaaaaaaaaaaaaaaaaaaaaaaaaataaaaaaaaaaaaaaatttaaaaaaaaaaaaaatgggggggccctttttaaaaaataaattttattttccgggtgttggaaaaaaaattttttttttttggggcccctaaaataaattacctgggccgttttttaaaaatttcgattttgaaaaaccttgggaatacccaatttaaatcctttgaaaaaaaattcctttttccgaaattggtaaaaagaaaaaaggccccccccataacccttttcaaaaaattcgccaactcttaaatgaaaaaagaacccccccttatacggtctttttaacccggggggtttgggttttacccccaagagtaccctttaatttgggatacacctaaggcccgttttttttatatttttcccttctttttttaaaaattttaggcggtttttcccccgaaaatttttataatagggggccttttttttaagggttccgaattaagagtttttataccggaccctttttctc

SEQ ID NO: 7071 - DNA, 310 bp, Glycine max
  unsure (1)..(310): unsure at all n locations
  Clone ID: PAT_MRT3847_106393C.1
cgcangcacgcntacgtaagctcggaattcggctcganctntnttgcaattgnatnnnantntcgaccacganatanagttcgnnntcanngtatcatntttgtactatancnatcttantccntaatncgancgacatcttncaaaattngngngtgtaatnctnaatccnntatantcgncnncncgtncgtttctgtcnctnnccgtancntctntctacnatngnnntcngngatcnncaannncaagggncgttccnggccnanngtncagatatncncgtnantgtnattctggatgtancggn

SEQ ID NO: 7072 - DNA, 485 bp, Glycine max
  Clone ID: PAT_MRT3847_106394C.1
ggattagatccaggtccaaagttggaagtgctttgttttgaaggtgaagcttaagctcaaggagtggcataaggaggtttatgggaatttatcctttgggataaggactgtggtagatgagttagatgacgtggaggtaagactttgtgaagagcaaccagttgattgtgatcagaggaaacttctatcctctgagttttggaggtgtgcctgaattagggagagtatgctggcccaaaaatccagggctaagtggatcaaagagggtaataccatctcacattttttccatgcttccttgaaggacaggtacataaagaattatctagtgaggctacatactgagaacgggggtgaggtaaaggatgttgttgttcatcactttcagaggattttcatggaacctaacttggagcgtcccttcttatcaggtattcagtctaatcaggtgtcatcttgtgattgtgtttctctaactgttttga

SEQ ID NO: 7073 - DNA, 1739 bp, Glycine max
  Clone ID: PAT_MRT3847_106395C.1
acaaagccccgagccggctgcggtaagaggacagaaggggaggaagctggaacatagtacaaactcacctccaagtccatgctttttgttcttgcaagagtaacagagaggaggtggacaaacaaagctataatttttagaggggttaccaccctcaccttctgccaaaccaaacccacccttttctctctttaagctactattgtgctgagagctgaagaggagatggggggtggaaatcaagaggcagtgaagcagctgcagaccctgatggaaaatgtggatgatgagcagctgaagaacacattccagattatgcaccagggttatcaaactgaaacgttaatacggtttctcaaagctagggactggaatattgccaaagcccataaaatgttaattgattgtttgaactggagggtggaaaatgagattgacaatgttttaaggaagcctatccccatggatttgtacagagccatacgggattctcaactcataggaatgtctggttactcaaaggagggtctacctgtcattgctgttggtgttggtctcagtacatatgataaagcatctgacaaatactatatacaatcacacatccaactaaatgaatatagggatcaagtgatcttgccaacagctacaaggaaacatggacgatacattggcacctgtgtgaaagtcttggatatgactggtttaaaattttcagcattgaatcaactgaggttgttgactgctatatctacaatagatgacttgaactatccggaaaagacagacacatactatattgttaatgtgccatatgtattctcagcgtgctggaaggttgtgaagcctcttttgcaagaaagaacaaggagaaaaatccaggtgctgcaaggttgtgggaaggaggaattactgaaggtaatggactatgcatccctcccacacttctgcagaaaagaagattccaagtcttccaaacatcatgcattaggaaacattggaaattgtttctccttcaatcacgccttccatcaacaactctacaatcacatcaagcaacaatccatcattgtggagtcaatttcaccaatcagacaagggtccttctatgtagacataccagagccagaccctgatgatgccaaaatagccaagaccatagaaactgagttccacaaattggagaatcagaagaatggctttaccaactcactaaatggtcttagagttaatggccattgaaagctatgctactaaagctactagtaactgtgttttttggcctgtcctgagccacttttatttgttgataactatatgatccctttctgattaggagggttttgcttgtgaggtcaaacttatagccggttattagatgtaatattgtaatgtttacatcaactccatgcagaattcttcccactctaatttctacaaccaccttgagatgataagcatatgatatatgttcaatgtagaaaagatggcaccatgctacaattcatatggctgtctaggtacattaattgttgttggcatcattatttgtgccccgttccctgcttgtccttcatgacggaaacacctttttatctcgattgttttaattccattttctttcgtgttttagctaggtcttttgatctctaatatgaatctaaagttttatattcatcctcccctttggttctttcctttcgtaccttaacctatgtggatgatgttattattataag

SEQ ID NO: 7074 - DNA, 391 bp, Glycine max
  Clone ID: PAT_MRT3847_106396C.1
aacgggaccaacataatttaccttggctttatagtgataaacaaagatggggctaaaatggcggtccctaggcgaaaataggatacatgtttttttaaaacggggataaaatgaacatggaatgcggaggttaaccgcttgcgaggctgctgcaacaggtggacctcccttggcccaggattttccatacgggggatgttaaaaccggggtcttctattcgaggacccttgaggcaattgagttccggccttaaggtgactggggcctttcaggtaaggaagctggtgaccattgctgccagaactcagacgttttttaagcagaaacccccacggggcgacctctaacaagaagctccgcatgggattggctcatggtgattacacgctg

SEQ ID NO: 7075 - DNA, 1126 bp, Glycine max
  Clone ID: PAT_MRT3847_106397C.1
cgcttttgttcttgcagagtaagagagaggaggtggacaaataaagctataatttttagaggggttaccaccctcaccttctgccaaaccaaacccacccttttctgtcttcaagctactatcgataaatcagtttaaatttttgtggggtagtaataattgtaccatattgaggtaccttaaaaaggatctggggtttgcatattttccttgcaaatctctcagctactttggcttggctttctgaattttggtttttcagtgctgagagctgaacaagaagagggggggtggaaatcaagaggcagtcaagcagctgcagaccctgatggaaaatgtggatgatgagcagctgaagaacacattccagattatgcaccagggttatcaaactgaaacgttaatacggtttctcaaagctagggactggaatattgccaaagcccataaaatgttaattgattgtttgaactggagggtggaaaatgagattgacaatgttttaaggaagcctatccctacggatttgtacaaagccatacgggattctcaacttataggaatgtctggttactcaaaggaggatctacctgtcattgctgttggtgttgggctcagtacatatgataaagcatctgacaaatactatatacaatcacacatccaactgaatgaatatagggatcgagtgatcttgccaacagctacaaggaaacatggacgatacattggcacctgtgttaaagtgttggatatgtctggtttaaaattttctgcattgaatcaattgaggttgttgactgctatatctacaatagatgacttgaactatccggaaaagacagacacatactatattgttaatgcaccatatgtattctcagcgtgttggaaggttgtgaagcctcttttgcaagaaagaaccaggagaaaaatccaggtgctgcaaggttgtgggaaggaggaattactaagggtaaatgtcaacattattttcaacaatctacttttagctatcacaatatcaccaatgccatatgtatgagttcgcctgttggttctcttgactaattgcagcagttatattttacttcagatctaggtctaacccaatcttctttcactt

SEQ ID NO: 7076 - DNA, 474 bp, Glycine max
  Clone ID: PAT_MRT3847_106398C.1
acgaggccccttgagagtatatcatatcatagcaccaaataaaccttgatcagcttcattcaacatggacacaagactcaagtctgtctctttgctcactctttttcttcttgcttccttgtttgcttcttctcttcctgtgtcagaagcacggccactgtttagttcttcaccaagtaagaatggtattagtattatcagagaggtgaatggagtcttcagaacattgaagagctctggtccaagccctggtgttgggcacagacttaaaaatcttcaaaatcttggagggatgaaagactctggtcctagtccagataaaggacactagcaaaatctccaacaacctgccataaagtaccaattctttgcattagactactattgttattctcattttttaacttgtaacatagtttcagaagtattgttattaagagatgacagagtgcatatgaaattagagtgttagac

SEQ ID NO: 7077 - DNA, 257 bp, Glycine max
  Clone ID: PAT_MRT3847_106399C.1
gtgacttctcctggaatatccacctcgtgtgattctctgggtataatatcatttttgtcttttatattttaaacaacatatactaaaatataaaagacaaaaatgatattatagtatatgttgtttaaaataaataaatatgtaatccaggttttaatttccaaagttgcattgttatcgatgaagactagaattcttcgagctgtaatggtttcgatctgaatttgttatgcattgctgtatgtactcttgtaaaa

SEQ ID NO: 7078 - DNA, 859 bp, Glycine max
  Clone ID: PAT_MRT3847_10639C.1
gttcagcgttcacccagagaagcagcagaaggaaaaagtgactgcagagaggtatcgaaaaaagtaactcggaaatagtttcactctgatcaaaatcaaactgaggaatcgaggaaggaattagggttagggtaaggattgagaaggcatataggagaagaagtagtagaagaagaagtcaattcaaaatgccggaagaggatttggtggacatcaaatttaggttgtacgatggttctgatatcggacccttcaggtactcctccgctgccaccgtcgatatgcttaagcaaaggattgtctccgattggcccaaaggtaaaaccgtcgtgccaaagtcagctaatgaagtgaaattgattagttctggtaaaatcttggaaaacaataagactgttggtcaatgtaaagtaccatttggtgagactccagggggtgttataataatgcttgttgttgtacagccatctctagcaaaaactaaagctgataagaaggttgatgattcgccaaagaaggttgtctgttcttgttccatattgtgaagagagtttgtgagttggatatgcgtatcctcatacatcaatcactcatgaactgtagaaatcatctgcctgaacaaacccctatttcagcattcctgtgtaaagtacgtatacgagcaattatatacttatagaaaagtttgtgttaatggtgacttccgaagatgctgtcattcttttattacaaggtctacagagttgatgacattgtaaccattgattgctagtgtcgtgcatcaagttgtcgttttgcatttgcatttgcaatgacgtgcgtgatatctaaaaaaaaaaaaaaaaaaaaaaaaaaaaaa

SEQ ID NO: 7079 - DNA, 371 bp, Glycine max
  Clone ID: PAT_MRT3847_1063C.1
gggctacctaaagattttatccttttaaatccctttaatttaaaatttctttttttttttggtttctctatgagacatttctaaaatattttatattttttacttttttatctttaatatatttatcaaatttcctgtttattctttttaaataaattatggttttacttttttcaggtattttactctttttaataattttaataactaatttcatcgaatatctataatttaataagtgaatgctttcatttagttttctaagttttttagtagtttcattttttgaaacactactttttaaaatggcaagttctattttctaaccttaatgttctttcattttgaacctcaatatatttatctaattt

SEQ ID NO: 7080 - DNA, 356 bp, Glycine max
  Clone ID: PAT_MRT3847_106400C.1
tgttgcgcgtcggacacagaatggcacacaggaagggctgatcggatgggtgcaaggctttctataatgcatgctatgaattgggaactgattcgtgcacgtatatttgcatggcaccggctacagtaccgtaggcactaaaatgggggctgataggttagcagaatgccaaaagaatgaccaacttagtgtgcttcgttatatgatatgtctctatatagcaggcattgctgcattcatagattgatactcactacgtgacatgctagagctcactgggtagcgctcagaatgggctactacctggatggctcactatatggtagaagaagttgtacggtatggcttgcagagac

SEQ ID NO: 7081 - DNA, 2268 bp, Glycine max
  Clone ID: PAT_MRT3847_106401C.1
ggctcgagagcccttcctacctcttctagctgcacaagcctttctctttcccagaatgatttttttccatttcttgttattaattattactccttttggactttctatataatgcttttctatatatgtttccaataataccacattactgtgccaggaaaagaagccagcagtgagcacctatagtactctcaccttctctcaatcatttttcattcatttgtcaacttttatagacctcgattagtgtatgcaaatttctttaggacatgtggcctacattagtggctaataagatattcaagaagagacttggaagcagcaattttatagcggattatcctagttataaagaacccttgctgggtattgtagacattgatcagaactcaaaaaccattcttaatgatcacaaggactcacacaaatacaacgcgtctggggccccctgatcctagtacgcgggaccgagactttgtgttgcccaagtagggtgtgaacccagctaagtgctggggccccccacttgagggcccctgcttcttttgctagcgtttgggtggatttgtcccttctggccggtttcccacgcctctgtgtccgtgcaggcggccccctggcgggtcgcctgtaggttgtggcttcatgggctgcttaggaaacaagccatctagcctcggggcgcggagacggggttggggggcgccgcgacgctgctgttgctgttgctccttcccgcacatgttgtcctagtgcccccttgctcgatgggccctgctcccttcggcaccagggccgaaaagagaggagcacccagcatggtgtgatcgattagtattgtgccgggacggtctgcttcagcgttggtatttgttagtacatggaacgtaggtgggattgcaccggatgaagatttgaatatagatgatttgttggagacatgcaacaactcttgtgacatctatatactagggtttcaagaaatagtgcctctaaaagcatcaaatgtattggggtccgaaaacaatgagatttctatgaaatggaattccataatcagggaagccttgaacaagaaaataacacatcaaagggacaaagatgctaaaaaacaggagctaaagaataattttcccaataagaaagaaaatccagctaagtgctgtgatgccccacatgatttccaatgtatcattagcaagcaaatggttggattattcatatctgtgtggattagaagagatctttgtccattcattcggcatccaagcgtgtcatgtgtaggttgtgggataatgggctgcttaggaaacaagggttctatatcagtgagatttcagttacatgaaaccagcttctgctttgtgtgcagccatctagcttcagggggcagagaaggggatgagaagcacaggaactctaatgttgctgaaattttttctcggacaagttttcctagaggccctttgcttgatttgcctagaaccattcttgatcatgatcatgtaatattgcttggagatctaaattacagaatttctctaccagaagaaaccacacgcttgcttgttgaaaaaagagactgggattctttattagcaaatgatcagctaataatggagctaatgagtggaaacatgttaagaggatggcacgaaggagcaattaaatttgcacctacctacaaatattgtccaaattcagacatttactatggatgctgctatcatggcaaaaaggcagaaaagagaagagcaccagcatggtgtgatcgaatagtatggtgcggtgagggtctaaagcaacttcagtacactagaattgaatcaaaactatcagatcataggcctgttaaggcaatgtttatagcagaagtcagggtttttccagagctgatgaaaaacttgcaaagcttgttcctatcagaaagatacgagcaaattaaaactccctttgaagtttccaccactgatgattttgtaaatagaaaacgatcaagcttccgattgtgaattttttgtgtgattcaagctaggctttaaatcgcgattgtgatcaatgttgcaattttatcacaatcttttttattggagaaaaattgcataaaaatgtgattgatgcgatcgttattacaatcagagacttcaacaaccgtgacattgtcatcaatgttgtggttgcacatggtttttttaaaaaactgtgatatatgtacataaatgtttaattttacatttgaaaaaaaaaactagaaattcagaggaagga

SEQ ID NO: 7082 - DNA, 491 bp, Glycine max
  unsure (1)..(491): unsure at all n locations
  Clone ID: PAT_MRT3847_106402C.1
ttgccgctctacatgtgtagcagtgccgcctgcttggggggggggggggggggctgtagccaaggcttcgccgcctgggagggtacagcggagggagagaagagagacagagagagagagatataaactgctagcacgacaacagtagctacacagtgaaggaggcaacgcctcttctcgcacgtgtactgagttgaacatgaagcccttaagaaagaaagaaagagaaaataggaaggcctggagggataagagggtggactagacaaagccaaaaggacaaaaaagagagaccgccacaaacggcgtagaggcacaaagacgcaaaagcaaacaaccagtaatcctgccaccccgcaatctttatacgtggtaaccgcgcactccggtcaccacgccgcaaaccaggacccgcccaacccgtcgccacgcgcacgnaccggcgtggcaagcgcacacacggggtggaacaaccaattagtcagcaaggt

SEQ ID NO: 7083 - DNA, 374 bp, Glycine max
  Clone ID: PAT_MRT3847_106403C.1
gtcataatgaagaactgtgacctctggttgttgtggctagaagcatataccaagggataatagtacccgttttaaagagaatggcacatagattgtagtttttagagagcgacaccttgagggaatgaaaagctctctgtggggtggacacagaattggtgaaaaaccttatatccgactctaaattcatagggagaacactatcctatctcttaaacgactgcttgtgaaacataaactccgtgcgcttctggcacagtttgatgtccaataggaacactaggccagggatgaacctgatgagttctttcactctgctatctggcataggatacttccgagcgaccttcgtattcagctgctttcggtgagtc

SEQ ID NO: 7084 - DNA, 802 bp, Glycine max
  unsure (1)..(802): unsure at all n locations
  Clone ID: PAT_MRT3847_106404C.1
gtgacattcctctctcgcccaaacctctcacactcccaaacctcttgaggcttagcctctcgtcactgttggcactgtcatcatgtcgaaactactctcaagccctcgcctctcatcatcgttgatgttgagtttccttcagcttggatctctgacaatccacctaaaatggcgatgtatagcgggatctgcaagcatggagggcgagaacgcgagcaaggtgaccgagttggtgaacgagatagccaacatctccgagtacatgcctccaatgaagaagcagcattgcaacttggcgtagaggctgaagcttctgatcccaatgttcaaggagattagggatatgaacaaggatgcacttcctgaggacacttccaactcagtcctcgccttcaaagaagctctccaatctgcgagggaactcctcagattcaaaagcgattattattattggtgtttttttttctgctttttattgaactcattaccaaaagtagttttagcagtaatgattttgaagctacatacactggattattttttattttttaagatttttttgtatttttttataaatttattttgggtttttgaactgttttttggttttttgcctcttttatatgatgattgntgatcgcattgagaaagaaaatagccatgcaaatggctgaagaacagtatctgctaaagataagggatccatatactgcttttacanaaccgtgtaaaggagcttaactatggaaactcttatttctttctgggtatgacttttgaaatcagttaactcatcggctga

SEQ ID NO: 7085 - DNA, 894 bp, Glycine max
  Clone ID: PAT_MRT3847_106405C.1
gctgcgagaagacgacagaagggcccgtttcatgatgcttgaattgcgttttgaagctgcaatgccatgacatgagaacatcaatgcccttttttttcttcttattttgtccaaaaatataatatacgtgtctactttgtaccatgtggtacttttatttatggcacatgataaaccctcgatcttcaaaagtactaaatcaatttgaattctgcacggcttgatcgttaactatgtgaaatcactgccaatatgccttttacaaagtgttgatgctcaactcattttcatcagtttgatggcaatgaaatgtatagaatatatataaaccccagtggtaatatctttgtttctttcattcgcatatttatcctaagagggtgtttcggacagattacttatgtccgttttcattatttttgaggaacatttgtttaaaaattattgttatgtttggaatatcaattgaaatttgataaaaaaagttttatttaaaaagaaagtttttcaataatctatatagtttacacacacacaattgtccctttttagtttgatttgaaagaatcaaaatacaaaagccaaatgaaattcttcataattcaaaggttatatatacttttgttccctatatttcctattttttgttttagttattataaactattttttgaatggtccttgtaaaaattatttttatattttagtcttaatttattattttgttttaaaccttgtaatatatctaaatttttagttccttgaatattttatttattttgagttagtccggacaaaaatgcatggtagggactaaacaaattattcacatgttataagggcaaaacggaaaaaatgactattttacaaggactaaagtaaaatgccaagacc

SEQ ID NO: 7086 - DNA, 322 bp, Glycine max
  Clone ID: PAT_MRT3847_106406C.1
ggggccttcaaaattaaaaaattggacttttttttttttaaggaacaacaacattttttcaacattcctaatttttttttttttccccaatcccttttcactggcattcaacaagcaagataaatagttcttcggcagttattgcccccccctccattgctctttcaagtacagggaggcccccggcatttttaactggcgggcttgcccccctttttaataaaaactttgccaattgatttttcccacttgtaatgcaatggggcaagggagttctttcatgatagtcccacatgtttacctcagcccccaattggggcca

SEQ ID NO: 7087 - DNA, 504 bp, Glycine max
  Clone ID: PAT_MRT3847_106407C.1
tttacaagcactctaccagagacacacacacgcgtatattgagagagagagagagagaagaacaagaaggaagcccaggacgaagaaggcggagatcttgagagatcaggtcgcaacttacttgcagctcccgagaacctgatcttctttcaccgccaaagtgaggccttttccttttcaaaatggggatacgcgtattgggccaaaagatcatggggcgagaagttacaggaatgcacggtgtggacaacaagccaaatggcgtaataccagcttcaaatggcagttctaatgatagagtgtgcattcctcctaaaaggacagcaactgaggttcatgcgatggatcacctaggtaatgaatgtaccaaagctaactcttttgttgcaaaaagccaatagaagatggatggtttgagtgccaaagcaacacactgtaatactgacttgtctgaggaggagattgagatatctgaagtgcagaaatgggtgacagtccaaagtt

SEQ ID NO: 7088 - DNA, 983 bp, Glycine max
  Clone ID: PAT_MRT3847_106408C.1
gtgacatttcggttcctacggccctgattggagctcgcgtttgttccttcccctcctcatattttccaataccatttttcactgttaacaccaacacacccaaaatctcaatcttgttcagatccctcataccccttttttcattcaaactaagggggtgacaagatgagtgaggtcttcgaagggtacgagcgccagtactgtgagctctctgctaatctctctcgcaaatgcagttctgcctctcttgtttctgaccaagaacagcagcagcagaagttgtctgagattaaagcgggactagatgatgctgatgttctgattcggaaaatggaccttgaggcgagaagtttgcagccaagtgtaaaagcaatgcttcttgcaaagttgagggaatacaaatctgatctaaccaatttgaaaaaggaatttaaaaggctaacatcacctaatgctgatgaggctgcccgtgaagaattgttggagactggaatggcaaatacacatttggcttctgctgatcagagagaacgattaactatgtccgtggagagattaaaccagtcgagtgagaggattagggacagccacagaaccttgctggagactgaagaacttggaatcaacatcatccaagatttgcacagtcagagagagactctactgaactctcataaaaggcttcatgggatagatgatgctattgacaagagtaagaaggttttaactaccatgtcacggagaataactagaaacaaatggatcgttgcatctgtgattggagctcttgtttttgctatagttattattctcttttacaagctatctcattagctaatatacacaagatacaacaggatggaagcaatgtttaatgcttttatgtgcttggtttgtatataggaatcatatgacttatgtgaccatgcaattatttccccattgtattggtaacttttcgatgatacattgctctttacgct

SEQ ID NO: 7089 - DNA, 319 bp, Glycine max
  Clone ID: PAT_MRT3847_106409C.1
tctactttgagtcttcttgatccttctttttctccttgaactcaaacatttcacgtgaggtttttatgctagattggtcgccaaatccatttgggatgaaggtcaagatttcactttcttaaaaaggtatcaaatattaatacaaagaataggacttgaggaacaagagtcctcttctcctccaaatgaacccggttcacaagaagattccggttctcatccacaatggcaaacccatttgttaattccctcattgctgttcagtacattgaagaggtttggaatgacagaaatcccttgttgccttctgacccttacc

SEQ ID NO: 7090 - DNA, 726 bp, Glycine max
  Clone ID: PAT_MRT3847_10640C.1
cccacgcgtccgcccacgcgtccgtacggctgcgagaagacgacagaaggggagagaagcagcagaaggaaaaagtgactgcacagaggtatcgaaaaaagtaactcggaaatagtttcactctgatcaaaatcaaactgaggtagtgttcaatttctctctcatcgctataatagatcatcgaattacagatctttgaagattccatttagtgtcgaataacaacggaatcaaatcaaatcaaatcaaatcaatctcgattggaattttaggaatcgaggaaggaattagggttagggtaaggattgagaaggcatataggagaagaagtagtagaagaagaagtcaattcaaaatgccggaagaggatttggtggacatcaaatttaggttgtacgatggttctgatatcggacccttcaggtactcctccgctgccaccgtcgatatgcttaagcaaaggattgtctccgattggcccaaaggtaaaaccgtcgtgccaaagtcagctaatgaagtgaaattgattagttctggtaaaatcttggaaaacaataagactgttggtcaatgtaaagtaccatttggtgagaactccagggggtgttataataatgcttgttgttgtacagccatctctagcaaaaactaaagctgtgtataggtttgattgtcaagccaaatatcaatgtagcttaccattactgcattgcttcatatggggaa

SEQ ID NO: 7091 - DNA, 404 bp, Glycine max
  Clone ID: PAT_MRT3847_106410C.1
ctcgagccgctcgagcctttctttttaaaaataccgaaggatcatagggagttcatcaaaccgacaggagggatggagcattctcttcaacatttcacattcagacttggaaacatttatccatattacctttattcaccaccattttacaaacaaacataacttaaaccttttttttatgggcaatattcattgatttttttaaacattataaccattcaccgaaagggattctgaatttgattttaaccctcccaaaattcaaaaagcacttcattccatagatactttaaattcttatattaattaaagaatttcaaggaaaaaattgcctttattgcaaataaattctgtttaataactaggtgccaatcttctgacaagcctttaacataccacccaac

SEQ ID NO: 7092 - DNA, 239 bp, Glycine max
  Clone ID: PAT_MRT3847_106411C.1
accacgcgttcgctacgaggtctctccaccaccatctccattactcctatgcgtccaagagggcaatcttcctctggctctctgcaactaccgcccttgtcctcatcctccaccttttccgcgcctccctctccactcactatttggccattgtcaccaactgggtcgacaccaacagcgccccttcttaatccgaatctcaccggcataccttacaacaacaacgacaactacggaaa

SEQ ID NO: 7093 - DNA, 172 bp, Glycine max
  Clone ID: PAT_MRT3847_106412C.1
cgggaacggaaccgggggcgtatctatttatgggaccaagttcgccgacgataacttggagaagaagcgcgccgggcccgacgtcgtctccatggcgaacgccgggccgggaacctacggaagtaagaagttgatttgcacgcgtaaaacgaagtggggcgacggacagcaa

SEQ ID NO: 7094 - DNA, 555 bp, Glycine max
  Clone ID: PAT_MRT3847_106413C.1
atgagtcatcattcatctagtgttaatggtgagggtactagtcacaagaaccctctatctagaatattagatgagttgagttccctcaatttatggaaagaaaaactagaaagaaaagaaaaaggaaaagagagggtagaaattagtcaagatgagaggaaacaagtaagggaagaagaaagaaggaaaatactaaaagagttaagaaatgaaaaggatgcctcctatagtagtcatgactcttgcaagagcctaagtgaagaacttcatgactattatgaaggaaggcatagggaaagaaggattcatggggatcctccagtagagtattggaatgacttgaaaaatgctcttaggaagaggcacatcccctccaactataaaagggagcttatgcacaagctccaaaggtttagacaagggagtatgagtgttgaagagtataggcaacaaatggaactactccttttgagagctgggcatagggaggaggaaagaacaagtattgataggttccttagtggactaatatgggaagtgagggaacaaggttga

SEQ ID NO: 7095 - DNA, 715 bp, Glycine max
  unsure (1)..(715): unsure at all n locations
  Clone ID: PAT_MRT3847_106414C.1
gatcagcaaaattataatttgtattaataactgtgagtaccagaggtactaaatatacaaggtagaaagcagcagactagcagaaccataggtcctacgaatcaggtgccaatctaaagggaatacaataaccctgcactgctaccctattaaaaaaatgctgttgataaattgctagaccaataattgtagggctgtgcaaagcctttctccagctgtctaaaccaagaccaaactaggaaaatagcatcatccattagcttggatccattaaaagccttgtttaggaacacaatccggtttcgatgccgccagattgaccaggtcaacgccacccaccaacacttccacctagcctgcagatgctttcctttggagataagcgtgtgctgcatgtaattctgcctaggaatgggggagaatactcccacagttttggtcaaagctagggattcccaccataaggggagaattcttggacaattaaaaaacaggtgggaggcttcctcctcctgtctattgcagaaggggcacatcaaattgttcagctgaacccgtcttctccacaaattccctttagttgggattctctctttgatcaatcgccaagcaaatgttgttgcttttaaagggattntgagctgccatagggtcctttaaagcctcatccagtcctgatcagctgctccttctagtagcatacggtatgcgctcc

SEQ ID NO: 7096 - DNA, 462 bp, Glycine max
  unsure (1)..(462): unsure at all n locations
  Clone ID: PAT_MRT3847_106415C.1
gtttgagagagtacaagaaatactaaaaaaatgaatgtgttcattatattattttccatcatttcaatggctgattcattggacaacggactcgcaagaacccctccgatgggttggatgccgtggaccaaattctattgtcaaaccgagtgggccaaacacccattcagttgcatcaatgaacaactttatatggacatggccgatcggctggcagaggacggattccgcgaggtcggctaccaatttgtgcacatcgacgactgttgggcggaaaaggcgcgggactcacagggccgaattgtggcagatccgactcggttcccatccggaattcgcaatttgtccgactatatgcacaaccgtggactgaaattgggcatttacggngacattggcacggagacgtgcgaaaattacccgggcagttaccagcactatgacatcgacgcgcaaactttt

SEQ ID NO: 7097 - DNA, 457 bp, Glycine max
  Clone ID: PAT_MRT3847_106416C.1
ggcaaccttccctgggaaaaataaaacaaaaaaagggggggcccatatataccggggcaaaagcaaacataaaaaaacaaaaaaggagcccttcttattcaaaaaggaaaaaaaggaaaaacaaaaacccgacggaccgcccccctatccacccaaagggcccccaaaagggggtttcgcaaaccctcctttgattctgggccccgtttcggcaaacccttttttcgaggggaaacaaaggggcttcccaaactttggggttttcctttttccccgggacccaaaaactttaacccccctatcccccgccgaaaacggggcccgccccggaaccggggcccctttgggggagcggcagttcaaaatccccgaaatgggggtcccggccgggacaactccaatttccatggaggaggggaaaaaccccccgggctcaaaagaaactgggaccgggaaa

SEQ ID NO: 7098 - DNA, 2165 bp, Glycine max
  Clone ID: PAT_MRT3847_106417C.1
cccacgcgtccgcgggctagtgcatttatagaaagaaaaaaaagaagaagaaagagttctgaccatggctgcatcattatttatgccttcatccatagtggacgaagaagcgaggtttgaagccgaagtggcggaggtgcaagcatggtggaactctgagaggttcaggctaacaaaaagaccatacacagcaagagatgtggtgtccctccgaggcaacctcagacaaacctatgcctcgaacgagatggcgaaaaagctctggtgccttctgaagaaccaccaagccaacggcacagcctcaaggacttttggtgcacttgatcctgttcaggtcactcaaatggccaagcacttggacacaatctatgtctcagggtggcagtgctcagccacacacaccacgagcaacgagccgggccctgaccttgctgattacccttatgatactgtcccaaacaaggttgagcacctcttctttgctcagcagtaccatgacaggaagcaaagagaggagaggatgagaatgagcagggaagagagggcaaggaccccttatgttgattacttgaggccaatcatagctgatggcgacactggttttggtggtaccacagcaactgtcaagctttgcaagctatttgtggagagaggtgctgccggaatccacattgaggaccagtcttcagtgaccaaaaagtgtggccacatggctggaaaagtgcttgttgccatcagtgaacacatcaataggcttgtggctgcaagacttcagtttgatgtcatgggggtggaaactgttttggtggcaagaacagatgcagaagctgctaatttgattcaatcaaacattgacacaggggccaaccccaaccttaaggggaagagcttagcaactcttatgcaacaaggcatggctgctggaaaaaatggagctgagcttcaggctttggaggatgagtggctctcaaaggcacagttgaagactctctcagaagcagttgtggaggcaattgagaggcagaacaacattggagaggaagaaaaaagaaggaagctaaatgagtggatgcaccattcaagctatgaaaggtgcctttctaatgaggaaggtagggaaattgctgaaaagttaggagtgagaaacctcttttgggattgggacttgcctaggactagagaaggtttttataggttcaaaggttcagtgactgcatcagttgttagaggttgtgctttttctccacatgctgatgttatatggatggagactgcaagcccaaatgtggttgagtgcacagagttttccgagggggttaggtcaaagcaccctcagatgatgcttggatacaacctctctccatctttcaactgggatgcttctggaatgagtgatgaacaaatgaaggatttcattccaaagattgcaaagttggggtatgtgtggcagttcaatcactgtgggaggtcttcattcaaatgcacttcattacttcaacatttgcaagggatgcaagggattggggaatgcggggaatgctagcttatgtggagaggattcagagagaggagaggaacaatggggttgacacacttgctcaccagaaatgggctggtgctaactactatgataggtatctcaagactgtccagggaggtgtggcttcaactgctgcaatgggaaaaggagtaactgaagagcagtttaaagaatcatggactaggccaggagctgtagaaattgatagaggcagtattgtggttgctaaggccagaatgtgaaagtgctacttttgcagaactatactgccgagagtggaacttggggaaaattcaccaatttctgtgttggattggaatttggaataaatgtcctcaataattgaagtattaaacgggccattgaatcattctgctatttttgccttcataatttcttatatttcttacttgttcagactcttggccatgtgggcaaggagaacaaggaaaacttgtttttctgtgttttgtaatttgttttactcctactgttaaacatattttacttatagtgtatatttggacatgcaattgtggacaaggagcacaaagaaatctggttttactgttttgtaatttggtttactccttcccttaaatatattttacttggtgcttattcg

SEQ ID NO: 7099 - DNA, 1991 bp, Glycine max
  Clone ID: PAT_MRT3847_106418C.1
tcgaagccgaagtggcggaggtgcaagcatggtggaactctgagaggttcaggctaacaaaaaggccatacacagcaagagatgtagtgtccctccgaggcaacctcagacaaacctatgcctcgaacgagatggcgaaaaagctatggcgcctcctgaagaaccaccaagctaatggaacagcctcgaggacttttggtgcacttgatcctgttcaggtcacccaaatggccaagcacttggatacgatctatgtctcagggtggcagtgttcagccacacacaccacgagcaacgagcccggtcctgaccttgctgattacccttatgacactgtcccaaacaaggttgagcacctgttctttgctcagcagtaccatgacaggaagcaaaaagaggagaggatgagaatgagcagggaagagagggcaaggacaccttatgttgattacttgaggccaatcatagctgatggtgacactggctttggtggcaccacagcaactgtcaagctatgcaagctctttgttgagagaggtgctgctggaatccacattgaggaccagtcttcagtgaccaaaaaatgtggtcacatggctgggaaagtgcttgttgccatcagtgaacacatcaacaggcttgtggctgcaaggcttcagtttgatgtcatgggggtggaaactgttctggtggcaagaacagatgcagaagctgctaatttgattcaatcaaacattgacacaagggaccatcaatttatcttgggagtgaccaaccccaaccttaaggggaagagcttagcaactcttatgcaacaaggcatggctgctggaaaaaatggagctgagcttcaggctttggaggatgagtggctctcaaaggcacagttgaagactctctcagaagcagttgtggaggcaattgagaggcagaacaacattggagaggaagaaaaaagaaggaagctaaatgagtggatgcaccattcaagctatgaaaggtgcctttctaatgaggaaggtagggaaattgctgaaaagttaggagtgagaaacctcttttgggattgggacttgcctaggactagagaaggtttttataggttcaaaggttcagtgactgcatcagttgttagaggttgtgctttttctccacatgctgatgttatatggatggagactgcaagcccaaatgtggttgagtgcacagagttttccgagggggttaggtcaaagcaccctcagatgatgcttggatacaacctctctccatctttcaactgggatgcttctggaatgagtgatgaacaaatgaaggatttcattccaaagattgcaaagttggggtatgtgtggcagttcatcactgtgggaggtcttcattccaatgcactcataacttcaacatttgcaagggattttgccaataggggaatgctggcttatgtggagaggattcagagagaggagaggaacaatggggttgacacactagctcaccaaaaatgggctggtgctaattactatgataggtacctcaagactgtccagggaggtgtggcttcaactgctgcaatgggaaaaggagtaactgaagagcagtttaaagaatcatggactagatcaggagctgtaaacattgatagaggcagtattgtggttgctaaggccagaatgtgaaagtgctacttctgccgaactatgctgcatgctgagagtggaacttaatggaaaattcaccaatttctgtgttggattggaataaatgtcctcaataatataaacaggccattgaatcattctgctattttttcctgcataatttgttacatttcttactagttcagactctttagccatgtgggcaaggagaacaaggaaaacttgtttctgtgttttgtaatttgttttactcctactgttaaacatattttacttatagtgtgtatttggacatgcaattgtggacaaggagcacgaaatcttgtttta

SEQ ID NO: 7100 - DNA, 1346 bp, Glycine max
  Clone ID: PAT_MRT3847_106419C.1
gttttttttttttttttttaaacaagcagaatcatacatttggggcactttcatacccctccccaccaccaaaagctatggcacacatgtataactactgacctctgccacaatatttacatttataacgttcacgatcaaattgtgagtactcacaacatgctaacaaaaattaatttcagttcattttgaattaattattatactcaatgttttacacctacaaaacacaaggctacttcagctcgggcctgaacctcttccaatatttccacaatcttttcccgacataaattgctttcattctgctccgtaagcattttcctcagcctgcggacaatagcagtgtctccatgaccagtgcaaattatcatcatggcatttgtgggtaatgacaaatacagattatgaattctagcatccatgcgagccagaatttccttcagttcagcagatgctttcaacttgaagtctttcccttttgtaaaattattctgacatgtttgtaatgccaacatctctgcaagtcttctattcaacctctcagaatcttcagcttgtttcttcaagtatgagtgtagctccgaaaactgagtccagataaaatgtacctttccattcttcacctccttgttggcctttgcaagtgctacatcatcagaggtcactggaattgcatgagaggactctgaggcataccgttttactacagatatatcatcaatcagtgaggaggttttgccagactcactcagaatagaaaggagctttttccgggtaaaggatggaggggaaccaaaattaggcccatttctgatcttcaatagtgccaattccatggtagctctagccgcttccctgctgtcttgtccgggccctggctgttggatctccctgcataggtatctcttcgtgagtgcccggagagcttccttttgagtggttcctccggggtggctggatgactctgctgcgtcaatgaccaagtcatgagatatcttcaatgctaacaaatcgttttccagagaatgcccaacaaggatagtctccttgtgaaccaactttaggaactcttcctgaatgtctctcagacttgtcgtcacgccatctaacatctctgacgttattccactatatcttgtgttgtaatcagtgatggcatttgatggtttaaccaacttatctatcaaaacctgtcctttgacatccactaaagtaattcttgacagctcaaaaccttcacttgttatgcacatctcacaatcaagtgccaacatatcataaaaaggagatcccgaaggtgcgggcaaagtagaaagaaaacctggcttattaacagaatatcc

SEQ ID NO: 7101 - DNA, 259 bp, Glycine max
  Clone ID: PAT_MRT3847_10641C.1
ttggaatatgctgtcagctgcttattgcaaggtataaaatttggtctcgtcaattcaagaagccatcttgctcgtgtgctttatcttcttagcttcgatactcctaatgagcctgttggaaggtcatttgataagtactatgaacaagtaccacactgggtttggctttcttggattccacagctcttactctccctgcagaggacagaagctcctcactgtaaacttgttcttttgaagattgcaacattgtatcctc

SEQ ID NO: 7102 - DNA, 256 bp, Glycine max
  unsure (1)..(256): unsure at all n locations
  Clone ID: PAT_MRT3847_106420C.1
gcacaacctctcacaataatgtctcactccaanaantcagagtccaantttgatcctaaggnaagccccccgngncntatcanatcccnananaagatnnctaaaggngttggagtcacgctcctactatgagtcctttcantannctttaacanagcttcancagttcctattgaaagtggctantctgcaccattgcctaancnnagangnntncgagtgtggncatgntatggctgggggttatgtagatgat

SEQ ID NO: 7103 - DNA, 2457 bp, Glycine max
  Clone ID: PAT_MRT3847_106421C.1
cattggaagaaagagaaatggaggagactctttctctcagtctcatccacgtaaacaactcattggttttcaccaatagactacacatcatcctccatttcactgctctatgtttcttggtttactacaggctttgtttcttctttcagaatccacaaaccagacgaggaactactttgttcccttggcttcttgtttttgcctctgaaatcattctctccttcatttggattcttggtcaaggtttccgctggcaccccatttcaagaactgtgtttcctgaaaggttaccacaggatgacaagctccctctcattgatgttttcatatgcactgcagacccaactaaggaaccaactttggatgttatgaacactttgctatcagccatggcgctggattacccgccagagaagctgcatgtgtatgtttctgatgatggaggttcatctgtcaccttgagtgccatgagggaggcttggaagtttgcaaagtggtggattcccttctgcatgagatacagaatagagtgtaggtgccccaaggcttacttttctgcttcagagaatggtggtggtgattctgatgggagcattgagtttcttgcagataaaaaaatgatcaaggaaaaatatgaggctttcaaagaagacatagaaagagtaaaagaagaccactctggagatacaactggcataaagggtcaaaatcatccacctattatagaggtgatacaagagaatagcagcagtgaaatagagcaagtgaaattgcctttccttgtctatgtttcccgtgagaaaaagccttctcatccccaccatttcaaagctggggccctcaatgtcctttaccgtgtctctgctgtgataagcaatgctccatatattctagtgctggattgtgacatgttctgcaatgccccagcttcagcacgccaagcattgtgtttccaccttgatcccaagatatcactttcacttgcgtttgttcaatttcctcagaaatatcacaatataagcaagaatgacatatatgacagtcagcacagatcacaactttaggttctatggcaaggtatggatgggcttaggggaccagtattatctggcacaggcttctatatgaaaagggaatcactgtatgggaattacaaaattaaagccactgaccttgaactccgacaatatgttggcacatccaatgggttcatcaaatccttaaaacaacactgtactccggattcagacactgttggacatacattgcctgaagaagagactttgcttctggcttcttgtaattatgaaattggcactgaatggggcaaagaggttggattcctgtatggtacagtatgtgaagatgttcacactggattcacattgaattgcaatggttggaattcagtgttatgcgatccaccacagccacagtttctaggaaatggtaccaccaatttgaatgacttactaattcaaggcaccagatggtactgtggactgcttgatattggtttaagcaggttttgtcctcttatatgtgggcctctaaggatgtctctacttcagagtctttgttatgcacaacttacatatttccctctttattgcttgcccctttggtgtttagccattgtccctcagctttgtctagtagatggaattcccttgtaccccaaggtctcagacccatttttcttcatttttctgtttatccctctatcagctctcaccaagcacttagtagaagtcctctcaactggaggaacaatcagaaaatggataattgagcaaaggatatggatgatctcatccatcacatcccatctatatggatgtttggatgctctactgaagaaatttggtttaaaagaggctagtttcttgccaaccaataaagtggaggatgatgaacagactaggctttaccaaatggacaaatttgacttcagaacatcaaacatgttccttgtgccaatggttgcactcctcatcatcaacatatcttgcttcatagggggaatctacagagtgttatctgtgggagattgggacaagatgttcatacagcttttacttccagcttatatcattgttgttaactctccaatcattgaaggtttggtgataaggaaagatgttggacgcatttatccttcaactgctctagttgtaacatcaaatatcttggccacaattatcacttctacaatctattctctactaaggaaagtgtaaaagcccattctgtctctccaaaaatattcgtccagctttgcttttatgctatatagtggagaatataactgcatgttgacagtataaagtgatgtagttggatgaaataaagccagagaccattcacccattaaaaaatctatatttaaaaatacataaaaaagtatatttgtcatatttctcattttgtataatccatgagaaaaataatttgact

SEQ ID NO: 7104 - DNA, 362 bp, Glycine max
  Clone ID: PAT_MRT3847_106422C.1
ctcattcaactctctcactcatactcctttaagacgccacagacaactacgggccggctcttacccgcaagagaagcataccatatcacatcccggcataccctcctatatgtcccaaaagacaactcaaattccatcttgcttcactccgagatccccagagcaacccccaagatcaacataaccaatacctacatctcaaagcatccatatgaacacagattcctcatccttaaatcaacccatccccatcaacacttactctcactatgaccacctcctcgactccaccgccaccatattttccgatctaacaacgtacacttcaccctccacttcattgctcttaatccctacctttt

SEQ ID NO: 7105 - DNA, 331 bp, Glycine max
  Clone ID: PAT_MRT3847_106423C.1
gcaaagactgaagaaagcaagcttgaaactgtgcaagaagttgaggagtcatctgataagaaagatgaggcagtcaaagaagtagctgaagaaaacactgagactgaaaaaaaagttgctgatgcagacactaagaaagaagagactgaaaaggtgtcaattgaagaatctccagaagaaaagaaagaagtcattgaatctgaaacaaaagagattgttgcagaaaccgaggtgagcaagaaaactaatgagactgaagaaatcaagtctgttgagactgaagaaaaaaaacctgaggtagaaaaatccgaaagtgagactgttgaggctg

SEQ ID NO: 7106 - DNA, 633 bp, Glycine max
  Clone ID: PAT_MRT3847_106424C.1
tttagactcctctcctcactcacctacttagtgtttgaagtcttttgttctacgggtcctgttttatcctaactagcaacacccatttgtaataggctactttattttttaaactcttttaaaaaagttaacctagcttttctttgcatcctctgactgtcttccaccggtcaccgcaaaccaccaccgacctccgttcgactgttagtggtggtcgatttacatgtaatgtaatgtaagacgttggggtccttttgttgtttcatgctaaatacagaaccataatctcttgtttcttcttcagcttccattttggtgcaacgagcaagggcttgttgctgttgaaatttccgccccccccggcggctgttgcggcggatggttgccatatccgtacccatcggctgctttggcttcggattgttgtgctcttcaccataatcgctgcttcttctactttcttgttccttcttcggcttggattttttgtgatacaaaaaagggttattgtggtgaaaccctacaccgatccctaagcatggcgcataggttgctcagagatcacgaagccgacggttgggaacgctccgacttccccatcatctgcgaatcctgcctcggcgacagcaccta

SEQ ID NO: 7107 - DNA, 577 bp, Glycine max
  Clone ID: PAT_MRT3847_106425C.1
ctccatcggagttgaattctaacactcccagcttttgtaggggtattatcgtcctcctacatggcggaactctagtggcctcaaaggtgcagacagggtcaacactggatgcaagaattgtgccaattactgacgtgtccatagtctctgatcaggaacaaagggactagtcataacggccaagatatgtatgtattgggaaatgcaacaatttcagagaagggagtgacctgtcacctgattaggtcacaagggccagtaacaaacacaatcaggacagagccttgagaagcctgtacattgaacgaacacagaaccacattcctgggaattgatctacccagatagaggtctcgtgagcaactaatgctggctgtgaaatgtggatatctgagtggccaagtgaatcttcttgcaatatgaaccccctcatggacagtcccaagcgatgtacagttgttgatcatcaccataggatctgccaatgatctcaaatttctgattatactcttacgtcatggtttatctccttcgtatgctactgtcacatcttattgaaacgaataatactgtgcat

SEQ ID NO: 7108 - DNA, 295 bp, Glycine max
  Clone ID: PAT_MRT3847_106426C.1
cgcgttaataactacattcatcaccacactctctatcgtgttgtctatgatgacgatgctcacacgcttcactttctgtcacttttgtctagaggcgaccaccgtaacggccaccgctgccaagaaactgttcggtctcaaatccaacgtattcagatcgaacgaaatcggtgagaatgagaagagctggttcatgatgctgagaagtcgatatctgatcggacaaacgcaccatgtggaatggagcaagatccaaactcctacggacgaatgggttgtgacttacgacactatg

SEQ ID NO: 7109 - DNA, 381 bp, Glycine max
  Clone ID: PAT_MRT3847_106427C.1
acgcttcttctctggttgattccgatctttagtcttcaggttctcctcgttgttcttggcttggctgttttcaatgtcgagtctttcgttaatataattagatgtttgggagggcacccaataagaacgataattctatgtactactaaatccttggcgtcttcaataacgcttcgcaggatgatctgaagaaggcttacaagatagccgccattaagaatcacccctacaagggcggtgatccccacaagtttaaagagcttgcgcaagcttattatgttcttagtgacccttataagcgtgagaaatattatcagtattgggtatatgccctttatgtatgaaatggttttggccttttgcattatccatttttatatc

SEQ ID NO: 7110 - DNA, 350 bp, Glycine max
  Clone ID: PAT_MRT3847_106428C.1
acggctgcgagaagacgacagaagggggttgcaataaataagagctccagggtgttttctagagcgagaaagtgtggtgtgtgttggagttagagagagaaagaaaaaaaaagggttcagaagaatcagataggttagatttatatacaaaataaagaatagatacacttggagttggagttacacattattctctctctcactcacacgcactcagagtgcaagctagagagagagagatggaggatctcgaggaggttgcaataaataagagctccagggtgttttctagagcgagaaagtgtggtgtgtgttggaacaaattaaaaaataaaaaatcttcatattat

SEQ ID NO: 7111 - DNA, 351 bp, Glycine max
  Clone ID: PAT_MRT3847_106429C.1
gaaggaaatttccaccaagccaaacaaaatgggataaaatggttcaaaaaaaggtccttagccggataaacaggccgcttttttttaagaagggggggggaaaacaactgaggtcgcctaaataaaaatcccctaataaaatcctttttaaaaggctagaagaaatggcaaaagggccttcccgaaaaggattttcaataattggggaaagggaaatgacaaggtgtgccccctttaaagggggggaaaaaggggggggggctagggaaaacccgccaattgggaaggtccataccgcagcccccaaggccccgtttttttgatttcttaaaatggttttttgcgaatctc

SEQ ID NO: 7112 - DNA, 415 bp, Glycine max
  Clone ID: PAT_MRT3847_10642C.1
ggctcgagtttcaaggtttcgtcttttttggtatttttcttttcacggttggattctttcatagctcacccatcttcgattttcttttctcaacctatatcctcttatgtttcaatagggtttctatattatttcttccccccccccccccccagaaattcataaattcgtggaagtctcgaggctcgatttggtcccctctgtttctcgctcgggttaggctctagcgtccattaggcaatggacctgcggccctttcacccctccctctatccacgtacccttctttatattctctttttcccttcctcatcccgcttccgtcactggctctttttcaccctttcggagacaaagcatcaaaaggttaactttttcattttattctcccaacaggaagtcgattttaggatga

SEQ ID NO: 7113 - DNA, 323 bp, Glycine max
  Clone ID: PAT_MRT3847_106430C.1
cttgagccgcgaaaacaccatgcaatctttggcatcttgatggttatgatttttgggacaacgggactggtttctgacagtggcccgaggctatccgaaatttggagaaattaggggatgccccgacgagactctctgttcaagagaaaaggaaaaactgttctactgtggtggtgacgccctcttgcccaggaatgtcgcccttttttgttttaaggggggggtggcacaattttgggccacagcaaaatattattggggggggtgcattcattagccgggcttttgtgtgtgtctccccccctaaaataaaactgtggggc

SEQ ID NO: 7114 - DNA, 540 bp, Glycine max
  Clone ID: PAT_MRT3847_106431C.1
tctttttttttttttttttttttttttttttttttttttttttttttttttttttttttttttttttttttttttttttttttttcccggaaaaaaggccccggccctgggaggggggcaaaaggggccccggcaaatttggggggagtccccaggggacccccaaactgggtgaatagggaaggggttaggcccccaaaattggtaaaacgggggggtaaaacaccacgtccccaactttaaaaaaaggccaaccggaaccccgggccccgggggggaaacaaaaaaaaaaaaaacccgggttcgggggaaaaaaaaaaagcggggccccccccccctaaaaggcgacccccccaaaagtccaaaaatgggggcgggggggggggggaaacaaaaccccccctgggccaaacttttgggttctcttacgggggcccggaaaaaatggcccaaaaccccccggggggacgggccccccctgggcccccttggaaccgcgcatttaaaaaaggggagggggggcgggaaaaaaaatctggg

SEQ ID NO: 7115 - DNA, 305 bp, Glycine max
  Clone ID: PAT_MRT3847_106432C.1
cttggaatatcacaaatgggtagtaacagatggaattggtaggcatgttggggttcagaagtattttcaaaaatgaagctcttgttgttcttggtgcctctcgtactaggtgctggctttgcttctgtaaatggtccaagcctttgcacatggagtttcattgtggactgttctatcacatttactcatcttcctgcatcgtcagattcctcctcaaatgcacgtcatcaatctaatgagactaaagttttcaatgtcaccaagcccgggttcaatttagctgctggcaaatgaatccgatgaat

SEQ ID NO: 7116 - DNA, 133 bp, Glycine max
  Clone ID: PAT_MRT3847_106433C.1
aattcctatatttattttggactcttctttttctgatcggcgatggtcggaagctcctattcatcgccgacaccttgcagccgaatcggacccacttgggatccgagggccacccgaatgcttgcttcacagt

SEQ ID NO: 7117 - DNA, 445 bp, Glycine max
  Clone ID: PAT_MRT3847_106434C.1
gaatgttggtacagctgcagcgcctgctcgggcctttccggatcgacccacgcatccacccatgcgtatatatacgcgttcggataaggaaggcttgagggcacacataccagacgttgtcaagatgactagctctgatgctagatcaggttgtaaacattatgaactttaagcagtgagtagaggtttgtctgaagctattatctgctggtaaaaagggaggggtaaaaagtgcacctgtatgtttacgagctgcagggggaaatatagaaagggaaatgcccattacttgactaactgcattagtatctctttgggcaagacagggagaaaggatttgggagaacacaaatcgagtgggacactcctgtgaaaatagccggaggagtagcaagagtactggcatgcctccatgtggctggcagggcggaccacgggcacatca

SEQ ID NO: 7118 - DNA, 387 bp, Glycine max
  Clone ID: PAT_MRT3847_106435C.1
agcggtcgtttttttttttatcttttttaggcggggacagatctagtctttaatatattaagccgagattcataattcagattagccgaactttatatatgagcgaccatttgccaggcattatatgaaagactaagaggcaaccttgagctaaacacaccgatcacaggtccaaaaaacttgaccttgttgaagggtaagacaggaccacttttttctaaggagggttgctaaacccaaaacaccagggggcaggaaaaccatctcagacttaatacataaggttttccctacccattaaaagtttatgcttatccctaaataggggctgcgaatgctcgatgctggctctccaaacccttcactggcacgtgaaggggttgcaag

SEQ ID NO: 7119 - DNA, 692 bp, Glycine max
  unsure (1)..(692): unsure at all n locations
  Clone ID: PAT_MRT3847_106436C.1
cgggccggaaacccgcgtcgacccacgcgtccgccaaaagaaaaaggtactactgagagttcagaggcaaagaggggtttcttccgcattctcttctcgagtgtgatggtgttctctctatcaccaacccaagaaatctaagaccgttagggttccacactccacaattgatttgaatccttgttgcgaaatcaatggcgtccgtttacataccggtgcagaattcggaggaggaggttagggttgctctcgaccagcttccgagggacgcctccgacatcctcgacatcctcaaggccgaacaagcccctctcgatctctggctcatcattgcgagggagtacttcaagcagggaaaaattgatcaatatcgccagattttggaggaaggatccagtccagaaattgatgagtattatgctgatgtcagatatgagaggattgctatcttaaatgcccttggagcttactacagctaccttggaaaaatagagacaaaacaaagagaaaaggaggagcatttcattttggcaacacagtattacaataaagcatctaggattgacatgcacgagccctccacttgggttgggaaaggtcagcttttgctagcanagggtgaagtatgacaggcgtgtgctgcatttgagattgtggttgatggggaccatgataatgtacctgctcttttg

SEQ ID NO: 7120 - DNA, 1829 bp, Glycine max
  Clone ID: PAT_MRT3847_106437C.1
cgcgcgcaaagcgcgtggagtcggctcgcagggtgtcatttagcaagcagaaggattttctttgggaagaagctgagtctgatcgactcaacctcaacctgcttcctgcattgctctctccaaatttctagggtttggttcaaagagagaggaacctaaaatgtctcaaaacgggaagctgatgccaaatctaaaccagcatagcaccaagctgctcaatctcactgttctccaacgaatcgacccctttgttgaagaaattctcatcaccgcgagcacatgtcaccttctacgagttcaacatcgacctcagtcaatggagccgcaaggacgttgaaggatctctcttcgttgtcaagaggaacacacaacctcgatttcagtttattgtgatgaaccgtcgcaatactgaaaatttggtggagaatctcttgggcgattttgagtatgaagttcagattccatatttactgtatagaaatgctgctcaagaagtgaatggtatctggttctataatgcacgtgaatgtaaagagtttggttatctttttagcgtgaacgtgaagaggtagccaatcttttttgctaaatcctaaatgcgttcgctaaggtgtgagtcaagtcgaaggtttcttccacaaagagtgagtttgaggaactagaagctggagccatcatcatctactactttcaatgtggctgatgttcctgatggtccatcctttgtaaacttcttcagtgcagccatggctattgggaatacttcaaacactccaattactggacaaccttatcagtcttctgctgcaatttcttcatcttcagtgccaactcatactgctacacccactgttccaaccttacagataccctctctttcacaatctactcctctaatacccccgcttgatgctgttgagtccatctgcagcagtaaccgaaccgcaaaacttgtgaagccttcttttttcgtccctcccccttcttcagcaatgatgataccccccgtatcttcatctactccgacggcccctccacttcatcctgctgttaatgtacatcgcccatatggtgctccactgctacagccatttccaccaccaaatccaccactgtcacttgctcctgctttctccctctccctctccaaactatggttcagttatttccagagaaaaggttcgagatgcgcttatggtgcttgttcaggacaatcaattcattgacatggtctatagagcactgctgaatgctcatcaatcatgactttcacgaggtgtttaattatcatctcgctggatgaattgttttttgggctgaattacatttgctatactttttaggccaggctatattatgtcctaaactttgaaatgtttcagtcgtattcaatttgtaaaattggttgtgctttgtggtgaccattttgatctagctagtttcctgtgtctgttttttagacaagtcattgcaatttaactgccatatcaactgtattagttaggtgacatggcaggaaatggtgaggtccagatgaatggttgttagcaattcggaactgattttacaaattatgttgatcgactgaaacaaatctccaagttatagggggtgcaaaggttgttattgagccttgtttattgtgtattttattaaattgttttgtcaaagacgactttgtatagcaccattgatcagtgtttcagagaaattgtactgtgccactgctgcataatgtaagtatataatcagcccgatctttttgatggattacgaatagttgagaatatcattcttctgatgcctaaaaaaaaaaaaaaaaaaacgac

SEQ ID NO: 7121 - DNA, 408 bp, Glycine max
  Clone ID: PAT_MRT3847_106438C.1
ctcgaagcgaatgtctattgtgccgtggagtggatcctgacgacaaggcgagttctcgggacagcttctttatgcttgggcgtataatctggatctgcatgaaacctatcttgccaatcacctaaatgtgctacgagagttgtatcctcacagttcatatgaatcgtcgcagttgagaaggatagctctctctctgctggaatggctgcacaaagctgacgcgcctacacatatcacagattgaagagttccattcgatcctacatgatgatgaatgctcctgtttcacaggatcatattgatttactgtggagcatggacatgctgcctctcacaaagagcacgctatagcttttccaaacaaaattgttttatgacgatcacgcttcgcggtgcccaacacacaag

SEQ ID NO: 7122 - DNA, 784 bp, Glycine max
  Clone ID: PAT_MRT3847_106439C.1
gccggaattaccgccctcgacccacgcgtccggttgagtctgatcgactcaacctcaaccttcccctggttcctgcattgcgttgctctctctataccttctaattcccaaatttctagggtttggtacagagagaaaaaggaacataagatgtctcagaacgggaagctgatgccaaatctagaccagcatagcaccaagcttctcaatctcactgttcttcaacgaatcgacccttttgtcgaggaaattctcatcaccgctgcgcatgtcaccttctacgagttcaacatcgacctcagccaatggagccgcaaggacgttgaaggatctctcttcgttgtcaagaggaacacgcaaccgcgatttcagtttattgtgatgaaccgtcgcaatactgaaaatttggtggagaatctcttgggcgatttcgagtatgaagttcaggttccatatttgctgtatagaaatgctgctcaagaagtgaatggtatctggttctataatgcacgtgaatgtgaagaggttgccaatctttttagcaggatccttaatgcgagtgctaaggttcctcccaaggggatgagtgaggactagaagcagtacctacagtaacctagccatcatcttactattgcttttcatatggattaaactatggaaatgcaatgtgtctcacatagtcacatttttttttcataatggtaaattgttagattttggcaaaatattgttattttggtgcaacggtaaagttgtgccttggagacttgttggtcatggg

SEQ ID NO: 7123 - DNA, 381 bp, Glycine max
  Clone ID: PAT_MRT3847_10643C.1
ggctctagctttgaacgcatcaatctgcgtcttgacttcattattcctgggaaggtctctctaaataatggcagctcgctttcaatacgcacctatctgaaactgggaagccagactctcttatttacattacattccgagtttaaattgcaagctgtaacctattgtatgccctgcttgattcggttgctcttaacccttatcagaaatcaaaagcacttgcaagtaccattctttcaggcttattatcaggaactatgctggcgacccctatagggaaagatgaaacagaagtctaaaaaaggatggaaatgtattgcaccacttcattcgaaaggaaaatgcgaaagccggttgtcttttatcatacaaaatcaattc

SEQ ID NO: 7124 - DNA, 471 bp, Glycine max
  Clone ID: PAT_MRT3847_106440C.1
ggtttgttttttttttttttttttttttttttttttttttttttttttttttttgttctttttggtctttattaaagacatttcacaatggtttttctattataaaaaacttgggcttcaatattctcacccccccttaatttaaaccctgaaaatttaagccctgcaatgggggggcgttaaggctccaacctttgaaaggcctcttattgtgctcggaaagctgggccaagggatgaaactgccgccacagcatggggttccaagaaaacaagggcctgaaaaaaaaaaaaaccaaaaaaaaccctttttgacccagggtgagcctaccaacaacccggggtcttgacattctttggggcctttgcccccaaataaatgtcgggcgggttaaaactctggaacaaaccggatacctccccgggctaagggttggccttggggacactgaaggggaatatcccttgggat

SEQ ID NO: 7125 - DNA, 310 bp, Glycine max
  Clone ID: PAT_MRT3847_106441C.1
cgatagccgcaccttataaagatgctaagtataatgtcttgaaagtggatcttacatatgctaccaatggttaaacgatgatccacacacctgagattttcacttttctatattgagggacgtactggctggaataacattgcttattgcgagagatggtaccatatatagaaggtactttatggagcgccggtgagcataactgatgttattggcagtctagggaagaggatgctcctctgcttcggcataaaggtatactaatggcctgagccttctcctcttgggtcagaggaatgacgataaaccc

SEQ ID NO: 7126 - DNA, 325 bp, Glycine max
  unsure (1)..(325): unsure at all n locations
  Clone ID: PAT_MRT3847_106442C.1
tttttctctcccaacgagtatcanagaagattttggtgccactgatctcaaatacattattctgccattttatcttgcggagttggactaaaaaatagctcagactgtcagggtacagattctatagtgttcccatgcaaaaccttaagactttatctcattttgtgaatcaatggagctggtcgcaatatagtaggtacaatcttacatttatggggcaccaataactgttgctgatcatagggccacgaagatcgctaggttcttagcgcggagagctgcacaatcaaagttgctggaaattaaagaaccaaaggaaccccgt

SEQ ID NO: 7127 - DNA, 1326 bp, Glycine max
  unsure (1)..(1326): unsure at all n locations
  Clone ID: PAT_MRT3847_106443C.1
ccaaagatatgtaaattaatttagtaattaaaacatttgataagaaaagctgcatttgcggatagcttacaggcttcttttgtgactgttgnagagcatcccggggggtagagttactggtgacaactgcatcaaccaaacaaacaaataaagcaaaaggcctttttattccaaagcaaggaaggaagaaataaaccgaatgagagcattaacctcttcttcttccactttcattccaaagcgttattccttcttcttcttcctctccattctcttcgctcttcgatcctcgtccgggggctgctccgaataccaccaccaccacgcgccgatggccacgataggaggcttacgcgactcccaaggctctcagaacagcgtccaaaccgaggccctcgctcggttcgccgtcgatgaacacaacaagaagcagaattcacttctggagttttctagggtggtgaggacacaggaacaggttgttgcgggaaccctgcatcaccttactctcgaggctattgaggcaggtgagaagaagctctatgaagccaaggtgtgggtgaaaccatggttgaatttcaaagaactccaagagttcaagcctgctggtgatgtaccatcatttacctctgctgatcttggtgtcaaaaaggatggtcaccaacctggatggcaatctgtgccaacacatgaccctcaagttcaggatgcagcaaatcatgcgatcaagactatccagcaaaggtctaattcactagtaccctatgagcttcatgaggttgctgatgcaaaggctgaggtcattgatgactttgccaagtttaatctgcttctcaaagtcaagaggggacagaaggaagagaagttcaaggtagaggtacacaagaataaccaaggtgggttccatctaaatcagatggaacaagatcattcctaattctgatcggaagtttggccacgctagcagtataggcctgggtggcacctaaaatataccttttttttctgtggggtgtatgaatcttattatctatgctatacataattatatactaatcgggtattgttcttatctctgtctcagcaagtatgttagtgcttacccctttctctaagccttggcagataagttttcctatgtgtattggctttattaactgggaagctaccaagttacattagtacctttgtaacgtaaatatttacttaacataaaaatgtggatgttgaccatttgcatttaacgtatgcctaaagaatgtgaaatattttttacctttaaaattaaattttaacatttaatgtgaataattctttttggctgag

SEQ ID NO: 7128 - DNA, 186 bp, Glycine max
  Clone ID: PAT_MRT3847_106444C.1
tacgggtgcgagaagacgacagaagggggttctagtgtgtgattgtttgtagttagaactcgctcttcttatttagttggtctgtgctagcgatagttttttctctcacctgataatggcttgctgcgagaggaactgtggttgcagaagcttctgcaagtgcggcaactgctacggaagctgcaa

SEQ ID NO: 7129 - DNA, 1934 bp, Glycine max
  Clone ID: PAT_MRT3847_106445C.1
ccgttatcttattgctcccaaagatatgtaaattaatttagtaattaaaacatttgataagaaaagctgcatttgcggatagcttacaggcttcttttgtgactggtggagagcatcccgggggtagaggtactggtgctgcgagaagacgacagaaggggatgggcgtgttgttagcaattttgttgcacaggctatttgtaaacaacacattgacttatatggtgatgggaagcaaacatgaacgttaacatgtctctgattacggctgcgagaagactacagatgggggacgcgtataaaaaaataaaatcgagatgctgctacgacgtggcgtccaaactaagccacacggctaataaatacggccggcacactttcactgcatcaagaaaggaagaaacataccgaatgagagcatcaaactcttcttcttcgatttccattgcgaagcgttactttttcttcttctttctcttcattttcttcgctcttcgatcttcgtccggggactgctccgaataccaccaccaccactcgccgatggccacgatcggaggcttacacgactcccaaggctctcaaaacagcgtcgaaaccgaagccctcgctcgattcgccgtagacgaacacaacaagaagcagaattcgcttctggagtttgctagggtggttagggcacaggaacaggttgttgctggtaccctgcatcaccttactcttgaggctattgaggctggtgagaagaagctctatgaagccaaggtgtgggtgaaaccatggctgaatttcaaagaactccaagagttcaagcctgctggtgatgcaccatcgtttacctctgctgatcttggtgtcaaaaaggatggtcaccaaccagaataaaccgaatgagagcattaacctcttcttcttccactttcattccaaagcgttattccttcttcttcttcctctccattctcttcgctcttcgatcctcgtccgggggctgctccgaataccaccaccaccacgcgccgatggccacgataggaggcttacgcgactcccaaggctctcagaacagcgtccaaaccgaggccctcgctcggttcgccgtcgatgaacacaacaagaagcagaattcacttctggagttttctagggtggtgaggacacaggaacaggttgttgcgggaaccctgcatcaccttactctcgaggctattgaggcaggtgagaagaagctctatgaagccaagtgtgggtgaaaccatggttgaatttcaaagaactccaagagttcaagcctgctggtgatgtaccatcatttacctctgctgatcttggtgtcaaaaaggatggtcaccaacctggatggcaatctgtgccaacacatgaccctcaagttcaggatgcagcaaatcatgcgatcaagaccatccagcaaaggtctaattcactagtaccctatgagcttcatgaggttgctgatgcaaaggctgaggtcattgatgattttgctaagtttaatctgcttctcaaagtcaagaggggacagaaggaagagaagtttaaggtagaggtacacaagaataaccaaggggggttccatctaaatcagatggaacaagatcattcctaattctgatctgaagtttggtcaccctagcaatattgttcttatctatgtctagtgcttacccctttctctgtgccttggcaaataagtagttttacaatgtgtgtatccctttattaactgggaagctaccggtgatgttacattagtaactttgtaacgtaaatattactttagtatcataaaaaatgcggatgttgaccatttgtatttaacgtagcctaaagaatgcgaattattttttttacgtttataaagtttttattataaaaaataacccatgaccgcactacagcggccctctaaagga

SEQ ID NO: 7130 - DNA, 1540 bp, Glycine max
  Clone ID: PAT_MRT3847_106446C.1
cccacgcgtccgattctcccctttcgtcccaccatgccaccgacactctcactctactagtgttggtggtgctgtttttcgcccccgttgacgcgcattttccggcgaccggcgagcttccaacgttccgcgaggcgccggcattccgcaacggaagagaatgccgcaaccgcgcgcgaagcgactccgtgatccacatcgcgatgacgctggacgcgacctacctccgcggctccgtcgccggagtgttctccgtgctgcggcacgcgtcgtgtccggagaacgtcgtgttccactttatcgccaccacgcaccgaaggacggagctccgtcgcatcatcaccgcgacgttcccgtacctctccttccacctctaccacttcgatgcgaacctcgtccgcggcaagatctcgtactcgatccgacgcgcgctggatcaaccggtgaactacgcgcgcatgtacctcgcggatcttcttccggcgaccgtgcggcgaatcatctacttcgactccgacctcatcgtcgttgatgacgtggcgaagctatggagcattgatctccacgcgcgcgtgctcggcgctcccgagtactgccacgctaacttcacgaactacttcacgcaccgcttctggtcgaaccctagctacgcggcgtcgtttaagggacgtgacgcgtgctacttcaacactggcgtaatggttatcgatctatggaagtggcgcgagggaaggtacacggagaagctcgagaggtggatgcggatccagaagcggaaccgcatctatgagctaggttcgttgccaccgtttctgcttgttttcgccggcgacgtggagcgcgtggagcaccggtggaaccagcacggcctgggcggcgataacctcgaaggtctctgccgagatctgcatcccggtccggtgagtttacttcactggagcggcaaggggaagccgtggctgcgaatcgattccaagaagccgtgtccgttggatagtctttgggctccgtacgatctctttcgccactcgccgtcactgttctccgattcgtagaatcgcagccagggttttggtgcgggtgcatggttttttgccgtggggagtgcgtcactcgattgctgccgcttgctcctcgtgatgtgaaatgacgtaaaaggacacgcgagtgtgagtgagatgtgtattcctggataaagggtgacgtggctatgtgtttggggtgttatgatacgatacggtgacgtattatgagtttggatgatgattgggttgatggttattatgtacagtattcgtaggcagatagtatagtacagcatgcacactcttgtggtagggtatgcgcattgtgcactcttctgtattcttacacttggatggatgattcttcccctaagttctagtgtttgtttattttttgtacaaataaaaaggaactaaaagagtgtagtgtggtgggtggtatctggcatggttgacggtgcaattatcattttgtttcggtcagaccaaatagaaaataaagagtacaatacagc

SEQ ID NO: 7131 - DNA, 520 bp, Glycine max
  Clone ID: PAT_MRT3847_106447C.1
ggccgcgcggttgggttttttatcaaccaagagctcctcaaaacaacaaactttttatgatttataaacacatccaacttgagtgattaatatttggttgggctataacaatatggaaatagtcgaaacctaagctaaccttgtcttctccctctaaatacgaattatgagattatatacatccgtctgtgcacaaaatggcaggataggagagactgattgttggcttttaacttcacacgtggatattgctgcccggagattctgccagctaaagacgaataaagatataggcgctataaaacaggggtgtgagcatggacgacaatcttatccaactaatcagactgaatgggaacctacgggtgaaacaggactctaaataacgtcttattaaggataagaagaggtaatcactggctacaaaagagcgccatttacacgttgcgcaaacaaggtgaaaacactcaacttgaatggctgataaataataaataatttgttgtatcaggagcttttg

SEQ ID NO: 7132 - DNA, 237 bp, Glycine max
  Clone ID: PAT_MRT3847_106448C.1
gcagtcaattcagtgaattcgagggttgagccttttgctcacggttccaccacgtcatgcataaaatggctctatagatcgtagtttccttgcggatccttgcaactgagatagcaaaaatagaattcatgctcaaactgcttttacactcaacaaactctatgcacatcactttgcattcacagagctttgccataataaaatacatgtttagtcaagctcacaaagcttctggtt

SEQ ID NO: 7133 - DNA, 349 bp, Glycine max
  Clone ID: PAT_MRT3847_106449C.1
ttgttcattcaagatgtttttttttttaaaaaaaaaatgatccactcactttaataacaaagaaaccttcgtcaggtagttgtttgccttcaataaaagataagaaggcggggattcaaggaaattagtgatgaccgggtaaattacgggcttgatggcttttctttgatcttatccgtctccacagtctaaagaatttgttgcgacaccattggtgggaattaccaccgttttgtcggggggcggggatcttcaaatcaaactcatgggcatataacattgctttcctaaagaataaccgggcctttaattttgaaaccaacaacaacttggggaatattgaaagaaa

SEQ ID NO: 7134 - DNA, 508 bp, Glycine max
  Clone ID: PAT_MRT3847_10644C.1
tttttttttttttttttttgggaaaattctcttatttcttggcctagcaaaattaaagtttttgtatcccgctctagcacaaaacattaatgttgggttcttgctaatgctacctctactactacctatgtgacctctagtaacttttttgtctaacatttagtaaaagtattactaaaagtcttggataacatttaaaaaatattgtcaaattatgaataaatgttattaattttttttttttgacaattgatcaaatattgtgtataacccatgttgctaaagcttgaaaatatcatgaaaaggctttagtaacaaggactatatgcaatatttgataaaatgttgcaaaacatattagtaacatttattcatagtttggtgatattttttgaatgttgacaaaagtttttaggaacatttttattaagaattaggcaaaaaaaaaaatgttaaacatcacatgtatagttgtacttgaaattacatttattatctcatggaaaat

SEQ ID NO: 7135 - DNA, 438 bp, Glycine max
  Clone ID: PAT_MRT3847_106450C.1
ccggatcttggtgtttgcagagttgggcaggcagggtcagaagaggaagtgagaacataagcattaagcatcaaaatggaattagcagacagagctgttggatttctgttatcctttatcagcttatcaatatttacctattatactttctgggttatcatcctgccatttgtggatgatgatcactttgcgctcaggttcttcttaccccaagagtatgccattatgataccagtgtctgcggctgtcgcactcctgtgcctcctgggctggctcttcggtgccgcgtggccctattccttggagtcgtgggcctcacggccaacacggtccaggccttgcgccttttgctctcatttttgaaatagtgaatttattgaatgcattttcgatcatttccttccaattattactaatcacctctgttcgttgtattag

SEQ ID NO: 7136 - DNA, 174 bp, Glycine max
  Clone ID: PAT_MRT3847_106451C.1
acaaagccgaacttttttctttggtgggatttcaaaatacgacttggtctcacaaatcaaccaaaaatattcatacttcttagtaccacacaaaaaattttgaatgtgttattcttttaccaaataactcttataatcaatctaaactttatttccttcttaataccctattat

SEQ ID NO: 7137 - DNA, 324 bp, Glycine max
  Clone ID: PAT_MRT3847_106452C.1
ggtccacgaagataatttttttgccagtgtgcccaaggcaatcaacaggttgcaaataaacggaggactaaattaagaccagaatcggaaactcaaatgcccactgtagttcacagggttgacgaccttgcttctacccctgccgaaagtgactaagtacagctgcgctgaacaaagtggatccaaatgtacaggactgggaacgagccccaaggtaagacaaatgaatgtaagaggatagacggctgctatacggactaacccggccttgtacccagcgttctaatcctgtgagggcacctgcctaagatggtgccggattgg

SEQ ID NO: 7138 - DNA, 265 bp, Glycine max
  Clone ID: PAT_MRT3847_106453C.1
aagtgggagctgttgattggatgggagtccaccagctcctcatttggataagcgatttggatcatggatcaactattggttggttgcgtttgaaggaggaggatggtgcatcactgtcactacttgccttgctcgccagacccatcgcttatgttcatgtcagcaaatggccatgctgattgcctctatacgaatttggaatcactgggatatgcttaatccgccttgctacctctggtacagaatcatgcgccagtgttgtgat

SEQ ID NO: 7139 - DNA, 120 bp, Glycine max
  Clone ID: PAT_MRT3847_106454C.1
ccaccacacaattccgacacattgctactcgtgagttgctcgaattttgtggctcaattctcaacaatggccactacaacacaacttcacttaccccctgggattcagattccacacaac

SEQ ID NO: 7140 - DNA, 189 bp, Glycine max
  Clone ID: PAT_MRT3847_106455C.1
tgacagggctcatttggatattggttggaaggagcctaattagaacccccacaccaatttcaacccttttgggctcacctgggccttggactgcttcaaaatggatggtggtattcccaccattggtgcttaatccatatcaattttatcttgagcttgtcttaggaatgccatggttaaccctggggt

SEQ ID NO: 7141 - DNA, 231 bp, Glycine max
  Clone ID: PAT_MRT3847_106456C.1
atggtagttacacaggtacagcttgaccgtgccaaggatatcagaagagagcttgaaatggaaataattgaggaacatacggtgatggaatattctaaggtcagcaagaaatgtgaaaaatgtggccatggggaagctacctattatactagacagatgagatcaacagacaaaggacaaactactttctacgcatgtaccggctgtggtcatccgtctcaggagaattag

SEQ ID NO: 7142 - DNA, 311 bp, Glycine max
  unsure (1)..(311): unsure at all n locations
  Clone ID: PAT_MRT3847_106457C.1
tgggtggttgtttncngtcgcngtngtggnntntgttnnggttgtgngntctggttgtctgttngnttgnncttgtggngtgtnggngnggtntgnngntatngnctnntctnngnggtgtgngttgtctgngttgtggtnngtcttnccgntgtngggntggttgggtgttnttgggtgtgncgtntgtgctcnttctcctggttnggtgtttttggtgngttttnngtgttnttggggtgtgntnntgttngngtgtttgnttntnggggtgtgtggngntggtgtgtgtttttgttgtgttntgtggn

SEQ ID NO: 7143 - DNA, 509 bp, Glycine max
  Clone ID: PAT_MRT3847_106458C.1
gggaaaaaacccaatttttttgatagttgggaatttgtctggttaaaaagggaccccttttgaacaagggggggggtttttaatttaaaacaaccccccccagggtattttttttttttgcaatttcttttgcaatgcccaaaaaaaatgaaaaagccgaattatcccccgggcccaaaaaaaaatgggcaaaaaaaacgcttgcccccaaaaccttaaaggggggaaaaaaaaaaggggggggggaataatttcaggctttaaaacacatgttgttaaaagcagtgttggacccttttttacatcaacttttacaattattttccggggacacttttgtttttttttttaaaaacacttgggggggaaaataaaaatgccatttgttcaaaaccccttgctttattaaccccacaaatttttccattttggatatgccaaaaaaagcaaaaataagctttcccactctggaaaagtgttccaaacgaggggccaaaattcttctttat

SEQ ID NO: 7144 - DNA, 203 bp, Glycine max
  Clone ID: PAT_MRT3847_106459C.1
tcaggaaaatgttgttttgaaattttcacaggaggaatggctcacagcttggtcaactcaggtgcgtcctgcaacagctttggtgtgtgcggggtgcacatatgtgtgcgcaggggcgcgagagagtacagtgtacacaacccggggagattgtgacatgggtgtcaagtagacacccatacacaatatgtgcgcatatgggc

SEQ ID NO: 7145 - DNA, 361 bp, Glycine max
  Clone ID: PAT_MRT3847_10645C.1
ctcgagccggcaccattggcaaaattggaatctacaaatgatgagaaagaaagagattatctgcccaaagtcaattatgaacatgaagtagacaagttactggacggtcttggccctagatacacagattggcctggatgtgatccattgcctgtcgatgcggatatgcttccagtaactgttcccggttaccaacctcccttcagacattagctgtagccatgattaaattgtgggaaataagttctattgcaaaggttgcactcaaacgtggtgtgcagctaacaaccagtgagagaatggcagaagagatcaagaaattgacaggtggtattctactctccagaaataaagacttctt

SEQ ID NO: 7146 - DNA, 171 bp, Glycine max
  Clone ID: PAT_MRT3847_106460C.1
ctggccactctacaacgatagcgggaggagaatcgttattttgtaaccacacctggtttaaaaatccaagctcttcacaaacggacctattattcaaagtcacgtacaaactgagcttcttgtgtacctagagtaaaaggataaagtgctactgacaacaatgcaccttct

SEQ ID NO: 7147 - DNA, 422 bp, Glycine max
  Clone ID: PAT_MRT3847_106461C.1
ttaaactaaccatcacactttctttgtttcaccgtcataacatagcttcctcctccttggtttcttgttcacttcttctgtaacaatttcatccaacaaaagaaagaaatggttccgtcaaataccgtaacggcattcaccgcaaagccgtctccgttattaactttcgtaatgctcatcgtcctcggcgtggtgggattctattccctgcatttccctccccgtcccaccacctcccccgacccctcgcacgtgatgagaggggggataggggacccactgagtcctgggtggagtggggtggaaagtggtgagaagttgggtttggaagatagtgaggttttgaaaaggtttccgaaaattccatctttgcccttgtctgctgaggctgcggagaggatcttggagtcgcttggtggtgc

SEQ ID NO: 7148 - DNA, 440 bp, Glycine max
  Clone ID: PAT_MRT3847_106462C.1
cgttatgatgtcccaaatgacattgtcatggaaattatggggtctggctgctcaactaacaaatgtacacggactgtccaacgagaaacctccaatttgtaccaattccagacattgtactggtcaggagttgcgtggacatgaggctaacaacttaagcgttatcctgcttttttgatgactggcattaaaataccaattgaatccttagcttttgttatgggcaagggcagacaaccctctattgcttatgcagaggatatgtatgaagacaggaggggcacacatcaagatcaaagtgaggcggattcaccatactcagaacattaagggtggatctcctggacgaactcctcaccctggggaagtttttatcacacgcttagaaaccaaatgcattattatgatagagcgtctatggttctgccacaatcataact

SEQ ID NO: 7149 - DNA, 3485 bp, Glycine max
  Clone ID: PAT_MRT3847_106463C.1
tgggtttcacattctgttaacattggccactgttgacacacacagtctgtgcacaactttaagtacatttaggtggtttgtctgtgtgtgtgaacagtggccaatgtttacagaagatagaacaaactaaatgtacttaaagttgtgcatagggtatcacatctcggcggccgcccttttttttttttttttttttttttttttttttttttttaaccataacaagctgaaatatccatattcataaattttacacaaagggttgtcatcatggccccttacaacaacaaagtactacatctaactattctttaaaaatctaacacgatgattcaaaggacgccctgttgtcagcaggagaacttagattctctcttgcacaacaaccaagccccctcaaccaaaacaattcccacctaaacacaaactctaaaacatgttagacaattaattagcttctatataacataatcagaccatgaagtatggtccatggtaaaactaggcatcttatccaatttaatagggttatccttccctccaaccaacctagcagggttcccaacagcagtagtccttggtggcacttccttcaacacaacagaacaagcaccaatcttagctccatcaccaatcttaatgttccccaaaatacaagtccctgcacctatcaacaccccatcaccaatcttagggtgtctatccccacttgccttaccagtccctcccaatgtcacattatgcaaaattgacacattattcccaataactgcagtctcccccacaacaagtcctgttgcatgatccagcaaaatcccacgtccaattttcgcaccagggtgaatatccacagcaaaaacctcagaaaccctattctgaatcaacagcgccaagaccttcctcccttgaagccacaatttgtgagcaatcctatgagcctgacatgccaaaaaacccttgaaattcagcaagcaatgcacataacttatgcaagcagggtccctctccttaacagctatcaaatcatccttcacagcacctacgatgtcatcatctccatcatcaaccaaaacacccatgaaaaggtcaaaaagggtgctgcttggaaggctcaagctgctcaaatttgtggagaggtggttggccaaggcactctccaaagatttgtgagacaaaatggaactgaaatagtagctggataaaattggttcttgatcaacatctaaccatgcctcctcttgaatcttcaaccaaagatcaacaccctccacccactcgtttttacgactgcgttaatacgaaacaagagggcagcacaagcagaaaaggagaaggtttgggattttagagcgtatgtggttttggttggtaactgaagagtgtgtggaggaagaagaaggaatcggcggtgttcaactgacgatcgcatctcaaagtttggtcacgatcgttgctttgcttgttcgacatttttttcccttttggtttttctgaggcattttcctctagttgtatggttgtttgtgttgttttctcgctgctgaaattatatatgggctaagggggcacttttcatgggaggtgtggaagatgaagaaccatccatgaaacgaatgaaattatcctctaaaggattagttggcttgtctaacggttcttctaaagagcctgttggaggcttgtccagtgacttgatggctcggcccctaccatccaaaggggacgaacatgttggttccaaaggggttataaagaaagaagaatttgtcaggataaattgcaaaggcattatactctcttggttacggaaagagtggggcacatctagaggaggagtctggaatacctttgcaatctcctggggtaaatctgtttatgcaacaaatacttgatggaaattgggatgacagcgtagccacattgtataaaattggtctggcagatgaaagtatggtcaggtcagcctcattcttaatattggagcagaaattttttgagcttctaaatggtgaaaaggtcatggaagcgttgaagaccttgaggacagagattgctccactttgcattaatagtagtagaattcgagaactttcttcctgcttagtttcagcatcttctactccagacattctaagggtgaggtctcgatcaaagcttctggaggaattgccgaaactgcttgcaccctacagtaatgatacctgaaaagaggttggagcatctagttgaacaagccctaatcttgcaacgagaggcatgcccatttcataattcataggataaggagatgtcattatattcagatcatcattgtggaaaagatcagataccttccagtacattacagatattagaagcacatgatgacgaggtctgcttgtacaataacctcaacctcaatatcatcattatcctccacacatgtgtcaaactcctccacgcgtgtgaaggcagtgtcacgattcttgcaaatgggtatgcagggaacgcgatcagagaaagtgggtcggcagaatttcatgtaattgaaggaatgatcatcggattgggacccgttaggcttccgagaaagaggggttggggcatcaacacaagtggccatggagagagagaaagggtgaattgaatacaaagattgaaactttgggggatgaagaaaaatgatactgtgtggcttaagtgacaagagcatttgcatgtgggaattagatgggaaagaagtggagtcttggaaaggacaaaaaacccttaagatatctgatttggaaataacagatgacggggaagacattctaagtatttgtaaagccaatgtggtactgttgttcaatagagaaacaaaggatgagagatttattgaagagtatgaaacaataacctcgttttctttatcaaatgataacaaattcttgttggttaatcttttgaaccaagaaattcatctatggaacattgaaggtgatcctaagcttgttggcaagtacaaaggtcataaacgcgcccggtttattatcaggtcttgctttggtggcctgaagcaagcttttattgctagtggaagtgaggattcacaggtttacatatggcacagaagctcaggggagctaatagaagcattggctggtcattcaggatctgttaattgtgtgagctggaatccagcaaacccccacatgttagcctcagccagtgatgaccgaacaattagggtatggggcctaaattgtctgcacaacaagtaccaaaatgttcacagcaatggcatccattactgcaatgggggaacttagtatgacaaactcattccaattgatttctcttttttatcattgcaattgtgtaaataccgttactattatctcaagtggaccattcatgccaaacatgcatgtgacttttcatatatatatctcataataaatccgtgttccattaatgtaaaaaaaaaaaaaaaagcggccccatttaggttgacatgaatggtg

SEQ ID NO: 7150 - DNA, 372 bp, Glycine max
  Clone ID: PAT_MRT3847_106464C.1
gtccctatctttctcgctcacatgtcactttttatcggtgatgctgttaactctttatctatatatgcctctctgatgccgattggtgcctccaattttccggcaagcttcaaacttaccttcttctgccccttttcttatcactttacctgtattaatcgttttctactccccctatgcttatttataaattctatatctattcgtcttatctcacgttttatccaaaaccatgttccacaatatgtaaataaaccacctacttcattctcataaaccttaattctattttccttccaattttttaacacttattgcaattttcaaatttctacagcttataattttttattcatttcttttttttaattt

SEQ ID NO: 7151 - DNA, 383 bp, Glycine max
  Clone ID: PAT_MRT3847_106465C.1
tgaaaatttacacacatgcacacacacacacagaaattgagcgtgaaaaccactagcattttacagggctatatacttaaatagtgttgaattttacacttgtgttgttccctttagtactcgagacatttttcgttctgtcgtatccctttctacggctctatagtttcctctgaaccttttcttacttgccttcctaaagcttccttccaagcccttggcacatgatggaatgttcactattgaatcgagattctctgcatcgcaaaatatttagtttctattttagatcaccaaatttaattttagcttaccctacactttatattggatctgttggtgtcctatcatttgcagtatatctggattgtatcgataaacag

SEQ ID NO: 7152 - DNA, 714 bp, Glycine max
  unsure (1)..(714): unsure at all n locations
  Clone ID: PAT_MRT3847_106466C.1
aggcgcactatagaatactatgacgtgtgccccgctcgaggcgcgcgtgccccgatccttaactcttttttgttattattcatcttttctctaactcacccatggctcaagagaacaacgatccgcccagggacgagaattttcgcaacgagaattttcgcgacgagaattttcgagacgagtcgagacagtcgttgtcgtttcggtcgcccatgagtcgcatgttgtcgttcacgaggatgctcggcagggaacgtaaggggaacgtttcactgtcgtcatgcgggagtgattgtagctgcgccgcggagcaaggtgagccagaggagactcagtgagtccgtgactcgggttttggcacgaacataaattagatgtacttattcgttgattttttttttctttttccttatttgttgtttatcttcgggttccaataatagttatattatagaatacgaaaattgccaattggttggtcattgtaatgcttcagtacatagaaatagaagtgaaaacaattgtaaagaatatctgatttcctagtaacggtgatttgtttttcttttctcttaagtataataaaattatntntntgtnntggtngttcgttggtgcggtccgttgnttntgttnttngttggggcgtgtggtggtnttttatgtntgttnnggtnnttgtgntgngtgttgcgnnntnngnngnnnctnnnn

SEQ ID NO: 7153 - DNA, 2568 bp, Glycine max
  Clone ID: PAT_MRT3847_106467C.1
ccacgcgtccgagaaaatactggatcttcaacttccagctgatgagtacattgacagtgaaggtgattcttgtgagaatgaaagggttatcaaacagcccccactgtcaacttatactgtggagaaaccatatagaatcaattctaataatggttttgccgacttaaatttaccatgtaagcttcaaaaagagacaggtgtgaagtctgatgattttggggcctcaatccctcacagaaaccatacatttcatgatatgcccgggagaatgacaccaggctctcataattttcccaatgatgtcatcctgaatttgaaaagaaaacaggatcatgaagcttacccagatctcccactatcaaatcacgggcagaaacatggatggctgccctcgggcacttgtgctgggcacaatggcagtgacttgggttttcttgctaaatttaatgatatggaaagccaatctgtttcaattgattctgtaagtaagaagctgaaacaagttaagtattgtccatgttttcattcaatacatcaaattgtcccaagatctagaaccaagagccctgcaggaactcatgatcccaccagtggtggtttgcttggaccaagctatgcttcatgcacatgtgctcctcacaagcttgtttctgattctgatatgaaaagttctggtatttcaccatcactgttatggaaaagtactacatctggccctaatttagatcgtcgaaactatctaccaccaattagtgctggtgatctaaacagcggtgacaactttggttcatcatcagctggccatgagcttaggaagtatgttaaggattcggaatatgtggggactcacaagagcataaacctgaatattatgcctactggttgttttgatacaacagctgcatcatttcaaagcgttcagattacaggtgaagaagataagtttcaagattcaagattgccttggctgaaagccaagcctgtacctaaaggaaagcccaatgaagaaagtcaaacctcaacccaagttgactccttccttttgaatccttataaatctgggtgcatgcattctgatttgatgttcagtaaggttgaaaaaagtgacttttgtacagacaagactcttgcatttgaccttaatggaaagcctcagacatccaaagtcttccagagcctgttcaagaatcattggattgaagaaattaagatatccaatgtaaattcactttgtgatagtgatcctgacatgggggaacaggcacctgccatcgaacatttcatgaagaatgagaagaaacacaagcatttggcaggtattcttgacctaaattcatgcatgaacgaggatgagaatatgccaattgatattgatttacaagcacctgtaagtccagaaaacaaggagtgttctccacccagaggagaatctgatgaaaaccagcttgagatgctcttgcaattggcagggcaggagcaggagcaggaacaggaacaggagcaggatctggaagaacaagaagaccaaaccggaattgcagctgaggctttggtttccatatcaaaaactgtggcctatgatgacctccaaatgacaacttgtccatcatctgaatcttctgtaagtagttctctccattggttttctggaattgtttctacaatagtggatcattcacagtgtgaggttaaggaggatttcaattgtaccattaaagatcttgaggactttctgcctgctgactttgattactttgagttcatgtccttaaatttgaccgacacaaaggacctagattatggctgctataagagttgtggccaaaatgagcaagaagttgaatctagttcaccaattcaaccaagaaattgccgaacaaacaggaagcggcgtgggaacgactttcaaagtgaaattctcccgagccttgcttctctgtcgcggtacgaggtaaccgaagatcttcaaacaatcggaggtctcttggaagctgccagaagaactcattcagcaacaggttgcctaagaagtgcatgcaaaaatgcattggctaaggggaagaaaaggtcttgtgcttctgtctctaataacatcacagacttgctgttgaacttgaaggaagtaaatattgatactgaaattgccattgagaaaatgggattcataagttgggggaagatttgtagaaagccaagggggaagagagttgctaccagtaaaccccacttaatttttagcaaagtacataactaattctaaagttaaagttcatggacttttggataaggtttttttatgaactataggatcgtcttgtatatgtcgtcatagacaattcatagtatatgagagtatgttagaggaatagaaaaggaacccttacttatgtccaatttacttattggaatcaaaacccattctctccttacaggagatgcaatgacttttaattatctctttggtttgttgcattttggatctattgcctccttaaagccatacaaatatgaaacgagcaatgccatatttagacttataaaagtagaatattattgtttaatgacttc

SEQ ID NO: 7154 - DNA, 804 bp, Glycine max
  unsure (1)..(804): unsure at all n locations
  Clone ID: PAT_MRT3847_106468C.1
cttgcatagcctgcagggtctctcggttctagatcttgggacaatttgatgtattgaatgaaaacatggacaatacttaacttgtttcagcttcttacttacagaatcaattgaaacagattggctttccatatcattaaatttagcaagaaaacccaagtcactgccattgtgccctggaaaatgaagagttccctatattagaaaaggtatgctagtacaagacatgtattataataactacaatgcaactttggagacaagctctcaccagcacaagtgcccgagggcagccatccatgtttctgcccgtgatttgatagtgggagatctgggtaagcttcatgatcctgttttcttttcaaattcaggatgacatcattgggaaaattatgagagcctggtgtcattctcccgggcatatcatgaaatgtatggtttctgtgagggattgaggccccaaaatcatcagacttcacacctgtctctttttgaagcttacatggtaaatttaagtcggcaaaaccattattagaattgattctatatggtttctcaacagtataagttgacagtgggggctgtttgataaccctttcattctcacaagaatcaccttcactgtcaatgtactcatcagctggaagttgaagatccagtattttcttaccaacttttctgtaagtcaaccctgacagtttaggatctaaagattctttgatcgcagttggagcaggaagaggagtangagataattccctgctcttttcttgcatagaagccaatggtaactggatgcgttca

SEQ ID NO: 7155 - DNA, 340 bp, Glycine max
  Clone ID: PAT_MRT3847_106469C.1
tgaagtgactgattgcagcgatcataccagcttctttatggatgtgtacattgaaggcattccgtatgattaataactcaactcgatagctcatgatagttatcacgaattagtaaagactattgcacatatgtttgacactaccattctgatgtggacttaaatggattgaattcaacccgtaaaatgtcatgttctaacttattaagattgaaaaggaaatttgaatattgatggtgatttacctttgaaaaatttattataaactgttaataagtttaaaatctcaaatgtggatgcattcatgtgataaattcattcaccttaaaaaacttttact

SEQ ID NO: 7156 - DNA, 1824 bp, Glycine max
  Clone ID: PAT_MRT3847_10646C.1
ttttttttttttttttttttttttttttttttttttttttttttttttttttttttttttttttttttcccaaaaatcagcatatatttcctctataacattggtcctatattcctagaccatatattaactgatccgttaacttaatcaattccagaaaatttcatacgaacaaatgttaaaatgcatatacatacatctttcagaaactataatgctgtgtagccaattagattcaggatcgtgtctaattgcgtgctctatgacaatatcattgaattgagcatgttgatcttctcggtggtttgatatgaaggagctatcatattcttccttgatcagcctgtggtccaatgtatctagtgccattaatgattcacacaggcgtaaggaatacccccaaatcgcatgatccttgaccttcaacttcgtgaggcaaattcctcagattggaggatacatattatcactttcaacttcactttcaatttcactatcattttcgctattataggtcttgagatatgcctcatcaccctgctcaccatcctccacctctgagttctcatcatcgctaggataggcagaatccaatttgtcatacaatgcttcatctcctttgtcctttaccttctccatttgctctatttcggatcttatcctccccactttactttgcaaagttgaaatatgattcatgagtgcctcatgtcgttggagctcaattgagcgtgccaaagcctttccccttggcaaacggtttttgggtctcaatgttgaaggacgctggtaaaccttaccccgataaacaattacagaatatccttttgaaactttgtcaactgagaccagaacacctccactctcagcttcaagtgctagtgcaattttttttacttgttcaaaggttttagccttcacaattatcttgaccagttcccggtacttccaatgcaagtgcatgttctcaatagtaccatcaaaaaccccacgtctaccaagaagtaagaaagctttcatcctcaatcctaatttgcgaaacataaatctctcttcatcagttatactttcaggatctgctttgtattctgatggcttcaaaaacgactccaccttcattaaggctttttcagctctccttaactttctttcagcaaaggaaagcttctgttctaattttttaacaaggttggcatgccgtagttgttctacttctctcattattttttgtttgtgacgctcatccaatgttttcccccactttgcatctgcatccaaagtttcaccaagagtccctgcctctgctgacagctctgatgtattattagtcggtatgagcaatgatgacgctctcaatcttgcttgctcctcctcatcttgcattacttttgccattctttccctctccagcaaggcttgagtgacatctgctgataaaaaattctttcctcgaaagaagaccaagaagtctttatttctggagagtagaataccacctgtcaatttcttgatctcttctgccattctctcactggttgttagctgcacaccacgtttgagtgcaacctttgcaatagaacttatttcccacaatttaatcatggctacagctaatccttgaagctgtctgtttctacctaaagcaaaatgtggaggaagggtccttgcaatccttcgtagagcagttgcctcccttaaaccaagtgttgctctcactccaaaaggaagaactctgaagggaggttggtaaccgggaacagttactggaagcatatccgcatcgacaggcaatggatcacatccaggccaatctgtgtatctagg

SEQ ID NO: 7157 - DNA, 429 bp, Glycine max
  unsure (1)..(429): unsure at all n locations
  Clone ID: PAT_MRT3847_106470C.1
tcgntaccggggtcaactggtgtatggcttccccttcaatttccctcagccatgcttgacaacatgttcagaaacccaccctccttcctccaagacctcttcaccaaaaccttatcccgatcccactattgcgctttggttaggaactcggttgtggcttcttctgcaagcatgcgcctatcgtgctaagtgcctccagttattccggtttgtaatttgtcactgcattatgagattgactaaaagatctatgtggttgtggtttcttccatatgaaattaaagcatcatgtaggtaacaattaattgaaaacatattgcttgtttcattttggaagattgaactttatgtaatttttattgtttgtttcattttgaaaaactattatggcccaaaaattagaatgctatatttagaattttaattctc

SEQ ID NO: 7158 - DNA, 494 bp, Glycine max
  Clone ID: PAT_MRT3847_106471C.1
ctgtttgcacatggtgggatgttcatacgggtgtaatgcaatagatggtttggataaattaagttggattaaaatggatggttcaaaaataaatcattagttcatttatggtatggtacaattttatttaaaatccaaaccatccatgactttatatgataaaaaaaaaatcccaacccatccattaataatgtttcatgggtaagatatccaatccatccatttaaaaatatattattttttcccctcttttacgtgtcaaaaaaattctctccttaagacttctcttcttatgagcaccgttttcaaaagaacctgcaatgagccccagctcctatgattatcattgatccaatatcttaacatcgatggatcgtctcctttctttgtacattttgtaatcccatttatcagttgcatttaggagttcattgcaatgatggttttgctttaatttcattgtggtaatgtactagttccaactcttatgttgg

SEQ ID NO: 7159 - DNA, 667 bp, Glycine max
  Clone ID: PAT_MRT3847_106472C.1
tggggacagctaccaccacaaaggtggtggtggtggtggtggtgatgaaaacaacggcgtttcgttttctcaaacggctaataggttcgagaatcagaagcagttggtggggaaccccgttatgtttcagaacctcgagatttcgaagccacctggcagttccgtaacagaagatccaagtggggctacagttacaacaacagtagcaccacccaccgaatggttctttgggaattcttctttttcctcagcaggtaatggtaatgatggtgccaatagcaacaacaacaacattaacatcaacattaacgatgcaaacaacaattggagtgatgcccttgcttggggagattttcagcagcagcagcagcaacaatacagtgctttgccctagatttgactaaagagaggagaattaagagaaagaggaattagagatcgaggtagagatagctttttcttaatcttgtaagcaaaagagagagaagaaattatataattaatagctaggacaaatatataattgtctaaaaaccccttttattaattaggtctatgttaattagttagttttcttgttttatgttatgttcaaatgttcaaattatcatatatgtaacagaaaggataattaaagttaagaattaagatcatagctatgtgttca

SEQ ID NO: 7160 - DNA, 334 bp, Glycine max
  Clone ID: PAT_MRT3847_106473C.1
gatgtgatagtattatcattcattcgcatcggtctcacttctctctccacctataccctaactcacgacactgtacccctctcgaatccgtcatgacacgaggaaagtccaagaccgaatctaagacagcagattgcaaacttgctgtgaataataagggagccgcgaacaatgctaagaaactcgccggcaacgggaatgcagcgaaagatgctaacaagcgaaagaggcctccaagtgcattcttcgttttcatggaggaattcacgaatgtattcaacaaagaacatcctgaaaacaaatcagtgtctgctgttggcaaaactgctggagc

SEQ ID NO: 7161 - DNA, 211 bp, Glycine max
  Clone ID: PAT_MRT3847_106474C.1
gcgttccaccaggccataaatagaggccctaatttttatggagggtcgctcacaatattgttttatgtgtgtaataacaaactcctttcactttctgaccgaaccccatgctactgcttttttagaaaggacaggagggcttcatgggggaggggtctcacattgatttccataacaccactgtcccctaaacaacctgggaacgtgaaaa

SEQ ID NO: 7162 - DNA, 367 bp, Glycine max
  Clone ID: PAT_MRT3847_106475C.1
gttggttggggatggcaacatacctggtgacaatggggatgtgaattatgttgaaagataaaatgcttatcaggctacacatacacaacaccggctaattatagattgagagggcacatcttatatcttgaatgaatggaaagataaggagagatcacgttccttcttataaaagaacgagatgagggtcaatataataaataactataagcacactcgctatctaaaagaagttaataatgtacatgatcgggacactattctacttgaaacagatgctatctctatgattatcgacaatgattgaaacacttaaagaatgaagctgtgatgctaaaaaaagatgaattctatataccttgatatc

SEQ ID NO: 7163 - DNA, 3256 bp, Glycine max
  unsure (1)..(3256): unsure at all n locations
  Clone ID: PAT_MRT3847_106476C.1
cgaagctagaattcgctcgacctgggtttgtcccacaagtagtgatgctaagcctatatttgacatgaatttcatactacttatttatatggcactctcagttgctggttcatttggggttttgctgccagccatgatggtgttaaatgctggactttggacagcacagacacttttcacaaagatgttgcatagtgtgctccgtgcccccatggcattttttgattctacaccaactggaagaatattgaacagggcttccacagatcaaagtgtgctagacttggaaatggcaaacagaataggatggtgtgctttctcaataatacagattctaggcactattgcagtgatgtgtcaggtggcatggcaagtatttgtcatcttcattccagtaactgcagtctgcatatggtaccaagtatgtgatcctttttccttgatctatgacaggaacagaaaaaagtgagatacattctagtttcaaaatttatacaagatataatacgatttctcaagtttatcatataaacaaggaaagtcatatcagtaatgcaacaaagttaaaacttaagacattggaattggatgttaaaaactatgtgaagtatatatttaaattttaaatttaacatttaaaacagaataaggaagtgatagtacttatcttaaactactagacagaaaaagactatgaaattagtctctcctcactgtcgcattctaacagaagtcgaatgatgtttatttcagcgatattatacgccaacagcaagagaactggctcgcttagcacagatacaaatcactccaattctccaccatttttcagaatcattagcaggagcagcatcaatacgagctttcgatcaggaaggccgtttcatatacacaaatcttctccttgtggatggcttctcaaggccatggtttcataatgtgtctgcaatggaatggctttctttcaggttgaatttactttcaaattttgtttttgccttctcactggtcatgctagtgagcctccctgaaggaataatcaatccaagtattgccgggttggcagtaacatatgggatcaatctgaatgtgttgcaagcttcagttatatggaacatatgcaatgcagaaaacaagatgatatcagttgaaaggatccttcaatatacaaatataacaagtgaagcacctcttgtgattgaagacagcaggccgccaagcaactggccagatactggaacaatatgtttcaaaaatttgcagatacgttatgccgaacatctaccatctgtattgaaaaacatcacttgcacatttcctggaaggaagaaagttggtgttgtaggacgtaccggtagtggaaaatcaacactcatacaagccattttcaggattgttgaaccaagagaaggaagcattataattgacaatgtggacatatgcaagattggtctccatgacttaaggtcaaggcttagcattatcccacaagaccctgccttgtttgaaggcactgttagaggaaacctggatccactacagaaatactctgacattgaagtgtgggaggctctagataaatgtcagctaggtcacctagtaagggccaaggaagagaagctggattccccggtggttgaaaatggtgataactggagtgtgggccaaaggcaattattttgccttggaagagccttgctgaagagaagcagcatattagtactagatgaagcaacagcctcagtggattctgcaactgaatggggtgatacagaacatcataagccaagagttcaaagataggactgttgtcacaatagctcatagaatccacacagttattgatagcgatttggttttggttctcagtgatgaaagagttgctgagtatgatgaaccatcaaagttacttgagagagaagattccttcttctttaaacttataaaggagtattctggaagatcacataacttcagcaacttggcaactcaacatgtccaaagcaaggagctattataggacttcaatgatattaattaatatattggagaggtaattcttcgggaaaacaaaagcaccatctaaactatttcaaccacagcttcaataaaaccaccaatgatacatataaaggggtttcaggccccgcatgtccctgccttgtttgaaggcactgttagaggaaacctggacccattgcagcaatactctgacattgaagtgtgggaggctctagataaatgtcagctaggtcacctagtaagggccaaggaagagaagttggaattcccagtggttgaaaatggtgataactggagtgtgggccaaaggcaattattttgccttggaagagccctgctgaagagaagcagcatattagtactagatgaagcaacagcctcagtggattctgcaactgatggggtgatacagaacatcataagccaagagttcaaagataggactgttgtcacaatagctcatagaatccacacagttattgatagcgatttggttttggtgctcagtgatggaagagttgctgagtatgatgaaccatcaaagttactagagaaagaagattccttcttctttaaacttataaaggagtattctggaagatcacataacttcagcaacttggcaactcaacatgtccaaagcagggagcaattataggactttatggatattaactaatatattggagaggaactttgtgacaccctctaccccacacatatatgtactaataataaaaggaataggaatgcggaattaattaaaagttttaaaacacatttaaataaaagcatttcaaaaagggtaaaagattcacatttacttttctaacatcataatagaacttgttcaaataaataataaaatcatctcgatcatacccggttcggcctggccgatcggaccagtccaaccgggactagtttcactattggatcgctcatgcatgtgacccgggatggcccggccaagcccggccaattttgtgaaaacccggtgacccggctggttttaaaaacccagactgggttgtgcacattaaaaaaataatgggagtgcagaaaacaataatgggggtgcttaaagtttattcacactctttttgtttattaggaaattgggcttctgggctcattttgtttacgaaaattggacttgtgttttaatttaggttgttgttatttatacttttttattactaatacacttcacnngtgttatcaactttaatac

SEQ ID NO: 7164 - DNA, 1887 bp, Glycine max
  unsure (1)..(1887): unsure at all n locations
  Clone ID: PAT_MRT3847_106477C.1
cttcagttcgtcaatagtgactgctctctttgtcaaccaatcacaatttagaattttcagtctatcatttttaacttaaatactggttcttatagtgatatatagagagagacaaagagtctaacttgaaagtttttctctttcaaaacctagtgacacttcttctgtgtcagagtttgtgaagtgaaccccatcaacagagtcccataataatcatgaagaaaggaaacttgggacttggtctcaaactctcagttcctgtgtctgatcaatctaattttgccaggttcctgactgaaagtgggacttttaaggatggggatctgcttgtcaacagggatggagttcgaattgtctctcagaatgatgtcgaagctccacctccaatcaagcctacagacaaccagttaactttggcagacatagatgtaatcaaagttgttggaaagggaaatggaggggtagttcaattggtgcaacacaaatggactagtcagttttttgcgttgaaggtaattcagatgaatattgaggagtctatgcgcaagcagattgcacaagagctgaaaattaatcaacaagcacaatgtccttatgttgttgtctgctaccaatcattctatgaaaacggtgtcatatcaatcatcttagagtacatggatggaggttccttagctgatctgctgaagaaagttaaaacaattccagaggattatcttgctgccatctgtaagcaggtgctgaagggtttagtttatctccaccacgaaaagcatattatccacagagacttaaaaccttctaatttgttaataaatcatattggtgaagtaaagattactgactttggtgtgagtgcaattatggaaagtacatctggtcaagcaaatactttcattggaacctacaactatatgtctccagagagaatcaatggaagccagcgaggctacaactacaaaagtgatatatggagtttgggactaatattacttgagtgtgctttgggtcggtttccatatgcaccgcctgatcaaagtgaaacatgggaaagcatttttgagcttattgaaaccattgtcgataaacctcctcctatccctccttctgaacaattttctacagaattttgctcatttatctcagcatgtctacagaaagacccaaaggatcgactgtcagctcaggaattaatggcacatccttttgtcaacatgtatgatgacttggaggtggatctttcagcttacttctcaaatgcaggatctcctcttgcaaccttataaaagtttccctgcttgcaaatgaggagcgtttgcagatgagttgaagaaccagctcctagagtcacttcaaggattctgtatttagttgttgagtgattgagttcaatttgttgagaaactcagatgcaagggtcaagaaattgcaataattgacatttgaagaactttaatgctgaagttaagtatcaggggctacttgcaacaaaatgtttgaaatttatgattgcaacaaaacgtatcactaggatttgcctgagttgctgataatatgatctgatgtacaaattttcatgagatgaaagttttgtcaagctgtcccaaatgaacgttttgagtcacactaggtgaacagttcctcaagttatatttgagactttttatttggttaaagcttgtcaaatttcctgattgatgatgggttttcattgcttgcaaattacatatcaaatttaagacttggaaccattttgttttcattgcttgcaaatttaagacttggagttggaaccattttgttacgtgatgccctagggatgtcatatccacgtttgnntcttcagttgctgcttttgttttgttttctgttttttctctnntatga

SEQ ID NO: 7165 - DNA, 286 bp, Glycine max
  Clone ID: PAT_MRT3847_106478C.1
gcataaaacccgatataaaagaggggggggggaacctccaaggtacattaccaatatttgcaaacatactgcctgcgcaaaatacatatacaagcgccatgtgtttatactggggcaaccgcaacgcttatggggcttttactggcaaagaacactaccgtctatggaactttgccacaactttcctctttttgccgccgacaacaccattcttatattttgcacgaatacaaacgcaatgtggccaaattttacccctcagaactgggaccatccaatatatcat

SEQ ID NO: 7166 - DNA, 542 bp, Glycine max
  Clone ID: PAT_MRT3847_106479C.1
cacattactttttttttaaggattacaacataaaattccggctataaaaggatgtggcctatcactactatcgcaatccttatgcctcatggtaaggccaccattacaacagccttcttgggcagaaaagctggccttgtgctcatccctttataccaccacgctctattaaggagagggtacttgtttcacctgcgccttcattgtaaggggccagcgacttatcatccttgagaaagccaggctttccactgaattgatggttactaccagggagctggatctgcccagcctttttttccttaagactaccaacaggttcagacaaaaataacactgtattcaccacaacttgaccctggagatttccttcatcaacattatgaacagatacactaatgcgaacaggtccaggatgaagagccagatatagatcttgggcgatcagagcagattcgtcaaggttccgcgctatttggctcaggttgttccgcaagtggaggaggagcctcctgtgtagacctaggcggagaaactccttg

SEQ ID NO: 7167 - DNA, 553 bp, Glycine max
  Clone ID: PAT_MRT3847_10647C.1
gaagaatagttgctcaatatactagtgctggaacttacacttttgtcagtttgggaataaatagaagggtatattcaattttctagctgtgatttctttgcctgaatatgtatgcaaggacaaaacatttgaagcaagtaaaatcaaatatatttgactgctgaattgtctatatgacttatgaactaatcaacaaaatgattggataggtaaactattttctcctcttgaaatcctcatccgaatccacactcttgagtcttcttcgttccacaatccagaagaatgaagtgaaatttattgtattaaacttcaattgttttctgattgagagctgtgtatctccatctctccttctccacaaaatcagcatcaaggaacctggcaacaaaagtccatagtttatatacatcttcaaaattagccaggaagcttaatgcagcagtaaccacagttactcctagctcatctctatctttcttcttgatggtgggtactccttggactcttccttcttaggtctgtagaactttccccttgacttctgcatact

SEQ ID NO: 7168 - DNA, 457 bp, Glycine max
  Clone ID: PAT_MRT3847_106480C.1
taaaggggggaaaacagggccccaaaacaaatggggtttccatttttccccgtttttttttttaaaacttttaaaatgggggtttaaaaattttaccatgttttatttgccgcaagttcccccttttataattaattatggaagcgctctttcagacaaagctcttcaaacaattggaagagccttatggcttataataataataaaccccccacttttcccctttttttgacaagccgcaacaaagcttttttcaaaattccttggtggaaatggtcccttatttctaaaatgaatttacaatttgggcgaaaccgggttctttttccattttaaatgccgccaagggctttttttaaattccctccaaaatacaacattaggtccccgccggggacccttcccttcgggagattaaagaaaattctttttttaacaccatttgcgcctgggggca

SEQ ID NO: 7169 - DNA, 582 bp, Glycine max
  unsure (1)..(582): unsure at all n locations
  Clone ID: PAT_MRT3847_106481C.1
tgcaattagacaaattattctgaactctgatcctcaactagaaatatttgtgaggcttctaaaaagcactagtctgtttctaaaagctgcagttcttctttatctgtcaaaaccaaaggcaaagcagatgttatcttcggaatgggtgccattaatacttcgagtgttggaatttggtgacaaattgcagaccctcttcacagtacaatgcagtcctcaagtggcagcattttatgttttggaccaaattcttacaggttttgatgaagacaagaacttagaaaatgcccggcaagttctttcacttgggggattgacactgctaatgagaagaattgatggagaggtccatgagagaaacaatgctgctatgataatttcatgttgcattcgtgccgaaggaagctgtagaagttttttagctgacaacataaataagacttccttactcgaacttattgttattgagagtaaacaaaattccagtggctatgccttgtctgtgctagctgagttgctctaccttgatagaagaaccaagactntaaatntcttgagaggacttaaagatggatggggtgg

SEQ ID NO: 7170 - DNA, 276 bp, Glycine max
  Clone ID: PAT_MRT3847_106482C.1
cacgcgtccgcccacgcgtccggttgcgcaacaggtcaatactgccgttcatgtgccggaggcggatgctctgacctgttctagtatcatgaaacccgactaacacatgcaatagctgcagagacacgtgcataacctagtggatcatgaggaacaacgtgcattgctgcttgatttgctacaataggcagaggtgtatgaggacgactgcacatagcttggtgaaacaccactatgtgtgaataccttttcaagttcgtgcaaaagattttacaa

SEQ ID NO: 7171 - DNA, 454 bp, Glycine max
  Clone ID: PAT_MRT3847_106483C.1
acgagaatttacaaataccagaaaaccaaggataaatgcacaggtcaagcaaatataaaaccagaaaatagaatcaccaagcatacacttataattttattttattttgaaagaacacacacttattattaaattgtgtgtgtgtttgttgaccattatttgatctaatttaaaaaagtattaaataattcattgtatctctttattttaacgtaaaaattatacataacataagtaaatttgaggtttaattatctggtttctatacttcatatttactgattttctacggtggagacgtaagggaaatatggttcacgtggtgaagtaagaaaataatatttcaataggtcaattaaaattgaaccagtaattatgaaaagacctttaagccctttgtaaaaaatggtttacttactttacaggatcattaacatcaattacgataccctat

SEQ ID NO: 7172 - DNA, 257 bp, Glycine max
  Clone ID: PAT_MRT3847_106484C.1
aaaagaagtaaaagaaataacaagaagaaaaggatagagacactatagacacttagagggcttgcttcctcactgcccaaaaggccaaaactacactcaaccttttttagccccctttatctcccctccttctctcttatactcaacctatccgaatttcactctccaaaattcagacttacccttttcgtccatctgatatctcattccccgcatgatcaagcataggaaggttcctagcatggtctttgttatat

SEQ ID NO: 7173 - DNA, 251 bp, Glycine max
  Clone ID: PAT_MRT3847_106485C.1
ccacgcctccgtccactctttcgaccgctgcaagatgacatcagagggggaccaacagtggtgtgagtggagcctttccagtgtgcaattgcatctgctgccctttcaatcattcaaacttggcacgttgttgggcttggagccaccatcattgcccacactgcctttttttgataaggatagcacgtatttggggcgttcttgatgctgtagggcttactcgcttcatcttcggatctttcccattattt

SEQ ID NO: 7174 - DNA, 121 bp, Glycine max
  Clone ID: PAT_MRT3847_106486C.1
ttgtgctgatatccgcactttggctgccagagacactatggtagccacaggtggaccttcatggaaaaatccaactggcacaagggatggggtcctttctaaacttacggaagccagaaaa

SEQ ID NO: 7175 - DNA, 323 bp, Glycine max
  Clone ID: PAT_MRT3847_106487C.1
gtaggaaaattatgggcaaagcgttccttttttcttttctattgcttggagtgattaaagtttggggtttgttgatttcgtgcagtgattaagagaatggcacaagaaatcaagggaacccgtaatgaaagggagatcgtacctatttggttctctggttcgatagtggtggctgcccaatgaggactcgtggagaccaagtgtaagaaacgagtaaggaattcctaattcttctattgattcttttattatctcttttatatgtactctttctaattattgacgatgggaaaatgcgtgtaagccactgtcgtcccccatac

SEQ ID NO: 7176 - DNA, 303 bp, Glycine max
  Clone ID: PAT_MRT3847_106488C.1
aattcggctcgaggaatgcctgagccaaatgcatactctagtaagagagaattcgattaacaaggattggtgttgtctagcaaagcttactggcattgtgaactctatcctttggagctctgacgaccgaaaagtgaagatgaaaattttgataactttcaaagaagctttataggggaatacaaaaaacaaggagaaagtggcttaaactcaaggatgggataacaatattttctgcttagggagggactctagcacttcaaaggcagctattgatttgctacatgagttgctttaaaaaca

SEQ ID NO: 7177 - DNA, 467 bp, Glycine max
  Clone ID: PAT_MRT3847_106489C.1
gagctatgacgtcgcatgcttaagctcggtattctcgctattgtgctcgagaagaaaagtcaaagacaatgtcagggatcattcacaagattgaggagacccttcatgtgggaggccccaagatggaggaggagcacaaggttgagcttaagcttcgagaagaatgcaaaggtgtgccatcatggagaacacagttctgaataccgaggcaagtgtcatgccgatgagccaaggcttgggaagaagggaggatctgctttaagcaagagtgtttatagactggaatcacagtcctgatacactggccggtctgctgcggcaggctgttcgtgcaagctccagatctctacgagcggaccatgcggtgcattaacatcgacaccgtactggtccttgacatggccgcttatctaaccctaaagtgccgtgctaacggcctcatgaaactcgtcttcagaatattcccg

SEQ ID NO: 7178 - DNA, 403 bp, Glycine max
  Clone ID: PAT_MRT3847_10648C.1
gaacccctaggaatattgacaagaatgatgaactaatatccacaaaatcataccttgtcgcgacgaaggatgctactccgctaacggaaaggaacgtgaaagacccactgagaggtggcctggagcacattttactcactttggacatgtggggtggaaggaagctcttgaaccggccagggttcctctaccataagcacgagaatacgagcatctgatgggcaaagagacaacagctaaccagaacaaaaacaaagagagtgttcatctgtatgaaaaagaactacatacgtacacatatactaggccagaattgtgccattaacagccaggagcgttcaagaattgatcaatgggggttgttagcggcagttgcaaagaatgatgatgctcaagcgatatg

SEQ ID NO: 7179 - DNA, 327 bp, Glycine max
  Clone ID: PAT_MRT3847_106490C.1
catgcgcttgggattccggaaaatgggttcaggcagactgtacgaggcctctctcttgcgaatgaacgcatcctttctcatcgcatggttcgacaaagggtgtgttgctaccatcctatagtttgaaaacttccatttggtacagtgcatggtcaggccttctgcttggaatgatattaccgagcggttgttttgcgatggtttgactggatcactcggagctggtatagattagccaatccagactgcgggcgataatacccctgagacgattaacacacaatactgttattgttgaatgtcggcagtgcattcttggataccaat

SEQ ID NO: 7180 - DNA, 128 bp, Glycine max
  Clone ID: PAT_MRT3847_106491C.1
accatgcacttttaatcaacttatgttaattggaccaaaggtcataagccaacatatcaagttgacatgatcgccacccttttaccgatatatctattaatgggaaccgctacttgcctgtaggaaaa

SEQ ID NO: 7181 - DNA, 461 bp, Glycine max
  Clone ID: PAT_MRT3847_106492C.1
agtgattgggaatcatgcaccctctcttggccactcccttcagctgagagaagagctgcaagtacttacagaaggaaccaatgtcctaccacctatggacccaatggtttctcccctattcaagactcaacctcactattagtgcggagtcaaattgatcattggccatctgcttcactgggtggtgaacatgatcttaacagagaaatggaagagtgacgaataaggaacaccaatagttttctcttgtttgtgtggataactcaacatgtgatgatcccttgttattgatttatatttcattcagaggtcatgagttctttatccgtttcaggagattctcctgtgtggtaattaaatttcaaggcattaggatgttatattctgtactccattctggcccacatagccagctgttcattatgatagtaataaaataataaatacgtgctgcaccccat

SEQ ID NO: 7182 - DNA, 709 bp, Glycine max
  Clone ID: PAT_MRT3847_106493C.1
aaatttcgtcttttttctttttttcatacctgttttaaaactcaattttaacatggacaaggaactgaggaacaaagtacaaaatattcactgcatatatataatatatcaaacatataaactcgccagcaccaatttgaatacaacaaattcaagcttcaaatgataaacgctaaaatggcttctgcatagtacgtaattacgggtcattttaaggcatgcttgatgataccaggaaaatggatattgatgaaatagtcctcccaatcaatcatttttgggtcaaagtaaaaaattccgtctctaccccaccttgtcttgccgatgataataacttttctgtattcatattatcaaacaccccattgaagaacaagtaaggcttgtaaagttcaaccaatcgcatgacagtacggatcttcgattgaagtcaagatacattttctgaaaatactggcatgaaactgcattgacaagctctagtccctttaagggaagcaggtaacgaatgtacatatatttgcggaagctatccatgtttcttaatatggtaaatttgccaacctttacgggctttccatccctgtttatccaaggtttttctgtgaaatatcttacactatagtctcgaagattaaggtacataactggatttacaacagaggaacccaaatgatatatgatatcactaggttgatttgcatgagcc

SEQ ID NO: 7183 - DNA, 161 bp, Glycine max
  unsure (1)..(161): unsure at all n locations
  Clone ID: PAT_MRT3847_106494C.1
cntgctctatactacacagtacagacacgagaagaatnntggcttccatcctccactactnnntagncctnctcnnctntctngcnctttncngttctncttatccgantcagtcacccctacaaaaccatanaccttgttgttctacccgtncaaaatga

SEQ ID NO: 7184 - DNA, 294 bp, Glycine max
  Clone ID: PAT_MRT3847_106495C.1
gattatatttgcgttgaaacatgtcaaagccatggccacctccaacttctctaatgatctctccgtctccctagccttcgttttggtgctacatagcaaagcacactcgaccgataccgtttctttcaccttcaacaagttcaatccagtcgatccaaacattatgctccaatatgatgctagtatttcatcctctgaggtgttacaactcactaaagttggcaccaacggcttgcccacctcgggatctctcggtcgtgccctttacgctgccccaatccagatttgggacag

SEQ ID NO: 7185 - DNA, 227 bp, Glycine max
  Clone ID: PAT_MRT3847_106496C.1
tgatgctagagatagtggtgatcaatatgtgcaagaatcgaaaagtttgctgtgatattctaattggaaacatgatagctagacgagtagtgatggagtagtttggcgatgctaccccaaaaggagctgaaaacttcagggctatctgtactggggacgtatagatgggtagatctgggaaacctgggcactacaggggctctgtagttcatcgtagtagtccagaa

SEQ ID NO: 7186 - DNA, 796 bp, Glycine max
  Clone ID: PAT_MRT3847_106497C.1
gatgagaaaaagaaagtgatttgagttggttttagtcagcagccataactaccaaaacctagaacaaacattggttgtgttcccccgttttctcagtcaccatggccgcagcagcagcagccactctctcctcttccttctccaaaccctcctctcttccttttcacacccactcttactctttccccacaaccctaccaacagtccccactccccctcgcgccgccgtcgtcaaaacccctctcatcgtttactccaaaaaccccatttccgacatcgtctcctccaccgagtcacgctccggaggcgcctgggacgacgagaagccgcgcgaggagtgcggcgtggtgggcatatacggcgaccctgaggcctcgcgcctttgctacctcgccctccacgcgcttcagcaccgcggccaggaaggcgccggaatcgttacggttcacaacaacgtcctccaatccatcaccggcgttggtctcgtttccgacgtgttcaaccagtcgaagctggaccagctccccggcagcctcgccatcggccacgtccgctactccaccgccggccaatccatgctcaaaaacgtgcaacccttcgttgccggctaccgcttcggctccgtcggcgtggcccacaacggcaacctcgtcaactaccgcaccctccgaaccaacctcgaggacagcgggtccatcttcaacactacctccgacaccgaggttgttctccacctcatcgccacttccaaacacagacccttcattttgagaatcgttgacgcctgtgaaaagct

SEQ ID NO: 7187 - DNA, 185 bp, Glycine max
  Clone ID: PAT_MRT3847_106498C.1
gccgaaccttcgtctaggctataccttgacagacaaatcatcgagtgggaacattaggattttgtgtatgctagagatgcctattacgagcttgctagaggtggatccactaaggatactgagatacttgatcggagccgtagctatgatgatcggagtattgttacccttcagttacatgatgt

SEQ ID NO: 7188 - DNA, 222 bp, Glycine max
  Clone ID: PAT_MRT3847_106499C.1
gggagatgttttttttaagattatttaagtacaaccctaacattattaaattaataagaaacaatggcaggaaaacaatatatgaataattacactaatagttctaataggggggattgagaccagcactatatgttatctaattaattttattgacacgggggctaaatgggttgaattgtgtaactgttaataatgaaccaaaaggatggggctatgatg

SEQ ID NO: 7189 - DNA, 118 bp, Glycine max
  Clone ID: PAT_MRT3847_10649C.1
gtgggctccgctcaggctgctacatggagaccctgtgctctgcgccccgcctggattgccggcttccccgagagggtaggcctgctcccccacgccgcggaagtcgagtcggggaccc

SEQ ID NO: 7190 - DNA, 263 bp, Glycine max
  Clone ID: PAT_MRT3847_1064C.1
aaaaaaagaagaccgatttcatttcttttaaaaaaaaaaatttgcaagagggatttgctatcgcttttcattaccgtcccccttatacattttaagggccccctcatattggtcatctagcaatttcctgaccggccaaataagtaccctcaccatacccccaaatctaaaaaataaacctaataaaaaacccttgctgatgaacgggaacaacttttaaaactgtatccgggccggggtgagcaaataaaacccaagtttta

SEQ ID NO: 7191 - DNA, 520 bp, Glycine max
  unsure (1)..(520): unsure at all n locations
  Clone ID: PAT_MRT3847_106500C.1
taagggggttncgttttctattgagtcctccgggagggggcaaaaacatttcttnagtgagtgattcaactccaggggggagtccaaaaatcactctttattggggctacctcctcttttttatnaaaagagtgagtcggtttatcgaangagcataaaaaaatggggccagacctcttncgggaataatttnngagagccaaaacctaaaataggtgtgtttactagcaacaacataggtggggcggtcaatcaatatagagtgagccgaaatctgagtcaaatccaatatagcacccagtggtacataagagatgtgttgagtcnagtcaattgcgacttcnaatatggggattcaaagggtcaaataggaaatgagactctgagtcatcnaactataatgagatacacgagcaaccaacatttatccaatttgagaaagaggcanaagaaatggggcngtcctcttatttttatttctcnagcggggagagccatgagtcnngatcctaatgcgtat

SEQ ID NO: 7192 - DNA, 248 bp, Glycine max
  Clone ID: PAT_MRT3847_106501C.1
ggtaccggtcaggaattcccgggccgacccacgcgtcagaccgctggtacgacacacacatcagggaaatacgtccatctgatgggatcttagaagcgtgtgcacgatttgagcacacaactggcatttgacgtcctcatcgtcgttttcgattaagagagcaatgacacggacgatccaaagggttcacacttacatcggaggaaaggtccgtcgaagcacttggcaacgatagccgctcgcaagtc

SEQ ID NO: 7193 - DNA, 688 bp, Glycine max
  unsure (1)..(688): unsure at all n locations
  Clone ID: PAT_MRT3847_106502C.1
attcccaggtcgaaccaacgtccgtacggctgcggagaagacgacagaagggggtgtaaggacttgtttgtttgattagtaaaaagatgaaggttgctgcagaaggctgcaacttactgttattgttcattacctcttacctttcactgatctcagggcttggcgtccattctttgtcttatgatcattctgctaccacaaagtgtttggcagaacctcggagagcacagtatggaggaggcattatagtaaatccaggatttgatcacaacatagagggttggacagtatttggaaaaggagcaatcaaggagcgaatatcgaatggaggcaatagattcattgttgctcacaacagaacacatccattggatagtttctctcagaaggtccaacttaagaaaggaatgctatacaccttttctgcttggcttcaggttagtgaaggaagtgacactgtgtcagttatgtttaaaacaaaaagaaatgaaatggtacgaggtggccaagtgatagcaaagcanntggatgctggacccttctaaaaggcggcatagctgcaaacttttaagccctgttgaaattctttttgagagcaagaattcagctgaggaaatatgggcagacaatatctcttttacaccattcactanaaagcagtgggagatcacttacagacgccagcatg

SEQ ID NO: 7194 - DNA, 416 bp, Glycine max
  Clone ID: PAT_MRT3847_106503C.1
ggctcgagctcttcctcttaccacgctctttcattttatacgcgctgagccaccctcgtgctccggccggcctcaccttgaaggacactatctcccactgcccttcaaaaccgacaacggagacaacgcatagaagcaccacgttgggcctgccaccccttcggatacaatgtggtcaggacatcacaaacattaggctgctgatagacacgccaaccaaaaactaaagaataggtggactgaaagagaacaagattattgtttctggaatgatgacattgcatcccctggggggaacctatggacgggagtcataattaacaaaccagacggaggggatgcttatgaacgagttacaaacgagctcgccagagaagatgtcactgttggtaactgacttgctgatttacttagaa

SEQ ID NO: 7195 - DNA, 248 bp, Glycine max
  Clone ID: PAT_MRT3847_106504C.1
tacttctattaactctcctcaccaaaataaatacaatttctctatgaagcacaacaccactactccatcaattgacacattttctcaaacaccaaacaaatgtttacccaagattcctaccctttttaaacctaccattttgaaccattacccccccatcagtaaagaatcccaattgtataacctatctaccatcaacaattcttttatctacatgcctccgtcaccatctgaataaaaaagtgacc

SEQ ID NO: 7196 - DNA, 230 bp, Glycine max
  Clone ID: PAT_MRT3847_106505C.1
gcattgataaagtcaactagcagtcttcgtgatgcattacttccacaagatgtaccatctctggcgatccccctgttactgcttattgctcaacatcgttctttggttgttatcatttcagatgcaccctacattaagatggttagtgagcagtttgatagatgtcacggaactctccttcattatgtggaatttctttgcagtgcattcactccagcatcaaattatgg

SEQ ID NO: 7197 - DNA, 499 bp, Glycine max
  Clone ID: PAT_MRT3847_106506C.1
atcatttcgaaatttctttcacgttttctttttgttttgcgcaataaagagcacaagttcgaacatagagtaacgcagatgaagaaggccacaagaatcgtttcaatcttcgtgatctcgatgctctgtttccaagaactcatccacgtttcttcgtcacctttcttgtacgcacaccaggtctatgaggaatcttctggtggaagaaatcttaaacaggaacaggaacaggaacagaaacatgctcaagaagtgcattgctccagggagagaagtagggcagctcggaaagtgatagaggagtatttgacaccatttatggaacgagaaaactaccaactttcaagtaagtgcaaacttcaccctgaaaatgatatattcacggatcaggaagagcataaaatttacatagatcgacatgaatggcggtgtggatattgtaagaaaagctttcgtgaagaaaaatttcttgatcagcattttgacagcagacactaca

SEQ ID NO: 7198 - DNA, 341 bp, Glycine max
  Clone ID: PAT_MRT3847_106507C.1
ctcgagcttatttgagctagagagcgctagcggctcgaggagaaagaaaaagatttgaaaggtaaaggtgacgatggtgaatagaaaaaggagaaggatacgaaggtgaagaagaaaaaagaaaacaaagacaagggtgacaaaactgatgtagagaatgtcacggggaaagagaatgatgggggggattaagatatgtggatggtagaggggcattaggcatttgaggactaggatggcatatctgattcacttaaatcaagcgcattgctatgtgcgatgagggtgtttaattgtaaaatgtaacgtagtataagtttgataaattttgttgtaagtaa

SEQ ID NO: 7199 - DNA, 174 bp, Glycine max
  Clone ID: PAT_MRT3847_106508C.1
cttctcatctgaagaccggagatccagtcaagacttgagtcttcatccatggccagtcaatctcaatcatctgtcgcataaggcacgacaagggattttagcaacgccatcttagacagtcacaaggctccgaatcgcctcgtggctgacgcagctgtgcaacgacgaccactc

SEQ ID NO: 7200 - DNA, 491 bp, Glycine max
  Clone ID: PAT_MRT3847_106509C.1
caggacaagttacaacgtttgacgctgcaaaggtgcagaaacatgtcatggttgagtggcctcagagaactgaagcctttgcttcacttgttgctgccacttagcatccattgggtcgctggtgagatgacagtttttgttctcgttgatgtcacaacctctgctttgtgccctggagagtcaacttgctccaaagttatttatatcaatgggatccatcaaacgattgttggaatttttaggatggtggtacttccactattcagatgagcacggccgtaaaccctttatcattattaccatgtccacgaccatatttccctttggtatgctcgttgacatcaaatgcattcagacttgtgaaaatttaccacttcaatatctcagtgactaaaatcacaacaaaacttttaaatttcattggtaattctccttttattttattccggcgggttttctttttccttttgtagtttgttcatgaaattgat

SEQ ID NO: 7201 - DNA, 1204 bp, Glycine max
  Clone ID: PAT_MRT3847_10650C.1
cactaggactgtgcaaaggttaaaaattcttctcttggtaaaaggctacttttaagccggaatctaatataaatacgcttctgccagatgacagaaggggatgtctcataaggaaagccaagggtaagtgtgggactcaaaacggtgatgatggttgaagttaagaggaaggagccggacaccgaaaccagtcccggagatgacacaacaaggcatactaagaagacaaaggtccaaccaggtgaaacctttttcgcagttaaggtcacagacaacatcaacacatcatctccgtcgtttactccttccgcatgtaaagatattcagccaatgcttgacagcgagaaaacgccatcctcggactccaagggttcagcgggaaacgctgcaccgtctaattattcatcaatcgttgacccacattctccccaaggaaatggcagtccacaatctcaaccctccgtctcgaccaatcgtagcatatcagacgttgattcagcggtacaaatgttagaaggcaggctcaggggtcactgtacatgtggaccttgatgagcgcgtcggagaatatgttgtgaagatcaagaggagcattaattcaactgcagaaaatgaacataaattggaagagacaaagcaattggctgaaagtgctggaatgttgttagttcaagctgaggtccttcgtcacatgggagagcaactacttgttaagtacagagaatcggttcaacggtgtaatccgaaagcctgcgctcagaattgatttctcaccatgagtaactttcctacgttcattctgccattctgggataaaacttaggttgactaagtcaggtgatttttgagttattttttaatgaatattaaaattttatctttatatgataatacgttttattgatgtaaattattgaaaaattttaatttttattaaagaatatcattaaaaacactgagttatgtcttattttttattatgttttttctgttaagaagtatcttgcctctgatccgattgcattgaattactaggatattaagatgtttctccactagctgggtggagatcgtagatctaggtcgttgttgtaaaataacatggtgatgtacctaagaagtaacatgggtatggttctgatcttttacttttgaattcgatttaataaaagtgttgttttgttaaaaaaaaaaaaaaaaaaat

SEQ ID NO: 7202 - DNA, 309 bp, Glycine max
  Clone ID: PAT_MRT3847_106510C.1
gagcaacccagtcacgatgaggcaaggcctcttctacatcagtcgcaacccatattcgaacgaccaacgccacctgacactcccgagtttcttctaggatggaccgctgatggactaccgctggaccacggaaacgctatgggccataccatgggccgtgcccaagggaactcctccatctgcgcctgactcggacgaaccgatcacttctgcagcagcgatctggaagtgtgtcttcttgggaatgaggctccttgcgtgctgcatggaaacaatgttgagagacttgaatctgctcctgggacattt

SEQ ID NO: 7203 - DNA, 130 bp, Glycine max
  Clone ID: PAT_MRT3847_106511C.1
cattgctccaaggcactcgtcaattatttgtcactcatgcgtcccactcggttagaaacgagatatcttctgcggaggacgacttaagcactgttggagactcaacgaaagctcctatcaggacgagatc

SEQ ID NO: 7204 - DNA, 392 bp, Glycine max
  Clone ID: PAT_MRT3847_106512C.1
aaatagtgcaatgtatctaagacatgctatcttaattcttataactgataattaaagcggggtgcatcaatacactacaatacactttggaactgtgaactatcaatatacgacacgtatttatgcctgtgatgcacacaacttatgccatgatgattcttacgcgagtgacagcagcttctgacttatttgattgatcattccgacccaactaggggcaatactcattatactatgacacttatctttaaactttgcagcgtgacagggtggcctggaccagcgaccatattcttatggactatgtgcccccactgggtaggacccacaggcatgcacagcacagatgtgcttctccatttccatgttgaagttagcattgtggcccccac

SEQ ID NO: 7205 - DNA, 386 bp, Glycine max
  Clone ID: PAT_MRT3847_106513C.1
gcgtccgcccaggcgttcggtgaagctggatcattccttcgaggtattcatggcaaccatcatacctgcgccctggtgattagccaataggaggcagaggactcatttgcagacatcacgcattgtaccgtcagtataaagctcagatcgaggacccacattgtcctagaatgcgtcaacaacgccaactgctaactctgctatcaccacaagaagatcttcaacttcgaccattacatcgaaagtcaccattcttcagcctaaccgccaatggcctcgtactctgccgctacatgctaaccaattgcatcaactataattacacctaccattcgactctacctatcttcagactaatcatacacatagccgattatgctctactt

SEQ ID NO: 7206 - DNA, 274 bp, Glycine max
  Clone ID: PAT_MRT3847_106514C.1
acaaattgagctgttcaatccaagttcataattaatcatttagcccaaatgattgcattaatatgattggagtagctaattgaataattagagtgtgatacatttgtacgacaacatgttaattgatgggaaaaattacccaaattttctttgaatcagattgtggaaaaggctaactaaatgctgaataacatcatacacagttgatacgagagatcagccaattatacatatgctgtatggttacataaagctgtatttcttaatcatcttt

SEQ ID NO: 7207 - DNA, 342 bp, Glycine max
  unsure (1)..(342): unsure at all n locations
  Clone ID: PAT_MRT3847_106515C.1
cccacgcgtccgcccacgcgtactcggacgctttggcggacgcgtgggctgtcggggancataagancgtttttcaaggacctttggcagacccaactcaaacttgaaagcaaccatgtcatatatattgaaatgggtcaacttgtttgtcaataatcattcacttgctgaaacacccatctaatcaaaaaccaactccaactcaaatgcaataaacaccaccaagttccttaatttatccaaagacccactagcataccgaatgaatcgctaaaatcacgaggaatatacatgaaaatacaaaacttgattaagaggaatattgacaccaagaaacatgat

SEQ ID NO: 7208 - DNA, 373 bp, Glycine max
  Clone ID: PAT_MRT3847_106516C.1
cattgttgtttatgttttcctttttttttttatttttattattttttttgtttttttggtatttttgaggcgaacacagaaccttaaataacaaggacttgctgtcactctaaaaaggctcaggcatgaaacagcctcgcacaggccaagacaacggtggcgcttgaaaaccaatttccaggtggagaaaagccggatccaaatgctcaatccccgcggtatacctaaagcctcttttgacaaggatgcccccatgaacaactgcttcggtggctcctcggatccttgccccctaataatcctcctttttttcaggggggccggtggtattcaaaccgtctatttttgctgcgggggtgacgactaccccacc

SEQ ID NO: 7209 - DNA, 422 bp, Glycine max
  Clone ID: PAT_MRT3847_106517C.1
gttggcgttgttttttttttttttaaggattttccatttatttactgttgtaatgttttcaaggtaaacaagaaaacacaaacgggaataatctataatctaatttttaactgatttattccaggaatccggcctcaaaaaaccactgcaaactttctgggggggggggaaaaaaaaattttttttttttgggcgccgggaacataggatagaaaccattttccaaaacgggacaggaaaaaccccccccccgccggaataaaaggaaaaacattcaagagatacaaaaagggtagggtcataaaaaaaaaaaaccttaggggatgcgcatctcggaaaaaaaaccaggatattggatacataaaaccttggggggatgccccaattaactaaaagggccactagggattagcattttagca

SEQ ID NO: 7210 - DNA, 122 bp, Glycine max
  unsure (1)..(122): unsure at all n locations
  Clone ID: PAT_MRT3847_106518C.1
ctacttctcccttctggtaattggtagtggtagcaattacaaatgtcaagatggttaacaatgacaaatctgtcacactttactgttctacctgtgtnctggaaaaggatttgcaccctatg

SEQ ID NO: 7211 - DNA, 326 bp, Glycine max
  Clone ID: PAT_MRT3847_106519C.1
acggctgcgagaagagaccgaaggggaacagctaaacagagagtgatttcagtgagtggtcggtgttcacttgatctcatcatcatcgtcaccgtcaattgaagaagatgccgatcagaaacatctccgtctgaaggcctgaagaggcgactcaccccgacacgttgaaggcggctttggctgagttcatctcaaccttcatcttcttgttcgccggctcaggctccggcatcgcctacaacaagctcaccgacaacggcgctgccacccctgtcggcctcatcttcgcctacatcgtccatgcattcgccctcttcttcgacgtc

SEQ ID NO: 7212 - DNA, 244 bp, Glycine max
  Clone ID: PAT_MRT3847_10651C.1
ggaacctttgggtttctggtttcccttttttggggggccaaccggtccttcctcgcttcaattggtgggtgccttgtccaacttgttgtgaaagaaattgccaatggggaccagccagttaaagctgatgccattccaaaaggaaacttttagggttgcctggattcttcagaccggcgaaaatttggttaaccaatattccataccggggttaatggaatctgaaaccagttccaaattgcca

SEQ ID NO: 7213 - DNA, 406 bp, Glycine max
  unsure (1)..(406): unsure at all n locations
  Clone ID: PAT_MRT3847_106520C.1
cctgggaaagctgacggacaaaaagagccaagactctaaaaacaataaatcaatagcttacaatgaagatatgccaaatataaaacacataactttatggctttctcttaatttttctttgagcctctaagtctatcacaattacaaagatgttatcttggntttttttgtctatggcaagcttaaatagatactctgcaggtgactgagcctgaggatccgctccttcactgagtcctgttgtgcccgtgacaccatactttttgtgccaaaaaaagataaccttctttgcaacccaccatgcttcttcatttgtcattacatcccaaaaaccatcacttgctataataaaacactgaacattttttttttgacgcacaaaattgacttcagggtctggaattat

SEQ ID NO: 7214 - DNA, 684 bp, Glycine max
  Clone ID: PAT_MRT3847_106521C.1
caagtacattacaaatacttaattaaaaaaatcaattatttttttagtttactactgcatataatacatgaaaaaagtatatataattatgactttccagaaaaaaaaaagatagttaaaaataaaataaatactgaagtaaaaaatgtaaatagtaaaattattttacccacaatacatgaaaattaaactcctgaatatatacattgcacaaactacacagatgttcatttatgttaacaagatagaatagaaatagacttgaagcagacaagattcatggcttccacaacttcattgtgcagtcttcactaaaagttgcaacaagattcctatggggatgatgagtgacacctataacttccttctcgtggaccttcattagatgctccaatttgccagatagatagctgaagcagtatatattcctatcttcaccaacacagtaaatccattctcctttaggtgaaacacaggctgcaacaaagtctccgccttctcttttaccagatgagaagctcttcacaacctgtccttgaagtgtcatgatatatatggatgacgttttgttacaaacaacaatgtgatcagtattcttggggaaaatgtgaacagaattgacagaagcatcacctccccttaaaggaggaggtggcttaaaagtttgtatgcagtctgtagtct

SEQ ID NO: 7215 - DNA, 322 bp, Glycine max
  Clone ID: PAT_MRT3847_106522C.1
cacccaacaggggggttttttttagggctcccacccctctccccacgcccaagaggggggggaaaaaatcccaaaaacaaggagaaagggcacgggggctcccccgggaacaaaaagagccaccctctggggatccccggacccgagcaaccggccatcaaaaaaagacagcacggggggcaccgacaagggcaccacccacccaacatcgaaccggagcgaggcgaaaagaaaggtccggaggaaacccagggtctcccaagaagccccccaggggggggggccaaccctcgccgggggcatggccccacccaagggcaaa

SEQ ID NO: 7216 - DNA, 1956 bp, Glycine max
  Clone ID: PAT_MRT3847_106523C.1
cccacgcgtccgcccacgcgtccgcccacgcgtccgcccacgcgtccgcccacgcgtccgcccacgcgtccggttgcaagggataacataacagagtttcgttgaatctgcactaagaccctacgcgcacatcttgcaactccaatcgacatagcagcaatgtctacgctcgaaattgaagctcgagatgtcatcaagattgtgcttcagttttgcaaagaaaattcgttgcatcagacttttcagatgctgcagaacgaatgccaggtttctctgaacaccgttgacagcattgagacctttgttgctgatattaatagtggaaggtgggatgcaatattgcctcaagtttctcaactcaagcttcccaggaataagttggaggatttgtacgagcagattgtattagaaatgaatgaacttcgagaactggatactgcacgtgctattttaaggcaaacgcaggtgatgggtgtaatgaaacaagagcagcctgaaagatatttgcgtcttgatcatctcctagttagaacttattttgatccaaatgaggcttatcaagactcaacaaaagagaagcgacgtgcacaaatagcccaagctcttgcagcagaagttactgtagtgccaccatcccgattgatggctttaattggtcaggctttaaagtggcagcagcatcaagggttacttcctccaggaacgcagtttgatttgtttcgtggaacagctgctatgaaacaagatgtggatgacatgtatccaacaactctttctcacacgataaagtttgggacaaaaagtcatgcagaatgtgcttgcttttcaccagatgggcagtttcttgtatcatgctcagttgatgggtttattgaggtgtgggattacataagtggaaagctgaagaaagatctacagtagctggctgaggaagtgttcatgatgcatgatgatgctgtgctttgtgtagactttagcagagattcagaaatgcttgcatctgggtctcaagatggaaagattaaagtctggcgtattaggactggtcagtgcttacggcgtcttgaacgtgctcattctcaaggtgtcacaagtgtttccttctcccgtgatggaagccagttattaagcacttcatttgacagcacagcaagaattcatggcctcaaatctggaaagatgttgaaagagttccgtggccatacatcttatgtgaatgatgcaatttttacaaatgatgggagtcgtgttattactgcctcaagtgactgtacaatcaaggtctgggatgtaaagactacagactgcatacaaacttttaagccacctcctcctttaaggggaggtgatgcttctgtcaattctgttcacattttccccaagaatactgatcacattgttgtttgtaacaaaacgtcatccatatatatcatgacacttcaaggacaggttgtgaagagcttctcatctggtaaaagagaaggcggagactttgttgcagcctgtgtttcacctaaaggagaatggatttactgtgttggtgaagacaggaatatgtactgctttagctatcaatctggcaaattggagcatctaatgaaggtccacgagaaggaagttataggtgtcactcatcatccccataggaatcttgtcgcaacatttagtgaagactgcacaatgaagtcgtggaagccatgaatcttgtctgctttaagtctatttctattctatcttgttaacataattgagcatctgtgtagtttgtgcaatgtatatattcaggagtttaattttaatgtattgttggtaaaattattttatattgttgacgaatgatatgttggtagaaaaccgatgctgaggtgagttattgacagattgaaaattcaaaatgtttatttacaatttttacttcagtttttattttatttttaactatctttttttttctgg

SEQ ID NO: 7217 - DNA, 297 bp, Glycine max
  Clone ID: PAT_MRT3847_106524C.1
tcactaggccgcccgcccccttttttttttttttctttaataacacccgaccggataaaacacctattattatataattggggggacgcacattattagttgcggcggcctctaacaagctagggcattataacacttttccttttggctcatataactactacgtttgaagttagatggcctcctagagcacaaagctggaaagatcctaagcataattgctgttaccatctgacaacttggaagcaaaagaccaaaaaatcacctcatgggttttaacggagctcttatgccacc

SEQ ID NO: 7218 - DNA, 413 bp, Glycine max
  Clone ID: PAT_MRT3847_106525C.1
aaaaccattgttatttgtcagggggagtaagtgatacatgcacaatttgctgacgtatctgtggttagagtacccagaatgagaggaatattctgtacagttaactctacacaagtgatctaaaacaagcataaaagcaaaactgggaggaaagcagaaagacaaaaataccaacaaaaatactaccgatcctcagatggcattggcaccaaatactcaagcatcaacgacttgaaaccatcgctgctgctcccccttaggcatcgtagaaagaatcaaacatctttaggcatatatggcaggcaacattggcattgtctttctcaatcagtgattcaacaccagacatctttaaataaaagtttgggcaaaactctgatggattccacttaaactgagaaacaaaccacaac

SEQ ID NO: 7219 - DNA, 534 bp, Glycine max
  Clone ID: PAT_MRT3847_106526C.1
ggctcgaggtggtgtgtgtgggtgagaggaagaagaagaagcaaatggagttccagcgcagcgattcatcatcgtcccagcccacacccaacgacgccgatccgtagaaagtcactcgttctgacccaatgcattcatggtgggaatcagtctgaaaagcccgctcccgaatccacgccctcgtcggcatactccgctcctcctgctacgactctgtctgctctttagcggacttcgaccgccccgctctgtcgttactttcctcccccgacgactactccgccggctgctgctccctatccgggtcccacttggatcccctctgccactggctctacgacaccttcctctcctctgacccgcacctacgcctggtagtcctgtccttcgtccacctcctcgccggcctgtacctgtcccgcatacactccccggagccaccggccctcgcgggattcgaagccgtcctcctggacctctacgccgtctagaccagatcccgcaacggcaaaccgcttgtggtcacaatccccg

SEQ ID NO: 7220 - DNA, 350 bp, Glycine max
  unsure (1)..(350): unsure at all n locations
  Clone ID: PAT_MRT3847_106527C.1
gcaacacnggttttttttatcacaagcgcaaatttcaaaaaacagagcattccactcaattctcaaaatttatctatccaaacctacatctcaagttatataactacccaacatcaattaatctaacacttacaacaaaatctctcaatctaggaaactcattgaaagtaaaataaccattaaaaaattccaatatcaaaaaaaccttaaaaacaagacactatgtaaaaaaactcatttcccatatccaccctagacatcatcccaatccttttacactttaactccactaactatcataactatattctttcaatcctacacttgcctacctacatttctctaattta

SEQ ID NO: 7221 - DNA, 482 bp, Glycine max
  Clone ID: PAT_MRT3847_106528C.1
acgaaagaaataaagaaaccaataacgacaagcgcacaatagaaacaaaacaaaaaagggggctacacaaataaaggcaggaccaaagaaaaaaaaaagaagaacaatgagccaccacacggaaacgcccaagccgaacagacaacaggaacactacggaagaaaaaaaaacaaactgagcgaaccccacggaaaagaagccacaaataacaaggggacaggaacaaccagaggtgggactaaaaacaaaaaacacataacggccgaagaaaaccagggaaaactgaaaggaggcaccagggagcgggaacaaatgcaaacaaaacaaacactgaaaggggccaagagaaagcaccacaaaatgggcaaaccaacaacacagggagagcacagaaaaaagcaaaaccagaagaagaggaaggccaagaacccgacagagaaggagggggaggacacaatgagctgaagcctcagggggaaaa

SEQ ID NO: 7222 - DNA, 911 bp, Glycine max
  Clone ID: PAT_MRT3847_106529C.1
tacggctcgagaagacgacagaaggggaactataaagaaactaaggtaagaatgccctactagcaactgacttccttcaggtatgattcgttcgtgacctataagtgagcaagtcttcgcccgttgccattcaatagcaaaagctgtagttactacactcttctttctctgattatctatcgtgctgccaagaagcaaggttacgcagtcctctacctatacgtacctctaagaaggaagctatttcaatcctctccttgaagtcaagcaattgaagactttcgtctgctctcataagtcagttcaaaagcttcagacaaagtcaccaaaaaggaaaacattttcattgaaaggctggcttgcgaaaggaaaaaggaagcagaagcagagcgggaggagaaaacactaacttccccgcagggaacccggaaactatctttcctctccggaatatatcttcttaatgttgccctagctcaagtgaagtgagttggagttctttgtttgagtttgatttatttccagctacggagctgaggtcacattcatttctagaggaaatcctgatcttcttatcgttcgtgacttccacctaaagtcattgcgttcagccctctccctatggtcgagcaactacgtacctttcttttctagacctcatgtgggagaggtacgatgttactgcttgacctataaccagctctccttgggaaagaaaagagcttgacatacgagacatgtcggagaaggcatctgttactaaagaaaatctcatttgccaacattcccttgggtattcccccttaagaggccttaacaacgaaatgaaagggttttgagcagctcattcgcttacagagaactcagctaaagaaaaaaaaaaaaaaaaaactagcctggtgaagaattcc

SEQ ID NO: 7223 - DNA, 230 bp, Glycine max
  Clone ID: PAT_MRT3847_10652C.1
tttttacaaacaaaaataaatgaatggtatggaatcaccactgtctaaagctactacaccctctaagcttaaactagcatataaggcccatgttctctatatgaacaagaacaaattgaccctaaattacttataaccattctctacaaacgcggttttatcttgtagggtctcttgatcacaatccagggatgccaaccttgtgtccggacagacattaactggactta

SEQ ID NO: 7224 - DNA, 184 bp, Glycine max
  Clone ID: PAT_MRT3847_106530C.1
ggcttctcttgcaaccttaactaatcctcaaccagctgcgctcaatggccttgctggaagttccatctctggaactaagctctctttcaagccctctcgccacactgtccaatccaagaactttaggagtggtgccttggtatcaaagtttggtcacaagagtgtgttctttgctctccccgat

SEQ ID NO: 7225 - DNA, 171 bp, Glycine max
  Clone ID: PAT_MRT3847_106531C.1
gtgcaatggtgccattgcttgcagcatcatttataagggaatataaggtgaggcttggagtgagtgtggctgctgtgacttatgctttgatggtgtttggctggataggggcactgaggtaaaaggctccagtattgaggtctgctttgacggtcttgattgttggttgga

SEQ ID NO: 7226 - DNA, 138 bp, Glycine max
  Clone ID: PAT_MRT3847_106532C.1
agaggtcgagtttcacagcagcaatggtgtacgtcaagggctcagaaatcgaaaggctacttcaagagctatcaagtcaaagttcaagagctgaagagagggaagagaccggttagcgtgagcggacgtcggttgatt

SEQ ID NO: 7227 - DNA, 355 bp, Glycine max
  Clone ID: PAT_MRT3847_106533C.1
tatgcacaaaagccaattattgcacatgccgcataggggaaacgttcagcaaggattataccactagcgtttatgcagcagaccgtggcagagttccagcgcaacatagccgaacaaacatgtggggatatcgcagcttagatctgctagctggtcggtgttgtcactactgaaaatgggcgcaagtgttataaatgactgtttattcccgaagtatacagcctagttgttgcaaagtatatgatatactcacctgtcaaaactcgaattgctaggggctccttttggcagatatggcttaacggcccatctgcttgcttcttgtgaatcgaccgccagcccgagacatgtcttc

SEQ ID NO: 7228 - DNA, 244 bp, Glycine max
  Clone ID: PAT_MRT3847_106534C.1
ccgaaagttagagtaaaacttaacataaaggaaccaagatttgggtggtccggtccgggcacacacatgcgagcattggaacgatacaagccatcaatgctaatggaaagctccgaatatacacgccagagggatcaaaagcatggatgttggacccttcagaagtggaggtggtggaagagaaggggttctgcattggagattgggttaaggtcaaagcattagtttcacccccacccaccat

SEQ ID NO: 7229 - DNA, 244 bp, Glycine max
  Clone ID: PAT_MRT3847_106535C.1
gatattgtaacaatgatattgggagagctggccataattcactaacacaaatgatttaaaaataaacatttggagctgatctccatttgattagtactactgggatgggcccaattagtacttaatgactgatatcaaccataaagtacgaactgtgcgcaggttataatccctatgatgtactgcacttcagttaaggcctgatgttgccctctatttgagttcctgtagcatcttgcctaac

SEQ ID NO: 7230 - DNA, 640 bp, Glycine max
  Clone ID: PAT_MRT3847_106536C.1
ggattgtaacatgagttctctcaagttgcaaaaaaggctagcagccgatgtgctgaaatgcggtcgcaaaaaggtctggttggatccaaatgaaaccaacgaaattggaaacaccaattcacgtcaaaatattcgtaaattggtaaaagatggtttgatcatcaagaaaccagttgctgtacacagcagagctagagtacgcaaaaatactgaggcaagacgtaagggtcgtcacagtggttttggtaaaagaaagggtacagcaaatgctcgtacaccacaaaaggacttgtgggttgatcgcatgagagtacttcgtcgtctcttgaaaagataccgtgaaactaaaaaaattgatagacatctttatcatactctttacatgaaggctaagggtaatgtcttcaaaaacaaacgtgttcttatggaattcatccacaagaaaaaagctgaaaaagccagagcagagatgctttctgatcaagctgaagctcgtcgtactaaagtacgtgaagcacgtaaacgtcgtgccgacagaatcacacaaaagaaacaagaacttcttcaaacataccaacgtgaagatgaagcagcagcagcacaaaaaaaataattgtatttagcgttcaatgatcttcat

SEQ ID NO: 7231 - DNA, 221 bp, Glycine max
  Clone ID: PAT_MRT3847_106537C.1
agatgacaaagacgacgggaggagcatattgaaggggctttgacattgaatggttgccagtgccatgacctaccaacctgacctttaaccaaatgaattcagggtaatgggctggctaccaagcctttaatgtcattgaagcccgaatggacatgttgattacaatgaaccatattatatattattactgcctataatagtcaatggcttaatagatccca

SEQ ID NO: 7232 - DNA, 230 bp, Glycine max
  Clone ID: PAT_MRT3847_106538C.1
gtacccatgttttcttcttttttttttatttttaacaaaaaacatggaacttagcttaatctaatatgtccatgattttactacaactaattccgtttttttgtaccagaacttagtgccgcacaatatccctggatggatggcaaaaaggaaaaaaaccttatgagattcattaacaagaggctcgggatgaattaattccttggaacagggtgctatagctatagaag

SEQ ID NO: 7233 - DNA, 391 bp, Glycine max
  Clone ID: PAT_MRT3847_106539C.1
aacaaaggcaacatatgctggcgaataactgatacaagggtgaggctctagtcatagttacatagcccgatactgtccgcgctcactatgagctattacagcatacgttttagtacatacttattcagcagacagccctcaaaattgaagacagaggaccctttgtgcccttattcccgtcctctttcttgttaggctgagcatccacaaagtaggatgctgtttggttcttgaatagcttgtgaacagctggggcagacccagggaatgcaagctcctgcactggactaggtgtctggcttagcacatgtggttgcgaacctgcgaggaagttcctctggttgttctcggcattagtaccaattgcagagaaatacagatttgagggagc

SEQ ID NO: 7234 - DNA, 745 bp, Glycine max
  Clone ID: PAT_MRT3847_10653C.1
ggaatttccggggggctccgagcgcgagaaagacgagaagaagaagcaagagagagagaggagagaatatggcgaccacaggcgctttgtgtggcactatgttgaacacctccttcctgaagaggcaggcatcagtgaacatgacaagcttcaaggctaacgctgctgtctttggtgtaaaaggaggacgaggaggtcgtgtgagggccatggcaacttacaaggtgaagctgataactccagagggagagcaagaatttgaatgcccagatgatatatacattcttgatcaggcagaggaaaatggcattgatcttccctactcatgcagggctggttcttgctctgcatgtgctgccaaagttgtgagtggcaaactggaccagtcagatggtagcttccttgatgacgaccaaattgatgcaggatttgttctcacctgcgttgcttaccccacctcagatattgtcattgagactcacagggaggaagagctcactgcttaaataagaactttcatcttactttaaatgacaacatatgtttgttgcatttttgctttgtaaaatctattgaactaaataatttttgtcagtgagtctaaagcttgagctttagtagtcttatccttggactgtctctgacactttcttcctccccccccccccaccccatcatgtctgttgcgtttaattttgtgtacgttgtgctattttctcaggatatataatatatatgcttgttt

SEQ ID NO: 7235 - DNA, 128 bp, Glycine max
  unsure (1)..(128): unsure at all n locations
  Clone ID: PAT_MRT3847_106540C.1
attttattgaacacaatntgatatgtatgattgattttcactggctgggggtacatgccgtatttgaactctgtcccatccccctttggattacaacttgttatgacaaactaatgagagggatttct

SEQ ID NO: 7236 - DNA, 283 bp, Glycine max
  Clone ID: PAT_MRT3847_106541C.1
ctatcgctagaggtactataagtctgtgtgttgaaagaggaatggtggacgaaggtggggtggactacgttgatcgagctcatgttactctctcattcgggaagctatcacaacctgatacccctctagaacccatccacaatgcagacacatgcatgctattccaataccaaatcagacaacgaccttccttctgtctcctcctatttcacggatctgctcaattgcctacgacctctttaatcctctactactcctacttttttatcgacgacagatcacg

SEQ ID NO: 7237 - DNA, 481 bp, Glycine max
  unsure (1)..(481): unsure at all n locations
  Clone ID: PAT_MRT3847_106542C.1
gcgttgtacggctgcgagaagacgacagaagggggaagaccgagagcttaattagacatagactgcccaactgttgggaacatctaaatacattagaatttcttgatctgagcaataataaattgtcaggcaagattccacagtccatgggtacacttgttaatttggaagctttggtcttaagacacaacaattttattggagacctaccattcaccctgaagaactgcactcgtttagatatactagacttgagtgaaaatttgttgtctggtccaataccgtcatggattggacaaagtttacaacaattacaaatcttgagcttgagtgtaaaccactttaatggaagtgttcctgttcatctctgttatttgaggcaaattcatatcttggatctttcaagaaataacttgtcaaaaggaattccaacttgtctaangaactatactgcgatgatggaagcagagtaatcacaagt

SEQ ID NO: 7238 - DNA, 281 bp, Glycine max
  Clone ID: PAT_MRT3847_106543C.1
cctgtatagcgggcgccctccactgtcgttcgttaggcagaacagaaagacaacgcggctggctcctgcagtcctttcttcaggtctacaagacgctcaagacttcttaggagacccacctgagtcgatcttgaatcggcagaaaaactctcacacgactgcaatcacagagtctagtctagacgatgaatacgagcctcttgatcttggtgagaaatctatataccgagcttgctgacgacaacgataaaggtgagagtgccatcacctacttcaacacc

SEQ ID NO: 7239 - DNA, 496 bp, Glycine max
  Clone ID: PAT_MRT3847_106544C.1
ttttgaaacagcgactttgggcccatgagcaatagctggcgcacttacctaaatggaattgaattataatcaccaacaagcactttaaaaacaaaaggcacggccatattcttccaaaaattagactatcaacctgtataccactcggcacgcacaagaggggccaagagataacctttagctaaaagcatagctaaatcaagagctctacaaacccaccctacaccaaagaagagaatattcctcgcgatccttctgttgttcccacattgtcaagaaacgaaaaccttccttctataagaaccgccatacttagcaggaaatcaccaggctagaccaaaaattttcatatgtatcatgtcttgctggccacgttgttagaaagcgcgtccgaatgactttacagaccctgtacagaaaacgcacaattgctacggatataccagaggcgttgacggagtgaatgaagaccaagcttgccagttatttattgccg

SEQ ID NO: 7240 - DNA, 1098 bp, Glycine max
  Clone ID: PAT_MRT3847_106545C.1
ccacgcgtccgaagggaggaggttggggggtgttcactggggtatgactatggcccattaaattatatcctttgatggattgaggaagcagcaacatatattggatcaatgttaaaagcagtggcatctgggttggtgattacctctatcctcatatgtgtatctgcaaatgataatggatttcctagatgtaactgtgatgatgaggccagcttttggactattgaaagcattctggagtgtcagagagttggtgatttcttgattgctgtggcctacttctctatccctattgagctgctttatttcatcagttgctcaaacgtcccattcaaatgggtcctgattcagttcattgccttcattgtactatgtggattgacacatttgctgaatgggtggacctatggccctcacactttccaacttatggtggcacttactgtctccaaaatactcactgcattggtgtcatgtgccactgccataaccctcatcactctgatcccattgcttctcaaagtgaaggtcagagagttcatgctgaagaaaaagacgtgggatcttggacgtgaggttgatcatattatgagacaaaaggaggctgcaatgcatgtaagaatgcttactcaggagatacgtaagtcactcgatagacatacgattctgtataccactttggtggagctgtctaaaacacttggcttgcaaaattgtgctgtgtggatgcctaatgttgataagactgagatgaacctcactcatgaattgaatgggaggaattttaatttgactatacgcattactgatccagatgttgtgagaattaagggaagtgacggtgtaaatatactcagctccgactcagcacttgctgttgggagtagtagacgtttcttgagaggcaggacacagttgcagcaattcgaatgccaatgctaccgggatttggaatttcaatgctacgggtttggaatttcaaagggcgtgctatgctgctaagacaggcttgcttccctctggtggtcttcaggcgccctgctcgtggtaatcaggagcctagatcgtggagcaatcaggagctggagatccttatgg

SEQ ID NO: 7241 - DNA, 209 bp, Glycine max
  Clone ID: PAT_MRT3847_106546C.1
ggctcgaggtttattaacacattaaatggctgatattcctcttgagaaactaggaagccatggtctggaggcttattatccatgatttggatttatggacctaagaggttagcacaactaacctgattccagatatggtgacgttttttagctggaacccgcattttccatatgggtaatctatctttgattgtggagatttttattga

SEQ ID NO: 7242 - DNA, 389 bp, Glycine max
  Clone ID: PAT_MRT3847_106547C.1
gtttcacatgattagcctgacgcagtgacttggccaaacctataagtcgacggcatacgctgtctacttctttgtatcaacaacaacaatggcaacagccaataaaaccatatatacccatgacaccataaacaactcgctcgatcttgtcatgaatagtagaaaattcaacctcatttactatacggctatcaaatcacttaagatctacaaagggaaattgattatcatagctaacaactacccccatttgaagaaatcaataattgaatactatgctatgttagacaaggttggagttcatcattacaatgttaacaatgtaaatttgtgcacttcatgtgtaaaatattacagagtgtgctgccttaacattaatgatcctggtt

SEQ ID NO: 7243 - DNA, 234 bp, Glycine max
  Clone ID: PAT_MRT3847_106548C.1
gatgcgagaactacatgagggtacagttgccataacactacataacgggcttttgatcatacacagtcagcgcattccataccccatattgcattcattcggctatagagctatcgcgttgctaaactttgccgtaaacagtcaggcgcatatctgcgcatggcttctgtatccggcgacttcaataccccactcactctggacacgtccaggttttgaacatcaactggtttc

SEQ ID NO: 7244 - DNA, 233 bp, Glycine max
  Clone ID: PAT_MRT3847_106549C.1
gtcacaactagctgctgttgtgaccgtgcgccgtcctgagcatacatgaaagcagccttgacttgagactgccaataccgagctatctattcttgcagttgactatccagtggataaggtctcctgctatgtgtctgatgatggtgctgctatgttgacatttgaggcggtggctgagacatcggcatttgcagggaattgggttccttttatcccgatgtgtggcattcgcc

SEQ ID NO: 7245 - DNA, 362 bp, Glycine max
  unsure (1)..(362): unsure at all n locations
  Clone ID: PAT_MRT3847_10654C.1
atcatcataangatttttatcttcttatagtcaagccccnaaaagccattagacccttttttacaaaatagtccaccttatattcttacttcacaatccattctctaactccaataattttccacatcaatcaatcaagtcttttttcttttaaacacattatacaattacagttgtattttcaaatcttctgactttcttcaaatagacttttgtttctatatttgaaccacaacatactcttttttctaatatatcatcaattacccaatccacattttgttcataatacttatcaaaaaatttataattttcttaccatttctaaaacaattttaaccaaaaattttcacatatttcac

SEQ ID NO: 7246 - DNA, 514 bp, Glycine max
  unsure (1)..(514): unsure at all n locations
  Clone ID: PAT_MRT3847_106550C.1
gacaaacttaggggtgagcgtggaaaaggaatcaccattgtgattggtttgtggaagcttgaaacagcagaggcttcttgcacagttgttgatgcgcctggtcctagggatggaattgggaatgtgattgctggcacatcccatgctgtcggatctgagcgtagcatagagtcggccacgggaagatgggtctgcggctctggaaggactggacaacctagggatcttccaccgtgttctgtctcctttggtgggtgtggctgatgcagcagatgtagcttcttgtggcgctacttcgcccatgcctttttgggaaacttgttttctgtgtacacggcggggattggtggagcttgaattggtgacactgctttactcgcttcctccttcttcgttcgtggggctttgccggaacatcttgggtcgnngggccttgctccttgtccgggttaggtgccgatgcttgctatgcgtttctctggcgcttgggtcctacagaatcccttatgcctct

SEQ ID NO: 7247 - DNA, 342 bp, Glycine max
  Clone ID: PAT_MRT3847_106551C.1
atcgcgactaaatggagcggaccctgaaagagcgctcctactagtacatggccgggccaataaacagaaccgtggtggaacgcatgcacatacgcgatggtggatcaaagactgatgaacctagggccgagcccatgccacctaatcatgcaggttgttgcaattgagattctaactaactgcaagtagacagttaagacctaaacctctacgagcatataggctacggacctatgaaccataccgctgcacgctgagatcattaggggccaactaaggcggacacacatccacttattatgtcattgccatcgaggacttgcattaaccctcgatgcttac

SEQ ID NO: 7248 - DNA, 157 bp, Glycine max
  Clone ID: PAT_MRT3847_106552C.1
actctgtggcttccattttgcagtccaacatattgttggtaagcagctattgatcaaatcaagcccagacgaactcatcagaccatgttgataccaattactaaatgatgagggaatgccccaacacaataagccattcaggaagggtagcctttac

SEQ ID NO: 7249 - DNA, 596 bp, Glycine max
  Clone ID: PAT_MRT3847_106553C.1
gacacataaatttgattttttaaaagcaaaccaagcaaaaattgaacacaaatataaagttgacatttaaaaagcaaaccaacaacgcaacggcaagccctaaaactcgctgcgcttaacaaaaatgtaatcaggggttctcacaaacacaacacattaaaacagaatgataaaaggagtcttgccaccgtcgatcaagaacccaattctgggaacaaaagttgcgagatgatggtggagacttaaactatgtccgtagaaacgaagacacaagtattgtaactcataagaaacgacatcccctgatgaaccaaaccgcacgattcacttcttcttctgggcagccttggtgaccttggctccagtaggatccttcttctccacgttcttgatgactcccacagcaacagtttgacgcatatccctgacagcaaagcgaccaagtggggggtactcagagaaagtttcaaccaccatgggtttggtcggaatcatcttaacaaaaccagcatcaccattcttcaaaaacttgggttccttctcaagctctttgccagatcgcctgtcaatcttggtcatgagttcaacaaacttga

SEQ ID NO: 7250 - DNA, 356 bp, Glycine max
  Clone ID: PAT_MRT3847_106554C.1
gtagaatgtggctgtgaagggggcgagcttgatccagcggtacagcgtgaatgagaggcaggacatgaccgcggacagcctgtctccagcggcgccttacgtgtgtgggcgcggtgacaagaccacgcctaatggatcgaggttcatgggatcacccaggtgacgcttggcgcgtactaagagtacatcatcgagcgcctctaggacaaggtctaagttccaaagtccactccttggcctctcccttatgaactcatctgatgccacagcttattctaagagtttccagtcactcatgttacatagctactatctcggcaccatcttctattgaacaccattctcactgatatgct

SEQ ID NO: 7251 - DNA, 417 bp, Glycine max
  Clone ID: PAT_MRT3847_106555C.1
gaacacaaatataaaggtgacatttaaaaagcaaaccagcagcgcaacggcaaagccctaaaactcgttgcgcttaacaaaaatgtaatcaggggttcttacaaacacaacacattaaaacagaatgataaaaggagtcttgccaccgccgatcaagaacccaattctgggaacaaaagttgcgagatgatggtggagacttcaaactatgtccgaaaaacatgctacctagaaacgaagacacaggggcgagaaaccaacatttattgtaaccataagaaacgacatcccctgatgaaccaaaccgcacgattcacttcttcttctgggcagccttggtgaccttggctccagtaggatccttcttctccacgttcttgatgactcccacagcaacagtttgacgcatatccctga

SEQ ID NO: 7252 - DNA, 294 bp, Glycine max
  Clone ID: PAT_MRT3847_106556C.1
ccccaccacccagcggagaccgggggaaaaatatgacattgaccccttattgtggcgaaccaagcagaagagcaatccacataagagacaaccccacacagagacagacacgaccgggcaacatgggccacacgcaaaactgaaagtctacaccccaaaaaaagcctgtgaaaccacgtaatcgagacaaacacctaacctaacgccgcaggggcagaggtgcaaccggccctttaggatggggagactaaaggacctggaccattagggaatctcaagagtcaacaaattctt

SEQ ID NO: 7253 - DNA, 531 bp, Glycine max
  unsure (1)..(531): unsure at all n locations
  Clone ID: PAT_MRT3847_106557C.1
aggtgtttttttnggaacataaatataaatttgacattnaaaaagcaaaccagggacgcaacggggaagccctaaaacgcgctgcgctaaacaaaaatggaatcaggggttctcacaaacacaacacattaaaacagaatgataaaaggagtcttgccaccgtcgatcaagaacccaattctgggaacaaaagttgcgagatgaagggggagacttcaaactatggccgaaaaacaagctacctagaaacgaagacacaagggcaagaaaccaacatttagggtaaccataagaaacgacatcccctgatgaaccaaaccgcacgattcacttcttcttctgggcagccttggtgacctgggctccagtaggatccttcttctccacgttcttgaggactcccacagcaacagtttgacgcatatccctgacagcaaagcgaccaagtggggggtactcagagaaagtttcaaccaccatgggtttggtcggaatcatcttaacaaaaccagcatcaccattcttcaaaaa

SEQ ID NO: 7254 - DNA, 575 bp, Glycine max
  Clone ID: PAT_MRT3847_106558C.1
ggaacacaaatataaagttgacatttaaaaagcaaaccaacaacgcaacggcaaagccctaaaactcgctgcgcttaacaaaaatgtaatcaggggttctcacaaacacaacacattaaaacagaatgataaaaggagtcttgccaccgtcgatcaaaaacccaattctgggaacaaaagttgcaaaatgatgggggaaacttcaaactatgtccgaaaaacaagctacctaaaaacgaaaacccaagggcaagaaaccaacatttattgtaaccataaaaaacgacatcccctgatgaaccaaaccgcacgattcacttttttttctgggcagccttggggaccttggctccagtaggatccttcttctccacgttcttgatgactcccacagcaacagtttgacgcatatccctgacagcaaagcgaccaaggggggggtactcaaagaaagtttcaaccaccatgggtttgggcggaatcatcttaacaaaaccagcatcaccattcttcaaaaacttgggttccttctaaagctctttgccagaacgcctgtcaatcttgggcatgagttc

SEQ ID NO: 7255 - DNA, 507 bp, Glycine max
  Clone ID: PAT_MRT3847_106559C.1
cactttctctcttcatgcgtgagtgcttgatcgcgctactttaccagagaaaattagaagtgagaaaaagctatgggccacaacatctaaacaaaacaaacaaacacatctgaattattcctttgattttcaaattctgcttcggtttatttctttataattgatagcgggtgctttggagattttatttttccctttctttttggttgagtatgggttcggtggactgttatccgtctcgtgtggacgatgcggccgtggtgtctctagattcgctgccgttagggttccgattccgacctaccgacgaggaactcgtcaattactacctgcgacagaagatcaacggtaatggtcgcgaggattgggttatccgagaaattgatgtctgcaaatgggagccttgggacatgcccggtttgtcggtggtacagactaaggatccggagtggttcttcttctgtccacaggaccgaaagtatccaaatgggcatcgaatgaacagag

SEQ ID NO: 7256 - DNA, 389 bp, Glycine max
  unsure (1)..(389): unsure at all n locations
  Clone ID: PAT_MRT3847_10655C.1
ctaaaaataaannntacaacactttatttatttccatcaagtaatattatgctcaacaaattatttttttccaaaaaaaaaaattattcttattattccccnnattattgtactatctactactaggacgtcttacaacaaatgatgggggggtgcagcgcnncacaccatactatatctacattatggaaattggttactataagcatattaatgataatgaattccaccaatcaataatcatgattcatgtttttttggtggatgaattaattatcaccaatgcgtgcttcaaaatcntcttggctccaagnnggnaaaattatgatgaattaccattcnncactgcctactatgattgccgnntctttcttggacaggatataaac

SEQ ID NO: 7257 - DNA, 452 bp, Glycine max
  unsure (1)..(452): unsure at all n locations
  Clone ID: PAT_MRT3847_106560C.1
ttttgaaaangaacatttatatgaagntgacagggaaaaagcaaaccaacagcgcaacggccaagcccaaaaactcgctgcgcttaacaaaaaggtaaacaggggttctcacaaacacaacacattaaaacagaatgataaaaggagtcttgccaccgtcgatcaagaacccaattctgggaacaaaagttgcgagatgatgggggagacttcaaactatgtccgaaaaacaagctacctagaaacgaagacacaagggcgagaaaccaacattcattggaaccataagaaacgacatcccctgatgaaccaaaccgcacgattcacttcttcttctgggcagccttggtgaccttggctccagtaggatccttcttctccacgttcttgatgactcccacagcaacagtttgacgcatatccctgacagcaaagcgaccaaggggggggga

SEQ ID NO: 7258 - DNA, 563 bp, Glycine max
  Clone ID: PAT_MRT3847_106561C.1
gtcctcgtttttttttttgccaaaatgcgacacataaattagattttttaagaggcacaccaggcaaaaattgaacacaaatataaagtggacatttaaaaagcaaaccaacaacgcagcggcaaagccctaaaactcgctgcgcttaacaaaaatgtaatcaggggttgtcacaaacccaacacattaaaacagaatgataaaaggagttttgccaccggctatcaagaacccaattctgggaacaaaagatgcgagatgatggtggagacttcaaactatgtccgaaaaacaagctgcctagaaacgaagacacaagggcaagaaaccaacatttattgtaaccataagaaacgacttcccctgatgaaccaaaccgcacgaatcacttcttcttctgggcagccttggtgaccttggctccagtaggatccttcttctgcacgttcttgatgactcccacagcaacagtttgacgcatatccctgacagcaaagcgaccaagtggggggtactcagagaaagtttcaaccaccatgggtttggtcggaataatttaacaa

SEQ ID NO: 7259 - DNA, 267 bp, Glycine max
  Clone ID: PAT_MRT3847_106562C.1
agaggatcagataacgaaaatgaggtttcaaaggaagcacaccacacggtggccggagtggtggtggtcatggacatagacagggtgcatgatgggttccttgcagccacatcaaaatacggtccagggagtctcagtgaggaacttgatcgcaagagtcattatggtagaggtggtctcataaccggcgacgagcaaagccaacaaaaaatccactatttcctcgtcggaaaagtggtcgccggaggccaacagtgccccaagcat

SEQ ID NO: 7260 - DNA, 485 bp, Glycine max
  Clone ID: PAT_MRT3847_106563C.1
aaatatccaatgtcaaaatttgacacataaagttgattttttaaaagcaaaccaagcaaaaattgaacacaaatataaagttgacatttaaaaagcaaaccaacaacgcaacgggaaagccctaaaactcgctgtgcttaacaaaaatgtaatcaggggttctcacaaacacaacacattaaaacagaatgataaaaggagtcttgccaccgtcgatcaagaacccaattctgggaacaaaagttgcgagatgatggtggagacttcaaactatgttcgaaaaacaagctacctataaacgaagacacaagggcaagaaaccaacatttattgtgaccataagatacgacatcccctgatgaaccaaaccgcacgattcacttcttcttctgggcagccttggtgaccttggctccagtaggatcctttttctccacgtttttgatgactcccacagcatcagtttgacgcatattcctgacagc

SEQ ID NO: 7261 - DNA, 502 bp, Glycine max
  Clone ID: PAT_MRT3847_106564C.1
aatatttttaagaatttaaataagaagcagacagaaaaaaagcaaaccggcggcgcaacggcaaagccctaaaactcgctgcgcttaacaaaaaagtaatcaggggtactcacaaacacaacacattaaaacagaatgataaaaggagactcgccaccgtcgatcaagaacccaattctgggaacaaaagttgcaagatgatgggggagacttcaaactatgtccgaaaaacaagctacctagaaacgaaaacacaagggcaagaaaccaacatttatagtaaccataaaaaacgacatcccctgatgaaccaaaccgcacgattcacttcttcttctgggcagccttggggaccctggctccagcgagaaccctcttccgcacgttcttgatgactccccacagcaacagttagacgcatatccctgacagcaaaccgaccaaagggggggaacgtcagacaaaagcttcaaccaccatgggttaggccggaaccatctaa

SEQ ID NO: 7262 - DNA, 475 bp, Glycine max
  Clone ID: PAT_MRT3847_106566C.1
aaaagctaaccaagcaaatatttgaacacatatatatagttgacatttaaaaaggaaaccaactgcgcaacggcttagccctaaaactcgctgcgcttaataaaaatgtaatcaggggttctcacttacacaacacattggaacagaatgataaaatgagtcttgcctccgtcgatcaaaaacccatttctgggaacaaaagttgcgagatgatggtggagacttcatactatgaacaaaaaacaagctacctagacacgaagacacaagggcaagaatccaacctttattggaaccataagaaacgacatcccctgatgaaccaaaccgcacgattcacttgttcttctgggcagccttggtgaccttggatacagcaggatccttcttctgcacgatcttgatgactcccacagcaacagtttgacgcatatccctgacagctaagcgaccaagtggggggtactcagagaaa

SEQ ID NO: 7263 - DNA, 400 bp, Glycine max
  unsure (1)..(400): unsure at all n locations
  Clone ID: PAT_MRT3847_106567C.1
ctcgnaattcgctcggctgtaagcatatcatgacagcagaacatattttatacattttggtggttagaagcaggccatgatgctgagcagaacggagatttctccactgaagcgattaggaagatcgaagaaggcatctcaggaactttatacaatgtaaaggcattaagagaaactggtcggacagtgatgctatgattgtggaacacaatggtaaaggactgcaattgtgtcgtaatccatatccctaacgtttcaagtgatgcttggtcgaatatgtaggagcaccataaaaaaaggtgctgaacaaaggaatacaggtagaactgatatcaacaacatactatttcttgttatgaacaatgttctagcttgtagggattaaggcactactgggcat

SEQ ID NO: 7264 - DNA, 191 bp, Glycine max
  Clone ID: PAT_MRT3847_106568C.1
atcaggtgcggacattatttgtgacttacaagactgagccttcactcataactggcgtgccctgatatcctcatagcggactgtgtgcatcttttatttaatcttatcacaaatgctaggtttggattctctttacgtattgaacaagatgacccgcgctttaaaacgatctatccttcttgctacctagg

SEQ ID NO: 7265 - DNA, 327 bp, Glycine max
  Clone ID: PAT_MRT3847_106569C.1
gggaaaaaccccaaatccctttttttttttctccctggggggggggggtcccattttaccaatagggcggctttaaaaaccccttttaccccaggggccggggttggcccccatccaaaaaaacccaaacccggggggttaaatcccaatggcccggcccccatcacggaaaattcccccttggaaaaccccccaccgggaaaagacccccccccctttgttaaataccaggcaaattgggcctttttggcgccaatttggaataaacaattcctgttataaggatggccccccaaggtccggaaaaacccaaaacttttcaaaagg

SEQ ID NO: 7266 - DNA, 399 bp, Glycine max
  Clone ID: PAT_MRT3847_10656C.1
ggctcgagctcgagccgattcggctcgagacctgattttcttattcaatctctctcaggtgaaacctgaagaatagttaactgtgaaggaagaggtcttgcagcacaagaagaacctgaagttctcataactatgggttccttgattgatggactgccctggactagccatgtcaagagcctttggggacttttgcctcaaagattatggcctcatctcagttcctgatgtgtcctacataataattacccccctagatgaatctgtggttttagcaacttgttggggtgtgggatgtgctcactaacagtgaagtgataaacatagtagcttcagcaccacggaggcccattgctgtcaatttgttagtgaagcgtgctgtttgagcctggagataca

SEQ ID NO: 7267 - DNA, 501 bp, Glycine max
  Clone ID: PAT_MRT3847_106570C.1
ctacgagatgcattagctgaagcaagaacacctagtctaagcacaactggtgctcttagtgatggcatctgtggtcctcacacctgcccatgtcactgttgacaactcctgacctagagacctgccctccctctaaaggaactcctcttgattcaaagtactggacagcggtgccaagaagatcaagactgacacccctcatgtaatcaatggagacctggctttgagaaaaggacctcatgcatctggcaagaaaggacagggaaagggcgtttaccagctggtacacctacacggggctaatgtcgatggttacagtcctatctacgacaccaaagactgttctccaaccggagatggctacgctggcggtactactggctggcctatctggtctgtgactctactaactcttcttgctgggggagcacttcttgtctacaacacagatgctttggcgcagcacactttgcgaatcgatgatttaagctcatacttaat

SEQ ID NO: 7268 - DNA, 257 bp, Glycine max
  unsure (1)..(257): unsure at all n locations
  Clone ID: PAT_MRT3847_106571C.1
aaaaaaaaccaatcgacccgacgcgtccactcaaaaaanaanttaaacaataaaattttttatggatcacaccacataaaaaaaacccgctgattcttaaaaaactccctccaccccccaanacaaacaaaaatcaacatttattaactcaaaattcctattaaccccttcaattcagaaaatcgacttacacataaaacccaaacctttttaacaaaatcactgtctaatataataacttaacaaccatcttaaaa

SEQ ID NO: 7269 - DNA, 325 bp, Glycine max
  Clone ID: PAT_MRT3847_106572C.1
gattgtggatgtgctactctaccgagtaagacttggcacatgtatgacaagcatcctctaagtctaaactatttcgtggaagggagtttgagggaacatgaatgtggcatttgcaatgagaaaatgtctccgaagcaatggttttattattgtgatgattgtgactctggtgctcacccttcttgtgttgttggcaagtctaggcgtgtgaagtttggacgcagtttcaaatatgatgttcactcacaccctcttgctttggttgaagaaactgagcagaacaatgaatgcggagcctgtggtgaacgctgcaatggatggacac

SEQ ID NO: 7270 - DNA, 789 bp, Glycine max
  unsure (1)..(789): unsure at all n locations
  Clone ID: PAT_MRT3847_106573C.1
gaggcaaagtccaatccaaagcaatggtaaactcanagggcgggcccgtgcgggtaaggggaatttaatttcatgaaactggatacttgtagctttttggggtgtttgttgcattggtgtaaggggaatttaatttcatgaaactggatacttgtagctttttgtggtgtttgttgcattggtgtaagtttcaaatgatttgtgtgtggtcactttctcgttgtctgtttactaatttgtcaagtgttgtgacttgtgatccataagtaaatttttttccttgctgtgcatatatgttgaaaatgttattattgaatatgtatggtttgtggaacttgtgatgctgcttttccttgcttgcatggaacctaattagttttattgacataagtatggagtctttctggttctttggtgtttctttttcttctttttttttacctctcctctccatcctgctttgtactgtccaatgaggttacttttgcaaagtcatttcattctatttatttgaaggtaaaattaactaaatatcaggaccttgcgcttaaaggactgcatagctttgaacgcaaggacaaatcctcaaatgtcctgttcgtatagcacattctctctatatttgttgacttgattgtgtttagtataaactgttttggttccacaaatacaaattgatttatatttaacaaatactttctgtaagtacagaactagaattggaaatgtaatggttattcttttgtaacggggaacctataacttcataattcatgtatctttttaatt

SEQ ID NO: 7271 - DNA, 612 bp, Glycine max
  Clone ID: PAT_MRT3847_106574C.1
aatgcgatcaacctgggcacattagattcgattgtcctgtctttaaaagaaaaagggaaaaatccgacaagaggaatttcaatgaaaaaaaaagaaaagaaagcatacattaattgggaagataatgacatggattcttcaagtgattcagaaaatgaaatcataaatctaggtctcatggcgaaagactatgaaagtggagaagaggtaatgtcttctaactatgacttatctatttctttttatgaacttgaagatgcattcaatgatttgcataaagaatctgtcaaactttccaaattagtttcatattctaagaaaactatttcaagtttagaaaattaaattttgaaattaaatttagagttaaaaaattttaaatttgaagttaaaattttaaaatcaatagatagaaatcaattttctacaaaatgcttaatacaagaaaacaataaagcatttcattcatgtaaatgttgtgataaattcaaagaagaaattgaagatttaaaaatttctcttgccaaatttactcttcgtaaaaataatttagatattatatttggcaaacaacgatgtgtttttgatgaagctggattaggatataatcct

SEQ ID NO: 7272 - DNA, 295 bp, Glycine max
  unsure (1)..(295): unsure at all n locations
  Clone ID: PAT_MRT3847_106575C.1
gaattcaaggtttcagcttttgngtaccactaccantggtgattttgttcaaggaaaagatctcgcgntggttaaagttaatgtagcatgtgctgctgtggcttgacatcaagttacactccaactccattgttggaattccggtttgcnaaaagacaganggtaattcgtcgaggaatttggaaaggagtccttacnttgctccatanaggnaatccagcccccaggncaannatgggttagcaggnaattttccctttgatatnaatcncggtnctagatgggnaaaagcttc

SEQ ID NO: 7273 - DNA, 328 bp, Glycine max
  Clone ID: PAT_MRT3847_106576C.1
cgcggtgttgggcggacatcagtaggggctgttgacccacatatttggaacattgctggacgacttcacatggtttaccaatctagaaggcctgaggatgatggaggtgaaaaaaaccataacgaggatgggaatgatttaactggcatagcatgtggcgagttgagttttcactacagtgcacataaacaagggtgatattttgaatgcatatcaccctactctgcagagactgcagagtcaagccgaagatatattccagcttcaacctcagaaagtgccatggcacgtcttcacacgaaccattgatagtcatgcgtaccgaata

SEQ ID NO: 7274 - DNA, 309 bp, Glycine max
  Clone ID: PAT_MRT3847_106577C.1
acgcttgacattacggtttcattttgttcaccttttggggaaaagaaatcattaattacattatggcgcataagataaccattaatctgagttcgttctcctatggcattgaacctataaaaaaagaagttaaaagatgctgaactttacaaccagacttgaaacttactaggaagctatagaggtgtgttaacacactaaagtggaaagggttatctaaagggttcaatgggagaagaatctttaaaaagagttgctgtttgaaagcatttaacagcttggattggggatgtccccaaatcagttttg

SEQ ID NO: 7275 - DNA, 277 bp, Glycine max
  unsure (1)..(277): unsure at all n locations
  Clone ID: PAT_MRT3847_106578C.1
ctatcggttatatgaaggagctcttggaaaagattaataatttgnagcaaganatagaagtggattcaaacatggctggcattttcaaggatgtgaagccaaacgaaatcatagtgagaaattctccaaaggtatgtgtactttttaagtttgtggaatttgaatttttgtcttaactttaaaactagtttatgagatgagagttgccctgcnnagttaatatacccctttttggnccatattnccagttggtggggaatnccccacngggcctatt

SEQ ID NO: 7276 - DNA, 959 bp, Glycine max
  Clone ID: PAT_MRT3847_106579C.1
gtcgaattggcgtggatgatcatgattcttacaatgagttgtgtgatttcatatatccaggtttcttctttgtcacccactaagcacttcataattcactcacggaaggcacttctcaatggcattagccctgctgaaaataggagtattcctccactaaaatatgaatacttctatggtctcttacgtgactttcctgacctaagatttacaatcaatggtggcatttctagagttgatgaggttagtgcagctcgagaagctggggctcatggtgttatggttggacgtgcagcatacaacaatccttggcagattttgggacatgttgacgctgctatttatgataaaccaagctgtgatcttacacgacgtcaggtccttgaaaaatatctagtctatggggactcagtgttgggaaaatatggacataggtcaactttacgagatgttgtgaagcctttactccatcttttccattcggaacctgggaatggactttggaagcgcaaagctgatgctgctttcaaaaattgcacgacaatcgaatcattttttgaagaaacccttgtagcaattcccgactcagtattggattcacttgttgcggagtcaccacctggccgtgatctttttgctaacatgcacaatttattgcctccaccatacagaacgagagaagaagcaataattatttgcgcttaagtcatgtgtactctgcaaaaccaagttgtgatcattgccatttttttattttttatttttgtgaaatctagtgatagtatgtaacaattcatattaatacaacatagatataccttgcacaatgcacaatgcacaatgcacaatgcagaatgcttaattgtacttaatcaagtgataggtgtcatgtaacagttcatattgttacaaaatgaatgcttttatctaatacaaaatagtattaattttttttaaaa

SEQ ID NO: 7277 - DNA, 383 bp, Glycine max
  Clone ID: PAT_MRT3847_10657C.1
atcaatggcaattatcatgttgaaaaggacatggtccactggctgcaaaagtcactctcagctaaggcagggatctctcacatgccatctccattaggaagtgattgctcatcaagatcaagtccaaaagtccaagtcacccattgcaggaaaaggttgaatcatttcacaaagtcaaaatcattgagaagtccagtgagtaagatactggaaaatagtgagatcaaatcaaatggcatagcaaacattgcaagacataggacttatcaaaagtcattgctaaatgacttatccaacaaaggaacgcattcggacattacctcttaatttatcagcatagaagatcagcatttaggtatagcttcttcaccagtttatctgca

SEQ ID NO: 7278 - DNA, 292 bp, Glycine max
  Clone ID: PAT_MRT3847_106580C.1
gggaacactccaaaaagaaggttgacatttaataatccaaagctacacatcgcagcagagtcctgaaactcgctgggcttaacaaaagtggaatcaggggttccgacaaacacaacactttaaaacccaattgtataaaagctatttggcccccgtcgttcaagaacccaggtctgggaaccacagttgcaaaatgatggggggaactgcaaactttggccgataaacaagttcccttaaaaagaataccctgggggtctggaaagaatccaacgtttattggacccaaaat

SEQ ID NO: 7279 - DNA, 459 bp, Glycine max
  Clone ID: PAT_MRT3847_106581C.1
accttcaattgtttccttaaccttggtgccttcatccattttatcagtctcagatatatgatcatctttcttatcctcttctatttctttcaactcatcaccttttttatctgctactacttgtttcacaccatcaattgccttatcctacttgacttctttcacatcatcaacttccttatcctctatgacttctttcacaccatcaacttccttatcctcttctacttcttccaccctatcttgtttcttatcctcattgactgcttccaccccatcttttttatcctcctttacttgttcaaccccatattcttacgtatactcttttgcttcttccactccatcttctttgctatcctttgctacttattccaccccttcttctatctgatcctgtttagcttgtttcaccccatcttatttgttatactctttcgcttctctcacaacaccaat

SEQ ID NO: 7280 - DNA, 307 bp, Glycine max
  Clone ID: PAT_MRT3847_106582C.1
gtcatttgtcagggcatggggactggatctaccgtgaggcaatattcctagtgtatggacttcaactgatgagagattggtgggcacacaacatgaactggatgaaccttgtctggggggaattcaattactggccgctaccacggtgcccgggcaggaagaaaccctttataaagtcgcacaagacaggggacaagaatggtttgttggggatgatcatgtggatatttttgaggaagttaatataagagcagttcttcatatgctagacggttcggactttatggaaagaatagctattgccaca

SEQ ID NO: 7281 - DNA, 444 bp, Glycine max
  Clone ID: PAT_MRT3847_106583C.1
atatggcaactgtcttctccgcaaactataaagcccactggcatttgccgaagtatatctatatacaccggccaggaatactaactttggttgatgtcaggcaaaaggattacttctttaggttagcggcatcttgaagtggacaatgagttacaagcagtccagtaagcatctaagcttatcgataggtcgaaaccggaaaggtggggagctgagtcagcagtccagactccctcgtggaattgaaggcaatcttcacatcttacctgccagtgttctcatgtcttcgagaataggtgacgcgcaactcatcgtcgatcttcttttgcttcaacatgaactccgaagccatagacctctccaaatttactcgcccagccgttttgtgccagtgctcccgatgtctgagctctctggcggtccttgagaaccaatgggtgaagc

SEQ ID NO: 7282 - DNA, 1224 bp, Glycine max
  unsure (1)..(1224): unsure at all n locations
  Clone ID: PAT_MRT3847_106584C.1
ctaagtatatgcaattgcaagttgaaaagttccaaattttcatctctattttacttacaggctcttttggttgctctatcttcagtgatggtggatttatcaactgttcacagaactgaaaagcgagtgttgcttgcatcgcaccaattgataaattggtctgttgctggtttttcaatggtgctcccgctgttctcagaaaatagcctcttatcccgacttacttcgatatttcttggctttgcacctccattccttcttctctccattggatacgaagctatattctatgctgctcttgctcttgtactgatggcttggatactatttgaaaatacaattctcaacttaaatattgtgaataagtcatctgattccactaaaagtgttacaaatcatctcatccatggatctgataatagatctttgcagttatctgatgtgaggattccattggtctttatggttttattcaatgttgctttttttggaacgggaaattttgcaagtattgctagttttgagatttcatctgtctatcggttcattaccatctttagtcccttcctgatggcagcgctactcatcttcaaattatttatacctttcttgcttgtaatatgcgtattcagtgcgattaccaaactaaaccaagttccaaggttgggatgctattttcttgttatattgttctcagacatgatgaccattcacttcttcttcctggttaggaatacaggaagttggatggaaattggaaatagtatcagtcattttggcatcatgagtgcccaagttgtttttgttctattactctttgccctcacaaatacatacacaaaagacatccactgtaactcagcagtatcatcgactcgtaaggcaaattaggtttcaccaaagtcgctctaaacgagctaccttattgccatggaaatgactactcattcttggtgtttgctttgatggttatgaccaacctggattgagaacgggcggcagtgatctggaactcagggaaaggcgagcaaacattgtgcctcaccatgtaaacaaagaactttcatataaactttttccttatattactgcctcttggtagttgatctgtacaggtcctggtcctggccctggcccgggtgcgggcggctgtgttcgggaactcanggaaaggcgagcaaacattgtgcctcaccatgtaaacaaagaactttcatataaact

SEQ ID NO: 7283 - DNA, 492 bp, Glycine max
  Clone ID: PAT_MRT3847_106585C.1
ctcacagtgaatcttcttctcccattcccataagaagtgctggtgtgagcctgttgtcgtggccggtgccgccgccgccgtatcgaaaccttaatttcaacaacaccaatactctctcatatggcaatccgaaacatcagcagcaacaatctcaggttcttctcaattcctcattctgcttgttctacctttcttttctctcacttcttctcaaacaccacaccctttttttcacctccccacttgtcaagttctttgcttttctcaacccccaaacacccttttgcgtcttcttccacttttcgctctaatattcataatggtcacgcacactttcatacccgtatgtctttttgtacgtatactccttactggggtagaccccatgctacttcagagcaattttatcagatcattgcattgattcgtgaggatgtggatgaattggggtccaagttgaatagtatgaacgtgtctttgtctgatgcatca

SEQ ID NO: 7284 - DNA, 626 bp, Glycine max
  Clone ID: PAT_MRT3847_106586C.1
ggctcgagaaatttcaacatgaacaaatggttcataaaacgcatttgacacgaagctaatcgcatcgcgcctcacctccactgctgcatctcagaatcgggacgccgtcttcctcactacatcgtccctattagcacactaggtgatgaacattctgaagccgaagccaaatccgcagcaactattgagggattggcagcgcaggcttcgccaagagtgtcgcaacattgagcgccaaattcgcgagagaagaaaaaaatgtgcagaaggctattagagaagctgcaaagaggaatgacatgggctctgcaaaggcacttgccaaggaacttgtgagatctaggcaaactgtgaaccgcctttatgaaaacaaagcacaaatgaattcaatatcaatgcaccttggagagagtgttgcaattgctcgtactgtgggacatctatcaaagagtgctgaggttatgaagcttgtcaataatctcatgaaggctcctgaaatggcggtgacaatgcaagagttcagcaaagaaatgacaaaggcaggagttatcgaggagatagtaaacgatgccgtcgactcagcgctagattctgaggacatagaagatgagatagaagaagaagtt

SEQ ID NO: 7285 - DNA, 494 bp, Glycine max
  Clone ID: PAT_MRT3847_106587C.1
gcgtgtgtatggtgatgatagctctaattagtgttcatgaatatgtgaagccttactttagtgggtctaaactgaaacgctttctagctggtcataacatcaccattactgatggtattgacaaagcttgtgcgactttgcaaattagaaagtcagcaaattgagattttatcaagagagactgtacccaaatgtgtcatgtgttgtggacggatactgacgacacagcgagtttatgggcactgcagcattctgaatcgtgtcctcatctgggaaagcaagacgcttatatagacaatctcggaactgagttacgagaattgaatgtgcacagctcagaggaagcatcacaattgataacgatagctctctctcgtattgaatggctgccaaaagactgtgtgcctaccatagcccagattgaagagatacattcgatgcgctggatgatgaatgctgccgactacatgataacacagactactgctgacttt

SEQ ID NO: 7286 - DNA, 1482 bp, Glycine max
  Clone ID: PAT_MRT3847_106588C.1
gcgtgaatgcgtgttagtgtgttacccagaatcgaataatcgtctttgatcagttcatgaaccgaattcttcagtaggatccaatttttatagattttgctgaaaagatcaaattttgaagcaattgtttttgtgggcgacgttcattctttccgatccctcgaaaaatcaattttcggacttgggatcaataatggagaaggtgaagaacattctgaaaccgaagccaaatccgcacagggatttgcccagcaagctgtcaagcgccttatcaactaatcgctccgcgaccgcatttgacacgaagctaatcgcatcgcgcctcacctccactgctgcatctcagaatcgggacgccgtcttcctcactacatcgtccctattagcacactagattttgccaaaaagatcaaattttgaagcaattgtttttgtgggcaacattcattctttcctatccctcgaaaaatcaattttcggcttcgggcatcggaaatggagaaggtgatgaacattctgaagccgaagccaaatccgcagcaactattgagggattggcagcgcaggcttcgccaagagtgtcgcaacattgagcgccaaattcgcgatatacagagagaagaaaaaaatgtgcagaaggctattagagaagctgcaaagaggaatgacatgggctctgcaaaggcacttgccaaggaacttgtgagatctaggcaaactgtgaaccgcctttatgaaaacaaagcacaaatgaattcaatatcaatgcaccttggagagagtgttgcaattgctcgtactgtgggacatctatcaaagagtgctgaggttatgaagcttgtcaataatctcatgaaggctcctgaaatggcggtgacaatgcaagagttcagcaaagaaatgacaaaggcaggagttatcgaggagatagtaaacgatgccgtcgactcagcgctagattctgaggacatagaagatgagatagaagaagaagttgataaagtcttgaccgcaatagctggtgagacagctgctcaacttcctgaagctgtgaggaaagagagggtgaagctacctgctcaaagtgttggcgcagaggaagatgctatagctgagggtgttgatgatgaagaagaaatggaagaaataagggcccggcttgctaaagttcgatcataatcaagtttctaatttcgcagcctctaccttgtaccctggtatgttataagagagagatgttaacaggtttattgtaacctatttgtcatatctatattgaaaatgacaattgataacactaatgggaaagatggtattggaatgtgcagtttgtatgtaaattacacagagttcttgaaagtgtgtcaagctattgtctttctttttaattttgataataagataataagaccagaataacttcatccatggttgaggatttattgcataatatctggttctatgcaacacttagttgctttt

SEQ ID NO: 7287 - DNA, 728 bp, Glycine max
  Clone ID: PAT_MRT3847_106589C.1
gtttgtaaggtatcaatatcattatacctttggtggtatcaatatcaaagcaaatgtatattttatgctttgttacttgttgaaaaatctgattttggtaagcaaatgaatgtatcccaaaaataagccaaaaaaaaaaaaaaatagtgttataaccttttccttttttttttttaaaaaaaagaaaaatctacgaatagctcattttttggaatacgcgtgaaaggggaaaaaaagagtgagatggtgccacggtgatgcgtgggtgttattcatagaaccgaatactcatctttgatcagttgatgaaccgagttcttcagcgggatctaattttcatagattttgccaaaaagatcaaattttgaagcaattgtttttgtgggcaacgttcattctttctgatccttcgaaaaatcaattttcggctttgggatcaatcggaaatggagaaggtgatgaacattctgaagccaaagccaaatccgcagcaactattgagggattggcagcgtaggcttcgccaagagtgtcgcaacattgagcgccaaattcgcgatatacagagagaagaaaaaaatgtgcagaaggcaattagagaagctgcaaagaggaatgacatgggctctgcaaaggcacttgctaaggaacttgtgagatctaggaaaactgtgaaccgtctttatgaaaataaagcacaaatgaattcaatatcaatgcaccttgga

SEQ ID NO: 7288 - DNA, 837 bp, Glycine max
  Clone ID: PAT_MRT3847_10658C.1
ggcaagcttgaatgaatgcaaaaacatagctttccaggctctcaaagttaatgagtcaaaatgtacacatatgaagtgcacttttggtgggatatggaatggtggggggggtgatggacagaaaaacctttttgttgcctcatttttctttgaccgggcagctgaggctggttttgccaatccaaatttacccgttgtgaaggttcgtcccgtggattttgaggctgcagctaagcaagcttgtaaaacaaaacttgaagatgccaaatccacttatcaacgtgttgaggaagggaaccttccatatttatgcatggatctcttataccagtatacattgcttgttgttggatttggcctagatccatggcaacagattacattagtgaagaaagttaaatatcacgatgcttttgttgaagctgcatggcccctaggcagcgccatagaagctgtatcatctacataatgacagacaccagtaatgataattacccacctgaaatcttctgggatgagttttatcacaagttcttttgaggtgaagttgcctccattcataaaatgatcagaaattgctatcaggtcaaattggaattaaatatggggatacatttcaagaataacaagaagacagattctttattttcatttgtaattattttacaaaagtatctgatttacagctttggaagactgattcaattcattttgttcatctattttttgtagtctttagagatgatggacataagggtgacgggggggtagtattttttttttttttttttgttgattcctgataatagttaattgagcaaattacagaaatttccc

SEQ ID NO: 7289 - DNA, 610 bp, Glycine max
  Clone ID: PAT_MRT3847_106590C.1
gctggtgccgcatgttttcgccgaatgtggagtccctgcaggaggcactggaagcagttgtaaaggaaggaccacagaggctagcaaggcggggcaaggcatgccgggaatatgctgccaaaatgtttacagcaagaaagatggcattagcatacgagaggttattcctatgtataaaagatcgctcattctgcacctatccttgaagcttaggttagaatagaaactctttaatacaactttctttcttccatttatttttctgttatttcagtatgataaaatcatatttaaatttttaaacaattatcagatttaggtttaaaatgattataatttcttgaatcacttccacacattatggcttctgcattggtctcgaatctggagtatctaatattggaggagacaataaataaaagagatttactaaaagttgtaacaaaatgtgtgagaaataataattagaaaactaaagtcttagaagataaaaggttgtgagtttactgtacatcaagggatattattcttgttgaagggttatttttccttctaatgtagccgctacgtattttacttgagaatttatatgatgtttatttgttactct

SEQ ID NO: 7290 - DNA, 1361 bp, Glycine max
  unsure (1)..(1361): unsure at all n locations
  Clone ID: PAT_MRT3847_106591C.1
cacccactgaaacatgacgttttgtacttgggagctctcggctcgctaaccccagctacttctccctcatccactcacaaaatgtgccaggccctctccgccccatcgcctccgtgtacggctcttctctccttccttttcttcctcctcacggtggtgggcccggtctcggtctcggcatggcggccgtggccccagaaaaacaatatgaacaccaccgattacgccttcggggactccaagaaatacgaggggtcctcggagttcgtgaagctgaggtaccacatgggaccggtcctcacgaccaacatcactgtccacaccatctggtacggcaagtgggagcggaaccagaagaagatcatccgcgagttcataaactcaatatccgcggcgaactcggcgcacccctccgtggccgggtggtggcgcaccgtacagctctacacggaccaaaccggggccaacatttcaaaatcggttcgactcggcgaggagaagaacgaccggttctattcccacgggaaatccctgacccgcttatccatacagactgtgataaagagcgccatcacagccaaaacgaggccgttgccgatcaaccctaggagtgggttgtacctcttgctcacggccgatgacgtgtacgttcaggatttctgcacgtcggtgtgtgggttccactacttcacgtttccctcgttggttgggtatactcttccgtacgcttgggtgggtaactcggctaagttctgccctggtcagtgtgcttatcccttttcggtgcccgcgtatatccctaaccggaaaccgtttaagtccccaaacggcgacgttggggttgacggcatgattagtgtgattggacacgagatggctgagctggcaacgaacccgttggcgaatgcttggtatgcgggtcaggacccctctttccccgtcgagattgccgatctctgtgaggggatttacggcaccggtggcggtggatcctacaccggtcaggttttcgacgctcgagatggcgccacctataacatgaatgggatcagacggaaattccttgttcagtggctgtggagtcacgttctcaattactgtactggacctaatgcgcttgatcactgatcatctcctcagtcaatgtgctagatttttctttctttcttgggtttggtcttgtgcttctgtgggagtctggtaattttgttaagttagttaagtttgttcattaatgcaaataatgtaattttattgttattgtttgttaagttagttaagtttgttcattaatgcaaataatgtaattttattgttattgttatatcatagtttatatcaagaaagattataagnccttt

SEQ ID NO: 7291 - DNA, 1410 bp, Glycine max
  Clone ID: PAT_MRT3847_106592C.1
aaatttttaaataaaaagtgttttgtttggggtgtataatataaagaagcttcacccactgaaacatcacgttttgtacctgggagctagcagctcactaacaccagctactactccctccccccaccccccactctctcacaaaatgtgccagggcctctccgccccatcgccgccgtgttcggcgcttctctccttcacgctcctcctcctcctcctctcggtggtgggcccggtttcggcatggcggccttggccccagagcaacaaaatgaacatcagcgattatgccttcggggactccaagaaatacgaggggtcctcggagttcgtgaagctgaggtaccacatgggaccggtcctgactaccaacatcaccgtccacaccatctggtacggcaagtgggagcggagccagaagaagatcatccgcgagttcataaattcaatctccgccgcgaactcgccgcacccctccgtggccggatggtggcgcaccgtgcagctctacacggaccaaaccggcgccaacatttcaaaatcggttcgactcggcgaggagaagaacgaccggttctattcccacggcaaatcactgacccggttatcaatacagtctgtgataaagagcgccatcacaggcaagacgagacccttgccgatcaaccctagaagcgggttatacctcttgctcacggccgatgacgtgtacgttcaggatttctgcacgtcggtgtgtgggttccactacttcacgtttccctcgttggttgggtatactcttccgtacgcttgggtgggtaactccgctaagttctgccccggtcagtgtgcttatccctttgcggtgcccgcgtatatccctaaccggaaaccgtttaagtccccgaacggcgacgttggggtcgacggcatgattagtgtgattggacacgagatggctgagctggccacaaaccctttggccaatgcttggtatgcgggtcaggacccttctttccccgtcgagattgccgatctgtgtgaggggatttacggcactggcggcggtggatcctacaccggtcaggttttggacgctcgagatggcgccacgtataacatgaatgggatcagacggaggttccttgttcagtgggtgtggagccacgttctcaattactgtactggacctaatgcgcttgatcattgatcatctcgtcaggaccagatatttcttcttctcttcttttaacctttgctttgggctttgttcttgtgggttttgtgggagtctggtaattttgttaaggtagttaagtttgttcattgatgcaaataatgtaattttattgttattgttatatcatagttattataagccttttttggtgtcacggtccccgtatatgggaaaagattgcgttgcgt

SEQ ID NO: 7292 - DNA, 698 bp, Glycine max
  unsure (1)..(698): unsure at all n locations
  Clone ID: PAT_MRT3847_106593C.1
ctgaaagaatggctaaatacactttttaccttaggatgcgaagcctacttgaatgatcttaagacaacaatgcctccaacctggaatttctctcctcggagagaggaggcctgccattaccatactccaagtcggtaattgaacgctattcgactctgtctttagatactcgagcaaacaaacttggtttgatcacctactgtagagaatggagcttgcggactgctagatgctcctttcaagctatgaacatgttgcccgcaaactcgaaccctataatgtactctgcacaaagtaccattctttgcctatcaactccacggcacacggtctagacaaggaaagcggaacttctggacttgtattgcatattgcaatgtgagagccccggctgttcaactcccgattcaagtctttcctagcctggacaccactataatctatggctgtcagaggggctatacatagaatcacgaagacaattctttgaacctcaggtgcgcgtcgttgacatctatcaacatcgacttcttattttcgcaacctgtccttgatgtatcttgtgtatgccaaatcaagaggagcataaacaccatcgattacacttcccttgtatgtatatgactgangtttctgggtagcattcctataaacagagtgtcctggcaaacgacccacgaagtgatatggggatttgc

SEQ ID NO: 7293 - DNA, 800 bp, Glycine max
  Clone ID: PAT_MRT3847_106594C.1
agcgccttcgactacaccccaacgccgtcgtcttctctgtttcatccttccgctctttattttactcatacgctcagtctcaaacacaaacacaatctctctctccttcttctctagatcagatctgtttttttttcccccaatcgttactgattcgacgtcgttttcgaaaccctcccgcccgagcggaacatggtcgtcaacgagagaccctccaagaggatgaagagaagggtcacagctgatcttcgtgattttcttacttttcccgagcctggcgtcactgcctccggccaacccttccggaactgtgtacagcggttcctctctgaccatgcgcgaatcactttccctccctcgctctttctcgtcactcatgacgtggcagatcttgttccgtgtcggagacatcgtcagtgggcccgatctctcgccggctatggtcactctcgatattgttgaggaggacgtccctcgttgccgtacttccgtctattgtgaaccgtgccgagtcgttgggtggagtggccttcccgtgtgtcgaaaccgatcccctttcataattagggttgcgagtgatgccgtcgaaacttttcaagaccctgttcaagatgtggaaatcttctccaattttctgaaaccaggtgtagaatcgtgtaactttgccatcaccgttgatgaccttgaggaatttgggtgtatcttcagattgaaaataaccaccatcttcttgcatggtgtcgtgcatgcccaatggttatgggcaccctgctcactctcaatggaagaaaaaggtggct

SEQ ID NO: 7294 - DNA, 251 bp, Glycine max
  Clone ID: PAT_MRT3847_106595C.1
gctatatattgtgttttgccgtgatagaggtgcaagagttacacacacgtgtatgcgatgtaatactgggtttattctgtcacatgaaaacaagagactgggggggggggtactacaggatgcatggtaaaatcgcgtgcatcccaagttaatgcgccttagataacatacctaaattgcctgctgtggtaatagcaaaaaagcgtcgacagatggaacatcctaacattagcgcagtcagaatggtgaaa

SEQ ID NO: 7295 - DNA, 1217 bp, Glycine max
  Clone ID: PAT_MRT3847_106596C.1
cgttgcaacaacaaacaccacactcacgcaaatggatccgctcaggggatccgaacccgaaaaccctaccgccacgtgtctctccatgctctccctccgccgcttctccgcgtgccgtgacttcgcccgtcgcctccctccctccgacttcgtcgcccgcgtcctcgccgtagccgacgtcctctccgcctccgacttctactccgtcctccagctccgcccttctgacggcggcaaccgcgacctcgcgcggcggcagtacgcaaaactcgcactcctcctcgacccaacgaaccccgataagctcccgttctccgacgaggccctcgcacgtgttcaggaggcctggcacgtgctctcccaccccgaacgccgcacccgccacgaccgcgagcaaaacgcaaacgcaaaccctaggaggacgacgacgtcgttttggaccgcgtgcccctactgctggaacctcttcgagtacgagaaaaggtacgaggattgcgcgctgttgtgccaagtctgcgggaaggccttccagggcgtgcctgtgaagccgccaaccaagacgggcgacgccgtcgtggagggtgaggagctccggcagtactactcgtgtgaagcgagtgtgccattgatgtattacgaggttaagggtaacaatggtttgggtggacaaaatattgcacaatttgtttacatttctgatgatgataatgatgatggagggtttgtgaaaaatgaagggttgcaacaaggcattcgtgagaagaggaggatgagggtgaagactgtggcgaacaaggttgctggaaacaggaggaggaggccgatcgatggcggcgactcggatttcgatttggatgtggaagatggggagttggagttcacggaaggggatgatgatgcctttgttggtttgaagtttgactagtgatgatgatgcagcagcaatgggtgatggaaattttactgcttttttttttgttgctaattctaggaggagtagcagcatatagggtggtagagtagtgtttttggatagtgttttttgcacagattatttgtggagaaacaactgaaaacaaagtataggtgttgatttggggttttgtcattttggtaaagaggcattaccttgttcatattttaccatttttgtaatgccccttttgatttgatgaccttcggaaattgaaaagaaaatatttggtctacttttgaaa

SEQ ID NO: 7296 - DNA, 270 bp, Glycine max
  Clone ID: PAT_MRT3847_106597C.1
ggggaggcaattggagggggaatttcacactgtctcatgtatgaaatacaacatatgctcattctgtccattacctgagagcttgttctgcaaaacaactttggtgtcccaaaccttaaagggtcctcccccggcattcgggacttaaaaaattactggagactagggttccccaaattacataaacctttcggaacttaatagcaaaaatggacccctatgtgttgtgtaactttttggacctgttcaggccacttggtggaacaactg

SEQ ID NO: 7297 - DNA, 356 bp, Glycine max
  Clone ID: PAT_MRT3847_106598C.1
ctcatttctttttttcaacaaagaaaatctccttttgaaatgaacattgtggaataacaattagattaaagctcaatgcaacaccaaggatgccacaaaaccttcttattgcgtaaccttacctataatcaacgcctcttcaggagcatcaagaactctctcattcgaccttaatccatcgtgggctgaaatccacccatattaataatataaagtacaaattacagaggaactagtgatggttacttcagttcaatcaatggcaaggaccccagtgagttgtttcctacagaagctctaagtggtcccccacctcaggagaaggggtttattttgtctgtaagaccaaccttctt

SEQ ID NO: 7298 - DNA, 288 bp, Glycine max
  Clone ID: PAT_MRT3847_106599C.1
gccaatatctactacttctatgcccatggatagatatccccttgaagtttcttcaactttcaagatcagcggtggcaacaacaacaataacaacagcaacagcaccctagacaggtttgacagctccatcactagttctgatatgatgggaatgggatatttcccttttcagcacttgaactatggatcaaacatgggactcactactacacccaacaacactccactttgcttcatgccaagttccacttcttctcaaatgatgtcagagctgaattccaccatgct

SEQ ID NO: 7299 - DNA, 291 bp, Glycine max
  Clone ID: PAT_MRT3847_10659C.1
ggtcgtcctttttttttttttcattttgacattctaattaaaagaaacgcactcgaccattatgatcagtcatggaagagaaaagaaatatctttctaccacggaggataacccgccaacataccgaggaaaaaggatgttcctacaaaaatggttttgaatagttgggatacctggggtgctcccagtagcatcataagcctgaggtgagtcagagcgaataggatgggcacaacgccagcgcctccacattccctcctgtgccctgggtgtaatatgtcatccgggcat

SEQ ID NO: 7300 - DNA, 804 bp, Glycine max
  Clone ID: PAT_MRT3847_1065C.1
gcaagttgcaacttttgacgttttgattttgttgtatagaacaacatggtgttactcgctcactgagttgagttcactggttacacaatgtcgaagagagaagaatttgctccgtggcacttcttttttcttcttcttcttctatgggggtttgtcggcggcgatgcgccggggagggaggtgtggtgcgtggcgaagaacaacgcggaggacacggcgctgcaatcggcggtggagtgggcttgcggcgcaggcggagccgattgcggagcgattcagggaggaggaccctgcttcgacccttccagtatgcagaatacggcgtcgtatgctttcaatgattatttccgcaaacacgctatctctgaagagaattgcaacttcggcaacaacgccgccattacctccttcaaccccagttttggtaattgtaagctcccttctagtttgttagtgaacaatgggagtttctcgggatcggtgtcttctatgggattgatgcccggggaagaaacgagtgggtgcggtggagttgtttggaggtggtggcttgcgccatttattgtcactacacattttttgtttatgctagtttcaatttcacggattgtttaaggataattatatttgtgaaatagtaccaatctgtctgtgattctgtactataatactattgttatgctcagctgcttccaaatttgtagttttgctagcaaagtattgattaaaatcaccactttgaaggagattgtacctcatttaaaattgaatttgagtaaatggaaggttgttatgttctcatct

SEQ ID NO: 7301 - DNA, 362 bp, Glycine max
  Clone ID: PAT_MRT3847_106600C.1
gcgtgctggtgtttgtgctcttggtgctgtcatagctaggcataatggtgatgaaagggtacttgactattaccagaggcgttttgttttattcattttgtatccttgtgataattccaatttacacatgaaatccacttgtttaaccgcgtttcatattattgcctttgcttataacacattgtgatacctcatgatttgccctatgagctattgtatggcagagcaagttacttatgggcttgttcattcttaaactagcatattggtaacaacaaattacatactacccacattgttataaggcctatgtgctttatgatgtgtctcatggcatatttactgtgcaattcattttaaca

SEQ ID NO: 7302 - DNA, 127 bp, Glycine max
  Clone ID: PAT_MRT3847_106601C.1
aagtaaataagtaattgacttagtgcatatgtaacagccaaagatcctgaatggtttgttatctgcaaaataatatgataaaacccttaaatttgttacagaatattgacatactgtgatttttcct

SEQ ID NO: 7303 - DNA, 535 bp, Glycine max
  Clone ID: PAT_MRT3847_106602C.1
gtgtgggggtttttttttttttttttgcacaaacgcagaagggaacaatttttcttaaaacaaaaagaaccaacaaaaaaaaaaacaccaaccccaaaaaccaagcccaaacaaaatacaaaaacaaaaaaggcaaaggatgaccacccccaaaaaagaatgccggcacaaaaaaaaaaaaagtcacgcgtaactttagaaccaaaatccaaaattattataaaaaccatcaacaaacccaaaataaaacgggaaccaattcaaaataaaacagacttcagaacaccaaacttcccccggtaatgagaacccccacaatgcacatgcgaaacctctatcccctcccaaaaaaccacaacacagcggaccaatttcataaaaaggaggcgctacaaagaaaaaaaaccccccaaacagccaaaaatgtggaagcccccacaaccaccgaaacattcggacccctctgaaagctcggagcaatcatacagacgcaagggcccacccagaaaaaaccgaccggaaacaccaaaccccc

SEQ ID NO: 7304 - DNA, 1265 bp, Glycine max
  Clone ID: PAT_MRT3847_106603C.1
ggctgggactgttgtcctcgcatccctggtggcgcctcctcagcatccgcgcccgccagcagccctgtccatggcgagcgcaacgtcgcctgcactgaattgctgcctgtccggctcaacccccaggtcactcggacgcacgcactcttctgcactgtcgaaccgtccattaaaaatactctccgctcccttcttcccagctgcagcctcatcatctccgaccctccccaaaatcatgagcaacagaacctgaatcaattgggcttgctgcaaattgagttagaggaggtgaagaaggagaatcagaatttaaggtcaatgctaaatgagatctctgaacactacgctgctcttcagaatcagttattgttggcgatgcagcagaagaaactatcttcatcacctcgaaataatgaggacatgcagaaggacagccagcagaataacatggagaaaccagcgttaccctcctgcaggcagttcttaaatactggtaaaatcaataacagggtaatattacaagaagcaaaaatcgtagaagagcaagcatttgaggcttcttgcaagaaagctagagtgtccgtaagagcgcgatcagaatcatctttgatgggtgatgggtgtcaatggagaaaatatggacaaaagatatcaaagggcaatccttgtcctcgggcctattatcgctgcaacatgggaactgcatgtccagttcgcaagcaggttcaaaggtgtgctgaagatgagagtgttgtcatcacaacctatgaggggaatcataatcattcactcccaccagcagccaggtccatggcgtgcacaacatcagcagcactgaaaatgttcctttctggctcaaccactagttcacatggaagcacttattcttattcaaattcagacctcttctctccactatgcacttctacctactatccatctgcagcaccatcatgtccaactataactttggacttaacccaaacctctaagaacaacatgaaattcccaagtgctatttcttcaaaccatttgcaaccttttccactttcattgcatggtcaacctcaacaatctgagggaatattaccttcagagaaaaaccttgccttggtggatgttgtcagtgctgccataaccaacgatccttctcttaaggcagcattagaagcagctgtttcctcaatcattggagactctcagaaatcactgccaactttgtaggagtgataatgacccctcttctaagatgtctgcagtatcac

SEQ ID NO: 7305 - DNA, 257 bp, Glycine max
  unsure (1)..(257): unsure at all n locations
  Clone ID: PAT_MRT3847_106604C.1
tcaacttcatcctaaccttttacacatcatatttttcggcttagaaacaaacataagcaaatttcaaattgtcntgtccttttcgggtaatgggctgtaanaggaaaaactcctgttttgtgcgcatattgataatggnatagtctttcttctgaacccatttttgcaaaaaggaanaaagagaaagagagagagagagagaagagagagatattcactgccaagaaagaagacatgaaaattcagtgcgatgtgtg

SEQ ID NO: 7306 - DNA, 261 bp, Glycine max
  Clone ID: PAT_MRT3847_106605C.1
aaaaaaaaaaaaaaaaaccaacggtgaaaaaaagggtcaccgccacaaagcaaaaaggatcatgacccatactatcttgataaaaaaaaaaaaaaaccccccccaggagcatcatccttatcggaatctatgggttttttcggggcccccatgacccaaccccccataagatccatagagatcaaacagggaattttttggaaagctaaaaagactaattaaagggcagaaataaacatagaggggggaaacggaaccaaa

SEQ ID NO: 7307 - DNA, 1269 bp, Glycine max
  Clone ID: PAT_MRT3847_106606C.1
ccacgcgtccgacaggccaaaacccaaaccttgacttggctcgccactccacacgccattgcaagtcccgtgctttctcgctccttcaccttctactccccaaactcgaaaccccacttactgaactttgttaaagttcataaatttcacaaaatttttcgaccttctttgcttcaaaatctacttccttcaaaatctacttcctctcctatcactaaccgtttcaattttgatttttgggctccatagcttggaaggcagaagaagatggagaagcttaacttggcccttgtgtcttccccaaagcctttgatgttgggacatgttcctgcaatagacgccacatccagagacgttttcagaagaaagcacttctcttttgggagggtcttaattgctcctcatcgttgcagattccgtgtttctgcactctcttcctcccatcgtaatccgaaatctgtgcaggagaagctgatagtaaagcattttgctagtatttcttcttcgaatactcaagaagcgacgtcaactggagttaacccacaattatcaccatctccatcttcaactatagggtcacctctcttctggattggtgttggtgttgggctttctgcactgttttcagtggtagcttcaagactgaagaaatatgcaatgcaacaagctttcaagaccatgatgggtcagatgaattctcaaaataaccaatttggcaatgctgccttttctccgggatcaccttttccctttccaatgcctacagcagcagggcccactgcacctgctagttctgcaactactcaatctcgagcaccttcagcatctagtgcatctcaatccactatcacagtagatttacctgcagcaaaagtagaagctgctccaactactaatgttaaagatgaagtcgaactaaagaatgaacccaaaaaaattgcttttgtagatgtttctccagaagaaactgtgcgggagagtccttttgaaagttttaaagatgatgaatcaagttccgtcaaggaagcttgggttccagatgaagtttctcaaaatggagctccctctaacctaagttttggtgattttcctggttctcaatctacaaaaaaatcagccttgtcagtggatgctttggagaaaatgatggaggacccaacagtgcagaagatggtttatccctatttacccgaggagatgaggaaccctactaccttcaaatggatgctgcagaatccacagtaccgtcaacaacttgaagaatgctaa

SEQ ID NO: 7308 - DNA, 2408 bp, Glycine max
  Clone ID: PAT_MRT3847_106607C.1
ccacgcgtccgggatgtttgaaatcaaataacaaacaggaagtgactacttttcttttgtgaccaaaatgaaagtgatgtgagtgacagtccttcacttttgatgacatttcaaagctactagaatggccaacaacgggagtccaaagcataagaagatgcaaaagaacctttgcacacaactagctgttgcagtgagaagcactcaatggagctatggtattttctgggcaccttcaaccactgaagaaagggtattgctagagccgaatcggctcgagcggctcgagattaagacaagaaagacagtccaagccatggaattggaaatgaaggctgataaaataggactgcagaggagtgagcaactgaaggaactgtacaagtttcttcttgcaggtgaagctgatccacaaactaaaaggccttctgctgcattagctccagaggacctctcagatttggagtggtattacttggtttgcatgtcctttgttttcaatcacaaccaaagtttgcctggaagagcactagaaattggtgacactgtctggttatgcaatgctcaacatgctgatagtaaaattttctctcgttctttgctagcaaagagtgcgtcagttcagaccgtggtgtgttttccctatcagaaaggcgttattgagataggcacaactgaactggttactgaggatcctagtctcatacaacatgtcaaggcttgcttcttagaaatctcaaagcctacatgctctgataaatcttcctctgtccttgataagccacatgatgacaaatatccaacatgcaccaagggtgaccaaagggtgttagaagcaatggctctggagaacccatgttcccttgaagaaaatatcaaatttgatcatgaccccatcaatgaattgcaagatggcaacaacgaagattctaacatggattctcctgatggttgtcagcatcatttccctatggatggatccatgattgagggtatcaatggtgtgccatctcaagttcattttgtgaatgaagccttagtcattggtgctccagattctttgagttcttgtgattgtatgtctgaggcttctgagaaccaaggcaatgattccaagaatgtagaccaaactcaacttatggaacttcaatattgccataaaccaaagagaagctccatggatgttggagctgatgaggacttgtgctacataagaacactttgtgctattttggggaactcatcaacttttaaaccaaacccttatgctggtaactcaaattgcaaatctagttttgcgaaatggaagaaagggagagtttctgaaaggaagaggccaaagttgcaccaaagcatgttaaagaagactttgtttaatgtcccttttatgcatagaagttactcttctctcaagtcacaaaaagagaatggcagaatgaaatggactagtaaattggaaaatgctaatgatggtttcatggagaaaacattctctgataagaaaagagaaaataaaaactttcatgttgtcaaaccaatggttccatcttctataagtgaggtagaaaaaatttcaattcttggagacacaattaagtacttgaaaaagcttgagacaagagtggaagagctagaatcttacatggaagttacagaccctgaagcaagaatcaggagaaaatgccctgatgttccagagcagatgtcagataactatggcaccagaaagatttgcatgggaatgaaaccttgggtgaacaagaggaaggcttgtggtattgatgagatagacacagagctagaaagaattgtttctgaagaatcaaaggttttggatgtgaaagtcaatgtgaaggagcaggaggttctgattgagatgaaatgtccttacagggaatacatactgtatgacatcatggataccattaacaacctacatttagatgctcaaacagttgaatcatcaacaagtgatggtgttctcacattgacacttaaatctaagtttcgaggagcagcaacagcaccaacgaggatgatcaaagaagcactctggaaagtatctggaaatacttgacatgcctatttggatttcacatgatagtattagtagtagtaatagtaaatatttatgattaaacaactttagctctagaacagtgatttgtttcctaacaaaatatgtatgccttgttgtatgaaccatgattttggctattgtgcttaagtgctgacttgttagagttaccagagctccactctgtaatttttaaaccacttcagccaatctgttagcatgcatttgcaagattttgtttgcttttactgccagcagtatagaactgtttccttgcatttagaaagtgaagtgtgaatgtaaggtttcaatgtgatcaagaaggtgcttt

SEQ ID NO: 7309 - DNA, 955 bp, Glycine max
  Clone ID: PAT_MRT3847_106608C.1
ggctcgagatacgataactaggaagtttcctaaacatcccttctttcaaaaaaccaatggctttcaagaacttgtccgttcttactctctgtgtttcccttgtgctttccttctttgcaccgaattccatagctgctaacaaccgtgcagtggttcctccagaaaccatttgcaactccaccgtaaacccttccttctgcaaaaccgtgcttgctaatcaaaatggcagcatcgttgactacggtcgaatttctgtccgaaagtccttgtcccagtcccgcaaattcttgaactcagtaaattcacttcttcaagacagatcctctttgtctctacccacaattcgagcccttgaagattgtcaattcctcgctgaactaaactttgaatacttaacaaacgcacttgacactgttgataaagctagcgatgttcttcccaccgctcaagccgaagatcagcaaacccttcttagtgctgttttgacaaacgaagaaacttgtttagaaggcttgcagcagagcacagcttctgatcaaagagtgaagagtgatcttatctcatcactctctgatgacaagaagcttcacagtgtttcccttgacttgttcacgaagggttgggtggccgagaagaaaatctcaacatcatggcaagtcaatgggagacatttggatttccacaatggtcgtttaccattgaagatgtcaaaccgtgtacgggccatttatgcttctgcaagaggtcacgggagaaaattactacaagataacagccaaagtgtgttggttagtgacattgtggttgttagtcaggatggaagcgggaactttaccactatcaacgatgccatagcagttgcgccaaataacacagttgctaatgatggttactttttaatttttatcactcagggtgtgtatcaagatatatatccatagcaaaaaacaaaaag

SEQ ID NO: 7310 - DNA, 304 bp, Glycine max
  Clone ID: PAT_MRT3847_106609C.1
ggctgccaacacattaataagtactgctatctcacccttcccatctctcctttcttcctcaaaatccacatttgccaccacagttcctctttctagctttaatatcaccaatacctcttcttctcacttttctataagtactaactaaataccagaccatcctagacctccttaccttaataattcagcacctaataactttaaattcgaccctcttcgtcttaatgaagtaccagagaatcttgagaagttcaaagagtcagaactcattcactacagatgagccatacttactagtccagga

SEQ ID NO: 7311 - DNA, 420 bp, Glycine max
  Clone ID: PAT_MRT3847_10660C.1
caaaaagattacgaaaccaagtggaagagtgtccaaatggaagaggagaaaggaagagtttgtgtaactggaggcacggggtttattggttcatggatcatcaagagactccttgagggtggttacactgttaataccactattagatctgatccagggcgcaagagggatgttagtttcctcacaaatcttccatttgcatccaaaaagctaagaattttcaatgctgatctcagcaacccagagagtttcagtgaagcaattgaagggtgcattggcgtgctccacacagctactccaattgatttagaagtgaacgagccggaggaaatagtgaccaaaagaaccattgatggagcattaggcattctaaaagcatgcctcaattcaaagacagtgaagagggttgtttacacttct

SEQ ID NO: 7312 - DNA, 1023 bp, Glycine max
  Clone ID: PAT_MRT3847_106610C.1
aattcggctcgaggaattggggtgctcctgattctgtctcttcctctctcactttctttgagtttcattgtgatccagttattgacttcattggccaggaatatcatctggggttgtcacaatctgagtgatccatctacttttgtggcaaagattgctcttttgaggtcttattcagatccggacttcaatttctataccaagagaaggagctgcttctgaagtttgactaggagtgtattagaagagaggaatcttccaaactgatccgtgcaattggataatacacaaggcttttaagtaatgtgtgcatcttgttgagcttcaactatcttttgatccgttattggcatctggatagagcttagtaagagtcaatgacggagtcagaagaagctggggcaaagccaatgaacacattgggtggccaagtctgccagatctgtggtgataatattgggaacaatgtgaatggcgatcctttcattgcttgcgatgtttgtgctttccctgtctgcagggcgtgctatgaatatgaaaggaaggatggaaatcagtcttgccctcagtgcaagacccggtacaagaggcacaaaggaagtcctgcaattcttggagaccaggaagaggatggggttgctgatgagggtgctagtgacttaaattacaattcagaaaatcagaatgaaaaacagaagattgagcacagccactggcttcctcaaggttcaccagaaggagcagactgagattgctgaaaaagccgttcaacaagaaccaatcgacttcccattttgaaaaatcctttgcacatgcatccatcttttttgagagtgataataatgcatttagtttaatttatccaccacgtaagtggctatagttggaaggaaggcgacctcatacatttgctttcaagttttgacctttttttatgttcttttggttccttacaaaaagtatgttaagctgaatttcaacatacgtatgctgaaatatttatatttcccttgttgcgatagc

SEQ ID NO: 7313 - DNA, 1388 bp, Glycine max
  unsure (1)..(1388): unsure at all n locations
  Clone ID: PAT_MRT3847_106611C.1
ggctcgagcagagttacacactctctctctctctgtcggtcaatttttcgatccgggtctattttattaagttctgaaccttgtggagcgttgtcacattccttgatgggaattgctgaattggggtgctcctgattctgtctcttcctctctctcactcaactttcttggttttgtgatccagttattggcttcattggccaggaatttcatctggggttgtcacaatctgagtgatccatctactttggtggcaaagattgctcttttaaggtcttattcagatccgagcttcaatttctataccaagagaaggagctgattctgaagtttgacttggagtggattagaagagagaaatcttccaaactgatctgagcaattggaaagtgcacaaggcttttaagtaacgtgtgtatcttgttgagcttaaagtatcttttgatccgttattggcatctgaatagagcttagttagagtctatgatggagtcagaaggagaagctggggcaaagccaatgaaaacattgggtggcaaaatctgccagatctgtggtgataatattgggaacaatgtgaatggcgatcctttcattgcttgcgatgtttgtgctttccctgtctgcagggcgtgctatgaatatgaaaggaaggatggaaatcagtcttgccctcagtgcaagacccggtacaagaggcacaaaggaagtcctgcaattcttggagaccaggaagaggatggggttgctgatgagggtgctagtgacttaaattacaattcagaaaatcagaatgaaaaacagaagattgagcgcatgttgggctggcaaatggcacatgggcgagcagaggaggctgttgctccaaattatgataaggaagtttctcacaatcacattcctctgctctctggtggacaagaggtttctggagaattatctgcagcctcacctgagaggctgtcaatggcatctccaggtggccgagggaagcgtgtccataatcttcaatattcctctgaccttaatcaatcaccaaatattagggttggggatcctggattgggtaatgtggcatggaaagaaagagttgatggctggaaaatgaagcaagataagaatgttgctccaatgagcacaggccaagctacttctgaaagaggagctggagatattgatgctagtactgatgtgcttgtggacgattccttgttgaatgatgaagctcggcaacccctctctaggaaggtttctattccatcatctaggatcaatccatatcgtatggtcattgctctgcggctggttatcctatgcatttttctgcattatcggataacanatcctgtgcccaatgcatatgcatttgtggttgatatcagtcatat

SEQ ID NO: 7314 - DNA, 198 bp, Glycine max
  Clone ID: PAT_MRT3847_106612C.1
tccattctctgtctgtctctctctctctcgatcaatcatggctttgcccaatcagcaaaccgtcgattagcctagtatcaaactcgtcatcgtctgtgacatgtgtacagtaaaaacaacgttcgtgaaaaggatcttaccgtagtattttagaatgtatacgaaccgaccattggagtggaggttcacccattggat

SEQ ID NO: 7315 - DNA, 218 bp, Glycine max
  Clone ID: PAT_MRT3847_106613C.1
cctggatatatgcgggcttcataggggttgatcacatgcaaaccatgtatttatatgcactatatctatctcattcttttaacttatttgaagtgaagactgtgtgaagaacagaaatgcaaccataacactaatgtagtattgcattgttatatgagcgtgtgtgttgagatgtccaaagatgctaaaataagatcctcggtcatcattccgtaggt

SEQ ID NO: 7316 - DNA, 359 bp, Glycine max
  Clone ID: PAT_MRT3847_106614C.1
cactgggtggctgttgaaactgcctttccctcattgcactgccccaagagttaaaggaatgcctatttctatacggcgaggagctggtccaaagaatgctgtactgatgaatacgccaaatgctggcctctcactgcggggatcatttgctggagaactctgatttgaagtgcttaacacgactctttcctacattaaacgtacagtcactttctaaatagcattgggaaattcggctgatgacaccatatatcaagaggctgctccccacaagctggagcagtgcggccagactcaggaaagagataggtcgaaatgggcacacgaggaatttcttacagcttgtgtaactcaggtgc

SEQ ID NO: 7317 - DNA, 206 bp, Glycine max
  Clone ID: PAT_MRT3847_106615C.1
gactcatctcttactacgaaaccctcttcatcttgttctatctgtgacgaccatcatggtctcaagatcactctaattgttagctaggtgtgtggttcccgcaatggttgtggtcattcgcccaacaaagaaccctttttgcgtgaagggtcgtttctactggtacccttgccgtgctggttttgagacctcacctaccacctaca

SEQ ID NO: 7318 - DNA, 156 bp, Glycine max
  unsure (1)..(156): unsure at all n locations
  Clone ID: PAT_MRT3847_106616C.1
gagtgagtgagtgtgcgtgaatcgtgatttagtagtgaaacgcacacactcggcacgtccacttccatatnctcanttctcncctcttccaaaaatctcataccanaagtntctactanttacctttaggtagcgcttatgcttganaaaacctng

SEQ ID NO: 7319 - DNA, 900 bp, Glycine max
  Clone ID: PAT_MRT3847_106617C.1
cccacgcgtccgcccacgcgtccgtacggctgcgagaagacgacagaaggggatccttcgtccagctagcaccacattcacctgaggcttccaaagcaatggcttcccttgcagcatccactgctgctgcttcccttggcatgtcagaaatgcttggaaaccccatcaacttcagtggtgccacaaggccagctccatctgcttctagtcctgcctccttcaagactgtggcgcttttctccaagaagaaggcagcaccacctcctccaaagaaaaagcctgctgctgtatcccccgccaatgaggaactcgccaagtggtatggtcctgacagaaggatcttcttgcctgagggtctcttggaccgatcagagatccccgagtacttgaccggagaagtgcctggagattatggttatgacccgtttggtcttagcaagaagccagaggacttcgccaaaaaccaggcgtttgagttgattcatgccagatgggcaatgcttggtgctgctggattcatcattcctgaggcctttaacaaatacggagctaactgtggtcctgaggctgtttggttcaaggtttgcaagatctgtcaattgtcacccctgttaaattcattaatacactgattttatgactcaacaaattaagtatttagaaatacctgataacacaattctaagctaagtttttgtgtaaataacttttgcaattatacatgtatttggtatttctaacttcttatacatactatctgctgcaaagtagttgaaagatgggcagggaaaggaataccttaatttaacatggacatcttgttgatgcttccttcctagggggaaattcacttgctcgaaacccaaaatatgcttaaaatcttttaatcggaattgataa

SEQ ID NO: 7320 - DNA, 339 bp, Glycine max
  Clone ID: PAT_MRT3847_106618C.1
attcacctgagcttttagtgaggattccaaagcatggctttccttgcagcatccactgctgctgcttcccttggcatgtcagaaatgcttggaaaccccatcaacctcagtggtgccacaaggccagctgcatctgcctgtagccctgcctgcttcaagactgcggctcttttctccaaaaagaaggctgcacctccaaaaaaagctgcagctgctgctactgccaatgatgagcttgccaagtggtatggtcctgacagaaggatcttcttgcctgaaggtctcttggaccgatctgagatcccagagtacttgaccggagaagtcacctgagactat

SEQ ID NO: 7321 - DNA, 326 bp, Glycine max
  Clone ID: PAT_MRT3847_106619C.1
cttaataacaccagggggttttttagggtatttcttttgttaaccccaaaacatactacttatatcaaattccccataaccccatgctcccaaacataatgaatatgataatccttacaacaaaaacacgttaaattcgattggaaaaaatgaatccttggctttagaataaaaacaaataaaggtgttatacctttacatgctaaaacaatttgcaattcctagttttgttagagaacaatttcttaaaattctaaacactattataatggcaaattctgggtcattacgaaaataggcagtctagaaacgcgtactaattggaa

SEQ ID NO: 7322 - DNA, 370 bp, Glycine max
  Clone ID: PAT_MRT3847_106620C.1
gtttctattaagcagaaggatcggtctgctatgagtgttgggccgggaatggatttgccgatcatgcatgacagtgatcgctatgagcttgtgcgtgacattggttctggcaacttcggtgtagccaggcttatgagggacaagcacaccgaggaacttgttgctgttaagtatattgagagaggtgaaaagatagatgaaaatgtacaaagggaaattataaatcacagatcactgaggcatcctaacattgtcaggttcaaggaggttatattgaccccaacacatttagcaattgtgatggaatatgcttctggaggagagctatttgagagaatatgcaatgcaagaaggttcagtgaggatgagg

SEQ ID NO: 7323 - DNA, 283 bp, Glycine max
  Clone ID: PAT_MRT3847_106621C.1
tctcgagccggctcgagtacggctgcgagaagacgacagaagggatagaagccatctcactatatcttaaccaaagaagtagtttggcatcaaatgatttctccaaattctgcaactgtggtggaaaacgtgatagtattcgacagaatgccaattattctgcaaaatatgttgaagtgatcaatactcaacagaaacaacttgagggtatgaagtacttttttgaagagacaaaattggaggtcagacaaattcaatcagaatggggaagaagcattgagta

SEQ ID NO: 7324 - DNA, 448 bp, Glycine max
  Clone ID: PAT_MRT3847_106622C.1
taatgctcgcatgcgtaagtctcggaatctcggattgagctcacatgcaagcgcaaccccatctatctttcatttttcccttataagattaaaggggcagtggcccaaactttgatttataaaaaaccacgtgtcaaaaatattttctggagaatacactgtgtacgtctacttaattttcgtactgctaggtacttgtcaagggaactccttgaagcagttcttgtctgatgaaactgttaaccctggacatgcacaaggcaagaaaattggcccttcaagtttcgatggtggcgtctgtgcatcacagtgtcttctgaaaagtgattgcatacttggctatgaaactttgaagaggattctgagcatgggagcccgtattatctggttcatacaattcaggacatcattaactcctgccgactgtggttggccaacgggttgacca

SEQ ID NO: 7325 - DNA, 1138 bp, Glycine max
  Clone ID: PAT_MRT3847_106623C.1
gattctcacctttccatgcatatagcttagctagctccttcacctccttagtttcgaaagcatggcttccctggcggcttccaccgcggctatgtcagaaatccttggaaaccccgttaacctcagatgcgcaaccaggtctgctccatcaccaactacacctgccaccttcaagaccgtcgcacttttctccaagaagaaggcagcaccacctcctccaaagaaaaagcctgctgctgtatcccccgccaatgaggaactcgccaagtggtatggtcctgacagaaggatcttcttgcctgagggtctcttggaccgatcagagatccccgagtacttgaccggagaagtgcctggagattatggttatgacccgtttggtcttagcaagaagccagaggacttcgccaaataccaggcgtttgagttgattcatgccagatgggcaatgcttggtgctgctggattcatcattcctgaggcctttaacaaatacggagctaactgtggtcctgaggctgtttggttcaagaccggagctttgcttcttgatgggggtacgttgaactacttcgggaaacccatccccatcaatcttattgttgctgttgttgctgagatagttcttgtgggtggtgctgagtactacagaataattaatggcctggatttggaagacaagcttcatccaggtggtccatttgaccccattgggcctagcaaaggatccagaccaagctgcacttctaaaggtgaaggaaattaagaatggtaggcttgcaatgtttgcaatgcttggtttctacttccaagcttatgtcactggagaaggtccagttgagaacttagcaaaacatctcagtgacccttttggtaataacctgctcactgtgattgctggctccgttgagagggctccaactctgtaaatcaatcatctttatgttcttctccactcttaaatgtacaatacatctcactatataagactcaaggcattttactttattccttggaagccaacttactcttaatttatagaacctgagtcacatcaactacaatttgaccttaataatgaagttcttccaaaatttgcatccaaaaaaaaaaaaagaaaaaaaaaaaaaggaaggac

SEQ ID NO: 7326 - DNA, 1294 bp, Glycine max
  Clone ID: PAT_MRT3847_106624C.1
cccacgcgtccgcccacgcgtccgtacggctgcgagaagacgacagaaggggatccttcgtccagctagcaccacattcacctgaggattccaaagcatggcttcccttgcagcatccactgctgctgcttcccttggcatgtcagaaatgcttggaaaccccatcaacttcagtggtgccacaaggccagctccatctgcttctagccctgcctccttcaagactgtggctcttttctccaaaaagaaggctacaccaacacctccaaaaaaagctgctgctgctgctcctgccaatgatgagcttgccaagtggtatggtcctgacagaaggatcttcttgcctgagggtctcttggaccgatccgaaatcccagagtacttgaccggagaagtccctggagactatggttatgacccatttggtcttagcaagaagccagaagactttgccaaatatcaggcatttgagttgattcatgccagatgggcaatgcttggtgctgctggattcatcattcctgaggccttcaacaaatatggagcaaactgtggtccagaagctgtttggttcaagactggagctctgcttcttgatgggggtacgctgaactactttgggaaacccatccccatcaatcttattgtggctgtcattgctgagattgttcttgtgggaggtgcagagtactacagaattattaatggcctgaacttcgaagacaaacttcatccaggtggtccatttgacccattggggcttgcaaatgatccagaccaagctgcactgctaaaggtgaaggaaattaagaatggcagacttgctatgtttgccatgcttggtttctacttccaagcatatgtcaccggagaaggtcctgttgagaacctagcaaaacatctcagtgacccttttggcaacaacttgctcactgtcattgccgggtctgctgagagagctccaactcttaaatcattcatcttcatgtttttctccaatttaagtaaatacatatactgagatttattaaggcattttgctttgttccttggatctgctgagagagctccaactctctaaatcattcatcttcatgtttttctccaatcttacttaatgtacaatacatatcactgagatattaaggcatttggctttgttccttggaactcaattcttgaatttcttccgattttaaaaaaaataattaaataaaatcataccacaaagcactaaatggacacaaattcttagtttcaaaaaaaaaaaaaaaaaaggaaaaaaaaaaaaaaa

SEQ ID NO: 7327 - DNA, 334 bp, Glycine max
  Clone ID: PAT_MRT3847_106625C.1
ttctttttttttttttttatttaaaagctgctgctctttattagaaggctgttgccaagcccaaggcggaagttgttgctttttttcctggacccaagcccgctaaggccgctccgaagaagggcgccgctcaccctgtgcttgagactcccgtaaaggccgtgaagaatgggttgggctacccttgttttggttaatgtcgtcaagcttcgcggtagaagtgaaaggctgtattttgatggatggagtgggttttagtttggcggtatagggtttatgtatttggggttgaatcgtaatataggtggatatttttttagaagagttttggtgg

SEQ ID NO: 7328 - DNA, 547 bp, Glycine max
  unsure (1)..(547): unsure at all n locations
  Clone ID: PAT_MRT3847_106626C.1
acgaccccacgccgctccgggaaaaataccaacataagccaagccttcaaatatatgattttttcttttcctttagttttctttggacaaaacacaccatgttgatgggaaaacatcttaatgcaatttcaagtttattgatcaacttgatcaatcatcttctgaatgttttcattgtattcttttgaatgatctgttttatttgtttgatgattgtttgccttactatcatatattatgctctgataaaattgtttttatatttctttcaaacaattacattgatttgttgaaatctgttaaagtttgaaatccttataataatagaccattcctctgatcatatatatgatcaatataaatggaatttgatggagcataatgagtggctcttggctggttttttgtggttaatgatcattgcagtagtatatattttgatgggtatatgtggggattcctactttcttgctattgaatatttaagtgggggagcatcatataaatattagataaccatataggctgnggatttcttttcatgatt

SEQ ID NO: 7329 - DNA, 373 bp, Glycine max
  unsure (1)..(373): unsure at all n locations
  Clone ID: PAT_MRT3847_106627C.1
ggcggaccgcaccataaaaaaaaaaaaaagggggaaaattaaaaaaaaaacccggaacaaaaaaagcaacggggaaaaaaaagaaaaaccacccaaaacaaaacaaaggaaccnggaggaagaacaggggcaacggccgcaagggaaagcaacccttctaaagaaaaaaagactggcagcccaacccaatcaaaaaccgcaaaaacaaaagggaccaggtcgcccctgcttctttggcaggctaaaacaccatcaccactatggcccctcccctttaaaaaaaaaaggcacagaatctaaacccacaccgggcatgagcccaatccaatccaaaaattggcgtttgaaaaaaacacggaaaagcaagggaaag

SEQ ID NO: 7330 - DNA, 497 bp, Glycine max
  Clone ID: PAT_MRT3847_106628C.1
acctgctgtgtcttcctctaatatgtgcagttttctctgcagttgacacttgaaaccacagaatcacaatgatctcaatcacttctactgaattgaactacttagtcttccgttacctccacgaatcaggttttactcattctgcatttgcattcgggtatgaagcagggattgataaaaacaaaaatgatgatagtgtggttccaccgggtgctcttgttactttcatacagaaaggaattcagtatcttgagctggaagcaaacttgagtggtgctcagagtgatgctgacatggatgaggatttttcatttctacaacctctggatcttatcacaaagggcccgactgaactacacaatatagtaaaagccaaaaaggaaaatctacgtcagcataaatttgaatcaaataaaataatgaatgacttgagtcaggatgactcaaggagggaacgagttcaggaaacaggacaagaggtgaaaggaaaggaaaat

SEQ ID NO: 7331 - DNA, 376 bp, Glycine max
  Clone ID: PAT_MRT3847_106629C.1
ctctaatgtataatttatggcagagaccttgctgacaatacccatattaatcaatacatgaaatattcggggacgcgggctttacatagcccatctgctggaatatttcatgcggggcacaccgtgtatgcatctttcaccctgattcaacaaggtcaggctgtggctgggcctgttaaaaatgtacgccccccttgtggatcttatttattcacgctcagcctgcacagatcaattggaactctaagcattagtgctggaaaacattttcttggcacgagaatgctcatatgcacacattgcgtgctcagatgcacgaagtattaacactggcctgatctgaagccttaataaatatggggcaaagaatgagaga

SEQ ID NO: 7332 - DNA, 174 bp, Glycine max
  Clone ID: PAT_MRT3847_10662C.1
atcatcatactcattaccatctattatcattatcatcattctcccattcacacacacacacctaatctcatatactccacacccaccatcttcattatcataatcatcatcatcatcatttacataaccatactcactaaacatcatttcattcaaataatctttattatatat

SEQ ID NO: 7333 - DNA, 849 bp, Glycine max
  Clone ID: PAT_MRT3847_106630C.1
aacttctctctctctctctctctctgagatacctgtgggtgtgtatcaattaaccaaaagatggaaatgcatccaggagatgacatgccaatgtctaatggaagagatcataatagcatgaagatgcacatgagcctctattggggcaaagatgccatagtacttttctctgggtggcctaagcacagtgttggccactacatcttggccatcttgtttgtgtttttccttgcaatcattgccgaggttgtctccaacaaacccaacatcaagcgtgggactaatcctataataggagggttggctcaagcaaccttctatgtcttccgcataagcttactttacttggtcatgcttgctgtcatgtccttcaatttgggaatcttcatagctgctgtagctggccacaccttgggcttcttccttgccaagtctcgtgctttagctcttgccaatagagaacaagagtcctcctcggatgctcaaaaagtttgatagaaatgttatcaactcatctaagtgaattttatatcttatttatcgcccaggctaatttgagctggatcagctagcccaggttagccaaattttaatggggcaagtcttgcaggctacaaatatgtccactatcttaaaacaaccattttcaccttcatctcttcccttacaccctcccccaacatccccaacctcctcttccaccaccgatgaccgccacgagaagcctttgcttgttgtcggaccaccgcacgaagaagaacaatttaatcagtgcgaaatcttcagaactcaactcaaggatttagtagataacaaagcctccaatccttccttcgtggtttcttcgag

SEQ ID NO: 7334 - DNA, 182 bp, Glycine max
  Clone ID: PAT_MRT3847_106631C.1
tacaaaatctgggcttattcaattttctgatccgaaaatactttccaaaactcaattccaaattctatctgaaccctctatcatatccacttaatttttatgaactctaatattatcctactaacactttatttccattgcattaaacaccacattacatatttttaaaatcttataaaaca

SEQ ID NO: 7335 - DNA, 322 bp, Glycine max
  Clone ID: PAT_MRT3847_106632C.1
cggggggaaatctgaatcaaacccccaactttaagatgaaaactacaaaattcttggtggaaaacaaactgccaagacaattttagatgggaataatttaaaaaaacttgcccacattgggggtttaaaaacctaacttaacagaaagtgtgttgagaaaatttttcctttatttggaaaactgcgaatggcctaaaaacagggattaaaattcttgactggttggaaagcttggaccacggagtttggacaaacccctcggttttaacccttatatatgcatgcacaccctaatagacctgttgagcttggaccaaattaa

SEQ ID NO: 7336 - DNA, 633 bp, Glycine max
  Clone ID: PAT_MRT3847_106633C.1
cagcaaaataagtaatggatccacttctggtcccagatccggaactgcatcatccaccagtggtttctaaggtttctgcacttattctccatttaacattaaacaagttgggctttggatattggatgaaatctagtattttcgggcttctgaggttcttcattgttgcttgttgactggggtccaaggttcatattttccataatgtgctaactgttataaattaaccaggagtggttcattcattaaggaaagtccctgaatggtcttcttcttttgccggagtattgaactttttgggaggatttaatgtttgtggttctatggatcagaacagaacattttcatgacagcctctccttaaaggaaatactgaacaaataatcaaggcaatgtgagattggttaggtatgaattcaagtgatacttttctttttttcttgtttttcagtgtaaaattatgatggattagaatcatggaaatgagattttttacttttgattgttttaatttttgtgaagaccatgagcaatagtaacaatatgaatacttgaatagtctgttttagccaactgccattgatttcgtggacttttctgtagtattaaaaattccatttactttctgtcttt

SEQ ID NO: 7337 - DNA, 215 bp, Glycine max
  Clone ID: PAT_MRT3847_106634C.1
atattcaaaggaacaatgatcatcatgatcacatccaccatcttaatagtaacttctattacatgacatacgtgttcaagtatttaactattaaaggtcagcttaagcattttgattaactctttaacgtcttatatacccaagtctatcaagagaatcccgaactcgtctagataacttaacccttattaaatttcaacaaatgaggttcattc

SEQ ID NO: 7338 - DNA, 1955 bp, Glycine max
  unsure (1)..(1955): unsure at all n locations
  Clone ID: PAT_MRT3847_106635C.1
acggctgcgagagacgacagaaggggaagaaggctcccttggaatatatttcaagccttgaatcaagtcaggcagggatgacaataaaggagtatgggaagattctgatagagcacaagccagtggagacaattcagattctcataaggctttgcacagaagatggtgacaaaagaggacgctcaaatggagtgtacatgtctatgttgccatctcctgttgattttcttagcatcttcattcatcatcctcagtcccttatggattttcttgaaaaatataccaataaggtcaaggactcacctgctcaagttgagattcacaataccctcttagagttgtatatatccaatgaattgaactttccttcaatgtcacaagttaatgatggtggaaattaccttaatggagcatcagcaaaaaccatgattttaagtgctcaatctaatggaaacattggtgatcacaaaaattcagagcaggaaaagaaccatctcgaaagacttgaaaagggtttacgcttgcttaagactgcatggcctccagagacagaacatccacaatatgatgttgatttagctattatactatgtgaaatgaatgcattcaaagatgggcttttgtatttgtatgagaagatgaaactctataaagaagtgagtgcacgctatatgcaggcataagatcatgaggggtgaattgcatgctgcatgaggcgtggggattctgttaaaggaggggactcatctctttgggcagatgtacttaaatattttggtgagcttggagaagattgttctaaagaagtaaaagaagttctgacttatattgagagggatgatattttgccccctatgattgtgcttcaaactctttcccgaaatccatgcctcacgctttctgtgctcaaagattacattgctcgaaagcttgagcgggaatcaaagatgattgaggaggaccgacaagctattgagaaatatcaggaagatacactggcaatgagaaaagagattcaagatcttaggacaaatgctcgaatttttcagcttagcaagtgcactgcatgcaccttcacccttgatttgcctgccgtgcacttcatgtgcatgcactcattccacctgcgctgccttggtgataatgaaaaagaatgccctcagtgtgcacctgaatataggtctgtcttagaaatgaaaaaaaatttagagcaaaattctaaggatcaggacagattttttcagcaggtgaagagctctaaagatgggttttctgtcattgctgaatattttggaaaagggatcatcagcaaaataagtaatggatccacttctggtcccgtatccggaactgcatcatccagtagtggtttctaaggcttgagatttctggcacttgctttctgcacttattctccatttaacattaaacaagttgggctttggatattggatgaaatttagttattttttcgggttttgattttctttattattgcttgttgactggggtccaggcttcatattttccataatgtgctgactgttataaagaaaccaggagtggttcgttcattaaggaaagtccttgaatggtcttcctctattgccagagtactgaactttctgggaggatttaaagtttgtctttctatggatcagaacagaacattttcatgacagcctctccttaagggaaataccggacaaatattcaaggcaatgtgagattggttaggtatgaattcaagtgatacttttctttttcttgtttttcattgtgtaaaattatgatggattacaatcatggaaatgagatttttactttgattgttttaatttttgtgaaggccttgagcaatagtaacaatatgaatacttgaatagtctgttttagccaaaaaaaaaaaaaaaaaaaaaaaaatgtcctattgccgctctagaggatccnagctt

SEQ ID NO: 7339 - DNA, 462 bp, Glycine max
  Clone ID: PAT_MRT3847_106636C.1
tttttttgaatattttttttttttttttttttttttttttttttttggttagattttttttttttttggggccctcaaaccccaaggttttttaaatcacaaattttattaaaacaccctggaacaagcaaaagtttgcaaaaggggcaataaaatttttttcccccaacttggaaaattgaaagtttgggaccataactccccaactggaccagcccccaacatagagttttttttataataaaaaatcaaggttcaggggtggtgcgtcccccaaaaaacccacttttttttttaaacatttttttgggccggggtttttataaaaaaacaacccccctttcgggggaaaaggggtgggcgacttattttatgttctcccccccccccctttaaaattggtttttgggggtggcataaaaaaacttcctcccccccctgtgtggggggggcacccccccc

SEQ ID NO: 7340 - DNA, 226 bp, Glycine max
  Clone ID: PAT_MRT3847_106637C.1
tcttcctcttgagtagagatctgttgtagacctggggtttactagtgaaaaagtgagaagatgggccccaagatagcactaggtcctatgctgggcatgctccttttgatctcctcggaggcgtcagagttagctactgcgcgtggtgggggccacctgggtgctggtgggggattctcacgggctggccgtggcggctcccctttcggtccatgacgttcaccgt

SEQ ID NO: 7341 - DNA, 526 bp, Glycine max
  Clone ID: PAT_MRT3847_106638C.1
gctccatggtcaaaacacagttgtaaagacgattcatttttttttttgacgctcaaacccatcatggtctgaccatacggcctaaggttttgccaagagacttacgcgccaatcaactatgccacctgaaactgcgccaatgcgtacaaaagctgttcgcttcacccagcccaaaattgaccgctaatgttcatgaaactgtggcccagaaccatgctacagctttattaatgccagatgtagtagaatttaaaggtctcgctagcttcctcaccaagtgctggcaatgctttaagttcctcactgtacaaagtggcacatgccatgcaaacaaacttggaaggcatgccattaatatgtttatcacttgcctctcaatccggaagcctgcaaacggcccagggcttacagtgctccatttactctaccttggcatgcatatgccccggagtggcatacacctttcacaactttggtgctcggtacattacaaaatcacttatcccatggttaactggacctttac

SEQ ID NO: 7342 - DNA, 858 bp, Glycine max
  Clone ID: PAT_MRT3847_106639C.1
ctttcgtttccctttaactgttccagaatatgaacaacaaatttgcaaacatcatatcactttttctttaaagatttgtgctcgagatctatttcctcacccttcgatgaggtcgaggtcgttgtcgcgtttacagtgacccgtaccgcagcggttgtggtgccctgtgttgtcagcatgtggccatggtggttgtgtctccgatgaggtcgaggttgttgccgcatttgcatattcatattggttttaatttgatgattttttctttgtttggtttccatggcataagatttgcatgttcatattagttgaggagatgggatttggggaaaatggagtagaggtggctaaagagtgcagtgttttgtggcggtgacgggtgattagaggaggaaaatgtcgtaggttggaggaagaggaaaaaactttggtaacgacgaagaagagatatagcaccaaaggtgtatcatagtaatgtggactttagattaatttaaaagttaaaattaatggttcacaaaagatcacttagtttgctagtctatgctagacatcgtcttattcaaaacttaaaatctctaaaaaagatactataagtgttattgaccttaaggcgttacacttgaactaattttattgggtgaaaaaaaattggtgacagaacatatttattcaaaactaaagatctttaaggaaggtaatataagtattatcgcccttaaggtgttataaatcaactaattttcttacttaacgtataaaaatctgggtgtagaaacacctataggacatagtcatttttcacctaacttaacgtataactcgaggttcgacacataattcaaagttgaatgtata

SEQ ID NO: 7343 - DNA, 600 bp, Glycine max
  unsure (1)..(600): unsure at all n locations
  Clone ID: PAT_MRT3847_10663C.1
cttaagtgttctgccataactaaaatagttaaattcaatcaagtccattatgtgtgctgaggagagaaatagaatcttgttttagaactacatttttgcctcataaatcatgagggttggaacctggccccttgacttcagaaaattaaaccagaactgaatcaacttattataatggtgacatctgtgaaaaggcaaatgtgatttggtantgatatcatcagttccagttccatgtccctgttgtagcgactcattggtattattggaggtgaaaatgagcataacaaattctacgtatagcagcaaacatgttgaactgaaataatatatgcaggtcctattcctatatttgttgtgccaatcatgtctttgaaacaaattgaagtcacttgagatggcttcaatgttctttttcttgttttaaacttgtctttntataacaggaaatatgtttccatgttgcattattttgttgttttattcacggacttgtgccatctgaagtgatatgtaaattggcagaaccacaactatgctgntgaccctgccacactgccggaaggagtggagggtactcatatcaatctaaatgatgga

SEQ ID NO: 7344 - DNA, 280 bp, Glycine max
  Clone ID: PAT_MRT3847_106640C.1
tttctacataataacactttaatatattatatcatttgccacattaatacctcttcaccaaacactaccatctcaattcacaacaatatcaacttcgatcttttatactgacaaaataccactctaaaacttaaatcaaaatggtcctaacaacaacttcacacatttctattcaccttttcctcaaaatctcaacctttctgggagtgcccgattaacactatcatatttcccattattctattgacctttcaccttattcatactttttcgcttcctc

SEQ ID NO: 7345 - DNA, 504 bp, Glycine max
  Clone ID: PAT_MRT3847_106641C.1
aaaaaaaaaaaaaaaaatccctttttcaagggttttgccaaaaagccacccttaaaaaaagttggccatttttagggttttttttccggggaaggggcataaaaaaaataaaatttttttaaataaaaaaaacggggggaaaatttccccctttttcggggacaattttaaaacccccaacccttaacttggggggcccataaacccccccaaaaaatttgggggaatccccccttttggaacggaaataaggggcaaaaaatttgggtaaacccccaacccgggaaaaaaaccaataaggggacttttttgggggggggaaggctttcggctcccctgaaaaaaaccattggcccaaaaagggaagggaaaaattttttgtttaaccggcaaaaatttttttcccgtggaaaacccccttcccaaaaatccccaaaggcaggtttttaaaaaagaaatttttttttggggttttaaaaatttttgaaaagaaaaatttttttt

SEQ ID NO: 7346 - DNA, 951 bp, Glycine max
  Clone ID: PAT_MRT3847_106642C.1
agatatatgtaaaaaacaggtccgattacgcctattcctaatcctaaatagaatggaacaacgcagggatctatatgtaaacatagtatctatttagatacgctcgaatgaccccttcttataatgagaatgtatataaccccatttcggtcgggtccggtatggaatgaacttataatcatggaattgactcgatcatcagattttcgattataagttcataaccctagcccattcccattttgggcggagcagatctactaattctttgattccagttagtaaggtaagagttgaactaagaaattcgcgatctatactaaaaaagggtatcctgagcaatttcaataatagggttcattgatattcctagtatagtagatgctatcacacatacaatcatacttaattcgatggaattgtttgatcttaaagggggccttcgataatttcgcacgtgaggagttatttcttggtttcgtccagtcattaataacttgattatttttaaataatagtagatagaaacaacactcgtaaggagtcctattgaaactaagaaatataagcctgcctgccatccacaccagaataaataaagttttccgaaaaaacctgatagtggaggaagacctcctaaggataagagacatagggctaaagagagagccaaataaggatctttcgtgtataatcctgcataatctcgaatgttatcagttccggtacgtagaccaaatgatacaatgcaagcaaaagttcctagattcatcgagatatagaacagcatataagttatcatgcttgcatatccaccatttgagtctccaacaattattccaataattacatatccgatttgacctatggacgaatacgcaagcatacggttcatgcttgtttgggtaataacaatgagattccccaatatcatgctaagaatagctagga

SEQ ID NO: 7347 - DNA, 475 bp, Glycine max
  Clone ID: PAT_MRT3847_106643C.1
gagttgtcgtcgggaatttattctggagactcgagccgttttggtggacatgaaggagaaagtctctttagctggtatagagaaaataatgaaggaaccattgaactgattattgggggaaattctaaaatctatgaagttactgattcagattacaattgtcatttgttgtttggatatacacctgttcgttcagattcagttgtgggagaacttgtcttatctgatccaactaacattgttctcccagagcttccatatgtggagatgcttgctctgactggaaacacagttgaaggtgacatacttacagctgttgaagtgattccaaatagtgagactcaacatgtttggagcaagtacaagaaagatataagataccaatggttttgttcttcagaagtggcagacaatctttcatatgatccattacctaatcagagttcttgctcctataaggtgcagctagaggata

SEQ ID NO: 7348 - DNA, 1176 bp, Glycine max
  Clone ID: PAT_MRT3847_106644C.1
gctcgcgctcatcgtcccgtggaaccagcaacaacacaacagtgctgtgttttttatttttattttttttttctcatttgatccacaaaaaaagcaaactttaaggagaaagaagcgaaaaaaagtgctccttttcgacacccagatttcagtttcagtgattgtgggacttggaaaggttatttggaagaaccttaactaagggattggtgctgttgataagagtccctgaaatgtatgggcctgtggccacttcagattcagccacatcccggggtggattgccaaatgactgtggggactctgttgtgactttggatcaagttccgaggtggattgatgctgagcattccttacagtacgacaatggagattcatcattttccagttcatacttccctgatcccttggcattcaagttggggtcggagagcggtggtggtgtgtcaaggtttcctgttgaccatgaagttaattctaagatatacttgtggagggggaacccctggaaccttgaggttgatgctgtggtaaattcgacgaatgaggttttggatgaagcactcagcagccctggattgcatgctgcagctggacctggtcttgcagaagaatgtgcaactttgggtggatgtcgaacaggtatggctaaagtcaccaatgcctacgaccttcctgcaaggaaagttatccatactgttggcccaaagtatgcttcgaagtaccaaactgctgcagagaatgctttaagccattgctatcgttcttgcctagaacttttaattgatcatgggcttaaaagcattgccatgggatgtatttatactgaggcaaagaactatccccgtgagccagctgcgcatgtagctataagaactgtgcggcggtttcttgagaagcagaaagacaatataacagctgttgtcttttgcactaccagcacaactgatactgagatatataaaaggttgcttccactctacttccctcgggataaacaggaggaggagatggctttgtcaaagcttcctgcagatgttggagatgagaatggtgagactgtcatagatgagcgtaaaatcagaataaagcctttgcctcaaaaaaaggtttcaaaagaatcaaaacctgctaaagctcctgttgatcttcctgttagtgatgtcggtacagttc

SEQ ID NO: 7349 - DNA, 1570 bp, Glycine max
  unsure (1)..(1570): unsure at all n locations
  Clone ID: PAT_MRT3847_106645C.1
ataaatagggaataactcatccagaagtttgaaattaagtatttttttttttcatttgacactcccgtatccgcgcaaagctgtccctatggcactcgtcatttggaacactattttctttgatgacatttacaccacataattttctttttctttgctgcttttatttgacttttatacagatttttttttttggatgtagatgacttttatgcagatgaaagtgaaaccaatctagccggcatacatctagctacaaaggtctgttttctgttgacaattgcgcataaaaaaaatccatcttccaaggtttcagttccaaagtaataagtgcgttcaattgagagctatcggcattcagaaagcaacatcacaccatccctatcaatttctgggataagaaagtcacggcacttgaagtcactagctagaccaatgcatagttcaaaagactatggatttcgaaaagaagatacgaccacaaatgtagcattatacaattattcttgccacagaccaatgtagtattactcaattaaacaaaagatcattcattactcggactaagatacgaccacagatgtattgctctgttgcatttaaatgatatgcatactatggaattcgaaaagaagatctaacttaaagttactaccttttttttatggatccacacataaatttacccctgacaattcattattcaagcaaaggcacggtgcagaagagttggcccagactatcttcgaaaacttgccttacatttgctcagtctttactatgaagttctttttttcttcattttccgcaggggtatatcggcatcaacatttgaaggggtttcatcgcttttaaccgcaggagtttctgatttgccatcctcagtatgcttggcagcagcagcagcagcatcaatatcacgagaagtagattctgatggttcaccagtggactctggttcagttactggaacttcttcacttttaacagttccaacctttacatacttgctcataaacttatattcccagtcttgtaaggcatcaatctcgaatgggccaagaccagaaatatccccagtcagatctttctcttcaaaagacatcttcgctaaggctctgctagcatccttgccagcaaatagggcataaggtccaccaggtccataaaacatcctgctctgggagacatcatagatctgggccttgatggccatgagcaagggcttctcgggatcggtgccgtcgtaggccttgagctcctccgccgtgatctcgccgagctgaaccggggggcgcagaggcggcatctcctcctcctgggcgtggcggtggcggtggtggtggtcgtcggaggaaccaaaaagacccgtgacgacgtagtaagcggcaaaaagaagcgccagcaccgtgaagaaggtggaaggagagaagccggtgtaggccacgatggcctccttcagggtttcccacagttgcacagccatcactccttggtagagagagtaattgaaaaggagagaggagcaagaagagagagaagcaagaagagagcggacgcgtgggcggan

SEQ ID NO: 7350 - DNA, 273 bp, Glycine max
  Clone ID: PAT_MRT3847_106646C.1
gtcgacccacgcgtccggttttattcttggggaaaaaattgtatgggaaagtaaaaaggcatttctaagtacctaacaatgtaccacaagaaaaaaaaaagggttaaatgatgattattgtaatgtgttagacaatcagaataagaatggccacaatggtgttgttacctcgcgtggaaaaaaaaaaaaaaaaaaaaaaaaaaaaaaaaaaaaaaaaaaaaaaaaaaaaaaaaaaaaaaaaaaaaaaaaaaaaaaaaaaaaaaaaaaaaaaaa

SEQ ID NO: 7351 - DNA, 1695 bp, Glycine max
  Clone ID: PAT_MRT3847_106647C.1
catagctcaaaagacttacccctcccgcctgtttttgtttttctgttgtttttgccaccttatcaacatcctttacctcttaatttttctcatcagtttaaaactactattcttcataaaaaggttatacaaccgagttacccttcatttattcttgccatagagcaacgtattattcaattaaacaaaagatcattcattactcagcctaagtaagataagaccccaaatgtcattgctctgttgcatttaaatggtatacatactacggaattctaaaagaagatctaacttaaagttactccccttttttttggatccacacataaattgacccggcaattcattatttatgagactaaatattcaagcaaaggcacggtgcagaagaggtggcctagactatcttcgaaaacttgccttacatttggtcagtctttactatgaagttctttttttctccattttctgcgaggggtatttgtggcacaactcagccgattactcatttatcggacatcacacaatttgaaggggttttcatcacttttaacagctgaagtttctaatttaccatcttcagtatcagtaggcttcttcagcagaatctattttacggaatcttagattccaatggtttaacaatggaccaacaggattcatttactggaacttcttcatttttaacaattccaaccttcacatacttgctcataaacttatattacccagtcttgtaaggcatcaagctcaaacgggccaagaccagaaatatccccagtcagatctttctcttcaaaagacatctttgctaaggctctgctagcatccttgccagcaaatagggcataaggtccaccaggtccataaaacatcctgctctgggagacatcatagatctgggccttgatggccatgagcaagggcttctcgggatcggtgccgtcgtaggccttgagctcctccgctgtgatctcgccgagctgaaccggggggcgcagaggcggcatctcctcctcctcctcgacgtggcggtggcggtgatggtgatcgtcggaggagccaaagagacccgtgacgacgtagtaaacggcaaaaagaagcgccagcaccgtgaagaaggtggaaggagagaagccagtgtaggctacgatggcttccttcagggtttcccacagctgcacagccatcactccgtgttagagagagagagagagagggagagagccgtaagaaggggcagctcgggataggggccgtcgtaggccttgagctcctccgccgtgatctcgccgagctgaaccggggggcgcagaggcggcatctcctcctcctgggcgtggcggtggcggtggtggtggtcgtcggaggaaccaaaaagacccgtgacgacgtagtaagcggcaaaaagaagcgccagcaccgtgaagaaggtggaaggagagaagccggtgtaggccacgatggcctccttcagggtttcccacagttgcacagccatcactccttggtagagagagtaattgaaaaggagagaggagcaagaagagagagaagcaagaagagagagaaattcttctcttgttgttgctgctgctgctgcacactgtgtgtgtttcagtgttcggtgtgtgtcagagagaaagttgcagaaaagactcgttgcacaacagggtgagatttttatgatacgat

SEQ ID NO: 7352 - DNA, 648 bp, Glycine max
  Clone ID: PAT_MRT3847_106648C.1
ccacgcgtccggaaaaatgcaattcaggagacgatacagttggactttgtaatatcagaaaattcagcggagtataaactcattaaactgactagaattagtatcgtctaattgcaaaaataaattttagattattaatataaattatgaaaataattaagtttatgctattttaatttagatattagccacgttgctatatccctatgatattaatttatgcttacttggtgtccatatgagagatccctatgttatgtggtaaattaaaccttatccacacagaaaggaactgtttttcacttccgctgttcatgattccatttgatgtaacaagcatggccggattccatatgctcttacatgcttttgtcattaaaatgcaccagaaacctcttcttccagttcacaatattgtaaagtgtaaatataatcagcaatatatatatatatatatatatatatatatatatatatatatatgagaaacttattattttttcattttcttaaaaaatataaataatataatattatttgattatataaaatataattataattatattattacaatacaaaatatagaaatgtcataatttttgcgatagtatacaatatatcaatatttgaatatattattttttt

SEQ ID NO: 7353 - DNA, 289 bp, Glycine max
  unsure (1)..(289): unsure at all n locations
  Clone ID: PAT_MRT3847_106649C.1
cccccccttttttttttttttatttantaattctttttttttttttggtttgatttcttcttcggggggggggttaattggggggggggtgctctcctttataacctcatttcctaaaatgaagaggttatttatcttatttacccgcccaagtgtccccttacttctgcctctcttcaaatcttttgcacggaagttttttccttacacgcccaaaaaaaaatatcgattaacttgcttacactcttttatttttgtcctatttatataacattcaactctttttttt

SEQ ID NO: 7354 - DNA, 271 bp, Glycine max
  Clone ID: PAT_MRT3847_10664C.1
cggtattcaacaaaagtgtatgcaagcatgtattacgatacagtgacataggaaaataagttggagttccgactgttttgcaatagccaactgaatgacttgtggcaatattcagaattaataagatctggattgacggccatatatataaatttgttcaattctactactcaattatcataatgatcacgattatatccaacagaaacttcaggataaacccgatgaaaaaacctgagacacaaatcaggaagttaaaatcctacgagta

SEQ ID NO: 7355 - DNA, 200 bp, Glycine max
  Clone ID: PAT_MRT3847_106650C.1
acttcccaatatttatctttaattttactgtgcgggcaaaaaaccattggcttgtttatacatcaatggtgggtacaccatctatgtttaaattcattatttgccctacaatgttattaataactttaattacacttttttgattgattcaatccacaatttttaatgtaaattcttgactttcaaagtttttttttaat

SEQ ID NO: 7356 - DNA, 361 bp, Glycine max
  Clone ID: PAT_MRT3847_106651C.1
gtggacacacaccttagccactgattaagacatgaatatcaacggtaacttaaatactatttttcatttaccctacaacatatgcacgtataagacaacgcgcgttatagacatgtttgatacgaggctgattagataagcagaggtgattaaactacccctaggggctccaacaagctaaaatgtgacagttacaaaagaattaccatggatatagttaagtgaaacgttgaaaccaccaatctctaatgcccattcatagaccttggctgacaatgacactgtccaaacatcatgaacactggtcccaccgagctcagctgtgctgactttactagagactacaccactcaatgctagc

SEQ ID NO: 7357 - DNA, 368 bp, Glycine max
  Clone ID: PAT_MRT3847_106652C.1
ggctcgaggttgggttcttcttgttttcaaccttaattatcaattttatttacttcttattttgggtattgagtgtttgcaaatcataaaactacaagactgatcgcatggtctttgccaacaatacataggttccaagcgagactccatctcctcctaccaattgcactgagactgcttacagtttcagaatttgtcagaaaaagcttgtcccgattgcatttttgttcctgtacgtactcttattgatacggatggcagcaccattggcatgtgttgttgggagtggtttatccatacagagtaataaaattggcaaggacgtcaatggaagatatctcttctcatatcataggctatcagtactg

SEQ ID NO: 7358 - DNA, 343 bp, Glycine max
  Clone ID: PAT_MRT3847_106653C.1
atatgagactttagttccaacaacattatattatactcataaaattaatcatctagtaattcctactagacattactgttttactccttcattaaataacattttccctactggagatttcatacataaaaatacgatatctaaacgaactacatatgtccattacaaagctaaacatggtcatatcacaactattattatttatgatctaatacaccacaaaataataacacctaatactacatattcttatgtaaaatcaattcgaccaagaatgcttctagctgcctctcagtggcaagctatccaagaatactactgccatcttatgataaaaaaaacc

SEQ ID NO: 7359 - DNA, 438 bp, Glycine max
  Clone ID: PAT_MRT3847_106654C.1
ctcttctagtgtctctttttcagtttctgacactgtagatatgaccctctcatcatcaacttgatattggggtggatccgagttctcaagcccttgaacatgttcaatctcatgttcagattcaacatcaggtggaacatgatcattcacatgttcaacctcgtgcactttctgttcttcattctccacttttatcacttcaacttcttggcttgtaacttccttaacttgctcagtttcaacctttgaagtttttgtagtctctttaggagtgctctttgttgagttaaaagaagcatgatccttattaaataccttcttagtgcttgtagaagtagtagtattagtagggacggttttctttgtgccctttgtgactaatggcttggtttttccatcactagcggaaattgtggtcctagctaagatgggtttgga

SEQ ID NO: 7360 - DNA, 183 bp, Glycine max
  Clone ID: PAT_MRT3847_106655C.1
ccggtccggattcccggtgcccacgcgtcgttgaaactgttttgtatactaggacgcatcacatattctgtacccgagatcgaggctgctgtaaaatcccactttagatctaaggaccaatctagaggggcgtcgaaagtgagatcctgcgagacctgccttcacgcttctgcaacgacttgc

SEQ ID NO: 7361 - DNA, 600 bp, Glycine max
  Clone ID: PAT_MRT3847_106656C.1
tacctatgaagtgggtctggtggaaaagttccctcctgttcccttgttgaagtcttttctcaaggatgctaagaaagttgcggcttctattttggaagatcctaataatgcaggccgagctgcggtacttttctctctttttaatatctatttctatgattttctgtggtttttggtttagttcgtgaatggataaactttttcataagcatttgtagcagaatgaaataagtaaaaataagatgggaaaatgaattgagcttatcttaatctaagttcaacttacacatctcaacttttggagaagttaaacatgagaactattataatagttaaattttcgtttatggagtagttggattcattttaccttttattttctactataatggagaagattatccaaatagactattaatattactagttcaatgttgtgaaagctgaactgtcttttcttttatgctggatgagaggtaggtagcaagtctgttatcttgtgaatgtttagttgatactcgatacaagttttctatttttggtttattttgtatagacagaggatgcagcttattagaaatcaatgtacctaggattctg

SEQ ID NO: 7362 - DNA, 244 bp, Glycine max
  Clone ID: PAT_MRT3847_106657C.1
ccatgttcactctgggaaatccacttccactggtcacctgatttacaatcttggaggcattgacaagcgtgctattgagaggtttgacaaggaagctgctgatatgaacaagaggcctttcaactctgcctgggtgctggacaaccttaaggctgatcgtgaaagacgaatctccattgatattgctttgtggaagcctgaaacaacaaagtattatagcacagttattgatgcgcctgcacat

SEQ ID NO: 7363 - DNA, 269 bp, Glycine max
  unsure (1)..(269): unsure at all n locations
  Clone ID: PAT_MRT3847_106658C.1
tcggcaatggcncctcttnagttcactccctgagagaganagagtgaagctatanttactcatttctttcccataagannanaacncaacnccccttctcttctncacctccgcactctctctctttcctcgtcatctttacnaatttcaaaccctagaaacttctaatccaatcgaagcagnaanaacagnaataacacctcttttaganatttagatggttgtncagtctctggacgacgttgttcancagcaattgatggtttcag

SEQ ID NO: 7364 - DNA, 485 bp, Glycine max
  unsure (1)..(485): unsure at all n locations
  Clone ID: PAT_MRT3847_106659C.1
ggctcgagattagttacacccaaagctatgtcatttctaaacaaatttttgaacttttttatttttatttttataccttttcttcattaacagttttagtcttcgttttcaagtaatattgaaaatttagtgacttatcgtaagagtctaacaacataattatgtgtgttttttttaaaactttgtttcttagaattattcgttttaaaagatatgaatttaagcattttattgaattaattaagtcaaggtcgatcttaaatgagcttggatgtgagaacctagaaacggaaaaacataagcatccattcccgcgaaaacacaagtttagtattcagcagaaaaaacaatgcgttatttggttntagtgaggtacgatgtttatgaaagttttgggtcgtgcaagcggcaaaagagttgttcaagagcacttagtgtccctattgcagaactgcacagcgtaagcacccttcttcaaattcaca

SEQ ID NO: 7365 - DNA, 296 bp, Glycine max
  unsure (1)..(296): unsure at all n locations
  Clone ID: PAT_MRT3847_10665C.1
tcgcangcacgcgtacgtaagctcggaattcggctcgagcgccaccatgccgccctacaccgtggtctatttcccagttcgangccgctgcgcggccctgcgcatgctgctggcagatcagggccagagctggaaggaggaggtggtgaccgtggagacgtggcaggagggctcactcaaagcctcctgcctatacgggcagctccccaagttccaggacggagacctcaccctgtaccagtccaataccatcctgcgtcacctgggccgcacccttgggctctatgggaaggacc

SEQ ID NO: 7366 - DNA, 554 bp, Glycine max
  Clone ID: PAT_MRT3847_106660C.1
ccacgcgtccggtttcataactttcatttccaggaaatcgaaactgctcgcgttgttcacagtcactcacactcactcacattggtgcagagagagagagacctaaactaaaaccctaaattccattgctgcagcaaaggcattgatcgttcggcatgggtcacgtaggttccagcaaggacggcaccaaggtggggctgtccgctgctgcgatggacatcgacgacgacgacgacgacgacgacgacgacctcggcgacgtcgacctagaccctacgaactccgaaatccttgaagaactcggcgaagacatggtgaaatactggtgcaagaaagcgtcgatgctgttcttcgacgagtacggtctgatcagccaccagatcaactcctttaaccacttcgtcgccatcggcctccaaaacaccttcgactccttcggagacctagtcgtaactcccggttttgacccctccaagaagggagaaaacgaacacttccgttacgcctccgttaagttcggcaaggtgaagctcgacaagcccatgttctggggc

SEQ ID NO: 7367 - DNA, 189 bp, Glycine max
  Clone ID: PAT_MRT3847_106661C.1
tttcagttattacaactcacaattccataaaggcaccagtctatatttaaacggatacattccaacacctcaactatacacgacccaaacttacatacacttacatccaactacaaatctctactatcaccaaacctaacatcaattcactgaccgtcattatacaccctatcatacttctaaaaccct

SEQ ID NO: 7368 - DNA, 1244 bp, Glycine max
  Clone ID: PAT_MRT3847_106662C.1
tacggctgcgagagacgacagaaggggggtaaccatgtatggaatatggtgcttcatcacggtcctgttgttctccccagtggcgttttcggaactgtgcaacccacaggacaagaaagtgctgctccaaatcaagaaggacttcaacaacccttacctgctagcctcctggaaccctaacaccgattgctgcaactggtactgcgtccagtgccaccccgaaacgcaccgcatcaactccctcgtcatattatcctctgttccccaaaccaatttatccggcccaataccaccctccgtcggtgacctaccttttcttgagacccttcaattccacaagctccctaaactcaccggcccaattcagcccactatagccaagctcactaaactcaaggagatctacatcagctggaccaatgtctccggcccagtacccgatttcttggcccggctcactaacctccagtttcttgacctttcctttaataacctctcaggcccaatccccagctcactttcccagctgtccaacctagtttccttacgcttggaccggaataggctcacgggcccaatcccggaatcattcgggtccttcaagaagcctggcccgagcctgtggctatcccacaaccagctttccgggcccattccggcttccttggccaacatagacccacaaaggatagacttctccaggaacaaactcgaaggcgacgcctccgtgcttttcggtcgcaacaaaacgacacagatagttgacgtttcgaggaactcgttggcgtttgatttatccaaggtggagttccccacgagcttgatatcgttggatctgaatcacaatcagatcaccgggagcattcccgtggggttgaccgcagtggattttttgcaggggttcaacgtgagctataatcggttgtgtggtgagataccgcagggtgggagattgcaaaagtttgatgtgtattcgtattttcacaacaagtgtttatgtggatcaccccttactagctgcaagtgaagtgaattgtgcagcagagaatacgtgcatttttaaataaaaagaatatctctttctgtagacattgaaagataatgtcaagctttacttccatccctctttgtaaagctaaagaacaggtttgaatttttaataagccctttttagagagtcccgctattactagatttgtctaaggagtacccatgggaaattttaatctagtttccccataagg

SEQ ID NO: 7369 - DNA, 426 bp, Glycine max
  Clone ID: PAT_MRT3847_106663C.1
gtataaggcaagatcttggttcaacagggttgttaccctttcccctgacgggggagacgggagagctctctgctacaagtttgaacttcagcatggaagtgaagagagccaaaaggatgttttgaaaagatgtgttgctgcagagccgaagcatggagaaaaatggcaagtgatttctaaggctgtcgagaattcccacttaccagttgaagccattcttaagaaaaccgtggttgctatgggtaaagaagagacgtctattctttccgatggcaccaaatctcaggctccatcccactgaagtagagattacataggagtggttgctgcatgatgcgtaaaggttttcttcatatagggcgcttctgtgctaatgatggtacgcactcaacgagttggttgtcactctttgcttatatgcctttt

SEQ ID NO: 7370 - DNA, 1009 bp, Glycine max
  Clone ID: PAT_MRT3847_106664C.1
ctaaattacaaaatgatggacccctggttcttagatctctctctcaaaaagatatcattcaattggtggaattgttaatagcagagagaaagttgttggtggagatcccttcccatggttcaaaatcaaatggcttgagatctgtctttatgagcagagcatcacagtcaaagttgccgaattcatctgaacatgatatggaaaaacaaaatcagagtattcctcatactagagtttccccaacttccactgattccgaattttacggggggtctagaaatgatatattagaagacttgcagcaacttgtgaatgagatattgagggaccacccaaagggatataatatatgttcttgcgtccgaatatttcttcttaggtatggttattatcttgatatagagaagcttggtcatcaaaaattgtcatccttactacaggtaatgcctggagttaaatcagagtccaattatatttttccatctgttcctgctgttagtgcttctgatggggaaacttctatcctcaaaactcaaataaccaatgctactcatgcagtcttgaactcagataatgaaatatctgattcagcactaaaagatgataaaatggaatctctgttggaggaattaggttctgtttctgtcatgaattccaatcagagtgatctcgatttaaaactaggtacagttccacaatcaattataagacagattaggtgtatattgagatcacatccaaaaggaatctcgattacaggtcttcgtgaagagttgaaaaaatccaatgtgtgtttctatcaaagcttttatggatataaaacattttctcgctttctatcatcaataccacatgtacagctccagcctttaggtcatggtaaattttgtgtacatttggtttccttagaatcccctgaaacttttgagagcaatgatgtacaatcaataacatctgctgctaagattgatgagagcaatgcaaagtctgatgatttggctgctcatca

SEQ ID NO: 7371 - DNA, 419 bp, Glycine max
  Clone ID: PAT_MRT3847_106665C.1
gggcgaaggaaacacatgggttaataacaaaagttctcctctcccaaaattatataactggttcgggtaaacccccctgggggaaaaaatctttacttttacccccaaaagccccctgccagaatgggtcctttattgagacccaaccctagccctcccaggggggttcccccttgtatttctccccgcatttttctttttaaaggtaaaccttttttggttggtgggggggaccaccaccttccatgaaaggtgggttaccatgcccccattagtcaagccctttttgtcgtcaagatttttttctttaagagtaaccccggggcctcctcaggggcttatgggccttttaaaaatgggccgttggccccaaattttgctcttgacaaataacaaaccctttttcctggaatatttgg

SEQ ID NO: 7372 - DNA, 393 bp, Glycine max
  Clone ID: PAT_MRT3847_106666C.1
ttatatgattttattaaacggccaatcacaggttcatatattgcaggaacggtacaccatatatatatatatatatatatccctttaatttcaacaaaaacaaataaattcaaaaaaaatgaaatctgaaaaaccctgagaactcactaaattacactaattacaaacaaagatccatgcctaccactcttcttaaaaaccccaacctgctctccctatgcacctatgaatcttcttgctcaccttgagcattttccttagtttctcattgtactcaagctacgagccaataatggagagtatcatggcccaagagaagttggccctaaaggaaatacccttctgcttctgctaggtgtgcacttccattgcaacgatggaagtggaggggtt

SEQ ID NO: 7373 - DNA, 426 bp, Glycine max
  unsure (1)..(426): unsure at all n locations
  Clone ID: PAT_MRT3847_106667C.1
ggttgagtgtgattaattttttgtgtacaaattgatgctttgaagtggggacccaaggggatccagcttgttttagacaacactaccgacaggggcgcttgctcaacgagtgctgagaattaaactaactttgctccctatggacctaagtaaaaagacatttgcccaccttctttcctaatggaccccaaccggggggaagataagtaaccccgtccacccctggggaaaataacaacaaagagctgacctgcattgtctggtggctcccccaccctcattgatgatactgcaacagctcctgatggaattatcatcagaaaagcgtctttcaaggcaagcagcttagcagcttctatagacacggacttgtaacctgaataacttnatctaggagacttacatccagaactttgggaaagatac

SEQ ID NO: 7374 - DNA, 192 bp, Glycine max
  Clone ID: PAT_MRT3847_106668C.1
ccacgcgtccgtttatttttaaaattgataaaattataattcatataattaaatttttttaaaaaaattacgaacctacggacaaccaatccgtatagagcatacgaatcagcaatccgtatagttcatacagatcaacaatccgtatgtccatacagatcatcaacacgtaatccatatgtttcatacgaa

SEQ ID NO: 7375 - DNA, 1047 bp, Glycine max
  Clone ID: PAT_MRT3847_106669C.1
catagccacaaaccatcctcaatttctcatcaaatcaaaactcatacatacacaaataacacaaaaatgaaatacagtgagatatcccatttcagccacccacagcacaagctgagatttgagtactcagaattccccttcaaatgtgatggctgcaaggaagtaggcataggatcacgttacaagtgctccatctgtgacttcgaccttcacatgcactgtgccatgataacctcccccaccttgctccaccctttctacaccaaatgcaacttccagttcatgtcaaagcctccaggtgacacgcctcgttactgcaacgcgtgcgagaaggacgtaagaggcttcttgtaccactgcaaagcgtgcgggtttgacctccacccatgttgcgccaagctaccgatggtccttgatgatggtgaagtgaagctgtacttgtacagaaaagtgagttcaccctgtcaccgttgtggcagaaaagggcgtagctggagttataggtcaaagtgcaagaactataatctgcatgtggcgtgtgtgagggacatgttggtggagaattggcacgaggtgtatgttaaaggaaggagtgtgaatagcaacattccaagtctgaggaacacactttacactcctcataatagtagaaggagtaaagggaaggtgaagaaatgctgtgagattgctggtttggctgtgcaggttgtgatatcagctgtgttgggagatccaacggctctcattgcaggccttgtgggctcgttcatgtcacgggcttgatcatgggcacaacagaatctatcagtttaacttcaaagattgtaaacaacttcagttcactacttcattgtggttgtgactatgttaatctcacttaaatgtgtggttcaatctttcttctcacatctcaatctgacttgcatgtataacaatttataacaattttatttctacaagtaagagagttacaaggggtgagagatgtaagggtttgaatctttattattaatatttttataaaaccaactattaatatttattgat

SEQ ID NO: 7376 - DNA, 432 bp, Glycine max
  Clone ID: PAT_MRT3847_10666C.1
aaaaaccaaccaagcattttttttatttttaaaggggcaggacaagacaagatttttaaaaaaagttaaaaacatccctcacccctcagagggtatcaaacattttacccccggaaaaccttaaaaaaaagcccccccaaataaacccgggtggacatcaacccttccaggttaaaaaggatcggggggaacaggttaaaaatcggcctcaaccctgggggggggaggcttgaatggacaaacaggaggacccctttccggtttcctgtccccccaaccaaaaacccgaaaaattttccccattaaaaaaaattaaaaaaaagggggggtgttgccaatcggaaccaaaaaagggggcagaaaacaagccaagcaaaccatttggggatgaacgactagattccccgaaaaccgaaaacgatggattcagca

SEQ ID NO: 7377 - DNA, 358 bp, Glycine max
  Clone ID: PAT_MRT3847_106670C.1
tgcggctgttagtcgacatcactaggggggtagagatatacgatgagaatccatgtgtttagttttctatcgatatgcatataagggaataatccaacatgcctttttgtgaatttaaaaactaccattgatcaatgcctcagaagggctgataataaatgaaaaaaatcaatgcattcatgataaaaccctaccacgcttttttattatgaatttttatgacaattgaggaatcacggcgttggcggatcaaattcgtaaactctttagatgatacatcagatgattagaaacatgactatagctttacaattaggccattgagcattaattgcaatcacatttatcttattgatta

SEQ ID NO: 7378 - DNA, 1177 bp, Glycine max
  Clone ID: PAT_MRT3847_106671C.1
ctttcccccagggttcatgtcaattttatttatcctaattattggtcatgtttcttatgtctgatcatacatgcaaattattgcacatgttcacacaaccaacgcgtcagggagagaggtaggagtacttcaaattttgttgctttatggtaataggtgtatggatcaatgactacttatccccataatgaaaggtggggtatcttacattcttatgggaatagaagttactttttacaataacggccaatctccacttcaatctttcacatttcttcttccacttctatttttttcaatttttaattaaatatattttatttttctgaaattactaaatgccaaccaaacatgttcatgagaataatattttaggcataagattcttgggaatgtgattcttgagaatatatgtaccgtgaaacaaactcccccttaatattaatgattatctgaaatgttatagggccctaaaaagaacaaaagtagttatacactatgtcttcatttgtattatatgtgatgatatggattgttcatggaacttgtttagctgactgaattattttaatttagaatagctgaccgattttttttttctcacaggataatgtgcgaaatcagcttattcagtttgagcttttactcacaactgcaacatttgtggttgccatctttggagtggtagcaggaatatttgggatgaattttgaaattcaattatttgatgtcccctctgctttccagtgggtccttataataacaggaatttgtggagtctttatattttctgcatttgtgtggttcttcaagtacagaagactcatgcccctataggaaggtagaccatcatgaagaagaagattaagtaatcgcgtcctttcgtttgttatacaatcataaaattcaaatggaaagtcggctcatatgaagagcaattctttcaattcaattttgtgtcagttttaggtgatttctgatgatattctgattcatcagtgtctatatttatagacaacattgatagttagaaacttgagcgacaaaacatcttcctagttcctttcttttacctttcatactgaacaatgtacattctgctctattatatttgtatgcttgatttgggggaaggatagttgaaggtatttaatcgggaaagtttttggttaccagt

SEQ ID NO: 7379 - DNA, 182 bp, Glycine max
  Clone ID: PAT_MRT3847_106672C.1
caaacgttggcaaaaggaaaaaggatggggggggtgaaactaaaagttgctgcttcttcagaaacgggggatctcaaggtttcaaccttacattaacttgaatgcaaatctaaactcctttacaagatcccccaaaattcaattaacggcccttcattttaaaaatcctgaacgggaaaaac

SEQ ID NO: 7380 - DNA, 348 bp, Glycine max
  Clone ID: PAT_MRT3847_106673C.1
aatcgaagagtttcctgcgtatgaagatagatttgttaattttaaaggataaatcactttcatgcaaacaacaaatatggagatgttaatttgtaaaatctcaatatcatgcgaatcacataatcgaatctacaatcacatgtccaagggaccaaatcgctttccatttcagtcttctgaccaaacctactgctatgggaggtcccatgcaatgattgtgttctgccgagattatcgatggggcacaggacagtaaattcgggcaagccacaaagttttggttccaaagtctttaatttttgaccacgggcgcagaagcaaaccatgattgtgctgacttgattgggt

SEQ ID NO: 7381 - DNA, 419 bp, Glycine max
  Clone ID: PAT_MRT3847_106674C.1
ttttctctatttttaactatcttatctttttttaatgagtgacttttaaatcaggggaggggtaactcaacaaacctcgacgatcccccatttccaaatttatctacaaagaccacttatgcgtccttaataaaatttataacctccactaaccctgcacccactcatcacttattcttcttctcccgcaccaccatcacctgtaccgccacctaactgagacaattcaacattcaccatacgcccccactcaccactaagatctcctcatcgacttccaccgttgtctgcaaaactgtcatcgttaagccccaaaccgaaacccaaggtctcaacattgctgaccatgacacacagcttatacggaaaacgccgatgttctaccccaacaatatccctaagggttctttggcccataa

SEQ ID NO: 7382 - DNA, 226 bp, Glycine max
  unsure (1)..(226): unsure at all n locations
  Clone ID: PAT_MRT3847_106675C.1
ttaaantcaaacttanncatanttcaactttttcctctcaccccagnttcctctacattcttgagggactctattncagatacaaatttcccttatatttctccttaatataatttaacctacctctcttttcacttaccacacaatctctctctcttaaatttaccttctttcctacttatctaactaactaatcacctttcatttccttcccctcttcaacacc

SEQ ID NO: 7383 - DNA, 211 bp, Glycine max
  Clone ID: PAT_MRT3847_106676C.1
aacccaagatttggtgcagagaagagactagttccctctggaccaaacccacttcacaactgattatactggtttcaccaccattagcaccctttggtatatctatttaccttaattccagaacgggcaacaacaactcaaaaaatcatttccttcacaaaaccctttggaattagttcaaacgttttgcttccttctcatggtcaaactt

SEQ ID NO: 7384 - DNA, 371 bp, Glycine max
  Clone ID: PAT_MRT3847_106677C.1
gttgcctctcaccaatgtttcgctctttcgtgttgctttctgcattgatctaaatgggattttgtttttcttttctcaatttccattggggtttgtgtttgctgaactggagggggattcactcaatgattttctctacacaaatttgaatgatgttggaatagcgaacttggattggtttttgggtgtattcacagaggattcgcagttaaagcatcgagcttattggttagagaaatgtccaggcctttgcaccgaggggtatctattcggatccctgatagcaacaataatgacttgtgggactctcaatccaaagatataacagaaaaagatggttttggatagaagaggttcctttggtcacccct

SEQ ID NO: 7385 - DNA, 545 bp, Glycine max
  Clone ID: PAT_MRT3847_106678C.1
gcaaaacgcgcgcgttccccttcttggtcctttgagttaacatattgcgtccacagctttaggaaccctagcctttttccgtgcattcgtccacaactttatgaaccctagcctctttccgcacattttgctctaccatgtttacacctgaatccctttgacagcaacaccctacctgttgttcttctattgaagtggacgaggtggacttcacggctccaacgccccggctcgaccttgcatttcgtgaagaaacacattgagctcatttcacataaacaaggtgagaaggaagctcatagaagattggctgccggtactagttgtatgcaaagattggctcgccaatgctgtcgatattggttccattcttgacatgatgaacaaagttgcagcttgtgctaaacactatgtaggagatgatggcacaaccaagggcattaatgagaacaatattgttgccagctataatggattgcttcgaattcacattggcttatagaatgaaatctattttatttatttacttgttggcttctatttaa

SEQ ID NO: 7386 - DNA, 249 bp, Glycine max
  Clone ID: PAT_MRT3847_106679C.1
cgtttctgatagtgtgtcctagtcattgagtttctcttgagaatagcttatcattatccagtatcaattcatatagggttgctctgttcatgatattgttatgcattgttgcatatttaggaacaaatgaaaaaaataatacttttgtggctattagtaaaagttgtccatcttgttctgatagtgtgtcctagtctttgtgtttctcttgagaataactaatcaagtatccattcttatatgggttgc

SEQ ID NO: 7387 - DNA, 384 bp, Glycine max
  Clone ID: PAT_MRT3847_10667C.1
acactcactatagggaaggacgctgcgcctcgctggtgccgccgcgccgtatattgccgggaccaaccccgcctccttttatttgaacgaatgatcgggcttcactcgttctcgtcttaattgccagcgtggattgaacaatatgccgctcatagacatcatcccaggttggcctgaacaggcgacacaccccgtctcgttgaaggcggccgcggataggctgatactagccttaatctagacaccctgcgtcatatgatactgtgtggccgaccaccagcataccgtcagccacagcgccaactgtgcatggctgatctcttgcaccatgatgcatgcattccccaattgagtgcaagcatgcgtgggctccaaaccaaccgg

SEQ ID NO: 7388 - DNA, 278 bp, Glycine max
  Clone ID: PAT_MRT3847_106680C.1
ccggccaaccggttcgctttttttttatttagggggctaaattaaaactacccttgtttccccccccatttaaaaaaccccaccatggcttttaatttttgcccaaaaatccaaattccaaattttccagccccaggacaactttttaaatcctttgataaaaacaaaaaatttttgttggaaacacaaaattttcccaaacttttttttttgttgtaaaaagaaaagctttctttaccctaatttttttccgcaaggcctcacaaacaaaaattttt

SEQ ID NO: 7389 - DNA, 563 bp, Glycine max
  Clone ID: PAT_MRT3847_106681C.1
ccacgcgtccgggcaacgcaatcttatcttctgaatctaaacacttttcgtgttcatgcgggaatcagtggtaagtattcaactctcctatgctttccgttctatcaaagtccgcttacacttgttgtttcaattttccaatcttgtaggacggcaatgcaagccttcaatattcaaaccaagcaattttggctttagggtctgggtaagcgttactatctgcaaatttctcgtgggagtgcttctattagctaagtttggtatacccatttgagaattttctgcctttgttgtttcagttcatgttcatatttgcttttctgtctagaatttcgaaatgggttaatgattataaataaataaataagttcttctttttgtttaattactttgaaatgttgaatttactgtgcaccgatatagtgtatattgtgaacaaataagtatgtttaagtatttaactgtttggttttctttatttctgcatagtaaccgaatagataaaacaatatttggcttcaactgatgactagactgagcaaaaaccattttttttgttgata

SEQ ID NO: 7390 - DNA, 446 bp, Glycine max
  Clone ID: PAT_MRT3847_106682C.1
gcgtgcgcccacgcgtccgcccacgcgtccggctgatatgactggaaaagagattgaacgggctctactgaaggaagttatcagtaatcccagaatttttgtgtttgaacaccattttgctatagatcttctcacttgtcaggatcgatctgatatgatttgtcttggtgttgacacactgaattctaaaaccctagagcttttaggtgattagatttctttcaaaggtcactttacttgcgtcaggtggagctggacatatttatcctaaaactacaaatcctctggtagccactggagttggaattgccatggcacaccgagctcaagctgtgattttcaacatggagtttgtgcaattccattcaactgccttaactgatgaagggctttctattaaaccaaccaagcctcgggaaaatgcatttctgattactgaagctgtc

SEQ ID NO: 7391 - DNA, 931 bp, Glycine max
  Clone ID: PAT_MRT3847_106683C.1
gagttttcggtttttgtggagttgaagaacgcggaattgcccaaaccgaaacagggtttgatgttgaaattgaattacgacgacgttcggaacgcttggtctgaccgcggaacaccgttctccgacgacagtcccctagccgacgtgccgggaaatgacgtcactgcgcggctgtcgcaaattgatttgttgtgggacaatggaggagtgagagaagctagcgtgctgcgctacaaggagaagcggcgaacgcgcctcttctcgaagaagatcaggtaccaggtcaggaaagtcaacgcagatcgacggcccagaatgaagggacgatttgttaggaggctcaattctagcgcaaatgcacactgatgatagtatgtaggagcagtaaaacacatgctttttgggactctacttttaaaatagaaaatataaataaaaggaaaagagagtttatctatattttttgtaacctttactttttgggttcttcttcactagaagatatgggggaaattgctggatgagataagcaacgaactagtccaagcaaattacctaagattctattgcacttgattctcttcttcgcgttatggcttcagggagattcttcgtccccatgtggtctatacattctcgtaagcaaagtaatactactaccaaataaaattattaataacgcacgcgttatttcttcccttccactttaattaggaacccgaagtattcgtgttaatgagttctaagttgaaggcaaaggatagccatggctctgacatccgttatcaagaggacaaaaaaaactagccctctcaaaagttaacggtgattgttgggtattgtaattgacccgactttacagatttcttaatgtgatcgtcatttatataaaaaaaaaaaaaaaagggcggccccgacagtggcggtttcc

SEQ ID NO: 7392 - DNA, 350 bp, Glycine max
  Clone ID: PAT_MRT3847_106684C.1
acctgtgacgcgtgggcggacgcgtgggtggacatcttggatgattattatacaatagcaactcaatttataaaatttctatcggattacattacggggtatctgaataccttgttgatctacattctcctatcttttctcactgcttaaataaaaaataagcggaaatgtgagaaatattcctgtttcgcggtttttttatacgggggtattataaaatttgtactataacactcaaaaaaaaatttcttttgactcaaatagaaaaaattggatgtggttttaaaaaaaaaggcataccttgtggaattttctcgcaaagcgatggcttataaaatttggaaaaacat

SEQ ID NO: 7393 - DNA, 498 bp, Glycine max
  Clone ID: PAT_MRT3847_106685C.1
ggaaaatagagttctactcaccctttttttttatgatttcagctaaataacactgcactgtataatttttcaggtattacctaaaagcagctaatgctgatgcagaggttcagaagagggtcaagtatctggcagagctggcactgtcaggtcatgagcaactgtgctaccggccttcaacagttgctgcagcacttgtaatcctggcttgtcttgaagtcaatcaaatttcataccacaaagtcatagggattcacgttagatcaaaagatgagaatttgtacgaatgcatagagaatctggagtgggtgttacgctatctaggatagcatactagttggcatggaggcattgcttatgcaattcagtttggtgacgatggttcctaaccatcagaagacaaatggctttctcatgcctggttggttcttcattaatacaaaataaagtccatttgtttccctacctgagaggaagggaattctatttttttttcta

SEQ ID NO: 7394 - DNA, 789 bp, Glycine max
  Clone ID: PAT_MRT3847_106686C.1
cgtaagcatcggaatgcggctcgagacacactgtaagtaaataaaatcgaaatttagacaagacatcatgggtggggtaacatcgttactaatgttgctatgtctcttcgcaggggctatgtcccctgtgaagggtgaagacccttacttctttttcacatggaatgtcacctatggcaccctttctccagccggtgtgccccagcaggttattctaatcaacaatgaattccctggacccaacataaattccaccagcaacaataatatcgtcgtcaatgtcttcaacaaccttgacgagcccttgcttttccattgggcgggagtccagcaaaggaagaatagttgggaagatggtgttgccggcaccaattgccctatccaaccaggcacaaactacacgtaccacttccaggtgaaggaccaaatcggtagcttcttctactaccctagcctagggttgcagcgtgctgccggaggcttcggcggcctccgcatcaacagccgcctcctcatcccagtcccctatgctgatcccgaggatgactacaccgtcctcgccggcgactggttcacaaagagccactcaaccctccgcaagctgctcgacggtggccgctccctcggtcgtccccaggccgtcctattgaacggccagaatgccaagggcgacggcaccgacaagcccctcttcaccatgatccccggcatgacctacaagtacagaatctgcaacgtgggcctcaagaacaccatcaacttcagaatccaaaaccaccccatgaagct

SEQ ID NO: 7395 - DNA, 1041 bp, Glycine max
  Clone ID: PAT_MRT3847_106687C.1
attcaatttgcaacctaagtgaggatgcaaaaacaattcacatcatagactttggcatccgctatggcttcaaatggcctgcacttatcagccgtctatcaagacgccctggtgggccacccaaacttcggatcacggggatagatgtgccacaacctggtttaagaccacaagagagggtgctcgaaacagggcgcagacttgcaaattattgcaagcgtttcaatcttccatttgagttccatgctattgcacagagatgggacaccatcagagttgaggacctcaagatagaaacagacgaatttgtggctgtgaactgcttgtttcagtttgagcatctacttgacgagaccgtggtgttgaataatcccagggatgctgttctgaggttgattaagaatgcaaatccagacatatttgtgcatggcattgtcaacggatcctatgatgtaccattctttgtgtcacggttccgggaggctctctttcattacactgcattgtttgacatgcttgacaccaacgttgctcgtcaagatcccatgaggttgatgtttgagaaggagttgtttggacgggagatagtgaacatcatagcttgcgaaggttttgagagggttgagagaccacaaacatacaagcaatggcagcttcggaacatgagaaatgggtttaggctgcttcctctggatcatcgaatcattggcaaattaaaggataggttgagagatgatgcgcacaacaataatttcttgcttgaggttgatggcgactgggtgctacaaggttggaagggtcgaattctatatgcttcctcttgttgggtacctgcatagcataggccttgaacattatttattccagattacaaaaatctagtcttacacacaactattagtacgtctccttcaatctccctagctcatttgttgttttttatgataaggaaaaaccaaagttatagttagtttctttcaatgtgtagtttgtttagtacttacatatctaacaaattcagcaaatacaattgagagccgc

SEQ ID NO: 7396 - DNA, 1618 bp, Glycine max
  unsure (1)..(1618): unsure at all n locations
  Clone ID: PAT_MRT3847_106688C.1
agcagaaacatgttgaagagttagttcgattaccggattgcttccttggctcgagtccttcccctgaggctggtcctgtttgtccaactcctgctctttccaatggctttgttacatttggtagttttaacaatcttgctaagattacacccaaggtactgcaggtctgggcaaagatactatgtgcaattccaaattctcgtcttgtggtaaaatgtaaaccgttttgctgtgatagtgtgagacagaggtttctttcaacactagagaagttaggtcttgaaccactacgagttgatcttctgccccttattcttcttaaccatgatcatatgcaagcttattctctgatggacatcagtttggacacatttccatatgctggaacaacaacgacttgtgaatctttatacatgggagttccatgtgtcactatggctggatcagtacatgcacacaacgttggtgttagtcttcttagcaaagttggactgggccatttgattgccaaaaatgaagatgaatatgttgaattggctctgaagttggcctctgacatttccgcactacaaaatttgagaatgagtcttcgagatctcatgtccaagtcccctctctgtgatggagcaaaatttacccttggtctagagtcaacatacagaaaaatgtggcaccggtattgtaaaggagatgttccatctttgaaacgcatggagctgttgcaacaacctgtttctactaatgacctgtcaaataagaactctgagccaacaaggattacaaactcaagtgaggacagntctgggtctgtcaaggccaatggattcagtacaactcatccaccaaagcttaatttacacacttgcgaagaaaatggtgggtcgttgaatcacagtagtaagcaagggattgtgggttcttgctgaatttcatgtgagtccttgtgattcaaggatgctcagctgtattccaataggtgcagtattaggttggcatgatgcatattgtgattttgctactggaagaggcttgcagctaccatggcatcagaaaaggttaaattttcatagaatgacaatttttttctgggaaggaagtgtaagcaacgggtactgaatcgatttgtgtcctcaactgctgttgatactcccagaggtgatgctgctttgaaatggcatccttcaatatctgtaacccatttttccccccttaattataatagctagttgagagtgtaaattgtgtaatatttatttaattttttttggggctatcgacttcttttctggcatggtattgaaggatggagtgtacctgtgtgaatgtaataggctttcatttgaaaagaaggggtgaacaaattaagatttctgtgttgattaagataggaatatgaaagtttaactctgaagtactaaaaagttcaaaacttgtctacagaggaaacaatatcagatgcaacttaattagctcttaagctagtagtactaatttgataactgttattatgatattggtcaatgctattatgtgtcagagatggcataattttacccttcctcaggattgatcactaattcctgagatatgtgaaaaagattgactttacagttttttt

SEQ ID NO: 7397 - DNA, 285 bp, Glycine max
  unsure (1)..(285): unsure at all n locations
  Clone ID: PAT_MRT3847_106689C.1
agaagaccacagaacggaacacatctaatttttatcacatgtatctctaattgtcatttcgctttattttantaaatttctaacccatccattgcctaanaaatctcctgcaaaaagtagacataactcgaacatcaataatcattaaccattattagaacctaacctcccttttctcccaaaaaaaaaaaagaatcctgaaaactaaccattccaaccctattcaaaattccgcgaattcttaccaccatccaaaaagattgacttcaacaacccttcttcatt

SEQ ID NO: 7398 - DNA, 287 bp, Glycine max
  Clone ID: PAT_MRT3847_10668C.1
gggccgaccacccgtccgcccattcttccggaagggactcaattttccttttccttttcctaaccccccaaaacttgccgggcaagggggttcctccgttctttggcaggaaccaggaatctttcaaaggtgggccccacgggattccttggcttgcataatcattgtccaaaaaaaatatctccggttccactatagaaggcccaaatctggtgtgtagttgcggaccttccacttgttcggaaatttccaaggctcaagaaagaccctctggcatagttggggag

SEQ ID NO: 7399 - DNA, 399 bp, Glycine max
  Clone ID: PAT_MRT3847_106690C.1
ggctcgagctttatttctggatacagcatgagcagggaaaatggcggtgactctaacatcaaccctactgatggctaagctatatgctgcttgagattacgctgatctgcagcctaaagtacctgaagcttacctataaaatggaaactctgaggaacagacgaaccccaaaaacctgcagaaaacacagctcatggggaaatatactttgcccaaatgggaagacaatgggcgggcatgagcttgtgtctgggggggccgaacctgtaggcatgttcttcccaatggctcatggaatccatgctgtgatgcttggcaatcaagcctcaaccttccaaaatataaaggccaaacccaggcaactgaatgctctaattattggggcctcagagacttgtg

SEQ ID NO: 7400 - DNA, 141 bp, Glycine max
  Clone ID: PAT_MRT3847_106691C.1
tgaattcgttctcagaaccagactttgaagattgcgatacatgatatatagaaggatgcaatggatgacttatggactatgcctttgagttcattatcaacaatggccgcattgatatgcgagaggattacccttaccgtg

SEQ ID NO: 7401 - DNA, 248 bp, Glycine max
  unsure (1)..(248): unsure at all n locations
  Clone ID: PAT_MRT3847_106692C.1
gtttgcaagcnatacaacgttcctcccctgttggacagcattttcctgtttcttttgtaaactggactactaataagtttgacaacttttaagcctattttatatattccagttgtgtctagatgttaccaagtgtaacatgtcattggttaatgcaganacaaatgtgcngctgtttttgtattcgaataacactacncatngtgtaagggcttagacccttggtagggttanggatcngtggctgt

SEQ ID NO: 7402 - DNA, 482 bp, Glycine max
  Clone ID: PAT_MRT3847_106693C.1
aaaggagttgaaaccatctcttattccacgatctcctcttactcatcttaactaatggcggtggttgggtcctcgtttgttgtattaaatatgtgtgtggagtgtaacattacattttcttttttatccattaaatttttgtaagaattcatcattatccacaaatatattattttatttcatattttaatcatataaactcatttaataaaatatcttcccatattttatattatttaaatatttaattttttaattcatttcttctactatttctatttaaatatattattcatactttttaaaactattcattttttttctttttttcatattatcttttatatcattcaacattttatactttattctctttaaatcttctttttttatttactttctatttctttctaatttatataattactttttttttcctatttattactttttatattcttttctttttctttattcatttt

SEQ ID NO: 7403 - DNA, 259 bp, Glycine max
  Clone ID: PAT_MRT3847_106694C.1
gtggagtattgtggaaggatgtcttacgtcgctcataacgttaatcacccccgagagaaagatttgttggaggggaatcatgcctttgatattaaatctcgctctagatagggaaaagtctcctctcacaaagcacaagttgctactggagaaaccttcatatatgatataattgggcctagggtcacattcttaacaagatttttctgaaaaggaatatctcgaaaaacccgaaaggattgatgcccgatcgagacag

SEQ ID NO: 7404 - DNA, 2130 bp, Glycine max
  Clone ID: PAT_MRT3847_106695C.1
atcactctcagctggtcggtgcttatagatccagcgccagctatgaggagtccgccctccctatcgttggaatccttctcttcagttgggttgtgtcttggctcgctccctctcggatcagatctgcgctctccgttttcagatcgcgttttgtttcaattcgacactttcctcgcttcaaagattaagcgaacaatatggttgtccttgctgcatccattgtgagcaaatctggcaaagtgctagtttctagacagtttgtggatatgactcgcataagaattgagggtcttctagcagcatttcccaagttggtagggactggaaaacagcacacgtatgttgaaactgagaatgtgcgctatgtttaccagccaatagaagcactgtacctgcttcttgtaacaaacaaaaacagcaacatactggaagatttggaaactctgagacttctctctaaacttgtacctgaatattcttactcccttgatgaagagggtatttgcaaacatgcctttgagttgatttttgcatttgatgaagtcatctctcttgggcacaaggaaaatgtgactgttgcacaagttaagcaatactgcgagatggagagtcatgaagagaagctgcacaagttggttttgcagagcaagattaatgaaactaaggatgttatgaagcgaaaagctagtgagattgataaaagcaagattgaaaagaacagaggtgataaaggaggatttggtccattacagtcaatgggctctggaagaattgaaaatagctttagtgatttgagcatatctagcagtggaactggttttggaagtggctctggttttggattgacttctgatgttgattcctttgcaaccaagtctaaaggtcgtccaacttcatcagccactgctccacctaaaggtcttggaatgaagcttggtaaatctcaaaggacaaaccagtttttggaatcattgaaagcagaaggtgaggtcattcttgaagatgttcagccaaaactctcccagtctcgggtttctgccccaccacctactgatcctatcactttgactgttgaggagaaactaaatgtgacactgaaacgagatggtggtgtcagtaattttgatgttcaaggcacattgtctctccaaattcttaaccaagaggatggacatattcaagtacaggtccaaactggtgacaatcaagctgtctctttcaagacacaccctaacatgaataaagaattatttgccaatgattatatactaggcctaaaagatcccaacaggcctttccccactggtcaagccagtgatgctgcaggtgttggtcttttaaagtggagaatgcaaagtactgatgagtcaatggtgcctctgacaatcaactgctggccctcttcttctggaaacgaaacttatgtcagcattgaatatgaggcttcatcaatgtttgatctgcaaaatgttgtgatctcagtacctcttccagctcttcgagaagcgccatctgttaggcagattgatggggaatggaggtatgactctaggaattccattttggagtggtctgtccttctgattgataattccaatcgcagtgggtcaatggagtttgttgttccactagcagattcatcagtgttctttcccatttcagtccgctttatggcaactgatacttttagtgacctgaaggttaccaacatcataccattaaagggtggcaatcctcccaaatttgctcagagaacacagctgataacggatagctaccaagttgtgtgattgactttcttgaatttgagctcctataacagttttgcttttacagtcgtagttcttttatcaataggccatgcaaagttgtacttgcctctattcatgaatttgtacttagttttacttcgcaagacatggcgcaaagtatgatttacataattaatgctaaagcgtgtctgttttactctagcatgcatcttttatggggaaggatgcattgcctatcttcccttttctgcgttatagactagtcttatatttttcgaagacaggcgtgtcaaatgcattctaaattttaatgcacgggagtaaaccaattagacggggtgttttagcttataaaaaa

SEQ ID NO: 7405 - DNA, 1929 bp, Glycine max
  Clone ID: PAT_MRT3847_106696C.1
aattcggctcgaggcgcaccgtatcgtgttttcattagacgctgcaatcgttcttctcttgagtttggtcgtctgggatcagatctgctctctccgtttggattcaattcgacactttcctcgcctcaaagattaagcgaacaacatggttgtccttgctgcatccattgtgagcaaatctgggaaagtgctagtttctagacagtttgtggatatgactcgcataagaattgaaggtcttctagcagcatttcccaagttggtagggactggaaaacaacacacatatgttgagactgagaatgtgcgctatgtttaccagccaatagaggcactgtacctgcttctcgtaacaaacaaaaacagcaacatactggaagatttggaaactctgagacttctctctaaacttgtacctgaatattcttactcccttgatgaagagggtgtttgcaaacatgcctttgagttgatttttgcatttgatgaagtcatctctcttgggcacaaggaaaatgtgactgttgcacaagtgaagcaatactgtgagatggagagtcatgaagagaagctgcacaagttggttttgcagagcaagattaatgaaactaaggatgttatgaagcgaaaagctagtgagattgataaaagcaagattgaaaagaacagaggtgataaaggaggatttggtccattacagtcaatgggctctggaagaattgaaaatagctttagtgatttgagcataactagcagcggacctggttttggaagtggctctggttttggattgagttctgatgttggttccttttctaccaagtctaaaggtggtccaacttcatctgccactgctccaccaaaaggtcttggaatgaagcttggtaaatctcaaaggacaaatcaggttttggaatcattgaaagcagaaggtgaggtcattcttgaacatgttcaaccaaaacttgctcaggcagctgccccaccatctacagatcccatttctttagctgttgaagagaaactaaatgtgacactaaaacgagatggtggagtcagtaattttgatgttcaaggcacattgtctctccaaattcttgacaaagaggatggacatattcaagttcaggtccaaactggggagaatcaagccatcattttcaagacacaccctaacatgaataaagaattatttgccaatgaaaatgtactaggtctaaaggatcccaataggcctttccccacgggtcaagctggtggttctgaaggtgttggtcttttaaagtggcgaatgcaaagcactgatgagtcaatggtgcctctgacaatcaactgctggccctcttcttctggaaatgaaacttatgtcagcattgagtatgaggcttcatcattgtttgatttgcggaatgttgtgatctcagtacctcttccagctcttcgagatgcaccatctgttagacagattgatggggaatggaggtatgactcaaggaattcctttttggagtggtctgtccttctgattgataattcaaaccgcagtgggtcaatggaatttgttgttccacaagccgaatcatcagcattcttccccatttcagttcgttttatagcaactgaaacatttagtgacctgaaggtcaccagcatcataccgctaaatgggggtaatcctcctaagtattctcagagaacacagttgatcacagaaaactaccaaattgtgtgatcgtttttcctctcgacactgagcttttatgacagttttgcttttacattcgtgattcttttatcaaagggcttttctttgccatgttgcatcattttattaaattcgtaaattcataatttggttttactttttgcaagcatggtgcaaagtatgattttcataatacgaaacttaagagtgtctttttactcccc

SEQ ID NO: 7406 - DNA, 114 bp, Glycine max
  Clone ID: PAT_MRT3847_106697C.1
atgacatagagagaaatcaaagggggcgtacccttggaccttggattttggagtggacctcacctcacctctctcaacttcatctcacacaaacttcacacctaccaaaataag

SEQ ID NO: 7407 - DNA, 343 bp, Glycine max
  Clone ID: PAT_MRT3847_106698C.1
ggctcgagagagaatgaaaaaattatctactcatttccttgaatgtactatgcccacaatcccaaaggattaatcaataatcagttaatcaccaccatttatcatgacatctgaagcatatgtgcctaaaagatatgagtctctagagaacccttttgctcataaaccgccgcgttagcgttctcttttttttttcttcttcctcttctcttcttttctcttttctccctctctttctcttcttcccttttttcttttttccttctcttcttctttctcctctttttttttttttctttcttttctttttttttctctttctcctttttccttcttccctctc

SEQ ID NO: 7408 - DNA, 395 bp, Glycine max
  Clone ID: PAT_MRT3847_106699C.1
tgctcgaggtttttgacatcatgagacatttgtggactattattaatgacaccgtgttcttaacaggaggcctatgcttacacagggatataatagtgacttggctacacactcaaaggcatctactgcaatgaaagagcacgtacacaaactggcagttattggagcaatggtcacacactggcacacttatccaggtgtgagtaaccgtcatactccagtaaagctaacatacacatctctccgtcattctgttgatgacatcatgacggaggatgcaagtctgaaccatctatacattgtcggagtatccaacgacagctcatgcagtatagtcatgaatattctaggctgtactaaccattggcacttccagcatatatcccatcatgccc

SEQ ID NO: 7409 - DNA, 340 bp, Glycine max
  Clone ID: PAT_MRT3847_10669C.1
acgcatgcgtgcaggcgtccgaaagacaccgctattcctatcaagccagctactgagatcccactcttgagtaccttaagtctaacggattcgaagttaaagctcaaaaccgatcacgaaaatgctcagaccaacattgtagtgcactgtcatggataccctgacgaggcaaccaacattaaccagctgaagaagcctgtcgcggacaactaggctccaaggcatgccatatgatggccagcccataccgactacgaaggcaaccagaacattaagctaacacaataatatggaaccctaatgtatcagtgtcatcgtcaatatgtagtttaagctagct

SEQ ID NO: 7410 - DNA, 380 bp, Glycine max
  Clone ID: PAT_MRT3847_1066C.1
gcccgcaggtaccgatttccaattcgcgccacgcctccctcctgcttccggatgacagcagacggcggaagggcgagtcacatatgtcttgtaccttcgggggcgggtgtccttgccgctacttgtttcattattaatttaaactgtgaggggaaccaattgagatgatcacagaccccacctgctaatcaacatccgatgtgcgttacccgatggacaggcttcacctaatgtttgcatgtgcaagtagaccgctagggcaccctaccccacattccccaactgtccattcctcatagcaggtttacatttgctcacttgatctccataagatgcttttatcacggaacggctgggtttcccatggaggtgatccaatt

SEQ ID NO: 7411 - DNA, 199 bp, Glycine max
  Clone ID: PAT_MRT3847_106700C.1
gggggtgataacctaattaggggtcctggatttttccaggccttccttaaggggtcctaaatggaaaagctttttacctggtcttaccatacccattcctgttggttttgccaaaactagggcacctttgcaatttaaaaagtttgcgaattgggattttttcaaaagaaactttaagcaaatgcctaatgttttgggg

SEQ ID NO: 7412 - DNA, 296 bp, Glycine max
  unsure (1)..(296): unsure at all n locations
  Clone ID: PAT_MRT3847_106701C.1
tgaccagcacnntggataagttggaacctgtttaatctcataatcaaagttgtgcctagattgggctggctttcttcatntttgcaatcattcacttntgaaagaagatactccggcagagcttctcaacttgacagcttcggaattttgtgtgaaatgggtattatttgaagggttcaaatcgcattcccttaatatttgaaccgagactttcagtgtatggggccataggcttgggactcaagacttcttgcttggtgttactcttgngtgatttgttcttggatggcatacta

SEQ ID NO: 7413 - DNA, 286 bp, Glycine max
  unsure (1)..(286): unsure at all n locations
  Clone ID: PAT_MRT3847_106702C.1
ctcgagattcttttgttttttaaaatatagtgtacaaggatggggggggaaccccccttttgggaagcaacacaacctagaggcggtttttgtcttgtggagaggagcaatacaaagatggcacgcactctattacgataattcgtgattgttctagggctttcttttttgtgagcaacaaaacagttccagttacaagaactgaaaaccttatgctgggacaacttcaccttactctggagaagaagcacaaggntatcactttacagaaacttgcactgggagg

SEQ ID NO: 7414 - DNA, 292 bp, Glycine max
  Clone ID: PAT_MRT3847_106703C.1
gctatttccaccccgggattcctttgaaggtcaaaagtgaattaggtaaatgggggttaattgaccttgaagggaccgaccggttgttaaaaccgggagccaaagaactaccatttgttaaggccaaacccattattctttccttttcactttaacctaatgttgttccacttttaaaaagaaaaaggtgtattttccctaacaggaataccagcctgcctcaaatcctgaaaaatttttttggttttggttcaaaggtatggatgttggtgcatataaccccttccaaaaa

SEQ ID NO: 7415 - DNA, 250 bp, Glycine max
  unsure (1)..(250): unsure at all n locations
  Clone ID: PAT_MRT3847_106704C.1
cnacaaagnnaaaaaaaaccttagccaacacaaccatcatggccacntcngctattcagcaatcagcattcactggtcaaactgctctgaagcagntcaatgagttcntcngcaagaccggtggcgccggnaaaggtngnactatcatncgccgcaccgtcaagagtgntcctcagngcattngnnatggccctnanngncccaagtatgggggctttctgggagcagtgcntttttnggggggntnncc

SEQ ID NO: 7416 - DNA, 353 bp, Glycine max
  Clone ID: PAT_MRT3847_106705C.1
ttgtcctaccgctcgtccgaacagatcagaggggacgtctgcaagggtcacccatggagtgagccattgaactatatcataaagagtcctcttcaacctgtccataacaacgagctttgagagtttctttgtgatacctagtcacagtgatgaaatactatctatagtgattatgtttgcactacttgtgtcagaccttgatatatcgctctaacaccaatcttatgtaggcacataagataatctattctatgaggaataggcatatcatcggagctatactgacgcacaagatgaacccaattcagacagtgaatgtgcgcatcatgtccatctaattcctacagaatgaa

SEQ ID NO: 7417 - DNA, 572 bp, Glycine max
  Clone ID: PAT_MRT3847_106706C.1
aaaatgtcattgggatgtagctgcctcgccacattataattaataaaaaggaaaatcagattattcatacaaaaataaccggcaaagaaatgggaatataaaaattaagggctattctatagcacctcaaaggtttgatatccctgctaagttgaaagcatccttattggctgttggctgactcttggatgaattttgatacacagtccaaaatgcagaggcaccaaatttttgggtacatgttcaggttctatggcagccacactattaatgcttagtcccaaagttccaccaccttttcttctttctcgactcacttgaaggtatatctggatcaataggttattaatgcatacatgatagaccaaccccataccatatatttggaaaatactaaggctaaaataaaattttggtccctcatctgaatttttggtttcagtttggtcccttaaagtgtccctcctagatcaagttagtcctttcgttaaataatcacacaaatttggtgaactcaatgacactaacaaactgtgactttcgttaattgatcacacaaatttggtgaactc

SEQ ID NO: 7418 - DNA, 1073 bp, Glycine max
  Clone ID: PAT_MRT3847_106707C.1
atggtttgtcatcaccacgttttcttgagcaacctcaacacttctcagagaaaaaaccgtccactctctgacgacaacagtgataagtgtctcccactaccatccatttgctaacccttcatttgttggcttttttgtggctgtgttggtgcttgacatcaattgcccaatctcaattggattaccaaagttacaaacttttcttaatatcacgtcataaagtcaccatttttccttcccttttgaggtgaagtgagagctgggaaacaaaacatgtctagggcattggttcatttgttgggtgttttgtggctatgttgttggctggcatcaactggagagtcccaaatagagtacctgagatacaaagatccgaagcaaccggttccaactcgggttagggacttgatgagtcgaatgactttggaggagaagattggtcaaatggttcaaattgataggagtgttgccaatgctaatgttatgaaaaccagcttcatagggagtgtattgagtggtggcggtagtgaaccccttccaagggctactgctgaagattgggttaatatgataaatgattttcagaaaggagctcttgagagtagattgggcataccaatgatctatggtattgatgctgttcatggacataataatgtctataatgctaccatatttccccataatgttgggcttggatgtaccagggatcctaacctggcacaaaggattggtgctgcaactgctcttgaagttagagctacagggattccttatgtatttgctccatgcatagcggtttgtagagatccaagatggggtcggtgttatgaaagctatagtgaggatcctaaaattgtgcaagaaatgacagagatcatacctggtctacaaggaagtatccctgccaattccaggaaggggtttccatatgttggtggcaagacaaaggtagcagcttgtgctaaacactttgttggagatggtggtacaacaaagggaataaatgagaaccacacactgattgattggcatggattggtgagcattcacatgcctgcatattctgaatc

SEQ ID NO: 7419 - DNA, 300 bp, Glycine max
  Clone ID: PAT_MRT3847_106708C.1
aggatgtaaaaccaatacgtactgataatttaaaatttttatttttttgggaggatatacaatcaaactttacccaagtgggggggttacaaaccacccaaaccacaaactaatagcacttgaattagcaaccagatacccccccaatttttcacttttgtttttctccctcctaaatagaacacaagatagggaaaaagggaaaagatagagatagagagacgacgagagagagagagagataaatttagggccagcccttggtactatgggcccataaaccttttaaatatatagggg

SEQ ID NO: 7420 - DNA, 347 bp, Glycine max
  Clone ID: PAT_MRT3847_106709C.1
cagacttcctaaacatccttggggaaggggtcctttatccaaccctttccaatccccacctacttctgaaaaaacaccttttttcttcacacatcaaaataaacctgcaaacttaaacaccaaaatcttccctttcagaattaactgctgcccattccctccaatacgggtccccgtgtaacccactgatcactatcccacatgaacaactccataaaactttcattcaccaccatgacgagcgtagttcaaagctctgccctcatcttttctatccctgcttctatcaccatgtgaaacagggaatggctcatcgattccatgaccaaaaacactcacagcctcaa

SEQ ID NO: 7421 - DNA, 954 bp, Glycine max
  Clone ID: PAT_MRT3847_10670C.1
cggacgcgtggggttcaactgaaatgctgcgtcatttgagactggaggattttctttctttaaagccagtggacccttcaaatcattcttttgagggtgatatggagaaaagaaacttaatttttaagctcatttcactgagagaggaggaggaatattcaattaaggatgaagtgactacagaattggatatatcccaacacatggtgaaggagcatctgtttcacaagcagtttaaagagaagctgtactcatggcttcttcacaaagtaactgagagtggtaaagggccaaatgtattagatgaggatgggcaaggtgtgctacatttagcagcttttcttggctatgattgggccataaatccaattatatctgctggagttaatatcaacttccgagatgtgaatggatggacagctcttcattgggctgcatcctgtggcagagagcgcacagttgctgtccttgtctccatgggtgcagattgtggagcattgacagatccatctccctcatctccagcaggtagaacagctgcagatcttgcctctagctatgggcacaaaggaatttctggttttcttgccgagtcttcattaactcaccacctcgaaaccctcacaatggatgatcaaaaaggtggtcggcaagaaatttcaggaatgaaagcggtgcagacagtttcagaacgatctgcaacacccgtgcactttggtgatatgccagatctctgcctcaaggattcgcttactgctgtgcgtaatgcaacacaagctgctgatcgtatacatcaagtatacagaatgcagtcattccagaggaagcagttaactcagtatgaaagtgatgagcttggattgtcagatcagcaagcactttcccttctagcttccagagcatgcaaatctggacaaggagatggtttagccaatgctgctgcagtacagattc

SEQ ID NO: 7422 - DNA, 379 bp, Glycine max
  Clone ID: PAT_MRT3847_106710C.1
cagcaagaccactatcatttggtaacccttcgagtatgaacatgattaccctgaacggcaagactacatgaccgagggctcttatgacgtaaaacacaagcttccactctccaaatgaacaactaaaattatttaaatacacgatcacaagagcggctccttacttcttaaaaaaccaaactgactgaccaaggtcttattccacagaggtgtagaagacctacagcgtcaacttaaaagccttaaccatgaaagatggctcaatctcaaagacggtggggtcacccttacacgaacacaagaaggctgaatgctaataccacattgctaggaagaggtgcctgtgccaagaccatgaaaaccttctcctctggggcat

SEQ ID NO: 7423 - DNA, 249 bp, Glycine max
  Clone ID: PAT_MRT3847_106711C.1
caaacgttggtctgtactacacagtacatgcactagccgcccaatgcgttccatggtcgactactttttagacctctgtgtttcttgctcttttgttttcttgttatccgactcagtcacccctacaaaaccagtcaaccttgttgttgtacccgttcaaaatgatggttccacagggctcccccctccccccctccacaaaagaacccctctagtgcaagtaccagtcctggtggacctcagtggaga

SEQ ID NO: 7424 - DNA, 488 bp, Glycine max
  Clone ID: PAT_MRT3847_106712C.1
atacaatcagaataacggccatccccatatttgctataccactacagtgtttttggggtcagccgctatgcttttcaataatgttatacagatgttgatgcaactttagttaaaatgtaggtcaggtgttgaacattagttatggtatagaaaactggaatggaagaacatatttttcttgattcaataggatgatacgccgaaaaatataaagcatgatattgggagcaaaaaaggaaacagaaccaatccttaataaaaggaataaaaacttgcctaattagttttctaagtgaatccccagatttaagatattttcagtggattctcctaatgatcttatttacatactgaccatttaacaatctcccttaagctgacaaatagatgtcttccattcccagtttggcagatcataaaaacccaagctgtttagcccctttgtgtgaacatcaaccagttagtgttgtaatggaacatgggacatg

SEQ ID NO: 7425 - DNA, 128 bp, Glycine max
  Clone ID: PAT_MRT3847_106713C.1
gacaaacgtctaaggattctatacatctctcttttatatgaacagcatcctgactgcaatagggtgcacttgcacgatcttagacgtcaatgcagatattaaacctggcttcagtagcaggatgttat

SEQ ID NO: 7426 - DNA, 283 bp, Glycine max
  Clone ID: PAT_MRT3847_106714C.1
gccatgacagactgagctggcttggttaatccaactgttggtggaaccagacattggaggaggcagagttgcaagtgcaatccaggacagactgagttaggtgcagaacaattacatgatttacatttactgacctgacaccgatagatttccactaggccttcccccggagctccaagcatagtgatagacttggttgacatttgtagggatgcatattccttgattctttgatccttgcatgtatgatattttgaaacttatacacttaatgtacctcatg

SEQ ID NO: 7427 - DNA, 1138 bp, Glycine max
  Clone ID: PAT_MRT3847_106715C.1
cttctggcagaccaaaactggaatgttgttgcagaaactgttgtgtcccacttcttctcatcaacagagcgcatatatgactggtctgtacaaatagcagatggttcttatattcctgattctcaacccattgatgggagtgagaatcatatggctgtttttctattgcaagtgatgcatcatacgtgtgtattacttaagagctacttgccattagataagcagcttaggctcgccagcatggttattacttgagatgcaaactacattcttgaaaatacaggattatggtgacactaaaattgctttgtgttctcaccatgctacacgttgcccaatgttttgggaattgtgctttgttatttatggaatatggagaattctgtgagttattccagccattcctggttcgtttggaaagtgaatttagaggacacactgtgttgagcagaagtcaaccgtgtgggatgtctctggcaaagcatgcagctgtgcatatatttgtttgtggaatccaattctaattctaatgcactaaaattcagcagaagcagaatgcatgttgtatcattttcttttcttcctacacaagctaagcttgatgtatcatagagccacccttggggttgcttgcagagatatgtaattcattttttaattaggttacaatataaatattgagtttcaaactcttaatttcgaagatgagtgaatgttcccattggaaaaaaaaaaaaaaaaaaaaaaaaaaaatttttattttaaaaaaaaaaaaaaaaaaaaaaaaaaaaaaaaaaagaaaaaaaaaaaaataaaagaaaaaaaaaaaaaaaataaataaaaatacctaaaaatcaaaaaactagaccgtgggggtacacctttggtgattggcaaatccttggcgttgcccaacttaatccttttgccgcttgtcgccctttcgccaattgccgtaccggggaagaggccaaaaaggagcgccgttccaaacgggtgtgcaacccgcaagttgaatgggacaacaccctctcccgttgcattaggcacgcccagcgggggggttaccctcaccgggaccctaacacttgccagtgccctagggcccgataccttccccttcttcctttcctttttc

SEQ ID NO: 7428 - DNA, 296 bp, Glycine max
  unsure (1)..(296): unsure at all n locations
  Clone ID: PAT_MRT3847_106716C.1
gatagaaaaagtatttaatattacaagcagagattcataatttaaatcagccgtactttatacaggnncggccctctccattcattaaaaaaaaaaaaagacgcccccgtgatcttaacacacccatcacaagtccaaaactcttgatctttctgaaaggcaacacatgaccactttattctaggggtgtgtgtttaacacaaaacaccagagtgcgcgaacaccatcacagacataacacatatgtttttagccacacattaagagtttatcattatccctaataaagggctatc

SEQ ID NO: 7429 - DNA, 638 bp, Glycine max
  Clone ID: PAT_MRT3847_106717C.1
ttttttttttttttttttttttaaagggtaaataacaaagaatcctctagattcaaatgtcaaattctcaacaaacttctaaccaggcatggtagcccatagcttcttatacctaagtcacatgtgcactccaaattataggaatatgcgaacttaaaccaaaaaaaaatgttggtcatgaaaaatcaggatgcctagattaatgaacagaagggtatgtttttatggagagaatttctttataatttatttgacctatcttatcctatcctccacagtggtgatggtaagtgactatgctatgaagaagattttcaaggtgcattaaagtatgaatggggaaacatgatcaagggtctggaaccctccgagcataagccaagaccatgacaaaatcctttgctgaggacccaatagttgctggaattctctgtgacgtgggcgccgtatccagccacaactcaaccaaattatataactgcaatgtagggagcactggttgtcccacacatttaatctcaacctctgtttcacttgtcaaatccagtttcttcattaggtatttttggatgaaagagacgggtacactaccatcctttattctcaaataacttgcaggaatttgggggcagggatca

SEQ ID NO: 7430 - DNA, 482 bp, Glycine max
  Clone ID: PAT_MRT3847_106718C.1
acggacgacagaagggccatggtaacaagcaagccagctgtatcaatttaggaaagcactcaacatgcatccattcaaatgcatcccattcaacatgtcccctagcaaaagtggaaaccactcaagatcagtcacaattttggtactgcagtcaagcatagtttgtgtttctacatatgcatgccttcaatacaatgagtcaagcatagaaatctagtgggttctggacaccaaacctgacctgctacctattcatccattcactttcacctatttccaccattttccaaaaaggaactcgcatatggaagggagcaagtgtgacattaagacccaaagatcagttgcatcaattcttttacaggaactaatgttattatttcaaagtgaacacttcatgccaagcttaccttgcatacaattcatacaatgtggcagaaaacacaacttgtgtagattctactctggacaagataggacat

SEQ ID NO: 7431 - DNA, 147 bp, Glycine max
  Clone ID: PAT_MRT3847_106719C.1
gtatgtcgtgctgctgttctagatccttatgtgactcatttatttagacgatagtgatacaatctgcctctcaaaatgatcccatcatatatacgcgtgcagttacattcacacttcttcaaggttgtccccttttatccattcaga

SEQ ID NO: 7432 - DNA, 364 bp, Glycine max
  Clone ID: PAT_MRT3847_10671C.1
aagaaaatacctacaacgtcttaacatataacttgaggacccgccaaaaaaacaaaaaaaccaggattttatcttttatcatcatcatccttgaggcaatgacctatattggttatccaacaaaggttaaagcttgtatcacatccatgcctattttttcaggaaataaacagcaacctttatttgtgaggaatgaaccacacgcttctattctttgtcttggcctagaccaatttacctgtaccctacaaagggaactgccatgcctcatgttcataatcatcccaaacattctgtgccaactctcaatgcccgtgagacatggtatgaagtacccatgttcttatataccactcctgtcctt

SEQ ID NO: 7433 - DNA, 211 bp, Glycine max
  unsure (1)..(211): unsure at all n locations
  Clone ID: PAT_MRT3847_106720C.1
ganatctgattatcattggagagtctgatttctgacttctttttctgattatcattggtgggaacttcaacccatagtttagttcatcttttatattattactagtattgcagttaattctgccataacatttaggggntgattgcaaatggcctctatatctgcaagcctgccgccaccattgatgctccctgctagacaatatcatccg

SEQ ID NO: 7434 - DNA, 871 bp, Glycine max
  Clone ID: PAT_MRT3847_106721C.1
gaaaaatcccatccaatattgtgaactagaaaacggtgatggcgtcgaaagctccaacagctccatatcccagtgctgccagaatctctgattctcagtgttttccgcaatacaccgcttctctcaaatgtttagaagaatttaattctgataagagtaaatgtcaagaacattttgatgtttacaagatgtgcaagaaaaaagagagggaagcacgattggaacgaaataaaaaccgatccttattctcgtgaaatcttagccgggagtttacgtttactcatcgtatcatagtaaacaaagttaagagttcaccaggatcactggttcatctatcatagcactgaggttatgaagttttctgaagctgtaacaagacgactttccaataaatgtgttcaatgctattctacactttgtttctttttgtctcaattcttagtttaggttccttttcctttcctttttggtgctgcagttgttctacagggccactagagcaagattcatttaagtgtgtctactcatttgttacatttagtaagaaaacataattagagtattgagtaccaatgttattaatggtggttggcaacaagccaacaatggactatggcagaaacatggtagatatgaaaaaacttaggtgcaatatatggttcctgtgactcagtaacgtctgtactctagggaatgctgaattgtcttgagtcttgcaaattgcgaaaacatgatgagaactttgggctgcttgtgatgttgctttagagaacaatgcatcatcttacatggagcaacatctataggcttgtagattgacacatcaaatattttgatactgaaagctactaataaagcatctactcatgtg

SEQ ID NO: 7435 - DNA, 225 bp, Glycine max
  unsure (1)..(225): unsure at all n locations
  Clone ID: PAT_MRT3847_106722C.1
acgagaaaattagttgcatatcaggtggcttcatcttctcgtaaaaattctcgtaaaaaatagccatattctatctgagtagatatactctctctaatccccatgactcttgaataataacaaaagtactaaataaattgaattttcagcatctttctattaaaaaaaagaaaagaaaaaaaaaaanaggggaaaaanaaaaaaannaaaaaaaaaaaaaaaaaa

SEQ ID NO: 7436 - DNA, 402 bp, Glycine max
  Clone ID: PAT_MRT3847_106723C.1
gacaaggaaaacacaggatatattaagacagaaaagatttacaacatcatcactaggtaacttagaaacaccacaccattcataacttacaatgaacattaacacaatcaaacttggattccttaacttggctacaatcgattcaagcacaaatattgtgaacttcgattgcataacttggctaccacagactcgagaacgcaaataacttcatactttaaccttttagaagacgttcatgtcctcttgcacttgattttcaaatttggcttccttttctcctccttcagttgtctcgaggagaggagcatcaagctcaggaggtttctggtaacacaggaatgttttacaaatctagggcccaattgacaccccgaaagaacgggaggttcttaatttcat

SEQ ID NO: 7437 - DNA, 274 bp, Glycine max
  Clone ID: PAT_MRT3847_106724C.1
gtgtgacttgctcagacgctcaagcgttctgttggatggatatccccaagtgcattgttgctcgtccattcagaaaacatgacaggcattctctatgagactggcgaacattccggccatgcggttgtcattaagtatgcaccttacggtggagacagcaggatgggcatggatgagtactctgctgagatattcatgcgcggtaagcacacacttgtgctgctcaacagtctccaggatacactgggggctgctcctattatctaagactagg

SEQ ID NO: 7438 - DNA, 573 bp, Glycine max
  Clone ID: PAT_MRT3847_106725C.1
cggggatttgccgtggtacatgtgtaggagtgccgcctgcttgggggggggggggggggggaacggtaagattggagtgataaacgagaggagaaaatgaattgttaagtaaattttaataatagcggtaaaggaatagggggcgatataaaggcgggtgaagggcgtagacaaatggccagaggggcggggaatacgggtggcagttggcaagccgccaagtgggtgggcaggtttgattaaagacggtggctggttaactgaataggtgaggtggtaggggtaagtataaaggaaggaaacacaaagaaaaaaacaaaatatgagaaggctgagcgatgaaattttgactgatgaggttggagtgaagcagtaaaggccgccgaggtgggccgcgctgtactggtgcaagaggggatgggaaggggttgagggtagggaagtggggcagagggcgccaggagttggcaaaggcaacagcagcattaactaggaattctgcaggtagtaaacatgctggtagcaccgacggttaggcgcccggtgtcgaggccggctgcagcggacgaccca

SEQ ID NO: 7439 - DNA, 486 bp, Glycine max
  Clone ID: PAT_MRT3847_106726C.1
cggcgacctttccaatgtaggcctacgcaacgtgctggctcgtccgtctgtgggctccgaaaggatccctgaccttctatactgcgtataccaaggcatgttcgcatgcatcacagtcgccttggcatctggagccgtcagcgagcgaggcagaatgctgccgtgcgttgtgttcatgttcatatggacgactgtcgtctacgatccactcgcgtgctggacttggaacccggcaggctggtcatatcgactcggaggtctggactttgccggtggcacaccagttcatattgccagcggatcagctgcgctcgcgtattcttacattctggggaaacgagcaggacatggcactcatgctctcaattatcgtccacacaacatcactttcatcgtcattggcacggtattcctatgggtgggctggtttggattcaatgctggcagcgcactcagtgcaaatcttcgagctgtcatggccgcatt

SEQ ID NO: 7440 - DNA, 269 bp, Glycine max
  Clone ID: PAT_MRT3847_106727C.1
cacataacatggtgacattaatacttatgtaaccacttacatcaccttatttactactttttgatgccattaaggtggattacaattttaaactttctgaaggacattgtagggtgttctcgatcgtagcatgcagtgcggctacgcctactcagtggatgctaccttaccacattttgactaccattactgttttggcctacccgagaagggggtcctcacggaaaatattgcttgccgtggccggtatcggctcggtcttaaagatt

SEQ ID NO: 7441 - DNA, 400 bp, Glycine max
  Clone ID: PAT_MRT3847_106728C.1
acctataagcttacacttccaactcacatctcttggaactcactgagccgcaatgccgagcaaagagggcggagtagaaaaacacgagggcgtaggtgcaaaagaacgctaacgaaatcctctatggagacaacaggctcactgagaaaacaattgatactagcagagactcgaacatggaggaagtttactacacaatagcacctcaagttagaaaaaagataccgcattacaacaggagggatgtggatacacagttgatctacaatctcccatgtttggtcactgctgaaatacaaaataagcgggatgcgagaaacattcaaatttccggctcattatacgacgggagatacaaatactggactaaacacgagaaaaatcttgctttgacagaaga

SEQ ID NO: 7442 - DNA, 297 bp, Glycine max
  unsure (1)..(297): unsure at all n locations
  Clone ID: PAT_MRT3847_106729C.1
aaaaaaaaaggggggagccacaanaaccanatttaaataaccatatttttttccacgaaaaaaaaaaaatcctctgttttttcactcatactccctccacacaaccaactncaaaacccaccaattcaccaccacattttctcccacttcaactaatcacccacctttcctactctattcaaaccataccctttatttacaaccactccaccccaatcacaaaccagaacccctaaaatctctttcactttatcaccatttacaacacaacacaaccaatctcacaaacactttttt

SEQ ID NO: 7443 - DNA, 353 bp, Glycine max
  Clone ID: PAT_MRT3847_10672C.1
ggaatgcgtatcctagttcatcagtttcatcaccagcgaggcctctgataagtgtgagagggaaaagagaaagactattaacggtgatgatttgctctgggccatggccactcttggttttgaggattatatcgatcctcttaaaatttacctcactagatacagagagatggagggtgatacgaagggtttagccaagggcggagactcatcttctaagaaagatgttcagccaagtcctaatgctcaggtagaatgcacccacgaatgtgcgaatcatgcttgactgcatttgtgggaatatgtgtagaatacaataacatctgattttggaatctttttgttgtgaaatc

SEQ ID NO: 7444 - DNA, 132 bp, Glycine max
  Clone ID: PAT_MRT3847_106730C.1
cgtaggctactctgagtattacggatccgtctgaacctgcatggactcacacatggcacatcgtgcgcttcatgtagatatctggccaagtacattcggcatgagggtcaggatcgcactcgctgaaaaggg

SEQ ID NO: 7445 - DNA, 204 bp, Glycine max
  Clone ID: PAT_MRT3847_106731C.1
tttcaagctcatcctagattttttaaaatggcatcagcctcctgggtgggtctctcttccacagtctaggggggcaaggccgttaagctggtcccatcatcccccttagacaggagggtcaacattaggattaccgttacctaacaagccttcttcttaagctccatactctgcccataccgcgacaataacttgctcccattc

SEQ ID NO: 7446 - DNA, 641 bp, Glycine max
  unsure (1)..(641): unsure at all n locations
  Clone ID: PAT_MRT3847_106732C.1
cccacgcgtccgggctttcattcatttgcattgcgagaaaacgaaaaactctgaaaaccgcaacaaactcacactcactcacaagagagtaacaaccaaacaaacaacaaatctctcatcatggcagttgaggctcctccgcacaacatgaatctcttcccctcgcagttactaaccgccagagaaatgatgaaaccgaatcttggcttctacaccgctccgacgagaaaacgctccagagactccatcaccactgtaccaaacgcgcttctaccacttccgcagaagaacaaactatcatcatcatcatcatcatcaccaccaccgtccattctcgatcaagagcttctcttccatttccagaaccagcaatccgagatcgaccgcttcatcgtacaacacacggagaaagtgagaatggagatggcggagcagcgagtgaggcaatcgagaatgttgataacggcgattcaagaagccgtggcgaagaaactgaaggagaaagacgaagagattcagcgcgtggggaagctgaattgggttctgcaagaacgagtgaagagcatctgcgtggagaatcagatttggaaagaactagcgcanacaaacgaagccaccgcgaataatcttcggaacaatct

SEQ ID NO: 7447 - DNA, 444 bp, Glycine max
  unsure (1)..(444): unsure at all n locations
  Clone ID: PAT_MRT3847_106733C.1
cttcagttctccaagagacttgttcagctccatccaaactttcatgtcacatgctctaagttcccacacgtcgtgtgctcccccaagtgccgtcaatatnccatccttcaaacctcttccaccaaacatcaacactatttttcttcaaccggtgaaacctgaggacctaccacaaggggctaccatagaaactcaaattcagctcatagtggctctctctatgccctccatacatcaggccctgaagaccttaacttcaaggactcgctntgtggccttggtggctgattcttctgcctttgacgcattagattttgctaaggagttcaacatgttgtcctatatttacctccccatatcagcaacaacactttcttggtacttctatgtgcccatgttggataaggagacatcatgtgagtacagagattgtcctgagcctat

SEQ ID NO: 7448 - DNA, 1427 bp, Glycine max
  Clone ID: PAT_MRT3847_106734C.1
ggttcgcgcccgctctctcgtcgcactctggctctctttctgctgccttgcttcacactctggctttctttcatttgcattgcgcgaaaacgaaaaattgcgactcatttgcatgcttcgttattctctatatttctctccctcctcctcttcagagtagcattgttcattcacactccctctctggctttcattctttggcattgcgaaaaaacgaaaactcagaaaaccgcaacaaactcacactcactcacaagaagtagtaacaacatcaacaactctctcatcatcatggcagttgaggctcctccgcacaacatgaatctcttcccctcgcagttactaacctccagagaaatgatgaaaccgaatctcggcttctacaccgcgcagcaaacggaaggcggcggtggcgccgccgccgccatgcctattcttccgtcatcaacagcgttacctttttaccaccaatccgacagcggtctcacctgccacgccaccaccgctgccgctccgccgagaaaacgctccagagactccatcactaccaccgaatcaaacacgcttcttctccctgttccgcagaagaacaaactctcatcatcaccaccgtccattctcgatcaagaccttctcttccatttccagaaccaacaatctgagatcgaccgcttcatcgcacaacacacggagaaagtgagaatggagttggaggagcagcgagtgaggcaatcaagaatgttgatagcggcgattcaagaagccgtggcgaagaaactgaaggagaaggacgaggagattcagcgcgtggggaagctgaattgggttctgcaggaacgagttaagaacctctgcgtggagaatcagatttggaaggagttagcacaaacaaacgaagccacggcaaataatcttcgaaacaatctagaacaagttctggcgcacgttagcgaagaccaccaccacaacctccaccataccaccgtcgaagcagcggagtcgagttgcgcgagcaacaacaacaacagccaccaccgcgaggaggaggaggtttgcggcggaagcggaaacggaaaacaaagcgacggcgttttggggaagaggatgtgcaatcagtgtggggtaagagaatcgatagtgctgctgttgccatgtaggcatctgtgtctgtgcacaatgtgtgagtccaccgtacgtaattgcccgctttgtcaatctggcattaatgctagtgttcatgttaattactcttaggagttttttaacgctttccatatactactccattttacaccaccggggaaaaaatagttacagttttttttttcattttttttttttgtccgaaggacagtgtaaggagattaaaaaaaaaagtagactgtagaattcttttgttgatacagattttttattcttctctctcc

SEQ ID NO: 7449 - DNA, 208 bp, Glycine max
  Clone ID: PAT_MRT3847_106735C.1
aggttgggtagatgtatcagccagatatgttgcaactccgatgagtgcacaatttcattgtcacatagcccatccatgtttgtacctaacttctaaataggtgctgatattatgcgttcagacccactatcagttggaggggaataaaagcaagctgactcgaagacaattgtctattattcttagcctatgcatatggtacttcaag

SEQ ID NO: 7450 - DNA, 577 bp, Glycine max
  Clone ID: PAT_MRT3847_106736C.1
ctcgagccgaatcggctcgagcggctcgagatatttctctccctctttctcttcacactctggctttcattcatttgcattgcgagaaaacgaaaaactctgaaaaccgcaacaaactcacacacactcacaagagagtaacaaccaaacaaacaacaaatctctcatcatggcagttgaggctcctccgcacaacatgaatctcttcccctcgcagttactaaccgccagagaaatgatgaaaccgaatcttggcttctacaccgcacagcaaacggaagctgctgctgctgctgctacgcctcttcttcagtcaacggcgttaccttttctccaccaatccgatagtggcctcacctgccacgtcaccaccaccgctccgacgagaaaacgctccagagactccatcaccactgtaccaaacgcgcttctaccacttccgcagaagaacaaactatcatcatcatcatcatcatcaccaccaccgtccattctcgatcaagagcttctcttccatttccagaaccagcaatccgagatcgaccgcttcatcgtacaacacgtaagtttgttccaa

SEQ ID NO: 7451 - DNA, 213 bp, Glycine max
  Clone ID: PAT_MRT3847_106737C.1
gggatggagtccacgttggcttcccaagcatccacagcgaatatagaggccacaaaagtttccaccaaaaaccaagtaaacaaaaacccaggaatctgcctctcaaaccccctaacccaaggggactatcggaaggctaacttaaccaacaaagagcttgaaaaacgagtgcttgatccttaatttgtccaaagtaccacaaccctagaagct

SEQ ID NO: 7452 - DNA, 329 bp, Glycine max
  Clone ID: PAT_MRT3847_106738C.1
gtcgaatgccaaaagtagacatcttcattaccataaataaaacaatcgagttcctacaaaaagcattggctaaaacttttcaattttaaataggcttttaaaaaattaacctgccaatcactccctatgaacagagtacatatctaccactgtggtgaactttcaaaaagaaaatggggactcatgaaggaggggccacttcatcctttccatagaaaccctgaaactcccgagcagcaacttgggatgaaggtttccatattcggaaggtcttttggtggatgggtagagccagggccattttgaatagcatcaaaaagcctatcctg

SEQ ID NO: 7453 - DNA, 234 bp, Glycine max
  unsure (1)..(234): unsure at all n locations
  Clone ID: PAT_MRT3847_106739C.1
cnataagtttgtccagaaccctaaganacaataatcaggaggcccctcgaaacanaaggaacccagaaaaaaagaaaacaaagaaaagaaaaaggaaaacagtattgggccattggtattgcaattggaattgaataggcattngcattatantagcccccgaaactgaaagccacatttgactganagaaggagacaanaatngnggaggaaaanttggatttgtanncnccc

SEQ ID NO: 7454 - DNA, 360 bp, Glycine max
  Clone ID: PAT_MRT3847_10673C.1
gttaagcatttcaatagaagaatttaagtctttactaagcttttttttcgtcatatatttatgctaccaaatcaattagatacaggtcagatgaaatatgactactctgatataacagtgaggagagctacttatcttaccatgttcgggaacaattcctatagaagttgacccttatgctgctcttaaaattaatttattggcttggtaaaggatctggagatttgtttccatctagtactagattataagagctagagcctagaggttcatggtggcaggctatttgcacacttgtttggcattttgtttacacactttttggctggatcacacactcagactcgagaagaaaagatt

SEQ ID NO: 7455 - DNA, 407 bp, Glycine max
  Clone ID: PAT_MRT3847_106740C.1
aaaaatgatgtttttttataattatgagttcatctaatcctggcacaacttcccaattatgctatatatggtgcatatgagcatcaatggcccgcggtaaaactgaagatctagttaaccaagtccttgatgagataggaattgacatcaaccaagagcttgtaaatgcaccatcatcagctgttgctgtcccggctgcaaagacaaaggtacctcaagttgaaacgactgggaatgatgatggcgggatagactgtgattgacaggcatggatagacaatttaagaaaattgtaatctatcctctatatgatataatggactccagttagactggggaaactgatgctcatagacaccatatttcgcattatcgggaagaagagcgcggataagatgaactcatat

SEQ ID NO: 7456 - DNA, 119 bp, Glycine max
  Clone ID: PAT_MRT3847_106741C.1
gtgaggtggtgagagatgtgcctccaggcgcaaaagccaccggggtctccggggagtgatcttccggctgatcggcccgaccgtgctttctccgatgcctcgatgctgatgatcatctt

SEQ ID NO: 7457 - DNA, 212 bp, Glycine max
  Clone ID: PAT_MRT3847_106742C.1
cccgaaaaccccgggtcgccccacgcgtgttgtcgcccgcgagaagacgacagaggggggcgcacaggggcaaacgaagccccggacacccgccgccaaaggacacgagacgggagccctcaagccgaacgaaggaaggcgcgcaaaaccgaaccgcaagagcgcagcgaggcccgcgcacacgacccacgggccagacagaggccacgcgc

SEQ ID NO: 7458 - DNA, 259 bp, Glycine max
  Clone ID: PAT_MRT3847_106743C.1
atttcaaactatgtcaatttctcttgttttctgcttcacatctggttatagcaaggtaacctgttactgttgctagctaagcttttgttcctttccgtcatcatctaagatatcttctttgattggttcatagccataggctaacagcttgaaatctccaggcatgttaggaaaattcgtgatttgaattataatagaacatgaatcaatcacctcaaattttgggaagtgctcataggattgatatttttatctgtaa

SEQ ID NO: 7459 - DNA, 363 bp, Glycine max
  Clone ID: PAT_MRT3847_106744C.1
gcctaggtgaagacaatggacctccacaactctgtactgggtagcctgttagtagatggagattgggtcacagctgcactatgtctagatgaagggtgttgctgagctggaatcacggttttatactgtaatgatctgggacactgtcattttggagaggaatgccaaaagtaccagatattagtctcattagacttcttgagctggcttccaatgtcaagatcatgcataatcatgctctggctattagctgcagggtagcacactctatatttcgtcgatgtactctgtgacaacacatgttcatcatattgtgaatacttagaaagaggcaatagataagaaagtagagtcgatgcttac

SEQ ID NO: 7460 - DNA, 338 bp, Glycine max
  Clone ID: PAT_MRT3847_106745C.1
ggggggcccaaaaaacattttttttttcccccttttggaaaagggggggggctttttaacccaaggggctttttttggacttataccataccgccccccttaaattgcaaaattttcccaaggggcttttttaataatttaacaaaagatttttggggggggcttaaaaaacaggcccaatttggccctgattggagctttttcttttaacccccccttgtttggaccaaaaaaaaaggtgtgccttattttggaaggcaattttttttttaccaaaaaaaaaatttttaatgcagttacggggccccccttgattttttttcacctcatttttgggg

SEQ ID NO: 7461 - DNA, 256 bp, Glycine max
  Clone ID: PAT_MRT3847_106746C.1
ttcaaaaccacttgtttcttcagttccacacaacatacgagcgtgcgaaagggggttgtgctgaatcaatcggaatggtgttgggctcggttgcatttctggattatctgtgtaggggttggtcatgaatgggaggcacgctgccaatgctctagactcaccagcagattacgtcaatgctgacgacgtctgcaagatcagtggtgggtgttcaaaacttggctttggatgtaacgggtgctgactatgcacagaa

SEQ ID NO: 7462 - DNA, 358 bp, Glycine max
  Clone ID: PAT_MRT3847_106747C.1
gttgggttaccgggacctccttacaggtgatgagcttctgtctgactccttccgttacaaggaaattgagaatggaatgctgtgggaagatgaggggaagtgggttgttaaaggagcagtagatgtgaacattgatgcaaacccttctgctgagggtggaggagaatatgagggagttgatgatgcagctgttaatgctgctgacatctgtgacacatactgactactggagcaacctgcattctatcagaagcaatttgttaccttcatgaagaggtttatcaagaatttgactcccaagctcgatggcaagcagcaggagttgtttaataagcacttcgagggagcatctaaatac

SEQ ID NO: 7463 - DNA, 771 bp, Glycine max
  Clone ID: PAT_MRT3847_106748C.1
taaaggaaaactaatatgtatcaaggtaagtaccattgcattcaaggatataattgtcagccaatttcaattaaactttaattaatccattgattgaagtaattagttcctgagaaaatctccactccttgaatattttctgccattttcttattagttttgaactgaagcatgaaacaaccagatctcgtatattagttccatgacgatttaagcttcaaacaaattaggttagttaatagccagaatagaaaatcatacaatttcagttaggttaagttaaatatatataaatctcaatttttcttcgaagaaggggtgttaatgaccagtccactttttaaatcacattcatgcacttttttttttttccatcttatttttctttttattttaatcacatcatctattactttctttttttatctttattcttttctttctatctttctcttcacccattcactccaatttgaaattgttcttgtaattaattaagtttcatctcagatttataagacctaacccaaaagtactcaattgagataagtgtaatctaccttctttgttggattttaggggttcttgttgaggttgtcttcccctacttagtaatcttccttttaactcttcataaatcaatattattgagtaccaagtacgttaatgttataatggaattctttggacaatcattaccattatacaggggagaatggattactaacgagcagagttggaccatgaacgcggtaataaaggcattgacct

SEQ ID NO: 7464 - DNA, 620 bp, Glycine max
  Clone ID: PAT_MRT3847_106749C.1
cgaaagtgaaacctcaagaagaaggaactacgttggaggacgagaagatcgtgttgctgccgtggtgtgtttcaaggtttataagttggatgaagagtggggaaaatgggttgatgtgaaaaacttgggggatagagcttttgttttgggtaatagttgtagcttctctgtatcagctaaagagttaacggggtatcaagagaattgcatctacttcacggatatctttgatgttcgtgtgtacaacttagacgatcgtagtatcgtgtctattgattttgatccttgcattgacaagtccatgtgttctcattcatcctggacgagaattggacgaaactagctttgcaataatggatcatgagtttaaagttgaagacttttgtatggatccctctccatgaagaagtgcagagtgcagacacactactgagtggcatacaaatggagtattgatcttgatttgtagaaaatcactttgccctgttgtgtaattattggttcatttgctgaatgatcccgtgtcacgagttggttgagatgaaaatcttgattaactggtttgttctccatgatctccacgagttggttcaatttgtgtttctacatgttttattgct

SEQ ID NO: 7465 - DNA, 199 bp, Glycine max
  Clone ID: PAT_MRT3847_10674C.1
accttcaacctcacccttctttcaagactctttgaaaaattctaatgccccttataaaccaaccactcactcttctcatcaatatatcacctctaatttccgacctacatctctattatatttcaaatctcattttacatactccttacatcaatcactacaacaccccctcacaactcacatatatcactacaacttc

SEQ ID NO: 7466 - DNA, 456 bp, Glycine max
  Clone ID: PAT_MRT3847_106750C.1
gaaacccaacgaatgaaagggggagtttaaaaaaacaaaggaaacaaaacggagaaaggccaggaacttcggggggctaaaaaaaaaggaaaaagggggttccaaaaaaccccacaatttaaaacccaaataaaaaaaaccattttggccacgggggaaaaaaaacccaggttgggaaaaaaaagttggaaaaagagggggaaaactcaaaatttggcccaaaaaccagcctgccaagaaagaaaaacccggggggccggaaaaaaacccaacatttaggggaacaaaaatcccgtggggaaccaccccgcaagaatcatttatttttgggggcaacctggggaacctgggttcgggaagaacccttttttaaaaggtttggggggattcccaaagaaaaaggttgacaagggttcttaaaaaaaaacccaacaggggggggacactggggaaagg

SEQ ID NO: 7467 - DNA, 225 bp, Glycine max
  unsure (1)..(225): unsure at all n locations
  Clone ID: PAT_MRT3847_106751C.1
caacatacctcagttaaacgcctttatttcaaagcgacaaccccttagtgccaagcaattacggaaccggcgacttttcgacggaccagcctactagtttcaccgcagccgctccggttgaaaacaaataataaactcggtcgctcgagcagttctgtcgactctttcatcgtcttctgcacctctctacacgacagacaagcnccagcacgatggtgtctccag

SEQ ID NO: 7468 - DNA, 484 bp, Glycine max
  Clone ID: PAT_MRT3847_106752C.1
tttgagtgaaggttttttttttttttttttatcttattttttttttttttttttttcttggcacaaaaataaattacttgaggacttgcacccttatcattggggtacatataaaccgcagctagaaggattgattttacaaagaagggccctccccaaagggggggagaaagggtgcctgtaaaaaaaaccctaaaaaaaaggccttaggggggggcaagggggctccaccacataactttggggggcaataggagcgatcggcataaaccaggaaatctgggacactggctgttgaacatgctgcaccttatgagagatatgacaaaatctgggggggggaaaaactggaatatgctctgggcattaatatagtatggaaacaacaatgacttgaacttttttaggtcacaaaatggccataccatgtgtcccaaaaagacgaacagcacaagtcttcgggggggggggtagcattttataa

SEQ ID NO: 7469 - DNA, 314 bp, Glycine max
  Clone ID: PAT_MRT3847_106753C.1
gcagcgctgattgggcacgcagcagtggtctattcatgtgactcagaaaatgcctcgacctactgcctgcaaattcccaaacaacacgcttgcgatcgccacactttgttaaacaacggtctctaatgagaggaggaagtactagatattagcatttgccagaaagaaatagttattggttgacaatctcacacactcatacgaatcataatcatggtggtctagacggaccctcttaaatgtgggaatggctcacttccatttcggtgtacggactgccctgttctaatttagaaatcaattagggcctgatt

SEQ ID NO: 7470 - DNA, 268 bp, Glycine max
  Clone ID: PAT_MRT3847_106754C.1
ttgtttacattatattcaataagtgatgagattggattggatcggaaggtgaggaacatatatacatcagggatcgctaaggacggtagttccagaaggcgggctatactgctgagacatattgctgcgtcggaaatggaaagggtggaggtgagaataagtagacgcacacctgcacgtgggtgtaggcaagggagctcttgactgggcaaaacatgttgattatgtaaggcttacggacctgattgctgacgtggacatgctgaat

SEQ ID NO: 7471 - DNA, 435 bp, Glycine max
  Clone ID: PAT_MRT3847_106755C.1
atcgatgggtgaacagacataaaaaatactcatacagaaaaaaggaaagaatattataatcgtaagatttccaaaactaaatttttctctcattctaatttttctctcctttccgttaccagagataattcatagcgacaataagtgggaaggtggcggaaacaacactggtcaaaagggtggtggtgggaataaccagccccagggttataatcaacaagggttgaacccccaacagcagcttcttcagcatctgcaacagcttcagcatatgaaaaggctccaagatctgaagctgcctcaattcaaggacaggagactgtccaacccgaacccgaacccgaacccgaaagcgggtgaaattattttgtctgatgaggatgatttgtctgatgatgaataataccagattgatgatgagttctacgacgactt

SEQ ID NO: 7472 - DNA, 295 bp, Glycine max
  Clone ID: PAT_MRT3847_106756C.1
caatacgacaggtcgtgatatgcctatgtttagtatgcagcttgcgatggtgtcctatgctctctctttgggacctgcttgtgtcaaatctcagggtatcattacatgacttatcccgtctccgtgtgcattctcattgcgaatcccgtggcatcttaaacttgtctggtgttgaattgcattgagattcagtgtttctgcctataaggtcacctagattcatttcaatggctgactttatttaactacatggtagattgcaccttggtttcggcatccaatctattcaacctag

SEQ ID NO: 7473 - DNA, 326 bp, Glycine max
  Clone ID: PAT_MRT3847_106757C.1
gcgacgtagctggatcctctagagcggccgtttttttttttttttttttttttttttaaccctttatcgaaaaactattataatctttggggatcgtaattttattacacccacccatctattctcttttcaaaaaattacaaaaataatattcaacctctaataaccatatactttaaaatcgcttagctttttaaaaactcaaatggttctattcaaagtttaaacctatactaaaaaaaaattccttctttctttacacttaaaatttatcactacttcccaaaaaacaagcacatggattaaaaaaaaatatatattttttt

SEQ ID NO: 7474 - DNA, 326 bp, Glycine max
  Clone ID: PAT_MRT3847_106758C.1
ctttagggagcataccctggtgagggaggtgaacttcctggccacacggttataggagacattgctgtcactaggaattcaactgctggggtaggacttatcaattcacctcccaatcatgacatgtattcaatcgtagaccttgcccagctaagtcatgatcttaagaatgccaacccagctgctgacattagtgggaagtcgatatcgaaagctggagcgggtataattgctagtgcagttgttaaaggccacgccacccatgtattgatctcaggtcatgatggaggtactggggtctccagatggactgggataaagaatgc

SEQ ID NO: 7475 - DNA, 1153 bp, Glycine max
  Clone ID: PAT_MRT3847_106759C.1
gactgcgaagacgacgtcgtggaaggcaaacaggcaaagagaacttggcttgttggagactgagctgtgtattgtgtgggttcccctggccgatagtacctaaatctcaatcgcgctttagcgacagcagagatccgatctgctctgcacctgtctaattcggctcgagcgccagagaaaggagaatatcacatcaataacacgatgatgatgatggatccgccgatgacgccgctggggcaaatgctattggaggagatcactcccgtcgtcatgctcctctcaactccttccgtcgaacaagtttccctcaagaacggtctctccttcctccagacgctaacgccgttctgctccttcaacaacatcgacgttcctgttaggaccgccagtgaccaaccttatcgccttcacaagttcaaattgcgtttgttctacgcttccgatgtgaggaagcccgatatgaaggtagctaaagagcagctgaagcaagttatcacagaggcaggggagaaagagttttctgagtcttgttcagatgtgtcggaaattaatcatgaattttcgtcgagttctgaataccaaaatacaccttcctggtttcggtttctcaataaagagcttgttcgtgtggcttccttttcagaccatgaagcatttgaccatcctgtgatatgtcttgtagctgtttcatcaaaggatgaacaacctattagcagatttgttgacctttttaataccaacaagcttccttcccttcttaatgatggtgcaatggatccaaaagtttcaaagcgttacttgttagtgcatgataatcaagatggccctgcagacaggtatgacttctcgcatttttatttccaagtcatattcctcttgtctcttgctaaaattgctatgcatatactttgtcttactcctacttatgtgaaaatcctttgtttccaaaatctgtcttcaaagctcaagtttaaagttaattgcttcccttgattcctcaatgaaaactatattatttgcaaaaagtttgcaattagggataatcttttgtatgcccctagtaagcacatcaggaagcaagagtcttgcactgtaggcctgtggacaacttcactcagcatttctctttggctgctcctaagctactaac

SEQ ID NO: 7476 - DNA, 1516 bp, Glycine max
  unsure (1)..(1516): unsure at all n locations
  Clone ID: PAT_MRT3847_10675C.1
ttnngcacaatcagaaatatgagcatgttcaattaaaaatgatattcaatatagaggcattagaatttgtctaaccattttcaaatgtattgaatttctataccaccttatgtattcacataccaacaagagtactctacattaccacatgcaccataagatcaaacgagatacaacttgatttcaaggtgcccaaaacctcataacactaggccaactaaacctatgaaaattagatttccctaaaatacagacgatgatgcaacagcgcaacaaaaaaaggacagactgcgggcgggctcaggacctctcgatcatgctgcaagaacgtgccaaccgaagagtgaggctgtctccaagcacactggcctctgtctcaacaggctcacactcatagggcttcctacaaccggggcagcgcccatcctcctcgagaatcctcttgtggcaaaagaggcaaagacgaaacccacagagacaaggcatgaaactcgtgtccgtcaaatcgagatcctcacagcaaattgggcacgaggatggggtgggagcgcgtccccaaggcaccccacgccgatcaggatttggcatactgtgctgcttagacaaattgggcaaactctgagggcgaaaggcatcatctgccctccacgctctgctattaccagagccccaaggaaacaatctaccactctcgggtttcgaattcggagaccctaaattggatccctctgaaggcgaaaccactgggggcgaatctggacaagggttttcgcgcttgtcatcggctgctagagcatcagccatagcctcccaatcatccaaacatccatcatcatcatcgtcatcgtcatcaccttcctcttcttcctccacctcggtgacgttcccggaacagcacccgccgctgctggaactgctgctgctgctgctactgctgctaccgccgctactgctgccggtgaaattcgtccccgaatcggtgccgcacaacacgcccgcagggcagttggttggagactccgaatcgctgtcgtgatggatcaatccatcgtcctcttcgcctctgcgcctcgtgttcagaggctccaccgagtgtttcacctccgctggagacggcggcgcatggccgtcatcgtccaaaccgtccttgcaccccttgctcttcaccgcaccttgagataaccattgctcgcggcgcgcatcgattttgtactgcttcaatttcgcggacctgttagtcctcttcttcttccccgggttcttggtgtttgcggcggagggaatcggtacggcggcgattgaatcggaaaccatggctgaaacgttggattcgatttcagacgataaaagattcgcaaaaaccctaatttgtgagggggatgagcggatagaaaattctagagagaggaaataagaactctagagagagagagaacaacaatggatcacggtaactcctctgatcctccttgccccccccttctgtcgtcttctcgcagccgtacggacgcgtggg

SEQ ID NO: 7477 - DNA, 408 bp, Glycine max
  Clone ID: PAT_MRT3847_106760C.1
actaatacattttatgaaagaacatgttttataggttcatattgtacaatatatgtgtgctgactgaacccattcgagcacactaacaaaagggggaaattcatgggagtattctgactattataaacagagctgacctacagggatggacccttagagcctattttagctatcctattgcaagaagccataacttaggcacaagtggcttgcccatagtgcagcaaccccttgaaattaaggaggctcattcatcccctggagtggcttcaccgctggacatgtgaagctaagtgcatgcctgacaaaactgccatattcgaacccttgtacaaacgcgacatttccagccctgttgagactaaggatgctggctattatgccagggctggccacaaaattctactt

SEQ ID NO: 7478 - DNA, 3598 bp, Glycine max
  Clone ID: PAT_MRT3847_106761C.1
ggtccggaattcccgggtcgaccgacgcgtccgcgcacgcgtccgaaaaaaagaaaaaaggagaagcatactcagcgcggcggtggaagatggtggcgacggcgatcgaggaagtgcgaaccctctggattggcgatttacagtactgggtggacgagtcctatctctctcagtgcttcgcccacaacggcgaagtggtttccattaaaatcatccgcaacaagctaacgggccagcccgagggctacggcttcgtcgagttcgtctcgcacgcctcggccgaagcctttctccgaacctacaatggagcccaaatgcccggcacggagcagaccttcaggctcaattgggcctcgttcggggactccgggcccgaccactccatcttcgtcggcgatctcgcccccgacgtcaccgattttctcctccaggaaacctttcgggcccattatccgtccgttaaaggggccaaagtcgtcaccgaccccgccactggccgctccaagggctatgggttcgttaagttcgccgatgaggcccagaggaaccgcgccatgactgaaatgaacggcgtttattgctccacgcgcccaatgcgtatcagcgcggctactcctaagaagaatgcttcttttcaacaccaatatgctccacctaaagcaatgtatcaatttcctgcatacactgctccagtgagtactgttgcgccggagaatgatgtgaataataccactgtttgtattggtaatttggatcttaatgtgacggaggaggagcttaagcaagcctttgtgcaatttggtgatattgtgttggtcaaaatttatgcgggcaaaggatatggttatgttcaatttggaactagagcgtctgctgaagatgccattcagaggatgcaagggaaggtaataggtcagcaagtgatccaaatttcttggggcagtaccttgacagctagacagtggtttggctgtttggtcgttgaaagatgtttggaagataagtctagactctacttgacaatcatgagattgatgcctatgaaggatgtacccggtggctggggtgcacagatggatccaaaaaaaaggaggctgaagcataatcagcgcggcggtgtaagatggtagcaacggcgattgaggaagtgcgaatcctctgcatgggcgatgtacattattgcgtcgacgagtcataagttgctgagcccgtcgcccagagaggcgaagtggttgccgtccaaatcatccacaacgcaatggctggccaacacgagcgactacggctccaaggagttcgtcttggaatgcctcccctgcagcctctcggggaaccgtctctgggagcccgaaatgcccgccatctgcagaaggttgctcgcaatcgggatatactagtggactctgcagcccatgtgtctatctctgttcgaattcgtcctcgtgtcgtaaatcttgtccataccccagatcctctacggacccaaaatccccccccgtcaacggtcctgcccagtgaaaaagcaccccttccgtgtatgggaccgcaggaaggatttaacccctgcacactcccgctgatgagaggcccaccgcttataaggatccctttggctactcctctaacctctacgcacgcactccccgtccgatagcgacgacaaatttgtcaccaaccccaaaaagggcctactaaggggatggacatggttataaggcttatgcttatagtgatacgcacgatcccacgatttatatgaatggtgcatattccggctatgcacaataccctcaacaggttgaaggtgctcaagacatatcagttgtgtctttgcctatcatggaacaaagggaggaattgtatgatccactggcaatgcctgatgttgataaattaaatgctgcatacctttcaatacatggaagtgccattttagggcggtccctttggcagaaaacctgttcgtaatccttacagcaagcctaggatctaattgtattgcctggtcaattatgtgcattacatgacaatattctgcatagatttaaattcttgttaatacatactggggtggacccctggacccttgtccttggactccctactatggatatggacagggttatgaagcatatgcttatggtgctactcaagatccctccatttatacttatggtgcatatgctggttatgcacaatactgtttgtttcaataaggtgctcaagataagtggaaaagcacgttaattaatgaataagtttttattttatgatgaaatactgaattcgataaattaaatgctgcatatctttcaatacaggcaaacgcgtgggaaaaaaaaggccaatttagatgtgttcgtattctccactccaatagcaacatcaattccaattctgatttggttcggaaagaagtgaagtcataagtcatctctcctctcttgtaaacatggcagccgaaacggaaccaaagaagatcataattgataccgaccctggcatcgatgatgctatggcaatattccttgctctacaatcacccgaggttgaagttattggactcacaaccatctttggaaatgtgtacaccactctggcaaccagaaatgccttgcatttgttggaggttgctgggagaacggatataccggtggcagaaggatctcatgtaacttcaactaatggaacaaaactccgtgttgcagattttgtccatggtgtagatggacttggcaaccagaattttcctccaccaaaggggaagcccattgaagaatcagctgcttcttttttggttcatcaagcaaaagttaaccctggcaaagtcactgtggtcgcattgggcccgcttacaaatattgccttggctatacagctggatccggaatttgctaagaacattgggcagattctgattcttggtggtgcttttgcagtaaatggcaatgtgaatccagctgctatttggtgatccagaggctgcagatgttgtatttacaagtggggcagatgtacttgcagtggggataaatgttacccaccaagacgtactgactgaatctgatcgagaaaaattggcaagctcaaatggaaaatttgtgcaatacttgaacaaaatcttggatgtatatttctcttaccatcgggaggcatacaatgtcaaaggggtttaccttcatgacccaactgtggttcttgcagctgttgatccttcacttgtaacttgcatagagggtattgtcagagtccaaacgagtggcattacaaggggaatcacaatactctacaacaaacaaaaaaggtttgctgaaatcaatgaatggtccaataagccaaccgtaaaggtagctgtgacagttgatgctcctagagttatgaaattggtaatggatcgtcttgtggactcttgaagtagctatgaagcattcaaaaaattcttgttatatttgtgttttaaattttaaagcacttgagctctactttgcatttcatttcaatttcagtgagaaaataaaaattgtgttgcttcctttgtcttcattaattaaattttcattcgatttccagttataatatattgaatggcattcttatt

SEQ ID NO: 7479 - DNA, 303 bp, Glycine max
  Clone ID: PAT_MRT3847_106762C.1
gaccctatgcccgggccggagcacggggacctgccaccagcctatctacggaccatagaacccaccatttgtagagcccaacaccgacataagactggatgcacatgttatcaactatgacacactattggtcggtaccgcactaacatttggtggaatggctacttccaaagactcagcagaggcttgtttcgaagctcgtttctcttgcacagggcatgacagactagggcgttacccatgctaccctggggaacttcggatggaccatactagcgccgctagcttcaaagataacgccgt

SEQ ID NO: 7480 - DNA, 1662 bp, Glycine max
  Clone ID: PAT_MRT3847_106763C.1
gggagcgggtgcggccgagtctcctgcttgcgccgcttggctttttccctcccttccagcggtgtttcttttgggttcacctctaccccttgctgatgtttattttatttttgttaaataaaacttcagtttcgattctaaattgttgccggctccagcaacctctgccaatctttaatgggtgtgattgatttctacaacactggtgctttgtgctgggttaagtccaacgccaatctgaagcagcaagtgggtttggcaccaagacccatttgttcatttgaggggaataatcagaggaagtttgtggcaatggcttctaccgttcctgtggagcaagtcaacaatggccccctgcaggtgacaggtgactccttcatcagagagcatctgaggaagttggctccttatcagcccattttgccctttgaggttttatcagctcgccttggacgtaagcctgaggatatcgtgaagttagatgctaatgaaaatccttatggtccccctccagaggtcatggaagccctaggatcaatgcaattcccatatgtctatcctgacccagagagccgcagattgcgcgcagctcttgcccatgattcaggccttgaagctgaatatattcttgcagggtgtggtgcagatgagcttattgatttgatcatgcgttgtgtgctggatcctggagacaagattgtggactgccctccgaccttcacaatgtatgaatttgatgctgcggttaatggagcacttgttatcaaagttccaaggaggccagatttcagcttgaatgttgaacaaattgctgaagttgttaaacaagagaagcccaaatgcatatttttaacatctccaaataatccagatggaagtataattgatgacgaagttctcttaaaaatactcgagcttcctatattggtgatactggatgaagcatacattgagttttcagcaattgaatcaaggatgagttgggtgaagaaacatgataatttgattgttcttcggacatttagcaaaagagctggtttagctggacttcgagtgggatatggagcttttcctttgagtataattgagtatctttggagagcaaagcagccgtataatgtatctgttgctgctgaaatttctgcatgtgcagcattgcaaaatcctacctatctagagaatgtaaaaaatgctttgttgaaagaaagagggagactttatgaccttttgaaagaagttccattcctccggccatttccaagccattctaacttcattctttgtgaggttacatcaggaaaggatgcaaagaagctaaaggaggacctagcacaaatgggtgtgatgattcgtcactatgacaagaaagagctgaaagggtacgttcgtgtgactgttgggaagcctgaacaaacagatacacttatgaagtgcctcaagagactctcgtaggaggaaaatttgatgtaataaatattgtaacacgtcatgctaaactcctcttagctaatctttatatagagccgtcaaaattagaagaaaatatgttgattttggcaagggatgtggatgtagctttatatattattgacctaaatctaccatgataaatattgtgttttgcaatttcttgaagttgcatcaatttgtttgtatgcttgt

SEQ ID NO: 7481 - DNA, 311 bp, Glycine max
  Clone ID: PAT_MRT3847_106764C.1
cttcctacattctcaacacatctactctctctcacgactaatacatgccagtagtgatcacataaatgtgtgggagaagataattagactccttcaggaacccaatttcagaaactgctgatctaaacactcaaatctgcgtccatgttccagtcctctcaaaggatcaccattttcacggctctcttatcttcttgtctctacggcaactgaaagcagtcgacatgcgtcacccaagacgattaccctgaatagtacattcgcagtagcaaccttcagcagcttccggatcactgccggtgcatcacaca

SEQ ID NO: 7482 - DNA, 379 bp, Glycine max
  Clone ID: PAT_MRT3847_106765C.1
agcacgggatgggggtcgagagaaaacgaagaacatcactaaccttgttctttcatccaatccaaccatgcctatgggctgctttcaaggaagtatggggagattacaattactactttcaattcaatgtttgagccatttttcgcatataggtaaattatcaataacagagattacttttccaatgtcaacatcacctacttctaatgccttcaatgttacataaacagatgtgctgactatatatttctcatccaattgactatgactatcttgttatttccactgcccaatcccatccttttcccaaaattatgactcaatgacttaattttttcaaaaaatacaatctttttatataatctgcttaatccatttc

SEQ ID NO: 7483 - DNA, 251 bp, Glycine max
  Clone ID: PAT_MRT3847_106766C.1
gtaaccttcatggactacttaataggaacattggaaagacaactaaagctacttcatagtttaggagcaagacaactggtggtttttgggttgggtccaatgggttgcattcctcttcaaagggtgctgactacaactgggaattgtcgagaaaaggcaaacaagctggctctttccttcaacaaagctgcaagcaagttaattgatgacttggcggagaattttcctgactcaagctataaatttggaga

SEQ ID NO: 7484 - DNA, 273 bp, Glycine max
  Clone ID: PAT_MRT3847_106767C.1
atgggggacccaaaaaaaaaaaaaaaaaaaaaaaaaggggtcaaaaacaaaattggtggccacaaaggggggaaaacattagggaaaaagggggaaaacccaaggggaccgaaaaagggaccaaaaaaatggaatgcaggggggcctccacaaaggccaggggcaaaggtcggggcataagcccaaaccttgggggaaaacggaacagaaagggggtcaaaaggggtcttaaaagggcccttgccaaggaaaaaagcccgaaaaatgaaacaa

SEQ ID NO: 7485 - DNA, 407 bp, Glycine max
  Clone ID: PAT_MRT3847_106768C.1
ctgttgtaatcatttccttgatgcttcttctcaagtttgaatcttgaataccgaaaaaaaaattatggggtcaaagtttccgatgacccagttggggacatcgcccgggtatatgatttctccccacagagatttttgtgtgtacagcaagtattccagaagaatatcctcggagcaaaagttcccatttaagttcgtggcgcagtctttagggcataaatggaagctaaatgacataagtactagttctattcaagaaagattgaatgtattgatgtcgaggacccaaaatttttggaatgaagttacttttccacttgcaaaacctggtcaaagtaggaagcctgatactgaaaatgattgtggatttcaagttatggaagacatattcatgatagagcagacaa

SEQ ID NO: 7486 - DNA, 283 bp, Glycine max
  Clone ID: PAT_MRT3847_106769C.1
gacatgtcaagttcatgggtcataccttttgcatatgtcatacttggcgaatgctcctactgcctggtggagatcttggggacaggaggcacaattcagggttggcggaatgactcactgactgtggttttataagataataagctctgacctctttgctttttttgatatcatagagcaggtttttggggtctcagaatcagactttgttatatctgtaaaggtagcagaaagaaatcgttttccataggtgttaattataagttatggagtttggaaactc

SEQ ID NO: 7487 - DNA, 715 bp, Glycine max
  unsure (1)..(715): unsure at all n locations
  Clone ID: PAT_MRT3847_10676C.1
ggccggnaattcccgggctcgacccacgcgtccggttgttctctctctctctagagttcttatttcctctctctagaattttctatccgttcatccccctcacaaattagggtttttgcgaatcttttattgtctgaaatcgaatccaacgtttcagccatggtttccgattcaatcgccgccgtgccgattccctccgccgcaaacaccaggaacccggggaagaagaagagggttcgatttttttcaattcgatttcgattttaatttttctttcttttacatgcattccgttctccgttcttattagtctcatcgtaatcttgtgcgtgttacagaccaacaggtccgcgaaattgaagcagtacaaaatcgatgcgcgccgcgagcaatggttatctcaaggtacgcgatgttcgcactattgttttcgttgatccattcattcgctgattccgttccgttttctgattcgtgtcggtgagtttcaggtgcggtgaagagcaaggggtacaaggacggtttggacgatgacggccatgcgccgccgtctcagcggaggtgaaacactccgtggagcctctgaacacgaggcgcagaggcgaaaaggacgatggattgatccatcacgacagcgattcggagtctccaaccaactgccctgcggggcgtgttgtgcggcaccgaattcggggacgaattttcaccggcagca

SEQ ID NO: 7488 - DNA, 211 bp, Glycine max
  Clone ID: PAT_MRT3847_106770C.1
gggggttaggtaaatagcccaaaagaaccggacacaattgacataaacactagttcgacagggcgcaagttgccccaaactttctgatttaattcaaaaaagacgtaataatgcggttttaaaacaaaaacattaacaaaaagggctgacttttaaataacggtggcatgaaaagagaatttaaaggaactggtcctccaccaaagaaaaa

SEQ ID NO: 7489 - DNA, 406 bp, Glycine max
  Clone ID: PAT_MRT3847_106771C.1
tgtcctggcattgctatggtgctgctatcatcctaaacaacgaccgtggttgtcatgatcactgaatcttatggttggtacctttcattggtgctgcacttgcagcactctaccaccaggtcgtaatcatggccattcctttcaagaccaagatgatgcaatcaaaccgttcatgcttaatcaagttgagaacaacaaataaaatcaaaacaatgtttctaggattattgttcatttcatcaagatgatctgtatatatcaatgtttttcaattttaatttaaaggctttggcttttgtctgcaaagatgtaaaactatgattattatgatggtgcatagtgatgagtcatgggccactgttatcctctgattttaagatggaagaggcccaactaacgagttatt

SEQ ID NO: 7490 - DNA, 235 bp, Glycine max
  Clone ID: PAT_MRT3847_106772C.1
gactaacagggatataaagctgcagcgattcaccatctctatcaggatactcaatagcacctaattcctcacagcctcctcggttccatcttccgtggcactttctgagtctcattcatcctcgtcttcctcttcatgttcatatacttctaccctcactctaaatttcaactcggatggtcaccttgattcgcaatccaatttccgctacgcttcatcctccttcgcttcctga

SEQ ID NO: 7491 - DNA, 343 bp, Glycine max
  Clone ID: PAT_MRT3847_106773C.1
ttttgatttgctttgcttttgcataaacgaatataatggttggaatacgaagttgggggaccaaagttgcacactcgaatagcgcgcagcctcattacaataaacttgacgtcccatgagtccttcaacaagctagatggttgatgtggaacgctttctctgtgcataagaatcatctaacctatgccaccatgtggacaaaactttttccatcatgtggagaaccaatgatactacgggagatgttcactaacatatttcgggcttcacctatggtgattcaagcctgctaacaagaggaccgtgcatgtcccaaccaaaggggtacaccttaccctccaaa

SEQ ID NO: 7492 - DNA, 597 bp, Glycine max
  Clone ID: PAT_MRT3847_106774C.1
tcgcctacgcgtccggtgaatgcctgaggaagaggacaattacaatggctgctgtttctttaaggctcctttcctttctttgttggctgtatgtcatcataatatcacaagccagtgcccagacatgtgataacagcagaggcaactacacaataaacagcacctatcacaacaacctcaacactctcttatccaatttctcttcccacacagaaatcaactatggtttctacaatttctcctatggccaagaaccagacaaagtatacaccattgggctctgcagaggcgatcaaaaccagaatcagtgcctcaaatgcctaaacgaatcgagagtgtctctggcagataaatgtccaaaccagaaagaggcaattgattggagaggagagtgcatgctgcgctactctaaccggtccatatttgggctcatggaaaataatcctaaggtgctactcgtgagacaagagaatgtaacaggttcattggatgaattcactgaggtgctggggaacttgatgaggaatctatcaagcacagctgcattaggtgactctcgtcgtaagtatgctacaagaagcatgcctacttcaaatt

SEQ ID NO: 7493 - DNA, 393 bp, Glycine max
  Clone ID: PAT_MRT3847_106775C.1
ggagagatcgagttatataagaatggcatgcatagagagagcatctccagcactgaagcaaatactgctcaaactttgctggtaataagaggttatatatgaaaattaacttttaggaaacactgccatgtttgctaggtcttatctttttattatatatgttggttaaagtttttctaatatgcagcacatggttttgttgtttttgtatgtgtctgtttttgttcttttcttttctttggttagtttttgttgaagggaaagtgcaaaagataaagaatgaagcaatttcattattgaaaatagttttagtaaaggaattatataatatactaatgtttgtttgtatttggaaaaatatgcatttaaacaaaaatttggtcagcatgtgac

SEQ ID NO: 7494 - DNA, 237 bp, Glycine max
  Clone ID: PAT_MRT3847_106776C.1
cactctttgatatacttatcctatttatttgcaagaacttgcaaatttttaggctttagggtggaagacaagctaatttaccaaattttgagcaatttgcagttttccagcaccaccacctagaagacaacaaattcatgtgcacaatgaggatatgagaaggcttagagagattttccttcagccacctcaaagatccacattccaaataaacacacaagctcccccaccggtaga

SEQ ID NO: 7495 - DNA, 392 bp, Glycine max
  Clone ID: PAT_MRT3847_106777C.1
ctcattcaacccatttttttacaccaacatttttacaaacatcatcacattaatcatggacgcgtttttttataatatgacaggatctcattatattctatatttaataaatataattatgcataatagcattcaataaatctagaacttgcattcttcattatttgcatctatctgaaaacctattatcttcataaaagcaatattttttttcacaatctatatatttttcgacagaatttctaactttttaaaacttattaacaattccagaatactaattataaatactttatattctattatttatattaaaaaattattttacttcttattaacttattaactattacaacatatctccttctttgtatacctttcttttaaacatt

SEQ ID NO: 7496 - DNA, 436 bp, Glycine max
  Clone ID: PAT_MRT3847_106778C.1
ttgttttttttttttttttttttttttttttttttttttttttagaacccaatattcatttttattggtatttttttatcaaatcaaagggcataccagtttccgaacccatcccgcttatagactaatggcccgaataaaaagccgatctggcaactgaaatctaaaaatcgccccaattaaaaaaaaaaaaagaaggcccaacccgaggttggggttaattaattggaataaaaaaagaagccccccccgggtggggggggggttttggaagaatgagccgagcattcaatcctctggggggtctgttattggaactcatcccccctccgtcccgattggggaggggccaaagagagaggggaacctttgttttccccaaacagggggggtttatcgaatacctggggggttggggggcccccgccgaggggga

SEQ ID NO: 7497 - DNA, 136 bp, Glycine max
  Clone ID: PAT_MRT3847_106779C.1
tttttctcacccttgaatggacattaccatggatcttgttcttgatcttatacacaaggacctacttgtgctccccatggtgttgttcttctttgaggtcaccattgagctcagcatggtgatgtcctttgtgctc

SEQ ID NO: 7498 - DNA, 141 bp, Glycine max
  Clone ID: PAT_MRT3847_10677C.1
aggaagcaaatgacgctcgggaattacgtttatgttaattgcaataaataaagggggcggccacaacaaaaggtgtttgtttttaaaggctacaggttgatcctttgagagacaattcctgataaagaagaactatatggg

SEQ ID NO: 7499 - DNA, 349 bp, Glycine max
  Clone ID: PAT_MRT3847_106780C.1
ggactaaccctagttcattgggctgcatcttattcgcttaaaccctattcgatagcctttccacatatttactgcttctttcatacaaatccaaaaccagacggaattcacaaaaaacgttaccatgtcggacgatgagagagaggagatggaatttgatctcacttctccggaagttgtcactatgtacaagagcgccgctgagattgttaacaaggccttgcacttagttatttctgaatgcaaaccaaagacattgattgttgacctttgcgagaaatgagattcgtatattatagagcaaactggtaacatgtacaagaatgtgaataggaagattgagagaggt

SEQ ID NO: 7500 - DNA, 401 bp, Glycine max
  Clone ID: PAT_MRT3847_106781C.1
aatagcaattcattttcttttaagaatattaataatgcacactgaacaactatctcactacatgcgcgtaaaccaccgtcggaaaggagacctactctattgctgtctcttactcacacgtgctggggaaaatgatcacagtcaaggacaacctaaacaggggatgaacgctgagactgactcagcgtcagcaatgcgcctaagtacgcgtggaaatagtcccgatctacattcgcctcttcaaggtacttatacctgacatagagacataccaggtcacttctagcgaccacaatatgctggagacgatcacccatacagtgcagatgacgcatggtaaaacatgagctgtcaagagtctcaacaccactgggcgactaacaataagggctagccttgcg

SEQ ID NO: 7501 - DNA, 407 bp, Glycine max
  unsure (1)..(407): unsure at all n locations
  Clone ID: PAT_MRT3847_106782C.1
gaaattgataaataacacaaatttgtctttacgaaaatcataaaagctatcaggtttttggtttcaaaataatgatattggaatgagatgagagcattattaatgataaaaccttgtatccaagatacattggaggaagagtaagagagcgatgagatgagagtgatagtgcctctacaaggagttgtccaaggcacagggggtcttttctggggttctgtcattccttgtgctctattctactttcttcagctctacttcaaaaccaagacacctcaccaccctgcaccttcccaaaacaaccacaaggacgatgactccaccacctttcaccggtctctctcttccaatcacaggcacttcactaccactggcttcggttacgtgtctnctcgtgccaattccat

SEQ ID NO: 7502 - DNA, 277 bp, Glycine max
  Clone ID: PAT_MRT3847_106783C.1
tacgatgtgtcatgggctcaatttcacaactgcagtattttactgccatatagtccgtgaagcagcagcttacatggctccattggtggctggtgatggaactcacactcaggcacttgctgcttgcctctcagatacttcttgaatgaatcatcacatgcttgatgaactcatgggagtagatcctggaactaaccctgtttgccgattccttggtagcaaggccattttatggtacgctagttatactgtggagcctgcctatcagactaacgtt

SEQ ID NO: 7503 - DNA, 603 bp, Glycine max
  Clone ID: PAT_MRT3847_106784C.1
gtcctttatattgcatgtgcaaagtggttcaagagggactgttggaagggatccaccctggcatgtgatcctcagtgtagctgtcttcattttcttctaccgtcgagtgattgatccacttgttggaagacttaaaaagaaaagttccaagggacttactgagcttcagagaatgggaattgggcttgttatagctgtaatggcaatggtttcagctggaatagttgaatgctacagacttaagtatgcagactcagtatgcccccactgcagtggcacaagctctttaagcatcttttggcaaattcctcagtacacacttattggagcttcagaggttttcatgtatgtaggccagttagagttcttcaatgctcagacgccagatggcttaaagagcttcggaagtgccctttgcatgacgtccatatctcttgggaactacgtaagtagcttacttgttagtatagttatgaagatctccaccgaggatcacatgccagggtggatccctggaaacttaaatagagggcacctagatagggtttatttcctcttatctatcttgacatcaatagactttgggcctttttatttgcatgt

SEQ ID NO: 7504 - DNA, 548 bp, Glycine max
  Clone ID: PAT_MRT3847_106785C.1
ggccggcggttcttgaaaccctttcttagagtgtttaaagaccttgaatgcacgcaattgtatcctgtaaagatgttaacagtgtgcagttttgtgctggtttaatatcttttactttatcaactatattgaagttttgaagagcataattgcaacagttgtcaggtgatataaatgaggaagtggatagtcataaccggatgctggatcgtatgggaaacgatatggattcttcgagaggagtcctctcaggcactatggataaattcaaaatggtatttgagacaaaatccagccgaagaatgttttcacttgtagcatcctttgtcgtgctttttcttataatatactatctgactaggtaattggtctttcacgcacttgtcagctttatgttagatcgaaaaggaggctactcgcactattcctgtaattagcgttacttgtaagattttccttatgtttgtataaagactttgctgtttcgtttaatccaacgagtaatgtccatatccagtttgtacaagaaaataaaaaccagtttgtgc

SEQ ID NO: 7505 - DNA, 365 bp, Glycine max
  unsure (1)..(365): unsure at all n locations
  Clone ID: PAT_MRT3847_106786C.1
accccgntcgagagctccttttcgggccgccttttttttttttctggtgaacgatttnagacccccgnttggatgaaattcacattgaagcctctactgggtcctactcggtaaaactaatttccccaagagttgctttgcctccccttttcttattactgtgcttttcaagaggggcgtggctcttgggataagccctaccctttccgctcgttactaaaacagggtctctcattgttattctacaaaaccgccatacaccctcgtttaccattggctttaaaacaaccattctacaatacctatacctaccggtgggcaatagcgcatgattggtaaactccccttgccgctcctagtgaaaa

SEQ ID NO: 7506 - DNA, 664 bp, Glycine max
  Clone ID: PAT_MRT3847_106787C.1
ccagcgtccgtgagtttttttttttttattatttatttcaacagaggaaacgcgatctagaacttgccaaacggtgttggaatttgtgatctggtgaatcatgaatgctaggagagatggtcgtaacaacagagttgctctttttgatggtattgaggagggtggcatcagagcatcgtctctttactcctcaacttcttcccatgaaattgatgaacatgataatgaacaagcattggatggattgcaagatagagttaatctgctgaaaagattgtcaggtgatataaatgaggaagtggatagtcataaccggatgctggatcgtatgggaaacgatatggattcttcgagaggagtcctctcaggcactatggataaattcaaaatggtatttgagacaaaatccagccgaagaatgttttcacttgtagcatcctttgtcgtgctttttcttataatatactatctgactaggtaattggtctttcacgcacttgtcagctttatgttagatcgaaaaggaggctactcgcactattcctgtaattagcgttacttgtaagattttccttatgtttgtataaagactttgctgtttcgtttaatccaacgagtaatgtccatatccagtttgtacaagaaaataaaaaccagtttgtgc

SEQ ID NO: 7507 - DNA, 1480 bp, Glycine max
  Clone ID: PAT_MRT3847_106788C.1
tgttttcactgaggttttcttttttttattatttatttcaacagaggttcgcgtaccttctcgcatctttctcttcttcctaatcctcttcctttcatcttcagatctggatttttttcatttattttcttacgattttcctataatcaatcgtgattattttttgttggggttcgtatcgtatataaacctctgcttcactcttctccttcgacttctcttttttacactaagtttttatttcaacagctcgcatctttctcttcttcctaatcctcttcctttcatcttcagatctggatttttttcatttattttcttacgattttcctataatcaatcgtgattattttttgttgggataggaaacgcgatctagaacttgccaaacggtgttggaatttgtgatctggtgaatcatgaatgctaggagagatggtcgtaacaacagagttgctctttttgatggtattgaggagggtggcatcagagcatcgtctctttactcctcaacttcttcccatgaaattgatgaacatgataatgaacaagcattggatggattgcaagatagagttaatctgctgaaaagattgtcaggtgatataaatgaggaagtggatagtcataaccgtatgctggatcgtatgggaaacatatggattattcgagaggagtcctctcggcacttggataaattcaaaatggtatttgagacaaaatccagccgaagaatgttttcacaatcaaagttccgcttccctccgcagagactggacgatctcgcgagccatgaatgctagacgagacaatcgtaacaatagagtttccctttttgatggtattgaggagggtggcatcagagcatcatctgtttactcctcttctcatgaaattgatgaacatgataatgagcaggcattggatggattgcaagatagagtcaatctgctgaaaagattatcaggtgatataaatgaggaggtggatagccataaccgcatgctggatcgaatggggaatgatatggattcatcaagaggggtcctttcgggcactatggacaaatttaaaatggtattcgagaccaaatccaaccagagaatgttcacgcttgtagcatcctttgttgtgctctttcttataatatactacctcactaggtaatttgatctttcattcaactgccagctttatgttaggtccaagaggacgctatttcctctattactgtaattaatgctactacctctggctctgtaagataactgttctgtataaaggtttgatgttttaaacaggtattgaatccaacgagtaatgtccatatccgatttgtacaccccaaaaacaaaatccaggttgtttatattttctctttgatttagattatgtatgcttcatctattctgtagaagattcgtactcctcatcctaatagccattttcgatggactgattaaacgaactcataaccatt

SEQ ID NO: 7508 - DNA, 683 bp, Glycine max
  Clone ID: PAT_MRT3847_106789C.1
ccgagccctcagggtcttgctcgtgtgtgctatatcaaggcccttaaaatccagcacacccgagcccatcagggtcttgctcgtgttcattttctaaaaaatgataaggctgccgcttacaaggaaatgaccaaccttattgagaaggcaagaaacaatgcatcagcatatgagaagaggtctgagtatggtgatcgtgaaatcacaaaggcagatctggagatggtgactagattagatccacttcgggtgtatccttacagatatcgagcagcagttctgatggacagccataaggaagaggaagccattgcggaactctctagagcaattgcattcaaagctgatttgcacctcttgcatctacgtgcagcattccatgaacacaagggggatgttttaggtgcactaagagactgtcgtgctgctctctcagtggatccattccatcaaaaaatgttagaacttcactgtcgtgtcaatagccacgagccatgagtcaagaccatgaattctgccaaatgaaaacattaacggtcaccaaaagtgaatttgtaaatgaaaagtatagttaaataagatttaactatccgaagactctatttttaggggtggccgaaattttaacatttatacattcctttttttatatttgctaaatacacagctccatatctcacccc

SEQ ID NO: 7509 - DNA, 612 bp, Glycine max
  Clone ID: PAT_MRT3847_10678C.1
ggggtcgagactttctctactcctccacgtaacaccattaaaccttaccacacaattatcaaagttgttgatgagcgaaaatcatcaaagcaatccaaaagttcaccttcccacatcctcaaaaccccaccttgttgttcgtcatccccaccccaagctttccccaactctcgtatacaccttgttgttcctctcacatccacccccaattttgcgatcccaaacccccactgccatttccctcaaaccctaaccttaaacctattgaagatgcagatccacgaacctgtgtgacggccaaggattgcaaaggaaaggatggaaaactccatatctgtaattcgttgcccgttgcgcttcgcgaacgcccatgctgatgagatctggatcgataccgccaccgacgagatctgaatcgaccccccccaacaacgagattgggggtttttggctttgaccctagacctagatttattatgaatgtgttttgtgtttttaataatttttttattttttttgttggttcaagttgaaactgagttttattttggatgaatttgtggtggctttatgcataggttatgcaatgaaaacaagtgggacgatgatgtt

SEQ ID NO: 7510 - DNA, 646 bp, Glycine max
  Clone ID: PAT_MRT3847_106790C.1
atgtatcaagtgagcatgaaagacttgtatatgagggctggatcttgtatgatacaggtcattgtgaggaagggcttcaaaaagctgaagagtctattagtattaaaaggtcttttgaggcctacttcctgaaggcctatgcattggccgactccagtttagattcatcatgttcttcaactgttatttctcttctggaagatgccttgaggtgtccttctgataatctgcgcaaaggtcaggccctaaacaatcttggaagtgtttatgttgattgtgggaaattggacttagcagaagattgctatataaaggctcttaaaatccagcacacccgagcgcatcagggtcttgctcgtgttcattttctcaaaaatgataaggctgctgcttacaaagaaatgaccaatcttattgagaaggcgagaaacaatgcatcagcatatgagaagaggtctgagtatggtgatcgtgatctcacgaaggcagatttggagatggtgactagattggatccacttcgggtgtatccttatagatatcgcgcagcagttttgatggacaatcataaggaagaggaagccattgcggaactctctagagcaattgcatttaaagctgatttgcacctcctgcatctacgtgc

SEQ ID NO: 7511 - DNA, 336 bp, Glycine max
  Clone ID: PAT_MRT3847_106791C.1
gtaattattttgtttttttgtaataattgtgttgcttaaaagggttaacaccaatggaagttatttaatcacctataatgctgcagaaacagaacgctttattttcttataggcaacctatctttttctgcaaacgtatggccgtgtacaaaagtaaaatattctcacactagaaaggatttaatgggtttaacggggaaacccttggtcattcaggaggggtatcggaaaatctcaaaaaaattttataaattacccaaattttgtttgaccctggcgcattttgaatggggactgcctaagaaaaatcattcaaggagggttctataaatttcc

SEQ ID NO: 7512 - DNA, 454 bp, Glycine max
  Clone ID: PAT_MRT3847_106792C.1
ttttctgtgcctcctgattatattcctgcatgtatcctttggtattcttgtcttctaggatgaaatagcactaaacactgataatcacttataattgagtatatataagcgtatagagccaacttcttgttattttttgttacggctgtgtgcatcagagtttttgatactataccctgctatattcaattttcttgttggatgcgatcgcatttgtactcaacaaaagcttcatacagtatcctcctctaagctgctctcctcagcttgacttattttaacttgggcagtgctgtgcattggattgtccttggtaccgatacggaccatgtcacacaagatgccagatggttcctgcggcatctctcaccgtcacttcctgtactctggtggaatctgcagggtcgatcctggactacattgtattgcatattacctgcctgccactgcctct

SEQ ID NO: 7513 - DNA, 311 bp, Glycine max
  unsure (1)..(311): unsure at all n locations
  Clone ID: PAT_MRT3847_106793C.1
tcgggtggagaanannnnnnnngngnagannnaanggggtgattccttaatacgaacgttaggggccggatatcttttgatcaaaagcgttgcgctcaaggactgtaaatactcgctccgaggatccaataagggctctttggctttcatattcctaattacataacttactaccctactagtgtaatgtctactgactgaatcgtgcattatattggctggtcctatagagaatcaaattatgagtcgtggaaagcgactaagattctatgtatcacgactcgcgataggatttgagtgctcattctttc

SEQ ID NO: 7514 - DNA, 185 bp, Glycine max
  Clone ID: PAT_MRT3847_106794C.1
gatcacgtacctgagaatagtacaactcatgttagaatcagctgcattcattgttgaaaataacttgacaataggaatgcagcatgtccacttttaatgtgcttctgaccattttaatagaaatagaaacacttcttacctgagttcatcttgagaattgtgtgcttttgcctaaaaaaaaaaaa

SEQ ID NO: 7515 - DNA, 305 bp, Glycine max
  Clone ID: PAT_MRT3847_106795C.1
caaataagttgtgtgtaatcaagcttaatcaattttttcatattcctatgtttatttcctacatatattggtagaaaaattatttcaaaaaaaaaaaaaaaaaaaaaaaaaaaaaaaaaaaaaaaaaaaaaaaaaaaaaaaaaaaaaaaaaaaaaaaaaaaaaaaaaataaaaaaaaaaaaaaaaaaaaaaaaaaaaaagggggggcccccaataagatgagcttttcaccccggaaataaaatcgggaccggtcccggtaggggaacaaattttccttataaagggtcttttaaaatcttgcct

SEQ ID NO: 7516 - DNA, 661 bp, Glycine max
  Clone ID: PAT_MRT3847_106797C.1
caaaaaaaatttgggggaacgggccctgttcccagcattttattcccaatataaaaatattattcaaaacattggggggccctataaattaataaaaaaatctccacccaaaaaaaaaaaaatcggttttgggggtttttaaacaactactacttggcaccgcctttaaacgttcgccaaagggacttttaaatttttaatccaaaggggagaggctttaataaaaaatatttggaacagccaaattcaaaaagggggaattgaaaactggttcgagtttcgactttttgaggacttcaatcaacccccataagcgggttttaaaaaactaagggggcgtttttttccaggaggctgtgaccccctttttcaaagacctgacggggggccgtttaacgggcccccggggaagtttgacccaaaaaggtttttgggggcccttttccccaaggtttttttggcccccggaccccgggggcaaaaaaaacaccggggggggaaaaaactactccccccccaatttttgggggctttaattttcccccgttgtggccaaaatatttttcccccccccccggggcaaaaaagggggccccgcacctttgtggtggggttaattttgggggagggggggaaggatttaaatccctcccccccttta

SEQ ID NO: 7517 - DNA, 332 bp, Glycine max
  Clone ID: PAT_MRT3847_106798C.1
gcttgcgctttttgcaaacgattggagaaaatggggtggtggacattgatactaattacagacaggattgttggttgacgatgatgacggtagcagaatgtagactgagatgctgcggaaattgttccatatgaagagccattagtgcaacatgaagaaactgtagcttactgtgcctgcgatcctgtagcggttgtggggcaagaaggtggtgcgcacaatgctactgcgatgtatgggggagatgtagcactgactacagatactaatttgggggctacttgcaacatatggtgacgggagctatcgtgtgacactatatcataccgatt

SEQ ID NO: 7518 - DNA, 166 bp, Glycine max
  Clone ID: PAT_MRT3847_106799C.1
gaatggaagcatagtcaacgcttctctgcctaaaataatattacgcgtctagagggccaaacgtattgcctttgatcctctctcatcgcattcatagtcaggtactattagttttgcactccgcggtctgtcttcatgtccctgatcagatccgcttttttacatt

SEQ ID NO: 7519 - DNA, 242 bp, Glycine max
  Clone ID: PAT_MRT3847_10679C.1
ccagtggtgattatgtgtagggtcgtcgtctcgctctggctctggctctagggtcacattgtgctcttctctagacctctctttgtactctcgctccagcgtatggacgtcgcattcactgccttccggtcaccgctgatcattctccgaggaccaggcctcgcgtctctctcagctctgatcggttccactagtgggatttccagaaggcaactgttcagttcggtatgtaatctcgctct

SEQ ID NO: 7520 - DNA, 424 bp, Glycine max
  Clone ID: PAT_MRT3847_1067C.1
tagacctagatcgcgagcggtcgaccttttatttgaattggaaatctaggatgctatgcttatcacttgcagtgcttactgaggctctcagacgatctacgtgacacacacactgattgagcgttatccctaaaatgatgtgttgcaacatatttagtacggtgtggtgacacagattgctactgaggacagagttgacagagccaattagatctgcataccttaaacaccaacttcaacatcacctaaatgcggtggtgagattatcagattcatcatctctagtctatttgatcaaatgcttaaataccgagacgatggcctatgatctgaccatggatactacagatatcatgattgcattgaccctggaggatctttcaatagctttggcacatctgcagatgacaacactcataggaac

SEQ ID NO: 7521 - DNA, 221 bp, Glycine max
  Clone ID: PAT_MRT3847_106800C.1
gacaaacacataacttgatcggatctagggaactcacttaatatagaattatatacatctaacctcacatcactccaatttacttaacaactattactttttttacaatccagagaatacatattccttcatataacagttttcttgccctattaatacacttataggaaacttttcttttatattcaccatgaaaaatggttttccaaaaaaaaacaaaa

SEQ ID NO: 7522 - DNA, 408 bp, Glycine max
  Clone ID: PAT_MRT3847_106801C.1
aatgaataaaaaattatacttgggataaaacattggggttaaagggcaaaaagaaaaaaaaggaaaaaaaacacgggaaggctgaaaaacacccaagggggaagggggagaaaaagtttttttttttttttgaaaccccacaaaaaatggaaaaagcaacctttttaaaggcaaaaaactaaaaaggggccgggaggaaaaaaacctggaaggggataaaagatcggcaaccggctaaagccctccactatgaaagccgcaaacaagcccaaggaacgcttaaccgcttcaaaagcaggggaggcaggcaaaaaggcgtttacggcaacctcccgggtttcaatccccccgggagtccccaaaaaaaccacgaaattcaggcaaacgaaggggaagaaagcccttgga

SEQ ID NO: 7523 - DNA, 968 bp, Glycine max
  Clone ID: PAT_MRT3847_106802C.1
attcgttttcgttggcggaatatagaaaagggagatcctgaatttttcccgccccattttccttcgatccaaacaatggcaccaaaatccgatagcgccgaagcgatcgtgttaaacttcgtcaacgagcaaaataggccggtgaatgcacagaacgtggcggatgcattgcaaaagttcaatctcaagaaagcggcgattcagaaagcgttggataatctggcagatggaggtcgaatttcgttcaaggagtatgggaagcagaagatataccttgcgcggcaagatcaatttcaaattcccaacactgaagagctgaatcagatgaaggaacagaatgctgagctgcaaaaacagctggaggatcagaaaaaggctactagtgaggttgaagccgaaattaagtcattgcaatcaaatttgacactggaacagatatttgaaagagaagtgaatctgagattggaggttcaagaaatggaggaaaaattgaccaagttacgtggaggtgttactctggtgaagccagaagaacgaaaggcagttgagaatatgttgtcagagatgataggtcagtggagaaagcggaaaagaatgttcaaggatttatgggataccctcactgagaactcacctaaggatcccaaagaatttaaggaggagcttggaatagaatatgatgaagatgttggggtaagtttgcagtcatacaatgacctgattcaacagggtaagaagaggcctagggggaagtgatgtatttattggaatcaacaaattaggaatacagattgtttggtgttctgacctcggtgaaaaatactgcaaattacatatagccttatgcattaagttttcacaattctgacttagtttgggtttattccctaaaattactagcctggctcatcactggagcatagtctcaatgcaatattattgttaataaaaaaaaaaaaaaaaaactc

SEQ ID NO: 7524 - DNA, 802 bp, Glycine max
  unsure (1)..(802): unsure at all n locations
  Clone ID: PAT_MRT3847_106803C.1
ggctggctagcctttggtcaaccaatcaatgaaaaaagacaactttcagagaactggctttattacttgcatctggttctttgatatccgtgagagagagagaaagaagcaaaagaaaattaacatatgtgaagttgcagaaattcaagcttctcgaacgtttactgtagcctagacatgcttctctgtgttcttacctgtgaagattccaattcagtttttttaccttcaatttttccgccattttgctctttgttcagttgttgtttttccttctgaggcttatttgtgtggcttagcagattctggctcattttgcatgtgctatttaccttcaaagttgtatgttgagtgaattcttttctgggttttctctgttgcttcatctttttgttcttttgggttgcttaaattttgaaactttttgcactttcgatttccatatgcatctggggcatcactattcactacatatttatgtttttcttctttctagatggtaatggtatcgtggggatttattcttgacaggcattgtttttgttgaattgatagcaggatgatcagagactgtgcataagaattatagctaattgtttatgcaatgaaatgcttttactattcactaaattgttgcgcttttcttctttctaggtggcaaggatattatgggttttattcttgacagacattttttatttgtgatttgttgaattgataacaggctgatcagagactgtgcacaagaatcatagctgatntgttatgcaatgaactgcttttactatttcagagacaaatc

SEQ ID NO: 7525 - DNA, 334 bp, Glycine max
  Clone ID: PAT_MRT3847_106804C.1
acccagcgtccacccagcgtccgacggatagacaaagacgtaagggaggggtggaatgaaagggacaagcaacagttcatagaggattggggcactgacataaaaactggagataaattgccttggactcaccgaacctcgctcttgtaggcatattctgattgatatccccgtactcgtctacacgggcatcgtccgtgaattccatatgcaagatttggataatggtcggtcgtacaggaagttcacgtgagagagtctggagagccttgggtaataattcgttaagttagacctggatattatgaggctacaaaccatgttattttttcct

SEQ ID NO: 7526 - DNA, 804 bp, Glycine max
  unsure (1)..(804): unsure at all n locations
  Clone ID: PAT_MRT3847_106805C.1
gcaaatcagcaaatactgtcccatgcatgctggctcgagggcggacacggcagtatgattattaccagagggttttgaatgggatattgtgaaatagtttgtcgatggtgatcgtttgcttgttcccttttgactaagcttgcacggtgattgttcatcaattagtatttgcattttcaagtcattggaggatggttggttcactgtgttatggctttggagtactttgtgagacgtaagaattaaaaggtggcagtgtgcatcgtctattctcctgtagtagtgtgagattctgactcgcaaaagtacttcaacagtctgaggctaaattttgagccgagtccttttgattttcccatccctgtttcttgtgaatgaagctctgctacctggagaaattgcatcagcctcctaaatgctgagtttgtacagtgattttagcgggagtacggaccagattcatattggatgtggatgagtgctgtataaactgtttgattcatctaagtcttgggattgcgatgcactgctgagcatatactgacatgttaccttcttggatatctgttatcatgggcagacctccagtattggcgaactgctctgttactttttctgatatcagctgatctatggcatctgtcttcccaaagtttattcttcaatgcttaagctggaaaattgttatcaaaattctttgaaaatgtttgattgtatcatgtgtaattgatcctgtttactttcacggtgaaatttgttcaccttcctatctatcatataagttttggtggcaaanaaaaaaaa

SEQ ID NO: 7527 - DNA, 485 bp, Glycine max
  Clone ID: PAT_MRT3847_106806C.1
gaacttcatggccatggccatacttgtgatcaccatgattgtgaacatctgcatacagtttgtcactggtgttatttatttgttctgggtggaacatgctgtcatcatgctcatcatgctaattttgttgatgaccatggcctcctcagccataagtcttccaaagatgaaacactactttgagctgaagtataagatgaatgaagaggcacttaaagagggttcaaaactacttggtgaggaagggaatcaaatggtcaacagactcagagatcagctcatgaaaatttggatgatggctcacacaagtagtcctcaatttgttcttggaaggtcagtgactggtactgcttctggtgccttttgtcttctcagtaccttaactttagtagaggctatgcttcgatcttacttgatgccatggtcgtttgatttttgcactggtgacactgactacaagtggtccataatcttaattctcatag

SEQ ID NO: 7528 - DNA, 690 bp, Glycine max
  unsure (1)..(690): unsure at all n locations
  Clone ID: PAT_MRT3847_106807C.1
ccacgcgtccggccaaagcaagaactccacacacaatgttatgattagccaaattacaaaccagccaatccccccaattagcatatgaataaaaccggcaagtttacaatcattttgtagcaaacaaaagattatggaaagaaattaaaccaaaatatttaacgcaaatgactaatgtactaaagttaacattatgactcacaataataatttcacaataaaaataaaaagaagaatctcacatattcattttgtttcctttgattattttttattttcacaagcataataacaataaaatatgactcaataagaaaaactcatcaaatataataataactaaaagtcaccaaattttataacattatttataatatatatatatatatatatatatatataatatgttagcaataattattggcaataggtaaatgtgattaataatacataaaatataattagcctagataataataatatataaaagggtaaatatatagtcatttttgtccgtgaatgtgtaattcgctgataaatgcgtccttgaaagatgaaaatacaaaatttaatttcccgaaagtgtaaaaaggtgcgacaaatatatcccgaccggtaacctttccgtctgtcaccattaataaatagtcttacgtgtcattggtgaaacaanatttgttactgaaatga

SEQ ID NO: 7529 - DNA, 106 bp, Glycine max
  unsure (1)..(106): unsure at all n locations
  Clone ID: PAT_MRT3847_106808C.1
taggtctagtcgacttagatggtggaagcaaaagtgaatgcaggcgtacatgatataaacaccacccntctctctgagcctattttattaacgtcacaaaatcagg

SEQ ID NO: 7530 - DNA, 277 bp, Glycine max
  Clone ID: PAT_MRT3847_106809C.1
gggcaggggaaaaaggtaacaaaacaaaaaccaaaccaaaggtatttcaaacattgtccctttgaggaccacatccaacaattcattctaacaaaataatcccctttatttaaaaaacaaatttttaccaagtaaacaaacttatcacctaggctttgcacctaaaacaaactaattaaggtacccaaccacagtgatctatttcacatcaggatatagaactcaagcctccactccaaaagaaaacccaatttcaaagttagtaagatcccccttt

SEQ ID NO: 7531 - DNA, 120 bp, Glycine max
  unsure (1)..(120): unsure at all n locations
  Clone ID: PAT_MRT3847_10680C.1
ctgatgtcctgcaagctctggaagctntanagacatgcagccttananatcctanaaaatgcttncaacttcnaaggctgaagcgaannaggttgtncatgaatnctanatangngggcc

SEQ ID NO: 7532 - DNA, 243 bp, Glycine max
  Clone ID: PAT_MRT3847_106810C.1
aagaattcgggtcgagaaaattataaaaaccgagataaacacgtcttgttttataaattgaatcacaccataattgtgtgggcatatttgaggtgcacggctttttctcttttttcccaataatcatcccaaagctctctgctttttagcagcacacatccccttcctattttaaattcctcactttagattctaccccaaattgaatcctttaatctattcgttaacccccaaataagtcct

SEQ ID NO: 7533 - DNA, 156 bp, Glycine max
  Clone ID: PAT_MRT3847_106811C.1
agatcaaaggaaaacctttttgattgcttatctaaggtttttaaagggccaagataacattatgaaaaattagaatagggtgctgccacatatgaaaccgtcatgccagatacggaaaagtgctccccccgtaggcacagattgcacttccagagt

SEQ ID NO: 7534 - DNA, 301 bp, Glycine max
  Clone ID: PAT_MRT3847_106812C.1
caacccaccttgacaccaaacattgaagttcataactcctgccactattggcatcacactcttgctcctgcgagggttgagcctcacaggcactgtcataagtttgatgatcgcaacccctattcttgttgtctacggccggatccttgtccctgatgcggatgggctgggtcctagttagctacatggctgtttgatctctgggggcagtggagtggctgccattgctgatttgacttggatttacaacgatgtgtctgggaaccagcctgcgggttatgacaccctggactatgcaaaa

SEQ ID NO: 7535 - DNA, 520 bp, Glycine max
  Clone ID: PAT_MRT3847_106813C.1
cttctttctatttatacaccaaataattatttctgttgtaatctagtacagatctatttaattgggtcatcatctgattgtggcattcatctcttggatttctatcccagcaccaactcaccaagtcatgtggattacaaggaggatatgcaagaaaattcaaggcggcacaaccgaagcaatcagaacagatttatttctttatctgaaggagttatctcatgtgctgctcaccctttgtataatgccatcgtagcaggaactaagaaaacttctttgctcgtgatttcccaaagacaagagtcatgcagaagtgacgattagtcccaagcattgacggaattttgtagggtagtggcaatttaagtgtattttcctcgactgaatttgtagatgcgtttttttttttaagatcaatttgtagatgagttaatgtgcaattccctgttccattaccttttggtatgcttttccggtatcgtatttgttgaatcttcggttcaaaatggaaagggttatt

SEQ ID NO: 7536 - DNA, 340 bp, Glycine max
  unsure (1)..(340): unsure at all n locations
  Clone ID: PAT_MRT3847_106814C.1
atagataaagaccccncnccacgacccccgagaaagaataggatacgaagccgcgacccatgcgcacacgggaaccgaacaacaacggcggcggcggaggaacgccgccgaaaagaacggaacggacggcagaacagaagtaaccgctaccggcaccgacagacacgagaagcaggaacaagaggcgacccgaacagccaccggaacaagcaccaaccagagcgcaccccagcccaacagggaagcagaggaagacccccatccccaaaccccaaacggccgggagacaacacccaaggagaccacaaacgccccaccaaaacaccaggacaggaaagga

SEQ ID NO: 7537 - DNA, 563 bp, Glycine max
  Clone ID: PAT_MRT3847_106815C.1
ggattaatactgatggtgtcaatttagagttaagcttggatgatatttcagatgatggctgcctgtcaccttgttgccaagattgtcgttctggattacaatcacctgtacatattatttcaggattaaatggtgaatcaaacaggcacataatagccagtcctgagatgaacaaatttttaacccatgagcctcctgatggctgtgaaaaagtgaacataactagagatataaagaaatggatttgttttacttcctagccaaagctcggctttcttaccgttaaccaagatttccaatgataatctagacattattacgaatcgacttggtaacactgatttggggacatcaatcaacaaattaggatagtagattgtaatcatgggatcaaaagggaaacaccaacaacactacaaaatccaactacatcaacaaatattctccgtacctatttctcattcttgtttcaccttattttgtttgtggtaacaaattggtaattcaaatcaattctctaattgtaaaggtttggttaaagttgatgattagacatttaccaa

SEQ ID NO: 7538 - DNA, 568 bp, Glycine max
  Clone ID: PAT_MRT3847_106816C.1
aaacaaaatcatccccccaacatttaaatacttatggggaacccccataattcaaaagggtccccttaaaaggcgtctacttggaaaaggtaaaagcttttttggaaaaccaaaaggggggccttttacccaaaaccccatttaaatttttaaacgccgggagaaaaaaacttcaacaggtaaacctaaaaaccggacagcctttaaaaaaactaaactggggggggagttaaacccccacccccttttataaaagggggcaattcccaaacattttcatagccaaggaaaaacaaaccccaagagcaaaaaggaaccggcaaggaaagcccaattaaaaaaaaacgggggggtccactgggtgcccaactaaacagaaaaagcccaacgaatcaatagccaaaaaaaatttttctacaatccgcccgggggggaatccacaatcgggggaaaaattttcccattaaaaaggaacgggtttttcactctgactgaattgggccaattggttgggtaaaaccctgccgggggttaaagaaaaaccacgggagggcctttggggtttttt

SEQ ID NO: 7539 - DNA, 1273 bp, Glycine max
  Clone ID: PAT_MRT3847_106817C.1
attttacagcatagtacaatctccagtagtccctcaacgaaacgcaagaactggtatatagtcatggtcggaaattggaattaacttcccagaaattaaacgaaagtatgtaccctaaaaaataacagtataaaatttgcaaagttacatttttaatttaactttagccgcggaaaaggtttttgcgttgcgttgcactagcccctgcacagtagtgtggtacgatgatttgattttgataagataggtctgtgctgtggggaaaattggaagcatcgatcggaaaatgcaatcgttatcgttgagtatgagtctgaggagtagtagcttagtgaattttcttttgctgggttcagagacgagagtgagaagaagaagaaggagtgtcatcgtagcgtgtgctttggagggagacagtggtagcagtagcacaagctcctttctctctcggacccaaacctacgcccttcttaagcaacaattgcaagtggctgctaaatctgaggattacaaggaagcagctagaattcgagactcgttgaagcaatttgaggacgaggagcctgttttgcgtctgaggagactattgaaggaagcaattgctgaagagagattccaggatgctgctagttaccgtgatgagctaaacaatattgccccacactctcttttaaaatgttgcagcgatgctacaacattgggaatcagggttcaagttaggagtgtatatatagagggcagaagtcagccttcaaaggggctatacttctttgcatatagaataagaattaccaataactcagaccaccctgttcaacttcttagaaggcattggattataactgatgctaatgggagaacggaaaatgtctggggaattggagttgttggtgaacagccattaatacttcctgggaatagttttgaatactcttcagcatgcccactgaacacaccaaatggtagaatggaaggtgattatgagatgatccatgtagaaagagtaggctcacaatcattcaatgtggccattgccccgttttctctctgtctgcttggagatgatgaaggttgtattatttaaaattgaagtgctgcatcagcttctgcaacatgtaaattattatcattctcttcgccattccaaagtattaaagcaggctacttgctttattaattaagtgtaagatatcttattattacgaataaatttgatcagcatacatttgtattttattgatatcaataaagaaatcaatatttatagttgtag

SEQ ID NO: 7540 - DNA, 255 bp, Glycine max
  Clone ID: PAT_MRT3847_106818C.1
agtgtttttttttttattacaatattttgtattttgaaaaacatggataactaaaagaaaatcagcaggttctttttagctaaatggaacaaatccctaagaatttctttttgccttgatgggtctaatatttcttttatatatatatttttttaagtaggagtgggaattattgaacagaggtgataatatgatccaacgcttgtcatctttgtccgtagaatagaaccgaaaaaatattgacccctcacaaaa

SEQ ID NO: 7541 - DNA, 316 bp, Glycine max
  unsure (1)..(316): unsure at all n locations
  Clone ID: PAT_MRT3847_106819C.1
caaaccaatggatattatgactgccttacaacttgtgctcagaaaatgtttggcttatggtggcttgtaacgtggccttcatgatggcgccaaactgattgagaatcatgctgcactactttgagttcttgctaacaaatgtaaccagcctgactctgttctactgttaagggccctttgcgcatactgcaatgattgcctgctgacagttccgactgcctaaacccttgcagaatgggctggtttgatcgagattgatacccaaggaaaagcaaggaaggttactggttgctcctgttgngatgtgaaaggattt

SEQ ID NO: 7542 - DNA, 345 bp, Glycine max
  Clone ID: PAT_MRT3847_10681C.1
cggaccggaattcccgggtcgaccacgcgtccgctctctcattttctcattaaattaactcattttttcatgaatgccaagctacaaaatgaaatcacagctacatacctacttcacatggctacatctaccattgaaattcaaccccgttccattttaatctcctttctttgggtttttagtcccctttcatataaaaaaaaatacttattttaaaatttaagaaatagtttttttaaaaacattgtaatatggtggacaataatcttatcccttaaatatcctaatagagtttaatataaatttgtgcatataaaagaatgttaatagagatcaatcctttag

SEQ ID NO: 7543 - DNA, 797 bp, Glycine max
  unsure (1)..(797): unsure at all n locations
  Clone ID: PAT_MRT3847_106820C.1
cttagctttaagcccatgaaaatttggcctatttgttcatgggctaatagctatttgagcaaaaaagagaaagaaaaaggtatgatcctctttccatctttggtaaatatagttgctagtggcaactttggctaagttcatatctaggattgttgtaccctacaagttaataacaaggtgctgaatgttggatgacacatctatctggccattaaagtaaccttcattttgtttcactcttcctaaccatgaaaagttcccaataacatctatatacattgtttctgaccaaatttagccatccaagttagcctagtcaccagtaaacgaagccttttagatcctggactaggtgtaatcctgtgaatgttcccaaccttagaacatcttggattgccagaacaccaaccacctggtgtgaatagttgttcattttccctatgtagtagttttttatcaatcacatccaagactggatcattgtgcttgaatttccgagcaaacgcggcgttgcttgcaatcatcttggttgtgtcattgatggtaaggacatgtgggtgctgttttggagggttgtcccatgaaatataatgcaagtcactgtttacaacagttttggctagttctggctcattgcatgcaactgtttgaaagtagccctcaggggaggagatgaaattagtgtagtacataagaagggtccttgggagattgtcccaaccccacacaacatattctacaaaggagtgcgataaaaccatccatgctgaaccagtnnatagtttaantgctnnngg

SEQ ID NO: 7544 - DNA, 416 bp, Glycine max
  Clone ID: PAT_MRT3847_106821C.1
gagcatgttttgtgttaatgaaatttgactcctcaaactcctctgctggatcatgatggatatagcataggataggaccatgaaaacaggaatagtgccctattttcatttggtttaagctatgccttggtgcatcggtaaggttgtagtcttgtgacctagaggtcacggattcaaaacctggaaacaagtcttcttcttacagggataagagtacccttcctagacccacttggtgggaacctcgtgcactgaatcatccttatatttttatccgtttgttcgataatgggtagataagactcgcgtcaagttgccctcactgaacttacgggtagaataaggcttctttaacatgccaagcattattgaaactgttgggatgttgtgtttgaatgaaaagctatgcttattat

SEQ ID NO: 7545 - DNA, 370 bp, Glycine max
  unsure (1)..(370): unsure at all n locations
  Clone ID: PAT_MRT3847_106822C.1
gaactctgtctgtatgacatagaagctatgtttgtcctaccactatgggccttcattcggttgctgacatagagcctacgatgaacggacttttacagtactatcgtcaggatcgtgagccataatataagtcctccgtgctgcttaatccgcctggtgggaaaagccatctatctgatgtacaaattctcgctagttcaactgcgttaaaccgtgttgataacaaaaatttgaccgatgctgctctggaagcgaggattntgattactacccttatagaaaccatatctttgagtaacgggcgcaccgccactgatttattagaagaggaacagtgactgctcccattccttgtaagggcccatgtctg

SEQ ID NO: 7546 - DNA, 543 bp, Glycine max
  Clone ID: PAT_MRT3847_106823C.1
cgggaatttgccgtactacatgtgtggagtgccgccttcttgggggggggggggggaccgaagacttaaggcacgagagggggtggtggtttagaactgagaggtaaagatagtaggactgcaaatgctacgacgccagtgagggggggcacaagcaggtaatgccgctgtcgagggagtgaaaaagcgcggctggtggaagctgtgaggggcagagcgtagagggccaaaactggtaaataaagcttatgcttaggcggtgggaaaaggccccctgagggtgcaaatacttggaccgccacaaattgtacagccaacttgcacaagaggtgcaactaaacagctagagttagtaaggctggtgcaacttagaacaggtgggctgcgctggtgtttgaggcacctaagcggctaacttaacccgcagaggggtttggggcacagtatggtgaagaaaagggcgtgtacaatgtgaagaggagttgggcccaaaacaggcttaggtatttgcgtagtaatagaggggtgcagtagcccaatagt

SEQ ID NO: 7547 - DNA, 1244 bp, Glycine max
  Clone ID: PAT_MRT3847_106824C.1
ggctcccacgcctccgctttctctctcaaaaccctaaccctaaccccaatccccagagtctggaagcctctccaatggcgtaccagacccccgatcaagattcaggttccgatccgaagaccccaacgcgcctctacaacccctacaaggatctcgaagtccccattcgcaacctctaccagctcccaacctccccggagtacctcttcgtcgaggaggcccgccgcaagcgccgatcctggggcgagaacctcaccttctacaccggctgcggctacctctccggcgctgtcggtggcgccgcctccggcctcgtcggcggcgttaaatccttcgagtccggcgacaccgccaagctccgcgtcaaccgcgtcctcaactcctccggccacgccggccgcgcctggggcaaccgcctcggcgtcatcggcctcctttacgccggcatcgagagcgggatcgaggcaacgagggacaccgacgacgtctggaacagcgtcgcggcgggactcggcaccggcgcgctgtatcgtgcagcgagaggggtgcgttcggcggcggtagcgggcgccgtcggcggcgtcgtggttggagtcgctgtcacggcgaagcaggctttgaaacgctacgtgcctatatgatgagaacaaaactttgtgtgagcgcttaatttttttcttcctttttttggggggttactatcaattttgagcgattgttaggtataagcattattataccagcatgtggcagcgttgctgttgcaaacaattggttttattattatgcatttttttttcagcttgataatggctaaccttttctaatgtaatttgtcgaaacatcttgcatcaataatcgggacggctttaatgctggatatatagtatcaagaatattgttcctctttcggtggatgcaaatggaagattgtgtaaacggtgtcacaacagatgttgtggtacatgatttgatagaagtagagttgttaggattagtttttgtgatgaaagaagcccgtattatgcttgtgttcctatgattaatgaattcaagggatttgcattttagacccctaataggatctctgatattagaccaatgcactgggttccaaggttctgtataaagtacgtatcatttggtgatttctggtagaatatctttggagagtttttattttgcaacattggatatgcttgtgttgtgaatgagctttgcatcattcaaccaaaaaaaaaaaa

SEQ ID NO: 7548 - DNA, 313 bp, Glycine max
  Clone ID: PAT_MRT3847_106825C.1
ttggaacacgcgtgcggccttgcgtccgcaaacacctgttggagtcattcactgttccgagaatccaaactcatgtgttcataatgcccttgtactaagaattgcatctcacaacaaacttttggatcagcttagtcatgatgctctatatctaccaatttatcaattcacaccattgtgccgcattctttacaaggcaccttcttgtgtccaatggggagaacatgcactgccactatctccatttcatctgttcttgaatgtaacttgaaccccaatactgacgaactgagtgatatcaaatatgtgaacc

SEQ ID NO: 7549 - DNA, 407 bp, Glycine max
  Clone ID: PAT_MRT3847_106826C.1
ggtttcattttcatgagaaataacgacaaataggagccaaacgagagagaatgagaggaagagagaccgagagacagagagactgagagtgggtgagtgacaaacagagagcatgtgggtgatcggttctgtgtccacttcggaagaagagggcatgacatctacgacacagtggacttgtcggagtggtggtggagagacagcacgagaaactcaagagacgcttgacatatctcgtctttctgctatacgcgtttccctgaagacattcgagaaaaagaattgtggtttactttcaagaaatgaggcgatgtcagggaggtttatatagctaaggacaagaatagaagtggatggagatatggttttgttcgactcaagggtgtatatcatgtgcaacaacttgg

SEQ ID NO: 7550 - DNA, 2617 bp, Glycine max
  Clone ID: PAT_MRT3847_106827C.1
caaagaagccccagactaaatagtgctaagaactctaatggtggacaagatgaatatgctgatattcaagtcccttcagatttctttgctgctagttttctctatcagaaacaccacagcagaaaagaaaacccatcacacaaaacacacatacataattcacatggacaagttcaacatgccagagagttttaacgaccatctcctctggtttgattcatcactaaaatcagtatcagactcagcagagatgctctacacatataaaaaagtagctcatggcttctctacaaggctaactacgcaagaagcagagttgctctcaaagcaacctggtgttctctccgtcatcccggaagttagatatgatcttcacacaactcgaacaccagagtttctggggttggccaaatacagcactctttcactggcctctggcaaacaaagcgatgtgattgtcggagtgctagacactggtgtgtggcctgaactaaagagcttcgacgacaccggactggggccagtacctagtagctggaaaggtgagtgtgagagaggtaagaatttcaacccatcaaactgtaataagaaacttgttggtgcaaggtttttctcgaggggctacgaggcagcctttggacccatcgacgaaaagacggaatcaaagtcaccaagggatgatgatggccacggaagtcacacctcaacaacggcagcgggttctgcagttgtaggagcaagcctctttggttttgctaatgggacagcaagaggaatggccacacaagccagagttgcaacttacaaagtgtgttggcttggagggtgctttacatcagacatagctgctggaattgacaaggccattgaagatggtgtcaacatcctttccatgtcaattgggggaggtttgatggattactacaaagacactattgcaattggaacttttgcggccactgcccatggaatactggtttccaattcagcaggaaatggtgggcctagtcaagcaactttgtctaatgtggcaccatggctaaccacagtgggtgcgggaactatagaccgtgatttccctgcctatatcacccttggaaatggaaagatatacacaggggtgtcactttacaatggcaaactcccacccaattctccactgccaattgtttatgctgcaaatgtaagcgatgaatcccaaaatctgtgcaccagaggtactttgattgctgaaaaagtagccggaaaaatcgtgatatgtgaccgaggagggaatgctagggtggaaaagggtttggtggtgaagagtgctggaggcattgggatgatactatcaaacaatgaagactatggggaagagttagttgctgactcctatctcctccctgcagcagctttgggccagaaatcaagcaatgagttaaagaagtatgttttctcatctcccaatcccacagctaagcttggatttggtggcacccaattaggggttcaaccatccccagtggtggcagctttcagctcaagagggccaaatgtgctcacaccaaaaatactcaaaccagacctgattgctccaggagtcaacatcctagctgggtggactggtgcagttggaccaactggcttgactgaagacaccagacatgtggaattcaacatcatttcaggcacttccatgtcctgcccccatgtcactggcttagctgcccttcttaagggcactcacccagaatggagccctgcagctataaggtctgccctcatgaccacagcttacagaacctacaaaaatggccaaaccataaaagatgtcgccaccgggctaccggctacgccatttgattatggggccggacacgttgatccagtggctgcgtttgatcctggtcttgtgtatgatacttccgtggatgactacttgagcttcttctgtgccttaaactacagttcctatcaaataaagcttgttgcaagaagagacttcacctgcagcaaaaggaacaattacagagtggaagatctcaattacccatcttttgctgttcctttcaacacagcttatggagtaaagggtggttctcgcaaaccagccactgtccaatatacaaggactttaacaaacgtgggtgccccggcaacgtataaagtttcggtgtcgcagtctccctcggtgaagattatggttcaaccacaaacacttagtttcgggggacttaatgagaagaagaactacacagttacgttcacgtcttcgtcaaagccttctggaacaaacagctttgcttatctggaatggtcggatgggaaacataaggttactagtcccattgctttcagctggacttagactctgatttttaaaagccctaactttgaattacctgttgcaagcaaacgtgctcgtcttcatgaataattgtatctctttgtttttattctgcttttggtgcagcaaaaggggcactgatgttatgtttctctttgctgtactcctttgaaaattagtacagaatgattgtacagaaaagaaacagggtaatggtgtacctgaataaatgacagtaagctctttcttatcccaaaaaatggaataggtagtccacttgggttattc

SEQ ID NO: 7551 - DNA, 1624 bp, Glycine max
  Clone ID: PAT_MRT3847_106828C.1
gaggcaatgaatgaagcatgaaacattggatgagcatgaggcgcatggcggtaggagcagtctcaaactccactctttttctaccttcctctcttctatcttcttctaaacctaatcccttaactatcccattctccttctatctcaccaaaacgtcaccgttttccatttctgttctcactcgccaacgccgcttcctttccgtttcttctttaaccgctgaccaccacaacctctctgatttcggagatggtgacagcgttgcaatttcaaacgaaggtttgaagatgcttctcaaagggatgacttatccagaacttgaaaaatgggttcaatcacatggatacaggcctgggcaggctatgatgttatggaagcgaatgtatggaaacaacatttgggcccatcatattgatgagttggaaggtttgaataaagatttcaagaaaatgttgaatgaaaatgccgagttcaaagcgcttactcagaaagaaattcgcacagcatctgatggaacaagaaagattttattcacattggaagatgggctggtcatagaaacagttgtcataccttgtgacagaggtaggactactgtgtgtgtttcaagtcaagttggatgtgctatgaattgtcaattttgctacactggaagaatgggtcttaggagacatcttactgctgcagaaatagtagagcaggctgtttttgccagacggctgctcactgatgaagttggttccattacaaatgttgtctttatgggcatgggggaaccacttcataacattgataatgtcattaaagctgcagatataatggtggatgagcaagggcttcagttcagtccccgcaaggtcaccatttcaaccagcgggcttgttccacagcttaaacgtttcctccatgaatcaaactgtgcattagctgttagtttgaatgcaactactgatgaggtaagaaactggatcatgcctataaatcgaaagtacaagctggagttgcttcttcagacacttcgagaggagctttgcttcaaaaagaactacaaagttctatttgagtatgtgatgcttgaaggagttaatgacagcgatggagatgcagagaggcttatcgagcttgtgaagggaattccttgcaagattaatcttatctcattcaatccacacagtggatcattcttcaaaccaaccaaagatgaaagaatgattgaattccggaatacattggctggtgcaggattggtagtcattttaagacttagtagaggtgatgatcaaatggctgcctgtggtcaattgggtaagcctggcaccattcaagctccattgcttcgtgtaccagagcaattccaaatggcaattggaagttcagcttgattctttgtggaggttctgttgcaaattgatctaggacacttgtggtggaggtagctagggatgacttcatgctgagaatgcaagacaaagagctatatttggaggatatctgtctgtttccatattgtacttttccattttacagttaatttatatttatttttataaatgtgaaggatcgagattccttgccggctaagaagtaagaaataaaaatagtttaaatgtttttattctctccc

SEQ ID NO: 7552 - DNA, 300 bp, Glycine max
  unsure (1)..(300): unsure at all n locations
  Clone ID: PAT_MRT3847_106829C.1
gagangaagagtaagaatataggnttaaataagattgtttatatanannatnagatattaannaagatangaagggnaaaaagagttnaaaagnggaaatatgtttnatnangagnaataanatngaaatnaatnaaangangngtgngtaagaagagaaantatgnatngtgaattntaanaangngangagnaggagagnataanaaagtnnntaanaatnaaatnnnanangataatgaggagagtgnataaagggtatgntanangaaanaaaattgaaaagtannaaaganngnt

SEQ ID NO: 7553 - DNA, 200 bp, Glycine max
  Clone ID: PAT_MRT3847_10682C.1
tatcgagccgaatcggctcgagctcattcattcgttcatcatggttaggttcagcaacaacgacatcggactcctgaacttcacgaccttcctcctctccatcccgatcctggtggccggagtgtggctgagcaagcagggcgccaccgagtgcgagcagtggctggagaagccggtgatcgcactcggcgtcttcctca

SEQ ID NO: 7554 - DNA, 909 bp, Glycine max
  unsure (1)..(909): unsure at all n locations
  Clone ID: PAT_MRT3847_106830C.1
tcccgagggtgtttcttcttgatttatttttcctatggcccatcttaatcacatggagagggaaatttattcttggtatttcccaacaagatagtgacgtgctgctgctgttttatgataaattatttctgcccgtggcaatgctggtagatttggcgtccggatttgttagcagaaaagggaaacaatttgattttcaatcctttcatcagcaagaacaaactatttccgccttacattttctttcgtacttttgtctttcttaattctcatctatcagaatacttgaataacttttgtccattcatctcaattatgtaggcttatgtttatgacaatttccagagttctctgatgagatatgcatgattaatgaaaacatgattgaggatttactaatcttgtttatcgatgataattagaaggccagaaaaatgaattctggtggatatactatagaagttacgtgtctatctccaaaagctactgagaagcatcagtatgattttttgctttctgtggtgcaattgagtatgttgaaattgccagatattttgatttttggcagtgtgtagaattcgatatgaaagttattgttcaagacaggtctggtgattatgcctgtactgcttatgtaacattcaaagatgcacactcccaagaaaactgcttgtttgctcaatgaatttgattttttggaatcagccttcctataggcacaaggaggatactgcatcaagtgtatgcataatactctacaaagcaaccaatttgtttcctctgctagagtagcagtcactggctcaagaagttgtcaagactatgctagcaaaggggttatgttctaagcaaagatgcattagctgaggcccagtactttgacgactctcatcangtttctgctactgc

SEQ ID NO: 7555 - DNA, 154 bp, Glycine max
  unsure (1)..(154): unsure at all n locations
  Clone ID: PAT_MRT3847_106831C.1
gcgaaagnncgacaacaacananatcagtgctcctcaagcaaggaagacgctgacntgaataagcaagcnccttcgctttgaagnggctgtngacgagagtnccaacctcgagacaatcgnctgtgcganattcgaagaatccgntganaaaac

SEQ ID NO: 7556 - DNA, 1617 bp, Glycine max
  Clone ID: PAT_MRT3847_106832C.1
gttggaatttgggttcgggtcctaattggttttaatggtcttgaatctgcttttaattctctcctaacccttaatggatccaaaactaggttttttttctctcaattggataataccacccatttacttgttaaataaacttggtcacacccctttttaattggaataacaccccatagcctaacctcaagtagattttcccaaaaaggggctattggttttctctctaatcccttacattggtgagttcttctattcatgtattgggttcatattcaagatctgagggaaccaatttgccagcatttttatctttaacatctggtatggatcttgtaagcagaagatacttgatttatgtgtcacaacatgggtcacaaccacaagcactttcaccaatcacaagtccagggagttcaatctttcatccacatcaacatgcttcgagcaccagttttcccatcattgcaattgccataataggaataatggccacagcattcttgcttgtgagctactacatctttgtgatcaagtgctgcctcaattggcatcgaattgatgttctgagacgtttctctccatctagaaggcgtgaagatccaccaccaacatactcaccagccacagatactcgtggactagatgaggcactgatccggttaatcccagtgactcaatacaaagcacaacaaggggatgatagagactttggagagagaagattctgcgaatgcgctgtttgcttgaatgagtttcaagaagatgagaagctgagggttataccaaattgcagccatgtgtttcacattgattgcatagatgtttggcttcagagcaatgccaattgccctctttgtagaacaagcatttccttgacaagcagattccacattgatcagcttctcaccctaaggccttcttcttcttcttaccctcatgatcaaaccccacctagggaaaacctcattggtggtgatgaagattttgttgtgattgaattgggtagtgatcatgatagaagccagaatttgcaagaaagaggcaatgctttggagttaccaacatgtcctattagtccttcttcaccaaggaagctattggaacatagaaatgtgcagaagaagaaagcaatgaaactgcagaaagtgacaagcatgggggatgagtgtattgatattagagccaaagatgaccagtttttctcagtgcaaccaatcagaaggtctttctccatggactcatcaggggatagacggttctatttagcagttcaagaagctctgaggaatcagaactggcaagtcaatgaggtcaactccattgaaggttgcagtggaattggtagtagagctaagaggtcattcttttcctttggacatggaagtagatccaggagttctgtgcaacctgtttctttggacccctgaaatttctcttttgtccctcgtcccccctttccattatgtttgcaacttgcaaggttcttaggtctttaccttttttctttttattcttttggtgaggatgagatagagatgttactatgttagatgtatgaacaggtcataggattgtataacacacaaatattcaaatggatttaattcttaactt

SEQ ID NO: 7557 - DNA, 236 bp, Glycine max
  Clone ID: PAT_MRT3847_106833C.1
tatgtctgctagaaaacaacaaaaggatacagggtggagtttacgacaaactgcttcttcttccacaagacgacatacgggcttttaaaccaaaatatgaatgttgacagagcctactaaaagctaattaaacttatcctgctgctttagaggatccatgattacctacgcgtccattcatcattatacctcttttatcttgtatcctaaatcaaatacactgtccgaccttttac

SEQ ID NO: 7558 - DNA, 387 bp, Glycine max
  Clone ID: PAT_MRT3847_106834C.1
gcagccaatattaaaggggatgttgactctgattgcttggattatgaaattttgggggaggacctgacaatgggagaaccaattgggcaaggttcttgtggaactgtatatcatgctcagtggtatggatcggatgttgctgtcaaggttttctcaaagcatgaatacacagatgatacaatactgtccttcaaacaagaggtgtctgtcatgaaaagacttcgtcatccaaacattattctctttatgggggctgtgacttcacctcaacatctatgcattgtaacagagtttctcccacgtggaagcttgtttcgtttgcttcagagaaacacatccaaaattgattggagacggcgagttcatatggccttagatgttgcacga

SEQ ID NO: 7559 - DNA, 392 bp, Glycine max
  Clone ID: PAT_MRT3847_106835C.1
cccacgcgtccgatcttatattgcaagacctgcgtgagcgaatgattgatatgctgtgtctggttctgattcggcgaggcctcttacggctggagtcggaattggaggaaggacaacaccattaacaggctcagatggtgtatgatggcccatgaatcacgctctctggactcagacaaaaccgtcaatgctggattctggatcattgaaggccccaaaactgtacaggattcggccaagatggagcttgaataaattcatgacaacattcgaagtccgaagaacaaaatcgacttacacatggataacgttcagaggcttaagatacatcaaataattaaaaacgctaaacttggaatttaaactacgagcaagagaatgaacttgctaac

SEQ ID NO: 7560 - DNA, 1007 bp, Glycine max
  Clone ID: PAT_MRT3847_106836C.1
ggtgccctcgacgcttacccgtacctcgggactctctggctttatcaaatcactcatcacttaacttattctctttctcactccaaccacagcattttcaccaccaccaataacaagaaaatcaatataataaattttcttctctgtttcttttttttttttctcttccgacgacgttaataactaatccgtcgtgactaattctttcgatcttgaagatgaagcagctgatccgccggctctcgcgcgtggccgactcctccaactacacgctcctccgcgcggactccgccgcctcccagcgctgccaccaccgccgccgccgtgcggagtcctttcgcctcgccgctgcggcgaagatccgccgctcctccgcggtggtgccggaggggcacgtgccgatctacgtcggcgacgagatggagcgcttcgtcgtgtgcgccgagctcctcaaccaccccgtcttcgtgaagctcctcaacgaatcggcgcaggaatacggctacgaacagaaaggagttctccggctgccgtgccgcgtcttcgtcttcgagcgtgttctcgacgcgctccgtcttggactcgacgcgcgtgacgtggcggagctcgtaaatttctcgccggaagagttctcctgagaaacaaagaaaaagaagcaaaaaagcaaaaaacacaaaaaaacaaaatacgaagatcgttgattagtgagaacttttgctggttttggtgctctgtaaatatactacattaggatcttgatagaaaaaaaaaatgaggcacataaatgttagggtttgcaatttctttttgtttggggttcttttttctgattgattgttgtagttgtagttcgatgctctctcgttgtaaaggtaaagatatttttcactttgttgttgcagaatgagaatctcttttgaattttccattcaatttttattttgtttttgtcgatttcttgggaaactaatggaaaaggggcaaaacgagaaatttcggcagcgtta

SEQ ID NO: 7561 - DNA, 298 bp, Glycine max
  Clone ID: PAT_MRT3847_106837C.1
aaacaaaaaagggggcccaaatatttttaccaaacatttatgaatcatgactgccttaaaacaaaaaaaattttttccgaatttcccctgttaaaaataattttttgccccttctaacaatcttaaaaaaaaaaaaaaccaggtttttttttttcaaaaaaacggatccattttttacttttaaaaaagacacctaatttgttggcccgggcaaaatccttgcatcaaaaaacactttttttttcccacccctttggttggacacatgtaattcctaaggggggaacacggttttttt

SEQ ID NO: 7562 - DNA, 365 bp, Glycine max
  Clone ID: PAT_MRT3847_106838C.1
gaaaaaaaaaaaaaaaaaaaaaaaaaaaaaaaaaaaaaaaaaaaaaaaataagggacaacaccaatggtggttcgaggcctaactactaataaaatcaaacacttataatatacatatctcataccttaacttcaatcaacataacgtcgtttatctaatatgggcctgttcaaacccattacattctccaatttattcttttaccatcccgtaccccatttattatgttaacattttaattacaactcctcacactattgccttttctattagaccttctaattctatggcaattgggactcgccttataacattcaattagaattttccggttgagcctttacacgcttcttctcccttaaac

SEQ ID NO: 7563 - DNA, 377 bp, Glycine max
  Clone ID: PAT_MRT3847_106839C.1
agaagcaatggctatgtgatttaatccaaacccgtgttctgatgcatggagtttggaattcctgaagcgtgctggacttcattgctatatcatttgagacactgggtggactgctaaccctatgcaggttgttcaacaaacaatcgaaaggtttatttcctttcatgaatgtggtgacaataactaaagtggtgtaaatgcacataatcctcctgagtttaataggtggaaagggaaaatgactttacctcagggtactatcaccagtgctgatagaatgcccatatctatagggggaggagcttgtacaaagaatgctattctgaagaatatgccaaaagcctttctttcaatgtggagatattttggtggagatc

SEQ ID NO: 7564 - DNA, 671 bp, Glycine max
  Clone ID: PAT_MRT3847_10683C.1
gtagggtcatcggaagcacgggatctgatgaaaaagtgaggctaatcaaagaggaatttgggtatgatgatggattcaactacaaaaaggaagaggaccttgatgcagttctaagcaagttctttcctaatggtattgatgtttaccttgacaatgttggcgggaagatgcttgaatctgtactgaatcatgtcaacaagtttgccaggataccactttgcgggatgatatctcaatataaccaggcttggacagaaagagaaggcgtcaggaatcttttgaatttggtgggcaaggaagtaagaatggaagggtttttgctgaaaacacatttcaatcgttttggagactttgcaaaagagattgagggccacataaaagaagggaggcttaagcccaagactaaaataaacttcggaattgagagctttttggatagcttgaactccttgttttctagctctaatattggaaaagtagttattcaagttaataaggcttaagtatgcttgatcaagttgccgttataaattttcctcaatatatttcaccccctctcccattttccagtcatttattttatatttcacgcatgaagagagaatttgtgtaataattatttgatttgtgtgaaggcgattttgaattttttccattaactagtgcaaaaa

SEQ ID NO: 7565 - DNA, 465 bp, Glycine max
  Clone ID: PAT_MRT3847_106840C.1
gactgcacgcgcacgcatgctcggaattcggctcgaggattgatatggattcctggtttcgtcaggtgattaacgaattgaactcataccaatctcatgatcaatctcagcatcaggaactccctctgtgattgatcatgagattgatatggattcctggtttcgtcaggtgattaacgaattgaactcatacccaacaactgtagatcgtgcgaggaaaaccaggaaagtcttggggcatattttcagacgcgttctaacatggatttggtacaaatgcagaggcgcatatgggttgttgagacgagattatatgcctaacgggtggagagtgatagcggtgcttgctgctgctacggcgcttactctcactgctatccagacacattatgcaatccaccgtaactagctagtgttttattttactttttttttttaaaatggttgattaagaaattgttcttg

SEQ ID NO: 7566 - DNA, 1376 bp, Glycine max
  Clone ID: PAT_MRT3847_106841C.1
ccacgcgtccgtcttatcattaccacccaccactctcaatcctctccaagcaaaatccttgtgttttcttctctcatcctggtatgtgtcccttcccatttccattctttgtcaccgtactttcaggtttgctgctggctgctttctattcttacctcaagagaaataaagaaatgggtgcaaagaaatggtttaagataatagtcaaattgaagaaatcgaagaaagataaatccaaaaaggaacagatcactgatgaaaattcaaacgaatactccaacgggaagcagagcgtgcctaagagtcaagtcagcattgccaatgaaggtttaatgatggacaggacagttccttcaaagttgatggatgatattgcagctactcggattcaaaatgcatttcgttcatttatggcaagaagaacattacaccatctaaggggagcagagaaattcgaagctttaattcaagatcacctggccagagagcaaacagcaactgcactaagctatatacattcatggagcagaacacaagaacaaattagagctcgaagaatctgtatgataacagaagccaggattaagcagaagaaattggaaacccagttaaaaattgaggccaagattcaggagctcgaggtggaatggtgcaatggttctgaaaccatggaagaaatcatttccaggttacatcagcgagaggaagcagcaattaagcgagagcgagccatggcatatgccttctcccatcagtggaggccaaactgtagccagtattttggtcaggcttcttatagccttggtaaggaaagttggggttggagctggaccgagcgttgggttgcggcacgtccttgggaagttcgggttcgaggtcagaccaccaaaacaacgaaactcaacggccatgcaggtgcaaaaaaccaaattagacaagatgaaccaaaatgaaagcaaagtagccttggctaaacctaccctatcaaacgggaaggaaactgggaaaggaaaggaaaacggtacttcagggctgtcaaagaacaatgtatccaaatagcccattctaatttgatggtttagggtttcttcttgctcttcttttggggtttattttccatatttggcttcgtgagaatctaccatttggtgtgtacgttccactaggagacttcacttattgtctgcttttgcatggtgtatatgattatgaacatgaatctcctagttttggttgagacatgagagatgagaatggtattttatcatccctttcattccaggggcagttaatctttaccgcaagaaatttttatgctttacatatattggaagggcaaaaaagcaaggaaattaaatgaaatatcctctcctgtt

SEQ ID NO: 7567 - DNA, 311 bp, Glycine max
  Clone ID: PAT_MRT3847_106842C.1
cacgcatgcacacgctcggaagctgggtagagagctcgagacttacctttgctctgaatgcaaatacgaaggctgtcatggcaaccacaagcctttcttggaaccccaatactctcattcttgaacggaaagcccgacacatattgattcccgcaggagcgccgaccaccaaaagatccttattcatgcatggcacaagatccatgtgcataaactcacaccgcgacgacctacagttcttcatatgggcatgcgcaaaaagagtacatcatgtcactggaaaagacacagccgttcatgacgcgcatgag

SEQ ID NO: 7568 - DNA, 244 bp, Glycine max
  Clone ID: PAT_MRT3847_106843C.1
cgtccgtacagacgtcaggggggcagtgattgtatgtgtcaaggggagatataaataggatcatggttgtgagcaaggactttcaacattcccactactaacactggtttgcttcgcggccgggcatcatgtgccgcctgaatagtcgtaccctctctcgtcggctgtgcactttataccccctgttcctctaagcaccctgctccattcccttgcatcagcctttccagtgggagcagtttaa

SEQ ID NO: 7569 - DNA, 766 bp, Glycine max
  unsure (1)..(766): unsure at all n locations
  Clone ID: PAT_MRT3847_106844C.1
ctcttaagattatcgttaatgcattatcatcatcaccacctacaccatgatcgttgtcacctccatcatcttgattgtcatcattgctaccaccaccattgtcgatggtggtagcgatgacaatcatgaggatggaggtgacacagttatggtggtgataataatgagttaatttagatattttaataattgatcgttgagatctcttattgatttgatttctgtttagtgaatcttttttatatttgattgttatattatattttacttttaaatgataaaatatgataatatttttaaattaaattttgaaaaataatagaattaatgaatctttaattcaatttttttttgttgagtgttactgcacaccaactaaagtgaatattagcacacacgcacacacactcaaaccaaactattaaaatctaatttaaagataaaagacatataaattgaaagagatagacaattaagaattatcctatacataaaaatgaaagatagttgagtgagtgaggaaaataatactcttagatatatattctaatttataatataagaatgaatatatgtaaaccaataataaggcttcataattgttttgcaaatgttttactaggaaggaactcaatanatgttaagaaccaaagagcttatgttatttgttgtgtaataggcttacattgatgactttgggtggtattgttggaatatagtataggaatgacaatgggtaggtcaaacacaataaggggttacctgc

SEQ ID NO: 7570 - DNA, 762 bp, Glycine max
  Clone ID: PAT_MRT3847_106845C.1
cgcctttactccattcttgttcgagcctcgacagttcctggcccttcgccgccgcagcatccgaattcctttgatcgttggtgtggagcgatggaacacggctcatacactgatcagagtaaatcaacatttagtctcgtagatgaggatcatacttttgcaaacgctgttagattcaccttaaatcaagacccaagagtgtcattttgtggctacagcattcctcatccttcagataatcgtgttaatatcagagtccagacaacaggcgatccatcacgcgaggtgttaaaagatgcatgtcaagatctgatgcttatgtgccagcatgttaggagcacttttgataaggcagtcagtgattttaaaatcagcaaggctaggaagaataatgaggatatggatgtcgagtaaatattttgcctgcgtagcagctatacactgaaatatgatgagcaggaaaaggcaggtgccaaactagtgttcattatcagtttttaaatttacttttagaaatgaaacttcattcctgaaaactctagtagctggtttggtcttccgttacgtctgataatacttgcacccatttttgctcatgggacatggaaccaaacagacactaaaatttcattcagtcttggtttgaatttacgatgcatttgttaagtttcactttcacaacctcatacatacaatagttcatgtagtaaattcatgattttaccctgctctcatagtgtaatacaaagagaatcaaataac

SEQ ID NO: 7571 - DNA, 211 bp, Glycine max
  Clone ID: PAT_MRT3847_106846C.1
aataaaggaactcaaataacgctggccatggaccagggggaacagtggcaaagtttttaacataaaggcttccaacgttttcaaccagaaagtaaaaaaggtacatccttttgcccttttccccttattaaatatctttttttaaaggggggggggcagttgggccccatacatagaccgtagttcatctcacagtcggcaacattaaaag

SEQ ID NO: 7572 - DNA, 778 bp, Glycine max
  Clone ID: PAT_MRT3847_106847C.1
gttataaattagagggttagcaagagaaattcacaaacctagtccacattctcatactatggaagacggtggaagcttagtttcagaagatggatccaaaatagaagatacaacctcagagaaagttgagaaggtgaaagaagaagaagatattggcaaagaagagagtggtggtggccttatcaacaacttggtttccactttgatcacacccttgagtccaggcattgggaaagccactgaaaatgaaagtggtgctgatgctgatgaagatgaaggagagaatgaaggagggatcatcagcaaaatggtttctaatttcttccatcaaagtgaaggtgaaggtgtggtggaagctgaagaggacaaagaacaagaggaggaaatcatggctggtggtgaaaaaatcaaacggttgaagacagagaatggaggcatcattcataacatcttttctcatttacctgcttcaatcccagatggtgcggttcctacagctgatgaggccacttttttaattaactctcttgttcgtgactaagcagagcaattcttcaactcttagtgcaccaacatggattattttgcactgtgtcaatgtatttagtcagtgttcttttttcttattttccaagatttttttggctggtttatagtaacgtagttcttgtttattcagtatggagtgtaactctatatatactcttgcgctatggtgcttaaaaattgcagtgccttgcgcctctcttagaaataactgaatacaccattgcctctg

SEQ ID NO: 7573 - DNA, 375 bp, Glycine max
  Clone ID: PAT_MRT3847_106848C.1
gaaaggcagatgctctctgctgagcataagcatctggaacacgatagagatcagctcctcggggaatctcagagacatcatcctgagtggcaagcgtatgagatactagtgccttcctcataagatcagttgagtatagtgcggatcagactcaacatatgatggtctcttctgttgctcttgtattacaaatacctgagatgtctcggattcccttgcctctgacagaaacctacgcttgaaagcgaaggttgccgatgaacaggccactgttgtgataaatctagcgttgcagatgctgtgaattcttaccaaatgtgaccaagagaaaatacagacagtaccactgtcttgaacgtaattgtggggcgactg

SEQ ID NO: 7574 - DNA, 437 bp, Glycine max
  Clone ID: PAT_MRT3847_106849C.1
cttctttgccgtagaccaccattactaccattgtttccactcaccaacacacaggaccggagcaattagggtttgtagattctgttgttcccaccacagatatcacattcgtagtttcaatcagcgtttgaatctcgcatttgcaccccctactgccgcaccgcaccttcctcactccatctctgcctccgccaccagtcactttcctccccaataaacaaaactcacaaagttaacccctttccctttttctcgaaccagaagacacaatttttcacgaaaagaaagacaacccaaaagcagaagaaaccttttcctaacccttgcaagcgttgcggcatcaccctcgatagttgaaaccgatcaatcgttcccagaaaccgaaaaaaatgaaactaagagtttaacgatgagaactcagacactgtttttgtgtt

SEQ ID NO: 7575 - DNA, 636 bp, Glycine max
  unsure (1)..(636): unsure at all n locations
  Clone ID: PAT_MRT3847_10684C.1
ccatatcatcttaattggtatattacgctattaattgttggataacgaattctctcgcacaattaacaaaataacaatttggtagaaaagtaaatacttaaaaagaaaaaggggataaaagtatttgttcttcacaatcctggaacggaggacataacttcatttacctttgaactagaaaaaaaaaagtttcagaaatcatgagacaagggtacctagcagccgctgcttcaaccatgcttgttgaattaacttctctaaaagtaacaatcctgcataaccttaaaaggtagccctgcccattctattttggtctctctaaccaatactatctttagataactatttgtgactattatagtattatcgttctttgtcattgatatcaatgggaagggcaacctttactggaaagtggaaacttgaggcaatctaggttgtgnttgtggtggagtgctagtactgctacggcttgaattcccatttgaggcatgcatggacctttattgtaacacaagggcaggaattgatatctatagacaaggacatcaacaggaacaaggacatccttatccatcggtaagtgacaagctagggagaagtccaaacagctgcattttcatttaaaggatcatc

SEQ ID NO: 7576 - DNA, 531 bp, Glycine max
  Clone ID: PAT_MRT3847_106850C.1
aaaaggggcgggcccaaatatgggggggggggttaaaacccaagtttcatgaaacaaaaaaaaaaacggcccaaactacggggcaaaagggggggcccccccccaccctgtttgaaacctggacagctacttatttgcaggaaatagccacagtttctttcacaagaaaaaatcctcaggtggggggggctttttgacattggcattcatcccccgggcaagggcaaccggtcccttgaaaacctttttaaaaaggctgttttgtctgaaggactgccccaaataggtgaaaggaaacaaacccaagtttttttgagttgccaacaagggctgggccacagggtgggaaactcccccgactttcgggggacaattcatcaaatggggagctgccaacatttacctttgtttccaaggttttcagccagggaaaggggcttttcccaaaggaattccccttacccagacgagacatgtgagggggataattgcaaaatcttgaggcaaaaaaggcattatgccgggctccct

SEQ ID NO: 7577 - DNA, 228 bp, Glycine max
  Clone ID: PAT_MRT3847_106851C.1
tcgaaaaaaacaactttgcggctgcgctgctgctgatagcgcggggcataggaaggcggtcatgcatattgtcgactaaccaacgattcggttgagcgtttttaccgaagcgctgacgacggatgcagaagaaaatggtgctgtttgcagtggaagaggaaatgctgatcaggcgggcgctctggtaggaccaagcttaccgtcgcctgcgagccaagacataacttt

SEQ ID NO: 7578 - DNA, 1460 bp, Glycine max
  unsure (1)..(1460): unsure at all n locations
  Clone ID: PAT_MRT3847_106852C.1
gtaatgtttgaaaaggctagagcccacccctaacacgaccgggcgcgtcgctacgcgtccgcagcatgctcgaaatcgcttgagctcactatcgatatcaccccaaactcgaccacactaatagttgaagcagcgaaaaatgcctctgggagaaaggtcaggggataagagcgagtctcgctactgcggcgtagagaccgacttcaacgatgacatggcgcacgtcctccatttcaacctttattctggaagcttcgatttcgttgttgctcctctgatggatccttcttataggccaagtttagttcaaaatgatgctttggggtctggtcttctgccatttgctgggtcagacttggtcttgagtccatcccaatggagcagtcatgtagtgggaaaaattagctcatggatagatttggattcagaggatgaaaccctcagggtagattctgaaaccactcttagacaagaaattgcttgggcttctcatctctctttacaggcctgccttcttcctgcccccaagggaacttcttgtgctaattatgctagatgtgtgaatcagattttacagggttcaaataatatgcagttgtggcttaggcttccattggtgaagcctgatgatgactctatggatgcaaaagtctgttgctttggttgactactgggaaacttggaattcatttcgtctgctgtgtgagcatcatagtcaactgtcagttgcacttgatattctgagtactcttccttccccaaattcactaggacgctggtttggggagcctgttagagcagctatattacatactgattgctttctaactaattctcatggctgtccatgcctctccaagcgccaccagagtttaattactggtttttttaaccattctattcagatcattgtatctggaaattcagttcatccaaaagcaagtgtggatgcaaatgataattctggtacaaattcacaaaggcatcccttgcggccatatctggactacattggatatctttaccaaagaatggatcctcntcaattcggctcgagttttgagcttggttacagggattttttacagtcacccttgcaacctttgatggataatttagaggctcagacttacgagacttttgagagagatgcaatgaaatacattcagtaccaaagagcagttagtaaagcattgctggacagggttcctgatgaagaggcatctgttaaaaccattgtattgatggttgtgggggcagggcgtgggcctcttgtgcgggcttcattacaggctgctgaagaaactgggcggaagctcaaagtttatgctgttgaaaagaatccgaatgctgttgttaccctacatgcattagtcaagttagaaggatgggagtatactgtgaccatagtctcaagtgacatgcgtcattggaatgcccctgaaaaagctgacatattg

SEQ ID NO: 7579 - DNA, 222 bp, Glycine max
  Clone ID: PAT_MRT3847_106853C.1
agatcactgtttttcctttactagaattgacaatagagttcgggtttcatatacaatatttattatatatttccaatctcaaagccttcccatatttcacccatcataagttttctatcagcctatatctcatcaatgggatatcttcactcttatagttttgctggataaatataacttgaaagtctaactctattctgtcacttcctaattagacaaatc

SEQ ID NO: 7580 - DNA, 1003 bp, Glycine max
  Clone ID: PAT_MRT3847_106854C.1
attaatttgtttattgttttgtgcgtgaatatgttgttgtgttgtttgcagaagcaaaagttggtactggcgaaacagttgggtcttttagcgagacaagtggaggtgtggtttcataacataagggcaaggtgggtttattttttcaacatttttgttgtgtgatctttaatagttttactgtaattaatttttatgactaatttttttttttcttttgtttttctgttttttttttttattgtttttttttaatttttctttttgaaatctttttgtttttttttgtatttttttatttctgatcgtttgtttttttttttttcgtttttttttcgcatttttctttttttttttttttgtttttcgtttttttacatttttttgtttatttgtttaatttgtttatttttttggggggttgtgttttttattttttttcctttggtttttttttttttgttttagtttgtttctgttgtgtttcatgttttgttttgttagacttttttgtttttttttattgtttttttttttttattttattttttagtttatagtatgtttagtttagttgattaatgaggagtttttttttgtattttttatgtataggtgtttttattttttttctgggacagttttgttacgttttgatgttttttttggtttttaggattttttttttcgtgctttatttaaagttttgtttttgttttttttttttttttatttgtttttgtgtatattttttgtgtgtttttgttttttttagctgtatttttttttgttctttcttttttcgtttttttacttttgtcttttttttttggttgttttgtatgtgtttattttttcttttcgttttttttttagcgggttttttttttttcggtttctttttcttgtcttgtgtattttttttgttttttttctatattctctttttcttgttattttgcgtctttgtctttttctcccttttttcttttttttttttttt

SEQ ID NO: 7581 - DNA, 296 bp, Glycine max
  unsure (1)..(296): unsure at all n locations
  Clone ID: PAT_MRT3847_106855C.1
attttaagcgtgtgatatggcgtatcaagtagtaaaggggagangcataatcaatnaccacctgcgntaccactttgatntcttcatggatcacgcacgtcacaaaggactcaatttgtttgatttttgtttaattttttttaaaattaaaattgagttctggtcattgagattttttctttgtgttccataaaagaagccnccttttcatccttttttgttaatgcccaggtggagtctaatgatggttcagccatagtagtcacantggtgaanctatgacagnggctctgcaa

SEQ ID NO: 7582 - DNA, 309 bp, Glycine max
  Clone ID: PAT_MRT3847_106856C.1
cttgtggcttgtagatattcaggcgtagagacaaacaaagatccagtgtgcacttgttccaatccaacaccatactctctctctgagatattttggaaattgaatatgttgtatttttttgtctcttgcttatttcgttgtgtgttgtttttctctaagatattctggaaattcagtgtgttgttgtattttcttgtctcctgtttacttcgttgtgtgttgtttttctctaagatgttatggaaattgaatatggcatatttttttgtcttttgttaaaaaaaaaaaaaaaaaaaaaaaaaaacaaaa

SEQ ID NO: 7583 - DNA, 324 bp, Glycine max
  Clone ID: PAT_MRT3847_106857C.1
cggggcgacccacgcgtacaagaatattcttataaacaggaacagctcagatcaccttacaatgcttataaaagccgtgtctggttctaatatgtgggacggaagcaacaacaaattaactgttcaactaactatttccatcaaaacaacacctttttatcccgacttagatataagaatgtgcgctacgttatcgaatgtcttagcacaggtatgttgtgaagtaaactataccttttaactagctcgacatcaatcactgatactctatactatgagcaatattgaatggtaaacctagatggactaatatatccatttttt

SEQ ID NO: 7584 - DNA, 748 bp, Glycine max
  unsure (1)..(748): unsure at all n locations
  Clone ID: PAT_MRT3847_106858C.1
gaattcgagctcggttcccggggatcctctagagtcgacctgcagatactgtttttgaagtgattttgagcactgaacaacagaaaagatacgagtaagtttcctataaaaggtgcttgagtgtcttgataacatattggggaaattagtctcttttatgtttattttttgcaggtgggatacattgatgtgtgacttggaactgatagattcttatgatggacactacgatgttgtttatgggacatatgattctaagtatctatcccggtaatctattgatgttaaccttttcaaatttcaaaagttatagcattgtaacaactggattgctgtaatgatattctctgttctggaaaattcattgtgtggattttttcaatgatagagatttctcatttgtgtcgactttttcaatcatagaaattgcatgcttggctagtttgattttcctattgactttggctctcattctgctaaattcttcatgttagacatgtgctaatttatttggtgtgtgtgtttgtcagtccattctatagttattagtgataaaattttagttgccaaataactacagtttcatgacatctctgtcttctctcccatggccttattagttatttttttcatcaatgaacataaagcaagttttacacanattattgttacttaatcatgttttaactttttataatgttcattgaattgccttttaaccccagtggcactcaaagcagaattttgt

SEQ ID NO: 7585 - DNA, 363 bp, Glycine max
  Clone ID: PAT_MRT3847_106859C.1
gcaagggttatgtgggatcagaagactgttcatgcaatgcgatttggatgcgtttaattccgtacccaacaagatgcacaacgctgtatacatgatttgactgatctgtggcttggacgtagacagatccgttggcactcgacgacacacggtgctgttggctatgaacagaagcagagactaaatgcaaaaagtgtggtgcaactcacgaaggtctcatctagagatggtaaacacacatgtcacatggactgctctgagaacaattctcattatactactggttatgtgggttaccttgctacataggtaactaaactcgatctccgatcccagttgcatgctcttggcgctaggactgat

SEQ ID NO: 7586 - DNA, 172 bp, Glycine max
  Clone ID: PAT_MRT3847_10685C.1
caagggaaagggaggtaagaacatgaacaggggaaagaactatgcgtacgaccacaagcgctatctggtgttcattgagcactgttcggagtacgcgcctgcgctccatatgctgggtatcgggcggtgcgaggcgatgtgcatctactggacgaaaaggctctgccacata

SEQ ID NO: 7587 - DNA, 225 bp, Glycine max
  Clone ID: PAT_MRT3847_106860C.1
ccgccaggcccagccaaaaggcctggcctttaaacttggatttattattatggttattaccttattcctttatttggccttaaccaaaaaaggtggatttaaaccaccttcaattccaccatttttaaaaaggcgaccaaatttttaaacctaccaaaacccaccagcaccgaaggtattctttttttccacagcttaaaacatgacccgaaaccaaaggccaaa

SEQ ID NO: 7588 - DNA, 287 bp, Glycine max
  Clone ID: PAT_MRT3847_106861C.1
ttgaagtgatacctctgcatggagcataggacttgctggatgtgttatgaatatggcaataagtcttgcaaggtgttcagccaattggcaccatcattgagacaactaatacagaacgaatattatttactgatgatgcagataaccaattacttgatgaaaattatacgtatattcgtgcaccgtttgatggaaatcatccatttaatgttgtctaatttacatttcacgtgactggaattatccatgataacattcttgtagatatggtcatgcacatcaaaaca

SEQ ID NO: 7589 - DNA, 277 bp, Glycine max
  unsure (1)..(277): unsure at all n locations
  Clone ID: PAT_MRT3847_106862C.1
antagaggctaagtacacatctagagctgcaganttgtataggcnaattctttnanaggnagttgcaaanngtatggctgangatggaggcttgcnttcatcanctgttgcttctnantcttcccagggggttnatgggctaccagangtnaagancaatgangtgccanaagataanattctggagangcnagatnagcctganagcncttcttcccctagagcttcanatanagtaatttcnagtaccgttnaganaccnattggtgcnaagana

SEQ ID NO: 7590 - DNA, 257 bp, Glycine max
  Clone ID: PAT_MRT3847_106863C.1
tatcctgactgctggactcaggaaagtccccgggccacgactgcagagatgcaggctcggaaacgggttaacttcgagctgggactagtctcgctcctttggggcgaggggctgagacgcgtgtggagccttcgctagtcccgccgaagatattggccaatatcacagtcattcacatggtttctcgactaacagaacggggcttatgccctcgtgatccaccttttcaaaaaaaaaaaaaaaaaaaaaaaaaaaaa

SEQ ID NO: 7591 - DNA, 393 bp, Glycine max
  unsure (1)..(393): unsure at all n locations
  Clone ID: PAT_MRT3847_106864C.1
ataaatatggccnccccaagcaacaaaccgcggcagggggcaacaaaaatacgaggcgcgcaagcccacgcaaactacgagaagcccccagcgcacaagccacccaccgagaaaccaccagggcacaagcccccagcagagaagccccccgcacacaaacccccagtagaaaaccccccaaaccacaagcccgcaggagagaagccaccagcgcacaagcccccagaggagaaacccccagagaacaagcccccagcagcaaaaccaccagcggacaagcccccaggagagagaccaccaggggacaagcccccagccgagaagccccccaggaacaagcccccaagcgaaaaaccccacgtggacaagcccccagatgaaaaaccaccgggg

SEQ ID NO: 7592 - DNA, 348 bp, Glycine max
  Clone ID: PAT_MRT3847_106865C.1
gagaaggtatgctatgggaaggacgcgctacatgataacatctttgactgcacatttgactagaattgcagttggtgattgtcgtgatggtatccttttatattcttatcatgaggaagcaaaaaaattggagctactttacaatgacccatcacaaaggatagttgctgattgcattctcatggatgctgatactgctgttgtttcggatcgtaaaggaagcattgctgttttatgttcagatcacttggaagcatcagacaatgcaggtgcacaatgcaacatgacactaagctgcgcttatttcatggctgagatagctatgagcatcaagaagggctcatattc

SEQ ID NO: 7593 - DNA, 448 bp, Glycine max
  Clone ID: PAT_MRT3847_106866C.1
acgagataaagtcaacaaagttggtcttagtcctaacatagttacgtacaacatactgatcaatgggttttgcgatgttagaaaaatggacagtgctgttagattattcaatcagttgaagtcaagtggactatcgccaacgttagtgacttataatactttgattgcagggtattctaaggttgagaatttagcaggagctcttgacttggtcaaggaaatggaagagagatgcattgctccttccaaagtgacatatacgattctaattgatgcctttgcgagactaaatcatacggagaaagcttgcgagatgcattctttaatggagaagtctggtttggttccagatgtttacacatacagtgtcctacttcatgggttatgtgtgcatggtaacatgaaagaagcgtcaaaactcttcaaatcattgggtgagatgcacctc

SEQ ID NO: 7594 - DNA, 383 bp, Glycine max
  Clone ID: PAT_MRT3847_106867C.1
tctacgcgtgcgatcggagggggcataacaggggaccttataccagatatgcgcacacttacacataatttcacaattagaaactggttgagagctgctggttggttgacaggctattttatgcatatgagcgaaacagccgtgaatgcacaagtcaaaaggagattgtgacactcattggtacaagagttcatcacaaccaagtacattgcagagtgttttggtgcacataactcaacacaatcaggaccacattactgcgaagtgaactttcctggagaggtttgaggctctgataattgtagtgaaaagtggagatatgaaggggcaactcacacttgatggcagtttaacaatcctaaacacagtgccaaacaggctac

SEQ ID NO: 7595 - DNA, 266 bp, Glycine max
  unsure (1)..(266): unsure at all n locations
  Clone ID: PAT_MRT3847_106868C.1
gctggatnggtcananatcatacatgncggacgaanagcaccatttcgngtaccaaggnngacgccggtgnctcnaanacctaccctcagcaanccggtnccattcgcaagancggctacatcgtcatcaaaggacgcccctgcaaggttgtggnngtntcganttcnanaactggnaagcacggtcncgccaagtgccactttgttggnattgntattttcantgncaagnnacttgaggatcttgtgnnctctctcncaactgt

SEQ ID NO: 7596 - DNA, 714 bp, Glycine max
  Clone ID: PAT_MRT3847_106869C.1
caggaaacgatgttttctgggcatagcagggtagttacacatacgaattcacagcaattgaaacagcatacacaagacctgggtaagctcaagccagataaagttccagtgtggagaggggaggtgggcactgctgggagaccattttccagtggaagctatacattcaagagtatatgggcgacacaatagtacttgatgctttttttaagtatatagttggctgggctattgaaggggttggatctgggaggagtcagggtaaacagcatgaatataatcaaaatacttccatgagattctcagatttcatgaacaagtgaggaaaagaaagaaggcattttctacattcgtacatagagagggatatagctgaaggaaaccacatttgcaggtgtcagaggtgattaaaatacactggtgtttctttgtgttttcatatctgtagttacaaattttttaaagctaacttatggtgagtaataaaaataataaactttatgttttagaaaacagggatccccaatctcaggtgtcctgtgactctttggggggcggaggggagctgtgaccttcagacttcacattcagttttctgtgtgtgtgctgtttaaccacagccagccattgaaatgtggtttgttgtcgggcggctgaggtgcgcacctttctttatctgaacttttggggagcaagagcaggcgagtttctgag

SEQ ID NO: 7597 - DNA, 131 bp, Glycine max
  Clone ID: PAT_MRT3847_10686C.1
ctagactttgaacagtagagaaaagagaatacaaaggtgatagagattggaactttacatacgtcaacggaaccatgtcgagatcagttcctggaacacatagtctgtgcgttcgacatagatgcggtggg

SEQ ID NO: 7598 - DNA, 348 bp, Glycine max
  Clone ID: PAT_MRT3847_106870C.1
gggagcttgggtagggatagggttttattcagcaacaggtcaaagactaaaaatattatctgagaccattaaggcttcattggtttactaataggaaatggatgagaacatattgaccctcttatgcactctgttgactgctgtaataatcatgggctaatacactgtccttgcagattgttgttctagatgtttgatagttcaattttggattttgatgggtagtttcttgtgtacttttggaactaatgggttacaatcccttggcatgtccttatggcatgcaaaagttgcttcaaaaaaaaaaaaaaagggcggtcgacgactagtgagctttttaacccggga

SEQ ID NO: 7599 - DNA, 1161 bp, Glycine max
  Clone ID: PAT_MRT3847_106871C.1
ccacgcgtccgaaacggctgcgagaagacgacagaaggggggcgatgaatcgaggcgcaaaagagttggggtgggatccttcttccctcatgatggcttcaccttcaagttcagtagagtagagtgagcgaaagtggaaaacaaaaatggaggagactcaagtgctgcacgaactccacaagctatcacagatagaatcagaggaaaccctaaaccaaatgctatgcaccctttggtccactcgtaaaacgggtcttcccctctccgacaagtcccatttccaatccctcctccacctcccttccccctcccatctcgaccccgttttagcgtgcctccgttccctcgtcagaaaatgcgcgcaccagaacctcgcccgcgacgaccttctcagactgtttccccgcgatcttccgattcagttgcaaacgaatttggtatcagcgttgcagagaaacagagatcggtggaaggaggacgtgagtcacgtgattccgcagctgaagggaacgataaactttgctccttcgctgctttggccgcgccaagaacaagattttgatgcggtggcggtgccggcggttgttcctgatgttggcccttcgggggtgaattcgtgcttccagtgtgatgccgttggtgcttctgataacttggaaaaccttccttgcctcaaatcaatgacgtggaccatggagaatcgtggctcatcccctgcagatagagtagctataatcagccttaagctgcatgattatagcaagtctccatcaggtgaaacagagataaagtttcagctcacaagggacacacttgaggctatgctgagatccatgacatacatcagggaacaactaaatgctgttgagacttcttcaggaccagcaaacaagaaacaaaagcagtagcttattttccagaaattaatgctgtagttagtaatattaagacaaatatctcatccttttagtcattggatgttataactgatttttgtccctccgattctttgatggatgccattaaggcttaagcaaacttaatggtttgttataaactatctctctcaatgatttgtatgtgaggatttgtttaagatgccttctcttttaactttatgtttattttgtgacaatgcaataaatttaaaattatcttcac

SEQ ID NO: 7600 - DNA, 249 bp, Glycine max
  Clone ID: PAT_MRT3847_106872C.1
attctatttaattttatttttgttgttgttgttattactattattatgtaggctctaaccaaatgctcttttttatgttgtgatgacagaagttaacgctgatattttctaactcttaatttttttttgtcatgcatgtttgctttgttgttgttgttgttgttgttattattattattattccgaactgaggatgggtttttggagttagctcaccctcgccagatcgcaatcctttgtcccgtccat

SEQ ID NO: 7601 - DNA, 356 bp, Glycine max
  Clone ID: PAT_MRT3847_106873C.1
atttcacttacttcgaaccacgttgcttcggtgcttttggagggagacagccttcactgccttcctggctgccatcaggctatctgtaacgcttgtagggccagcatctaactgaaagatctgatgatttcacggaagggaaaggtagctctgtgtatgacgggcactacctagtgttgattctcctgtgtgctaaattcgcagacgctgtgacagctcaccatttcaacttactctgtgagacgcttgggatgctcataacacgcaccctcatcactagcttgcacatgaaggaactgcggcctcccggttccacgagacaggatcatgcatgcggtcctattgtcatttcatgg

SEQ ID NO: 7602 - DNA, 306 bp, Glycine max
  Clone ID: PAT_MRT3847_106874C.1
gggggggacatctcgcaataggcaaattacacggtcacattcatacataacaggtgagctgggcctcttccaacttaaaagcacaggataacattggcccatgacgcaacacatgctccacctaataatcataattttccatctttacatacaaaatacaaagactttaaattaaacttcaaaaacaaaagatgaacttatcattttgatgaaatgaaaccgaaacccagaaacattgttctgattttttttgttgctcccaactcgattaagcatgaacgggtcgatagaatcacttggacttga

SEQ ID NO: 7603 - DNA, 337 bp, Glycine max
  Clone ID: PAT_MRT3847_106875C.1
tccacaccgagctcataaacacacaccgatctagaatctatctgacaaacttcggcatcccatcacccacgcataacacctccaaactaccgccaaaatttccttcctgcgtcacttcttcacgcgcgccccctcgcccgccacaatgtccgctacaaagaccaaggtccagtccatcatcgacgagaaccccgtcgccgtcttctcaaagtcttactgcccttactgtcgccaggccaagcagttgctcagcgacagtggcgcaaagttctacgcgattgagttggaccaagttgatgacggctcagctattcagtctactctcggcgaaatgact

SEQ ID NO: 7604 - DNA, 665 bp, Glycine max
  Clone ID: PAT_MRT3847_106876C.1
aattcggctcgaggaatttcaattcaacaattaaaaacaaaaaaaaaaacaaaaattgatttccctgttcaatcagaaggtaaaaacaaaaccaaatgtgaaagctgattggaggaagaagcaaatgaaataaaaaagagagagaaattgttcttctgtctctattggctttcaactttccccagaagttactttctctctttcttttctctatgacgaattaagtgtcaaattgaatgaatcacacagacccacatgttaattttgcattttctcttggtttgggtcaaatgggtctcatttttctgagaacccagtgaaaacgcttgcacctttgactccaaaagctgcagagtagagggagattcatcacaattcctcacaaccatggaagaagcaactgagttccactctgaagaaaataaattgtctatggagaaaaataagaaaagaaggctcaaaacaccggcccagcttaagggcttggaagatttttataatgataacaaatatcccacggaggaaatgaaatcagaacttgccgatgagttagagttgacagaaaagcaaatatctggatggttttgccacagaagattgaaagataaaaaaatgttgaatgatgaagtatgtgctaatggacgacatgatcgttcaagtggtgt

SEQ ID NO: 7605 - DNA, 568 bp, Glycine max
  Clone ID: PAT_MRT3847_106877C.1
attccgattccaaggaagcgtttcccgctcatcactgtatgacgtcctccttctttggggggggtgggggtggaagcggggttataggtgtggtgtggagccctcatgcaaacggtgataacgcggctcgtgcgggtgtgtgatacgccactcagcgatggatgacactaggatgatgcggatgatacttagtagaactctgagggccgcctgacaggctatcttaatgggtgctataggattgtaaaaggcacgggaggggtggttgcaatgaagcggatgtgtatcaacgaacggtaaggtgtgcattgcaagtgctaacgtgggcaatgttgtggctcgaaataaaaagcagtggcaggggatatcctgtacgggatgacctagcatagcggtagatgtgcttgcttggtaacgtatgtgtagatgacgatgcggaggtataatggtgtggctgggaataaccaaatggtcgcggtgctaagggtggccaatcttcacagaaggaagtatcggggcaacattactagtattaaacgtagtggtatgatgatggctacagcaaaga

SEQ ID NO: 7606 - DNA, 268 bp, Glycine max
  Clone ID: PAT_MRT3847_10687C.1
cagaaacccaattcaaccccccacccatgtaacacgcgggcagtgacaaaatcgagaacgcacgttgccagcctggagaccaccacgtactgccccccgccatttatcgccctgattggattttgtttttcatctgtccctgttgcttcggttcagttgagggtggagcctcctggggggcactggccactgagcccccttggacaagtcagcggggagtggcgaaagccactgtccggcctggcttctggggacagtggttggtccc

SEQ ID NO: 7607 - DNA, 279 bp, Glycine max
  Clone ID: PAT_MRT3847_106880C.1
ccggctcgagacgctcgcgctcagtggtggctatgtcccctatggtggtgtgggtcgtggctccaactctgctcatggcagtggaccccagtacacaagtcgcgatgtcgactatgatgccgatgactcttacaagtgcggacagcgacactatcgtcttgaacgccgcggtgagcctggtgctgcgatctgatgctgcgtacggcctcatgatgtctgttccacttatgaatgatctgatctgtctacatagagcatatctctactgagcgaacatga

SEQ ID NO: 7608 - DNA, 522 bp, Glycine max
  Clone ID: PAT_MRT3847_106881C.1
cgcaggcggcggccatgtgcccgggcatgtctgcctggggtgccccccacccctcctagtccctgtcatcgtggtggtcgatcccgcggccggccggagcctctctatttcaatgcccggtgcttcctcggatgtgtcattgaaattgtccacgggctatggagaggactcgggcccaggaaatgagaatgtaagcctcgagccagagcagctgcagttgaattgggccggaggatgggcctcggcggccctaggcgctgccatggcttcgatgattggccacgatcactgcaagactctgacaacgttgaaaacaatgctgctggccctagcctctctatttcaatgcccggaaatgctgctgctgcttcctcggatgtgtcattgaaatggtccacgggctatggagaggacccaggcccaagaaatgagaatgtgggcctcgtggcagagcagctgcagttgaattgggccggaggatgggcctcgtctaatcaagtggcttccatgggaggaccactg

SEQ ID NO: 7609 - DNA, 473 bp, Glycine max
  Clone ID: PAT_MRT3847_106882C.1
cgccgcaaaataaaatcacctaatatgtgatgagctcatactgattctaattcaaacatatctattaataacatttggaatgcgttgatgtcttttacgttttgccctatacatgaatctgaattgaatcattcccatgtgaataaaggggattttcatcatggccgtgactaattaaattagcactaacatgatagttgcaaaatcagaaattaaaatggaggcgctgccgtagagcatttgctgccattaactgtcatacttatcttcttcctccaaattaatgatgctacgctggttcaaatttactcatctttatcacgtgctagcccttctcccacttcgcttttgtagtacaacactttcttcatttcctcctccattcattgtcacattgttggctgcaagtttagggggccggagtccgtcttggctgatatcatccatgaatggtttctcacacacacatgtgc

SEQ ID NO: 7610 - DNA, 387 bp, Glycine max
  Clone ID: PAT_MRT3847_106883C.1
ccatgcgttcgaaaaaaaaaaatatttttaaaaaaaatatttttaaaaaaaaaaaaagaaaaaaaattataattttattttaataaaaaaaaattaaaaaaaaaaggggcggggttttaaaaaaggaagcccggtccgggacccggaaagtaaaaccttttttttgaggggggtaaattaaatgctgggcggaagtagaaaaaagggggacggggaaaaaaatggggttccgaaaaaaaatggcctggaaaaaaaaacccgtttctaaaagtgaaaaacttgggaggaggaggggaaaaaccaacctgcccaaaagggggggaccctaaaagcaaattggaacccgcaaagaaaaggggcacaaaccgggaaggggggggggcaacc

SEQ ID NO: 7611 - DNA, 628 bp, Glycine max
  Clone ID: PAT_MRT3847_106884C.1
cacgcgtccgtgcaaggatggagcaatagataaggcacggaagcttctggagagccttttagaaaatggacttaaacctgatatcttcacttttagctctatagttgatggactctgtcaaataaaaaggaccgaggaagctcttgaatgctttactgagatgattgagtggggcatcaatccaaatgccgtcatttacaatatcttgattcgatctttatgcaccatcggggatgttgcaaggtcagtgaaacttttaagaagaatgcaaaaggaaggaataagccctgacacctactcctataatgctttgattcaaatcttctgtaggatgaataaagttgagaaagctaaaaagctttttgattcaatgtcaagatctggcttaaatccagacaattacacttacagtgcttttatagaggcactgtctgaatctgggagattagaggaagccaagaagatgttttactcaatggaggcaaatggttgctcacccgactcatatatatgtaacctaattattaaaatattggttcaacaggaatatgttgaagaggctcaaaacatcatagaaagttgcagacagaagggaatatctttaaattctattcctaatttggagact

SEQ ID NO: 7612 - DNA, 126 bp, Glycine max
  Clone ID: PAT_MRT3847_106885C.1
ctctttccttggctcgaacataacgttaatcaagcgtttgtacgctgtgcaaacaactataaggagtacccagctatctgtggctgagacatcataggaggcagattgagtcaaaacataatgtcc

SEQ ID NO: 7613 - DNA, 313 bp, Glycine max
  Clone ID: PAT_MRT3847_106886C.1
catcagcttccttccttgatcagttagtgtcttcactttcactttctacactgggaggatcaaagtgtgcggctctgtcctgttggtgtcgttctttcttcttcttcaggtgtgcttcattgagccgtacgatttggaagcaacaccagaggtccacattgggtattgagcatggcatctcttcagcctgcggagatatgccacccaccagtggaccaacttgcgggcgttacctattgtataggttcccacccatcttgcgctgggacgacagctctgggtttccggcgtgacgttttggccttgggacctg

SEQ ID NO: 7614 - DNA, 366 bp, Glycine max
  Clone ID: PAT_MRT3847_106887C.1
cccacgcgtccgagtgctcacactttcaatcgctgacaccttttgaaccacggctagggtttctctcaacattctttcaccttacactctctacgtacaaagaatacaccttcaatacaatccatcagcatccatatatttacaattatcacactaaattcgacacacttgactcagattgctacattgctaatcaaagggctatgaacacgcggactcaacttgcaatttacaagcactggactgccctagacgcgaccccttttaatattgcactgcaccaccactagccattgagcaatcgcaggttctagactttccatcgtgaatgggtatcctcgatagagtacgaagatgaactgcccg

SEQ ID NO: 7615 - DNA, 447 bp, Glycine max
  Clone ID: PAT_MRT3847_106888C.1
attttgagaaagtggtctttaattcagcccaatggtgccatgctatccacgtagctcaaccttactttgtgggataagactttgttgttgttgcttttaagtgtcatgttcaattaaggttttgtggtactgccataccttgtgtgatgtgctgctgctactgtttctcaaatctcaatagtagacatttcaattgatatgctccttttgatcatgtattagttgtagttgtaagtttgtattcttaactatattacactcctcaaattcttgtaacttgcaagtcatgtcttctatgtggtattttcaggaagctgcagagcttctttccatcctttatgtgcaagggaagctagacataggatggaggtttgggcaaagtatggtaacaataatgtgagtaatctgtatgtttctgggcaaagtcactttccttttccagaatcc

SEQ ID NO: 7616 - DNA, 495 bp, Glycine max
  Clone ID: PAT_MRT3847_106889C.1
gcaaacaggtgacagctcgcgtttgtcggtggtttctgttcgtctgtgttttgctcatcgtggcacctggcttgcggcttcatccctgcgggctgaagtgcaagtgcctgttttgggcatgcacagcctcctgcggcctctcagggcttcctccgtgaggggagcgtcgtgtgtctggggctcctttgcggattctggtgacccgcctcgccttggttttgtcccccgcccaggtgtggggcagtccttgatccttctggttctccaattggttaggttcttggcctatttgtctagatgtgaattttgtgcatattgaacatgcccacttgactatatctgaagttagggagaatgtacaaaggaatttggcaaagctgcgcgctccacttccagagaatttagcattatgggttacagaaaatggcattgtggtctggctaggcttttgatgaggctctcccaaccaactgtaaaaaacatgcgtggcacttg

SEQ ID NO: 7617 - DNA, 385 bp, Glycine max
  Clone ID: PAT_MRT3847_10688C.1
ctggtttcagcacgcagatcagcctctaaagattgaatacgtgctgcactgtttcatcacccccatactgctgtactctgtctacaggtacatgtactgtggagactcctatggtgttggacacagaggctgcaatacagagaccgttctgggaagaaacctgtgcacttcgcgccgagaacatgatggggctggatcacggcgatgcatagcccatagatgtcaaatatgaatgtgaaaccatcacccatggccctaatcttggggacccgctggtcgggtggagaggaaacaatggctcaaccctgaccagcggtgttatcgctaacacagagggtatttcatgggcatcagaggacaagattcaacatgccaattactttgg

SEQ ID NO: 7618 - DNA, 459 bp, Glycine max
  Clone ID: PAT_MRT3847_106890C.1
ggaaaataaaaaacaaaatataatacgatatgcaagttcattattccacacaaggtgacaaattatttaacggggaaaaaaaaaaaaaaaaagatttccaaaagcttaaatgtaacaaggtaatttgtttttcaaaagaaacctattaagggctggcgtgcactactaaggccagttattgggaggcacccccacaaagatcgggaatggtttcaaaaacccctttaagcaaaacaaacacttaagaggcttttctcctaaagggccatgaccatttgaaagaaaacaaaagaatcgcccattgtttaggggacgtcaaacctgggaacaaaaccgcaccagcggaaccagaggccaaaccaaaaagccgggggacggcaacgaataaaggtaaccccattcttacagaaggggcgaggatacccaggcgtgacctttttccaaagtttaaagcaaaaa

SEQ ID NO: 7619 - DNA, 375 bp, Glycine max
  Clone ID: PAT_MRT3847_106891C.1
gcattgatgaagatctggtgatgctgatgctgacacgccttctctggaggatgccgatgctgagggtagcaagatggaagaagttgattaagtgcatgtttggattaacgtgtgcaaactcaaggtagacaaaattttactcaaacatatttttgggtctaaccaaacataattccgaattgattttattctcaaacatgacaattagggggctcccacctgaaatccaaatatacgataaatgagtattagaaacaggagaattggaaaacagtcttttacagtgtttatgttctttaattttgggaattttggaacgttagccggccaggtgccgtttatttctggatcaatgtattttagtttatggtaact

SEQ ID NO: 7620 - DNA, 357 bp, Glycine max
  Clone ID: PAT_MRT3847_106892C.1
ctcgagccgagcaggtatttgcaaaacagggcctgagccaacattacgttcatcagatggcaacatgggtgccaaatctgattagttctctacctaaggatatatcagatgaatttcctacctatgcctgtcttcttggaaatatattagaaactggtggatttgctttgtctcgacctgactgttcctttgatatggccatagaccttgctgctgttattacatttttgctggaatcacacccatctctaacaagatctgatggtagagagagttcttctattgctgaggatgaaatgactggcgaagatgaagtcatggaagtagcttttggataggaaaattgaatcaacaaat

SEQ ID NO: 7621 - DNA, 163 bp, Glycine max
  unsure (1)..(163): unsure at all n locations
  Clone ID: PAT_MRT3847_106893C.1
cgnccattcactggaactgtatctatcagatgcctaattattgctgcaacatgctacagtgctatgatgaccagaactatcattgttcgcaggatctacctccactctgtatagatgtaccagaagtatgagcacaggcactccaacatgcctgctcacatca

SEQ ID NO: 7622 - DNA, 538 bp, Glycine max
  Clone ID: PAT_MRT3847_106894C.1
ttggtacatgaaaatttcttaatgtactccaagaagttaaatctgaacttatatgtgcaaagaaggtaccaggaccagggaaaagcgggtagtttgtactgcatcgtatgtggcagaaggtctgttttcttttatgctgttttattaaatggagcacttctgttcacatattgaataaggagtcctctagtatttaactcacaggtggagtcaagtacatgtgctattattccagggatcatgttttaggttcccaaactttggaagtaaaacatgttggttgtataattgttgtactttattaaggcagatatgtggacggtttgaatagcaccaatcccatgacaataggaccaaacatatggtaaactgctttgtgggtgaacatgagtctcaaagctctgaactggtgtctttgcttttgaatgatggtgaaagttataattaaaattttcttccatgttgcatgattttgaagttaggtaccttaggttagaacctttgttagaactggcatctaactgcattttcaaaatgt

SEQ ID NO: 7623 - DNA, 499 bp, Glycine max
  Clone ID: PAT_MRT3847_106895C.1
ggggcaaaattttgggggaaaaaattttttcccccccaaattggttggggaaaaatttttattttacaaaaaattccccttttttaatttacaattttagacgtaatcaaatcccccagccgaaaaaaattggggaaggggccccaaattggggatatttatatatttggactatataacggggcccccaaaaatttggttataaacaaaaatttttttttttggcccaataaaaagggggggggccccccttgataaaaaacaaacttcttagcttcttgggggtttttcggcactggcatcacttttatcacttttttcaggaaacttggataggggcctaacatccaagccggggatatacttttggggtggttgaaaattttttgaaccctttgttatttaaaagggttttaaagcgcctttttttgcaacaaggctaaccggggtttttccatttttaataccctccggtaagggaggaccaaaaatagggcct

SEQ ID NO: 7624 - DNA, 512 bp, Glycine max
  unsure (1)..(512): unsure at all n locations
  Clone ID: PAT_MRT3847_106896C.1
gttaattgttactgtacgtcttgtagtcccatcaagccaagttggttgtttgataggaaaaggtggagtaatagtttcagaaatgcgaaaggcaactggggctaacataagaataattgggactgatcaggtgccaaaatgtgcatcagataatgatcaagtcgtacaggtttggagattatacttgttttattttattttgcaattaaaacatgctgaagaatgcttttgattttctcagtgaatgtgattctgtgtatctggcaactttataaattgttcccccttaaattaaaataaaatttctcatccttcatcatgctaatttaataacgatattcccaggcttttctgccttcatcaatcttaattatgtaacatttaaatattttaaattatatgcatctaattgccacataaattctgcaattatgtattactttaggggacatttgcgatacagaatcttttttcatcccaaaaatatgctttttngaatgtcataatatgtt

SEQ ID NO: 7625 - DNA, 505 bp, Glycine max
  Clone ID: PAT_MRT3847_106897C.1
atagattatgatgggctttacatttcatataaaccagtaggcgacccctgctgataggggcccccacacaaaatgtattctacaaggattgcatgatacaccctaaaattcctacaccattccaattacaatcggaggagctgatgttctaattacatctaagttacggactgtccttgacactcacatgatagagtgcatctaagagaccccgtgccattgagccttccccgtgagaagtacctgacttcatgctcgcgtgcatcattgctccttgatgagaccccctttatatattattatccatacaggatgaaactaaaaatataaaattgccaccttgtgtcaatgcatacatgactcctgaattaactcatgaaccacggtgtatacatcatggatatagctgcaatttgattgcaaactagattcgctccggagatccaaaaatctactgtgatgttagaactttggtgatggttgacacctcattgattacattttt

SEQ ID NO: 7626 - DNA, 399 bp, Glycine max
  Clone ID: PAT_MRT3847_106898C.1
cttttaaccaatacaaaactataatttatacatatatatacatcaccttatttaccaggagattattacaccgggggccgcgccacaccaaatataacacattcaactctattaaatcaaacaatatctctcttcaatgttttttaaccagatcaaataaaattaccttcctgacaaaatacaaatatcagatttatgaatcacaatattcaccttaaaatagacgacacccatatctgatcaaacttatcaactctaacattttctgttaacaacctaattacttctaaatcctttgcaatggatcaaaacttataagccaaacactgtattacaatcgacaccattttataacactagctattttatcataaacacatatttattaagaatgattat

SEQ ID NO: 7627 - DNA, 389 bp, Glycine max
  Clone ID: PAT_MRT3847_106899C.1
tctgcgagaagacgacagaagggggggtgcagtgtttagagtagaagggaacgtcataccttcacacgagattggacaaaacctaatcatttcaatattcttttcgtgtcttacattatacacacagcctaacattaggctggttttatgcgttgcttttcatgctatttaaattactaattaacaaattaatacgaatatttgaacctttgcacccccagggttataaactattaactattattgaaattgcatactacttgcgtagaatggtatcatcaaaattgggagatacctacccttaacaacctatttaagggtattagatcacttttttggggttcaatatgtcagataatatgtgagaaattttatcaatttttttcttt

SEQ ID NO: 7628 - DNA, 468 bp, Glycine max
  Clone ID: PAT_MRT3847_10689C.1
gttagcaccgcgtagccagagaggcacaccaaacaccgatctaattgtaatttatacgtcaacgaagcactttcagatgactgaagcatatagctgtaagcggtgcgagttactgtaatgtagtcgggacgattgagacaggtataaactctaataatggctcagtgaagaggtgactccatgtcacgatatcataagaggcaagactctacttgcagattaagtgatcgtgacagtttacattaccaccaggcattctaacaggacaaccctaccgcgctgggttccacatcccctcattcaggatttcaatctcactatttcttccgactatcactggctactagttggatacaacggtgccggaaagaccactgtactaaaaatattatgatggaaacacttggtggagcctgacatgaatggcgtgctcggaaaatcagcttttgaggacaccactataatatc

SEQ ID NO: 7629 - DNA, 346 bp, Glycine max
  Clone ID: PAT_MRT3847_1068C.1
aaatatgactttcaaaataattattataagaaaataataatttttaattatacaacaattcatgattgaataatagcataaacaacttttaaactaatagtatattccaatcaatgttttggctgaaagttaaccctaagattcatatgccaagaagaggacaaataatgaggtatgcttcgacattaaaatataaaatctattttacatcaacaatatgttattcagcaaaaagaagaaattaaaaggaagaagaagaagcttgctagtggcaaaacatgactaggtttgcgccttccactggcatgttgaacttgactgaccaaggtcagcagattctaatgta

SEQ ID NO: 7630 - DNA, 288 bp, Glycine max
  Clone ID: PAT_MRT3847_106900C.1
agaggagaattttttaatattttttattttttttatttttttatatttaaaatttgatccttttaatatttttatgacaaaactatttagtgctttttgtgttaggctaattcattaaaaactgttgtttttatgtgagaaagcgaaagacatgataaaaaaatttattaaaaagtaatccatgatcaaaataccaactctaataactaatgaaaaaaaatttaatttgacatttataaggtaataaagggccttgaactaaactgcatgagaaccaaatcctccaat

SEQ ID NO: 7631 - DNA, 1653 bp, Glycine max
  Clone ID: PAT_MRT3847_106901C.1
agagaaaacagggtttgtattatttgcggggcaaatgtcatgattgagataactggccttgctgacataagtcatcattgaacttacacaccactcccacccattctctctcctttctatataacctcacacccacacggcccctcctatcactccaaaacctaaactccccttgcttttcttaccatctccttcaattctctctcactctcttttttctctcaccaaaacctttcacccaatatcctcaaactactacttctgataaattgctaatttttataaagctagctagagatgatggttcaaaaggaagatttgggtttgagtttaagcctcaacttccctcatcacaataccccaaatcctcaacatccgagtctcatgtcatcctctactcattcctcttctccttctggttgcaaccctcaaaaaccctcttggaacgaggctttcacttcttcggatcgaaactccgacacatgcagaggcgaaacgcgatcgttcctgcgcggaatcgacgtgaaccggttaccttccgccgtggacaccgaggaggaaacgggagtttcgtctccgaacagcaccgtctctagcgtgagtggaaaacgtagcgagagagaagaaccgaacggcgaagaacacgacatggacagagcctgttcccgcggaatcagcgacgaggaagacgctgaaaccgcaaggaaaaaacttagactctccaaagaccaatccgctatactcgaagaaagcttcaaagaacacaacaccctcaaccccaagcaaaaattggcactggcgaaacagctaggacttcgacctagacaagtggaggtgtggttccagaacagaagagcaaggactaagctgaagcaaaccgaggtggactgcgaagtattgaaaaggtgctgcgagaatctgacggaggaaaatagaaggttgcagaaggaggttcaggagcttagagcactgaaactttccccacagttttacatgcaaatgaccccacccacgacgctcaccatgtgcccctcttgcgagcgtgtggctgttccgtcctccgccgtcgatgctgccacgcgtcatcatcccatggcccaggcccaggcccaggcccagattcggcacaggcccattggcccgtgggcttccgcctctcccattacgcaccggccgtttgatgtcttccaccactgatcttgagggtgttttggtcattgtgaaattattattatttactattctgggcctacttgtaccaccgtgtaggtgtgtaaccccaaaaggagagaaaaattgggggaaacagaaagagtgagggagcggtcgaaacagcgtgctgtggaattgtgcggtctaaggatatggtcattagaagaagggatttggtgggtctccaatgttttgtaccagtttgacctatcatcttttgttttgttgggtatgacctatatattagttactagttaggtgtttttttttattcagtttatagtattacttaacttttccccctctaaacagagactttgtgtaaagtgcaattatctagttaaattatatagggtttggttcccgtggcctatttcacttaattgagatcattatttattattcttttaaaaattaagggcggccgccgactagtagctc

SEQ ID NO: 7632 - DNA, 121 bp, Glycine max
  unsure (1)..(121): unsure at all n locations
  Clone ID: PAT_MRT3847_106902C.1
ctggcatggganctattggtgtaaagagacanttngcagcatttttaaccttgacnccctgtgatngcnatggtggaattcctgcncnngncaaactcgcnacttggtancatcgcngntg

SEQ ID NO: 7633 - DNA, 151 bp, Glycine max
  unsure (1)..(151): unsure at all n locations
  Clone ID: PAT_MRT3847_106903C.1
agtttaggctttnaactctaaaacaagactanntgnngaactgctaaaataaatatcccaacataatctgtcaataaaatctgggcaaatttgcggatgttaagtgtaaccttcaaattgaaaatcttcaattatggcccaaaaaaaacta

SEQ ID NO: 7634 - DNA, 234 bp, Glycine max
  Clone ID: PAT_MRT3847_106904C.1
tggctgtgagaggacgacacaggggggctgcagtccaagagtcaggaggaaactgcatcttcctcagagatgctgcaatgttcaggatcttacagaatcttagggtggcacaccaggaatatcccattgctctagagactatcagcgtcggacacctgtgaacgtgatcatccagggggctgccgctgactatggtacttcgcagtgcgcccatgctaatggttaaggcagggg

SEQ ID NO: 7635 - DNA, 349 bp, Glycine max
  unsure (1)..(349): unsure at all n locations
  Clone ID: PAT_MRT3847_106905C.1
ccttgctactggaattatgtaaatataaaatttacgagaatatctgattttgaattcactcgaaagtntnccagatttggtctnctntacattcctgtgtggcattnctnnattgttgatcctcaagattatgacactgtgaatgcaattggatcaaagtcctataatgcccttatgggagagctagtctctcttgaaacactaatcatgaatgtccatcatgaaaataatcctgaagattgtgttgattttgttcttcaacaactgctactcttttagttccttctcccagtctttcaaataccaggtcgtttaatgattctcctcattctatttctgatcatattca

SEQ ID NO: 7636 - DNA, 907 bp, Glycine max
  Clone ID: PAT_MRT3847_106906C.1
aattatcatccttgttaattagtttgttccatttcttgcttcttaatttcttgatcatgtcacttgctggtaaaatcagcattgaaattggggtgcatgcaagcgctgcaaagtggttcaacctctttgcaacgcaactccatcatgttcaaaaccttaccgaaagagtgcatgaaaccaagctacatcatggtgatgactggcatcacaacgaatcgatcaaacactggacttgtaccatagatggtaaggttacaacatatcacgagagtattgaatccgttgatgaacctaacaaaacaatcacttacaagatcttcggtgaagatatcgatcaccagtataaggtctttaaggtcatctttcaagcaattcataaggatcatgggggtgcattcatcaaatggactattgaatatgaaagggttggtgaggaagttgatcttccatttggcttcatcgaatacctcaacaaagggagtagagatgttgatggtcatcttctcaaggcatagctccaaaagttatgtagaaattaaataaaaaaaataaagaaataatgggctgggcttgaggataaagtgcttatatttactatcggtgtgatgtttgacgagaaggatgcttatgtgttgatcctttcttttgtgtggaataaacatggatatgtctgtccgtgatgtccttgaagtatgttaaattataccttaaagtgctcaatgtgaagcgtataaatgaatatttatgcttattgtacataaaatggacagcgacgagaaaaggcatggttggagaggatatttacggtgttccccgttgcgtggacatgctagcgtcctatacaactaggcaatatctcccctaatgtcatctacataaaagtgtcaaaggacatgcaataaccaaa

SEQ ID NO: 7637 - DNA, 221 bp, Glycine max
  Clone ID: PAT_MRT3847_106907C.1
ggattaaaggggaaatttggcatgtcaacctttaaagggaaacagaataaacaactgggccactttttaaatcgagactatttgattttccgaagtaaaaattattttggggaccgggaaaaaaccaaaatgttaaaatatccctgtaacaaggaataaccaaaacgaacgttttaaaaaaaaaaaaaagggcttatgccacggtttaaacggacccgtgg

SEQ ID NO: 7638 - DNA, 367 bp, Glycine max
  Clone ID: PAT_MRT3847_106908C.1
gggggttgggccataaacaaataaaggaaaaagcaatagatttaaaccaaaaaatacaaagaacagagaaaaacagaagatgacgattaagaaaaaaaagatctttcccaaaaaaagggaaagaaatgaaaacgggcacactttcaccctcataacaaacacgaatgggacaaatgtggaggggattcttaaacaaggacccctgggcccaaagacgggacaggaaagttaacacccaggaaaactccttcaaacaggtgttggataagggggaaagggaaaagtccccccatcccgtaaggcctcgccccgcgattaagggcggcaacaacacaagccattttttaaacatgacacctggggcccc

SEQ ID NO: 7639 - DNA, 1612 bp, Glycine max
  Clone ID: PAT_MRT3847_106909C.1
gactcagtcgggcgagcctgatcgatttctgaaagaacaaagatgacggcggatattgggctgattggattggcggtgatgggtgagaaccttgttctcaacatcgagagccgagggttcactgtggcggtcttcaaccgcacgacctcggtggtggacaagttcttggaagcacgagccaagggcaagaagatcattggcactcattccctcgaggagttggtgagcaagctcaagagaccgcgcaagatcatgctgatgatccgagctggctccccggtcgaccaacagatcaacgcgctgcttcccttccttgaagctggagacatcgtcatcgatggaggcaactcccactatcccgactccaaccgcagaaccaagttcttgaaggagaagggcatctctttcatcggaactggtgtcagcggtggagaggagggagctttgaccggtccttccatcatgcccggaggagaccccgctgcttgggagcacgtcaaacccatcttccaggccatttccgcgaaggtcgaagacggcactccctgctgcgactgggtcggagaggatggtgctggccatttcgtcaagatggtgcacaatggaattgagtacggagacatgcaactgattgctgaggcctaccacctcctttccggcgtccttggactctcgaacgacgagctcgctaaggtcttcgccgaatggaacaagggagaccttgacagctacctcattgagatcacctctcatatcctcggcaagaaggacgaagagactggcaagcacgtcgtggatctcattctcgatgcagctggacagaagggaactggcaagtggactgctacctccgctcttgacttcggcattcctgtgaccctcattggagaggccgtcttcgctcgctgcttgagctcgctgaaggatgagcgagtgcaagccagcaaagtgatccctggacccaaagccaacttcaccggagatcgggaagtcttcattgctcaagtccgagatgctctcttcgccgcgaaggtggtttcctatgctcaaggctttcttttgatgcgctctgccgcccaggagttcaaatggaatcttaactacggtggcatcgctctcatgtggagaggaggttgcatcattcgctccactttcttgggcaagattaaggaggcctacaacaacaacccgagcctgccaaacctgctgctcgacccttacttccaggctaagatcgagtcggtccagagcgcgtggcgcacagtggtttccaccgccttcttgaatggcattcccattcccgctctttccagcgctctggcctacttcgacggtttccgaaccgagcgcttgccagccaacctcattcaagcccagcgtgattacttcggtgcccacacctacgagagagtcgacaagccccgtggagagtacttccacaccaactggaccggtcatggtggcacaacctcctcccgtacctacaacgtctaaaatcaatccctcccttcctctgtccatcccaatcctgttcccccaacgaacaacattgcaatcgacaacgttcccaccgttccgtcacccattccttagtggaactgattgaccaacg

SEQ ID NO: 7640 - DNA, 240 bp, Glycine max
  unsure (1)..(240): unsure at all n locations
  Clone ID: PAT_MRT3847_10690C.1
anatncncgcgnacntnagctcggattnggctcgagtcncagnagatnaacaacngcngaancnagananagcacacatgttcgaggtganngagnatcggncgtggnnaggcatggcccacatgggctcaggnatcgcncangttgcctnnccatgcaacggcatcgacgtttagnttcacnangtngancnnncacanctctccgaaanccncatcttccanntccttntacataaac

SEQ ID NO: 7641 - DNA, 3221 bp, Glycine max
  Clone ID: PAT_MRT3847_106910C.1
ttgaaagtactactattttctcttctcttgtctattcccctaacgcgttgcttcttcatttgcgtggttttttaacatttgaaaactcataattcttatcttcacacatagtgctagtgcgctgggcctgcatctgtggcctctctcttcctcatcctcatatttcattcactttgtgggtcaaaatgtcttctctcttcttctcttcttttattaattaattacagaaattgtcagtttctaaatcagtgctagcagagagaaagagaatataactatataaggcggatcactcaacaaaccaatgggtctacagctgtccctgacatgatgaaatcttagtttactaagttgtccatttgagctaagcaataagcatccatttaataaaattgcgacgtggtgtgaggaccagcagtataattttccttcagcaaagcaagttgcggttgtggatgtgttgctgagatgttcagacattttctgtccttttctggttggttctaatagggatcttcctcctcatcgacattcacgagattaaccacaaacaatttggacccatcaaacaatgacgaggctatgcaaacgagtaaaacaaaaacaatagggtcctgcaggaatttccctctcggatagtagtccatttacttcagcccacttggttgaagttgaagtattcgaccatcgcaagctaaaaagagctctaaagttcactagggctgtagtacacccagagatcttccttgatgaagatggagaaatataatcatgttagacattcatcgtggtactatcatattaaacactgtcatattgcgaaagagagacacctgaactggtgtactctcctctaaactgagcctcaagttatcaaattcaaggagcactcttctcaagttagctaagagcgaacactccatcgcgaagtgattaactgagatatcaagcttcttgccaatcttttttggcataagaagccctagagatggtaatagctctcaactttacctagtcataaaacaggatgttttatttttattaattaattttcataccgagtatacagtaattctttgaatttgatgtattacgtcgagtgaggaccatttagatcaaattataacaaacaaaacgaatggacaggcagctctggttcggggagttggattatcgtatcaaggtgttggatgctcaggttagataattggttgctcgaaagaagtgggatgagttgaagaattatgatcagctaagcaaagaattgcgtatggggcatgtatttgatggatggaaagaggggttgataaacttcccacccacttacaagtatgaaattaactctgatagatatgttggtgagaggccaaaagaaggggaaaaaagaagatctccagcctggtgtgatcgtatattgtggctaggcaaaggaataaaacaactacaatatggacgtgcagaaattaagctctcggatcatagaccagttagttcagccttcttggttgaagttgaagtattcgaccatcgcaagctaaagagagctctaaatttcactagggcagcagtacacccagagatcttccttgatgaagatggaggttgagaaggcacattaacaatttgaaagtttccccggttggagttggacttatgggctacatgggaaacaaggggtcagtttccattagtatgtctctctttcagtcacgtatgtgctttgtttgttcccatttgacttctggtcagaaggaaggggctgaacataggcgaaactctgatgttcatgaaattctaagacgcacttgcttctcatcatctgtcttcgatgcagatcaaccacaaacaatcccatctcatgaccagattttctggttcggggatttgaattatcgtatcaatatgttggatgctgaggttagaaaattggttgctctaaagaagtgggatgagttgaagaattatgatcagctaagcaaagaattgcgtatggggcatgtatttgatggatggaaagaggggttgataaacttcccacccacttacaagtatgaatttaactctgatagatatgtcggtgagagcccaaaagaaggggaaaaaagaagatctccagcctggtgcgatcgtatattgtggctaggaaaaggaataaaacaattacaatatggacgtgcagaaattaagctctcagatcatagaccagttagttcagccttcttggttgaagttgaagtattcgatcatcgcaaactaaaaagagctctaaatttcactagggcagcagtacacccagagatcttccttgatgaagacggcgaaatataatcatgttagacattcatcgtagtactatcatattgaatactgaaagtttaaagcttggctgtctttgaagtcatgttgtgaatgagagacaattgaacttgtatactcttttctaaactgagcttcaagatgtcaaactcaaggagcactcttctcaagttagctcagagggaagcatccattgtgattaactgagatatcaaagcattttgccaatctatgttgcataggaagccattgagatagttataacagtaaactgtatatagtcatacgaaaggatggtttgttctttttttttttatacctagtaaacaatcattattcgattttggcctcatcaaacatgtgtgtcccatttattttatatttttggacaataaacaattggggtgggtggtttttctgtaacagtgcacaggttctatgtaaactaatattgatttgagcattgattttcatgtattaatgaccttggctggtttcagcccgattgttgcaaattacatattaccactttgcttgacaaaaaattggggtattataaacatactactaattattggtaaatatacatttctatcttcaaaagctgttatgtaggaaatgctttaattaaagccaacggactgggcgttagcttgccagatcatgtaaaagatgtcaaattttaagggtcacactaccaactagttctgcaggcagcttcctttttgaatctctttttggagtcttaaccattccaattaaaggtagctctaacaagcaaatgtacatagtcatgcattaggatactgtgaaagttttttctctgtatttaacatctgggtgtccaattttgatctagttaacttccaagttaatatatctaagttcccaatgtagacaccaat

SEQ ID NO: 7642 - DNA, 213 bp, Glycine max
  Clone ID: PAT_MRT3847_106911C.1
cggacgcgtggtcgtacacgagcatccgacattacaattcactggctatcaaaaccggaaccgacacacactcacttcttgaccatcttaacctcatctactatataccttatcgtctaagagtctctatctcgatctaacactataacacactgctaggaattcggcacttaagcttagtctttgacaagctgaccgcctttacgtccccaa

SEQ ID NO: 7643 - DNA, 279 bp, Glycine max
  Clone ID: PAT_MRT3847_106912C.1
cttccatgggctttctcctcattagaatttggtggctcttgagtaaaagcatgacttagtttcccaattaatgtgcttgaattgaatatgtcactgaggatatcatagttgtactcaaaaccatgtttcttgaaattcttgtaatgccttcctttttataaaagataaagtgtacaatgtcaatactaagcaatgacaacatacaacaataacaataacaataattttaggatcaagttataccttaatcaatccgtcccatactttcggggcatcaat

SEQ ID NO: 7644 - DNA, 408 bp, Glycine max
  Clone ID: PAT_MRT3847_106913C.1
aaccacgaccattaaggaatggttttcttcttttagctattagacaaaactggcgtacatcttattttggagggaaaaaaaattatttaaaaaaaacccaagacttgcaagacccccccaaattgcagttccaaaacctaaaaattttttttccccttggaagccaaaaacttcttttaaattcctcccaccacctagttcatttttttaggatctctgacctacatacagttttacatggtttttgccactttaaacaactcccctgtcaaaaacaatttgggggggcaccagggggttccctcctgaaccacagagtttataataaacaaaactttttttgggttaggcaaaccaccccccaaaatatttgttttttttgtttgggagccaaacagaaaacctcgg

SEQ ID NO: 7645 - DNA, 692 bp, Glycine max
  unsure (1)..(692): unsure at all n locations
  Clone ID: PAT_MRT3847_106914C.1
agcacctgagaaagcacnccgtcctccaccaccactgttgatcccttactcaagatatgggcccaaagcagagattacccatatattcaggtctcctgaaaagagacctcaccaggaactctctcttgctttcttgggtttgatccttttgccattcattggctttttggttgggttattgcgcttgggggtgaacctaaagaatttccctggttcaacagtacctgccacatttgggatccttttccatgttggtattgcggcggttttgttactttatgtacttttctggttgaagctggacctgttcactacactcaaagcatttggtcttttgggagctatactgatgtttgtggggcacagaattctttctcatctcgcttttacatctgccaagttgaaatctgcatgagtgaaacaacaaataatttctatttataaagacaatgaaaatttgagtttttttttcccttttaaggaatggtactaattcaattttgtaggaccgttgttaaattatctaatgacaaatttagagagctcaattgtatcctatagagaagagaactcaattacattgcaagggaatgtttggtaagagagaaattcttggtttttcgagaatcataggtctggagacttagtttctcatatttggtatcaattttaagaaaataatatttttgggg

SEQ ID NO: 7646 - DNA, 544 bp, Glycine max
  Clone ID: PAT_MRT3847_106915C.1
gggtctgcaaaatatgtatatatttatatggatagtataccaagagatacaagaagtatctctcacattggggtacacatgtgtctacaaacgttacagctcaacatattaatcataataatcacaataaatatggacgatgtcttgcataatcctagaaatagaatgatcaaaattcacgttgttgaatacctcattttttcctgaatctcattaaattccagctgaccgatccctatataacccacgcagcttctccaaaattgtaattcgcattccaagatccgcaataacttaaccatgaaaagcacacaaaatacaactacttaaaaacaatttaagaaaaaagctatttacctaaacctcactcgaattttcccagtgacgagccaattgagacagggtttgtgttgaagagccatctttcagtgcattagcagagaaatcttttaaattcatctttctttcacgttttcctttaccttcttccccttccatcagacactttatcaccttcgcaatttccttcttctccactatgcca

SEQ ID NO: 7647 - DNA, 364 bp, Glycine max
  Clone ID: PAT_MRT3847_106916C.1
acccttccggaggtagatagagtgaattttaaccccatttttcgcctcttatgggaaccaaagctctgttaacctggctcactactcctttgatgttgaaccaattgggttccttccgcccttgctttctggctgccgttccccaccactggcactaattgcgtctccgttgaattccaccacaccgccgccgttttggccaactccgtcgttttccccagtgatcaagccaacaacctaacaatggccggtaaggtgccatcaccgtttggaaccattctttattccagggggaccccaccccttggttttttggcttttacaactcaagaggctgggacctaccttgcttgcttctgggggg

SEQ ID NO: 7648 - DNA, 622 bp, Glycine max
  unsure (1)..(622): unsure at all n locations
  Clone ID: PAT_MRT3847_106917C.1
ctcccatcctcttatatcaaacattaataaggagtacttaacattggcaacaagttcatttatcacaaggccgtggaaggagacaacagtagttagtagccatgacaaccaatgaagacaaggaatggacacttttatatgagttttggagcagtggcatgtgcctcatccacttctctttcacacaagccttgtacgtggttaggtttgtgcccttttgaggagacacaaaaccctaatccttggatttggttgggggttggccaatgggccaagaggcttaaagaaaaacaaaatgagagaaaagggttagacagaggcccacgtaggattaaaaaaaaggctggaaagtctgctactctggtaccatatgctgcttagatagctccccacttgtcactgccccaccaccatgaccgaacctttggtgcttantagtatgagaaaatagtgcatatatacgattttgccaaatgatatcgtggttaaagatctaatgccaactctcccaccatctttatagatgggggatttgaattcttcttggcgccgttttcctatttgatgggcaagnttcttctagagattaggtggagtcctataccggagggaaattcttgcg

SEQ ID NO: 7649 - DNA, 543 bp, Glycine max
  Clone ID: PAT_MRT3847_106918C.1
accaaaaaaaaacggggataatactctttaatcagcccccccaaacttaaaaaatcccaataagttaataaaaaaaaaggggaaaaaaaaaaaaacaggcaaaacaatgatcctgaccaagtaccaatggtttcaaaaagatttacaaaaaaaaggcttgtttgggttgggttcggggccccccccaacggggaaagccttgccttttttaaaaatattggcaacagggtcattggaaaaaagggattttttactgaaaaggcggtatatctctgcaaaaatagtctggaaagcattctcaacattagttgcttcaaaaacggaagtttcaaaaaaaaaaaggcctttcttttggggataaccctgagcatcctcgggggcaacagctttgaaaagcttgaaaacaattttgttccccaacaacatgaaaacaatgttaacatcggggggatcccttaactccttgagccatcggctaacattttcaaatgggggggggttagggacatcggaaacaaaaaaagctccaagggccccccggga

SEQ ID NO: 7650 - DNA, 1329 bp, Glycine max
  Clone ID: PAT_MRT3847_106919C.1
agttcgagaaatgatgagataaaaaaaaaaaagtagcattgtctacaatgagatgaccgatgagataggtcagatgagataaggccttaaaaaggaaaggaaaaggatattaaattgggtgatataaactgcaggtgaaattgaaattgctgacaaataataataaaatcgagagagagagagagagagagaaatagcataaatcggacggtacaaaccaggagatgactcaatgcttatccactacttgcaggtctagaaaatgatacaatatgacaatgacccatgggttaataatttatcagtttttctttcgggaggccctcgaaaacatgtctttgatgttgtgtgattctgtctccaattttaccttctttgcttgtctacctttctttgcagttgtagccttcttatcattactctgttcctgtaattcattacgtaaacctgggttactttccttcggcatttacttgtgcttttccagtaacctcgagtatatttaacttaagatggtcacacaaaagctgcaaccaaggcttttccttcaaatactctcctaatatggagactgcatcaatcaatgtgtctttctctgattgaacagcatagtttttgtccaatttgggtagtgtctgttttagctgacaaaccttatagcacagccaacgtagaacctttgagtcatcaagtctgaaaaattttgaagatccaatttctttgacttcagaaactactagcatacagttctccacaacagacatcaactgcatatatcctggatacccatcaataaacaatatctcatccagttgcctgaacctcccaagatcatcccctttcttcattctagcttcctcaaatataggcaacatgatgaaaacaggatcaattggtgtggataaatacatccgaccatcttcagttatataatctcccaaaaaccaagatccatacaagttcttaaaccactgaagttcctgaagcattccatttacaaacagatattgtgttgcatttccagatttgggatggcggagcgatatcatctgtcccagaccatttccatcagtaccaggatcgggtgcgacgagaatccgtggttcctgaacgctatcacaccaactcatgggtttagcagaagaggattcaaaagccctaacacagccagtcaccgatcgttccctcccccggtaactttaactgtaacgggatactgttaatttcagatgtagaaagaacaagaacggaataaagaaagaatgctttacattatctcgagccgacgcgtccgcccacgcgtccgcccaagagtccgcggacgcgtgg

SEQ ID NO: 7651 - DNA, 528 bp, Glycine max
  Clone ID: PAT_MRT3847_10691C.1
ggttaagctccagctccaacttcatttttgacattattcatagtcaaggcaatttgtttgcagatcaggcactggttcctgtgaatgagccactgtttgatgcactgcatgtacgtgagacttgtgcacacataaatccagcttcgcaatttcttctccaactccatatattatcctggtacacatggaaacaaattttgtaagagaaaagttaatatataatacaaattcaattatttgttttgtatattctttatttttatttattttaattatcgaagcaaagttgagtgttcacaattgtattataacaataacaaatatttaacatccaaaactcttattcgatatgaaatgataatcatccagcctcttcctttttttttaaggctaaatttattgcaacagcaattggcacgatatatgaccaagctgacagtaacagggtacagctacaagagaaaactaaaaagagaatacagtggctatctaacttatacaatcaataggagaatattgtaccatgaa

SEQ ID NO: 7652 - DNA, 468 bp, Glycine max
  Clone ID: PAT_MRT3847_106920C.1
acgaccttttttttctttattttttttttttttttttttttttttttatttttttttttttttttttttttttttttttagtttttttttttttttgtttattgttttatattgctttaattttttttgattatggtgtttattgtattcgtatgcttctgaggagggaaaaaaaaaagactgggggagcaaacaggttttgcttctcttttggagcgaaaaaaaaaaagctattttctgccccaagagagaaaggggggggactactctcccggaaaacaaagcaaatgtgaattgcactaactggctcccaaaaaaaaaggggggatttaaagcaaaaaaccgcatcattttttttccgcatacgggagatgcaggatggggcctataataaaaaaaaaactgtcccccgccgaagaaaaaaggaggcaaggggggggggtggcacacccacacaaggaggggggt

SEQ ID NO: 7653 - DNA, 366 bp, Glycine max
  unsure (1)..(366): unsure at all n locations
  Clone ID: PAT_MRT3847_106921C.1
tctgcgagaagacgacagaaggggtcctgttgtgatgcctttgcaggtcatagctttatatataaaaaattactattgcctatgatattatgataaaagaccaaattagtatatgtataatactatagggtatttaaaaaataaaagtgactctaaagcaatagatgagaataataattccaaatccagtgtttagtttaatttagagttatcaagcttccaataagcatggatgtctcaaactatgcctagctttttgcaaccataatacaataactacgttcaacattagtatcaacanatagaatnatcatgatatgacatactttagattattgaacctcacttgacattctatgatatctg

SEQ ID NO: 7654 - DNA, 489 bp, Glycine max
  unsure (1)..(489): unsure at all n locations
  Clone ID: PAT_MRT3847_106922C.1
taagatnagacttcagctcgagctcaaactagacattaagcttttgatttatcgaacttttttttcaccacccacactttcatcaattggggatgtcactacagcaacgacgaatacctaaattctacccctaatatatacactcgcatttacccatcatcaactacaactgactaatcaaccctttacaaaactcatccatataccctctatccaaaccaagcataacaatattcgaaaaccaatcgcaccttcaacacatattaaaaacacatgccctcacaacattaaccacagaactcatcttccaaaaccttaatttacacatttataattatcatcttctatgcccaacatgaaactatcacttccactccaattgccaactttttaatacctcataatgaaacatctccttccatcctacatatataccccttccatcacacaaatcacttttttactacactccacaaataataaacaccc

SEQ ID NO: 7655 - DNA, 253 bp, Glycine max
  Clone ID: PAT_MRT3847_106923C.1
gactcaccacttacgttattttggacacacccgtactgctgatgctatggggatcttgctttaaaggtggtgtgatgctctccctctctcgctcatcgcgttaatatgctaccatatcgatacatcctgccacagcgtacgacaacctgccataccacacgtatgatgactcatattggacatccaactcttaaacacatgcttattatacccacgccgaaaaaaattctcaagaaccatatgtggccttaag

SEQ ID NO: 7656 - DNA, 343 bp, Glycine max
  Clone ID: PAT_MRT3847_106924C.1
gcgggtagaaaaaaaaaaaaggcaaggccattcttgacggttgctggtgcttattaacatagagctgggcttgttccttgcaaaatcaacattgattaatacacacaacgatctggggagtgactaatagcaggcctgggagaatagctaactccttacatgctagctgaggatatacacactctacgctgtatttaatccaagaatttcacatgaaatattgccttcattgccaaacaggattcccataaaacgaatatcagtgtccaggacaagcctaacaacatcccctctgagcaagaaagattcatgatacaagactatacttatctgattgcatgac

SEQ ID NO: 7657 - DNA, 912 bp, Glycine max
  Clone ID: PAT_MRT3847_106925C.1
ccgcaaggagttccgcactgcgctaaggcctgcggatgcgagatcacgcgagtgaggaactccttgcggacgccggggagcgccaggaggcagtggtgcaccgggagctggacctcgccgacgatgtggaggcggtggcggaggaggagatcgtagttgcggtgaattgagccgccgagggagttttcaaccggcaaaaccgcgcgatccgcgatccagagctccaccgcttgaaacgcagcctcgaactggtcgcacggaatccaggacgatccgaacaacgtgacgcggttcgtgatgctggcgcgcgaaccgatcattccgcgcacggatcggcccttcaagacgagcatcgtgtttgcgcacgataaaggaacctcagtgctcttcaaagtgctttccgcgtttgcgttcagaaacataagcttaactaagatcgagtccaggccgcaccgtagccgtcctattcgcgttgttgatgatgagagtgagggaaccgccaagcactttgagtatctcttttatattgatttcgaggcttctatggctgaggttagagcacagaacgcactcgctgaggttcaagaattcacctccttcttgcgactcttggggagttaccctatcgatatcacaccctggactccctcttctccgcgccaaaattaacatccacctccatttctttcatctcaactgtatatatatatattggagcccctcattgcacataatgtgcttctgtttatgtgtttccaactttccatgggggtgacgaatattttatgtttcaagtttttgcacgtctgaaaaaagtgtacaagaaggggaatagaatattcggcttggcattttcataattgaatttgctgattggggctctggtctgaatctacgtggtcgctatgttcc

SEQ ID NO: 7658 - DNA, 352 bp, Glycine max
  Clone ID: PAT_MRT3847_106926C.1
gggaaaatgggcgccttaattgaatgcgcggcgaaagagttaacaacctcatgatgttggtaccttgacttgcttacacacagttgtgactgcttaatgaggatcttgaggccctttttgatccctttttatttcatatttaacgatccgtgcatgctacatgggggagaggtgatggatctactgaatgtagtacatgggatgagggagctcaaaggttatgcttcctcctcagaggccaacgtggggatcgttccattggcctccaatgatcccaacagtgttggatccttgtcttatcaggttctctgtcaaggctgttatggacgaaaccgtctttggagtggacgga

SEQ ID NO: 7659 - DNA, 355 bp, Glycine max
  Clone ID: PAT_MRT3847_106927C.1
catgttgtattgtctagcaacaattatgggtccttcatactgtctttatgctggaggtgtattcctagccactattcattttcatacatattatccctttcatccacccaatgttgcattcacaacaaaggtatttcacccgtatatgtacttctatggtagcatttgccttgacttattgtaggaccagagtagccctgctctaactatttaataggtgttgctctcgatctgatccctgttgacggaccctatttctgatgattctttggttcccgtattagcccatattttcaagacagacggtttctagttcgagtcagctgtcataagctggacctataaatgtgcgatg

SEQ ID NO: 7660 - DNA, 476 bp, Glycine max
  Clone ID: PAT_MRT3847_106928C.1
agccccccatttgggtgttagaattcaattggaaggtgtgagacttgagtctcaaattggaagtgttaaggctaatactagcttgttagaaataagctctatatagagagagcacttacctactgtaaataatcttttatcctttttcaatcaatatgggtgttttctatttacttttgtcaaatgttaattgttagtattgttagtttatgttagcagaggtaatcaagcctgtgatctttttcctctttccttctcccttaactactcaacccatcttatatttccatatgggtgttttctatggaattggaacgcctctactattctttgagttgtatgatgtgtgaccatatcaaatgggtgctactaatatggaattccagtgttaaggctctccaactacagcaagtagctttttgtggtgtggttcttgcaagattcttatcaattggtatgagagcatttcatcatgt

SEQ ID NO: 7661 - DNA, 689 bp, Glycine max
  Clone ID: PAT_MRT3847_106929C.1
gcgctatcccggctgctcccgcggcgccagggtgcggttgctgtaccattgcgtgtgtgtgatgtagactattgggagccgggcccgcggcgaaggactggctcgaaaaatcacattcacatatcaatagcatcaacacacacattattagagaagaaaagagtgagaagcagaaaaatgggagcagaacctttgtccaagaacgaggttgcacttgcacaaacacaagctcccttcgttcttgggctccaaccttcagcacttgttgaccacgtggcacgtgtggattggtccttgctcgatcaaattcccggtgaacatggtggctccatacctgttgagcttggagagcttgaacatatactaagggaggtgaaaattcatattgtctcatgccatgacaatgatgatgatgattatccttcttctcacattaagaccttggctggaggcagtgttgctaacacgattcgaggtctaagtaatgggtttgggatttctagtggaattattggggcgtgtggggatgatgagcaagggaagttgtttgaccataacatgagctccaatggagttgacctctctagactcaggaagaagaaaggacacacagcacagtgtgtttgtttggttgatgacttgggaaaccataccatgcagccctgtctctcaaatgctgtgaaagttca

SEQ ID NO: 7662 - DNA, 293 bp, Glycine max
  Clone ID: PAT_MRT3847_10692C.1
aggacttgtgggaacacgaagcacgaaagcggacaaaaacggaaccacacaccagggaaaagaccaccccaacagaggggcgaggcccaaacaacggcaaggaaaagcggagcaccgagagggcaaaacaaaccgcaaggcacaagagaaacccaaacgacaaacccaaacagaccacagccagagacaaacacaagggaacaagcccaagacaaagaaaacgccggaaacaccccgaaagccaggcacacaccgaaccacaggcaaccgccagaaccccggaaaaagcggaa

SEQ ID NO: 7663 - DNA, 201 bp, Glycine max
  Clone ID: PAT_MRT3847_106930C.1
tcaatactagaaatgaactcattatttggggggcatgtcaaccgcgtacaaagcagaagttttagacactgttgtgtcaataaccgaagcagcactagggcatgacagaacaggacggaattcacaatgtgaatggagttttattcacatttgacatatttagttggatatcattgaaatgggatatacaattactaaaga

SEQ ID NO: 7664 - DNA, 208 bp, Glycine max
  Clone ID: PAT_MRT3847_106931C.1
agaggggggcggggtacgccccgagattttccccccgggacatggaggccccccacatttccacaaaagaggcgatcctaaagcctggagtgtaaaggctggggggccttccgggggagaaaacttacaccaattgcaatgcccccaatgaccccttcccagacaataaacctgaaacgccgggggccctaatggagcggccaacccc

SEQ ID NO: 7665 - DNA, 579 bp, Glycine max
  Clone ID: PAT_MRT3847_106932C.1
aaagaaaaaaagccctttaaaccaaaaacaggtaataaaacttcgtaataaaaaaaaggcaactaaaaacatccctaaacaggaaagggaaggggctaaaaccctatgggggggggggaaaatcgaaatatctaaaactttttttaccatcaaaacaaaaaacagtgctcattaaaaacaaacaggaatgaaaattggcccccggcgaaaaagaacctagttttgaaaggtacggctacatgaaatcggaaaaaacttaaaaatataacttaaacaaaacacctaagactctgcagggaaaaaaccactataaagggggaaccccgatgaggatcccatgggctagcaaaattgcccaaatgcaatcacttttttttgggagcggccttggtgaccttgggtccggggggggctttcttacaaacactcttgatgactcccacagccacagtttgacccatggccctcacagcaaaacgaccaagggggggatacccaaaaaaaggttcaaccaccatggggttgggtggaattattttaaccatacctggctcaacatttttaaaaaatttggggtcc

SEQ ID NO: 7666 - DNA, 866 bp, Glycine max
  Clone ID: PAT_MRT3847_106933C.1
agcattagtatgtatcagcaacaagggtcagatccaacaaagcaatcaccggcaaccggttttccggtgagctatagcaattcaacaacgtattcgaccaacgaggcttcctacgctccagtcccacctccccagcccaaacctcttgtcgattggtccaccggcctctgtgactgcttctccgaatgtggaaactgttgcatgacgtgttggtgtccatgtgttacctttggccgagttgcagaaattgttgacaagggatccacatcatgtggtgctagtggggctctgtatacgctgatttgctgtgtcattggctgtggctgcctatactcttgcttctaccgccccaagatgagacgacagtatggtctaaagggaaatggttgttctgattgcttgactcattgcttctgcgagccctgcgccctctgtcaagaatatcgtgagggaatgtaccgtggcgaactcgggattattgggtggcatggaaatgtcgagcatcagttgaaaatgtagccatgactgctacaacagctccatcagtcgaaaatggcatgagccgttgaatagtatgcagttctgtaactaagacaatgtgtctacgatgcttgtgttaatcatgaagaataataatgtttgaagaatgtttcattcctttttttcgttggactacttttataatagattcggtgttcagcagcatctttttctggatccaactgaggcaacgaggatactaatataagttcttaagcatttatcttaacttccgccgctaggctgatcgtagtggtttgcaatgcctctatttattaaataaaatgaaagcagatggatgtatttatccttttataaaaacggaa

SEQ ID NO: 7667 - DNA, 601 bp, Glycine max
  unsure (1)..(601): unsure at all n locations
  Clone ID: PAT_MRT3847_106934C.1
tcgatctatcgtctagacaatcgtacccagagtgcctgtacaccccacactgtacctggatgcagccaataagtggtgctgagtaaagctttgattagagtggagtagggccggcctattaaaaacaggtaataccaatggctaaacttgccgcggtggcacaccgggcgacaaaatagacattataggcttaaaggctcgctagctgggctaccaggcgccacgggccaacatgtccagaggctgaaaaaactaaggcaaaagttacacggagggcgcagcaacttgtaaacacaaccaccaccaaataagagggagccgcagcacggcacccaaatttgttggaaaggataccaactaccggtgcaacaacagctactagatagttggagctacaccagagggttacttatggtgttactaaggggccgctcgcagccgaaggcccagaacccgtagcgtagggtacaactgccacgagggccgatggagggaaccaagaaccagaaccggagtaggaagaatcaaacgcctgagagccgctcgataaaaagagtagtagtggagcaaccgccacgnggcttgccggggccacgccgac

SEQ ID NO: 7668 - DNA, 719 bp, Glycine max
  Clone ID: PAT_MRT3847_106935C.1
tcgaggctcgaggcggcgggccgatcgtatccaagtccaataactatgcttgagcaacaagggtcagatccaacaaagccagcagcggcggcaaccggttttccggcgaccaccgaggcttcttcctacgctccagtagcaccaccccagtccaaacctacagtcgattggtccaccggcctctgtgactgcttctccgattgtggaaactgttgcataacgtggtggtgtccatgtgttacctttggccgagttgcagaaattgttgacaggggatccacgtcatgtggtgctagtggggctctgtatacgctggtttgttgtgggtggccatactcatgcttctaccgctccaagatgagacggcaatatggtttaaagggaaattgttgtacggattgcttgcttcattgctgctgcgagtcctgcgccctctgtcaagaatatcgtgagcttaaacaacgtggatttgacatgattattgggtggcatggaaatgtcgagcaacgaattcaggaagtagccatgactgctgcaacacctccatcagtcgaaaagggcatgagccgttgaatacatccagttcgatctgtaactaagacaatgtgtttctactttctacgatgcttctgttaaacgtcaatttaaaatggttgtgtttaaattgctaagaaatgactttattatctgaattaatcaaatattcaatgccctgcact

SEQ ID NO: 7669 - DNA, 2985 bp, Glycine max
  Clone ID: PAT_MRT3847_106936C.1
gtacaaaattcccgaatcggcgcggggccatacattcccaaagaagaacgtggcctctctgctaaaccccttatcgtctccaaaaatggcttcttctatcataggcgtttcctccatttaccaaacaccccctctcgaactataccagaggccaagcactgcttccacttcctccgttaggttgcaatctttagactccaagtctcacttcaacaacctcctccgagcccaccgccactccactggcccgggcctcaagcctacaccatctttcgtcccctccgccgtcgccacccccaactcctccctcctcagcgaagaagccttcaaaggacttgcccgcgaattcgaccaaaacgacgaccaattcacccgcgcctcctccgccgccgaatccgttaaccccgacgaactcgacatttccaagctcgacttgccctcgcgtctcgttgagtctctccggagccgtgggattactcaacttttccccattcagagagcgttgttagtacctgcactagagtgtagagatatcattgcgcgagcgaagaccggtcatccggaaagacattagcgttcgggattcaaattattaaaggcctcactgaagatgagcacgcaccttctgaccggaagcctggtgagcttccgggagcttgggtgcttgctcctactagagagttggcgaggcaagtggagaaagagataaaagactctgcaccttaccttagcactctgggttggtctacattgcattcgtctggagctccagatactgcgctttggtgcggtgctgccggggcggtcagggcgcctcgttgagttgttgactcgctagacgcgaacggccttaggctcagtgaggttcaatatttggttcttgatgaagcggatccagatgcttgctgtggggtttgaggaagaggtggaaatgattctggcaactcttccatatcagaggcagagcatgcctttctctgccaccatgcccagtagggtgaagaagtaagcgataaaaaattggaacaatccgctaaaaattgatgtggtcggagaggatcaggaaaagcgagctgaaggggtaagactcaaggctacagaagcggctcccacgtaaaaaaattgataacatcacacagcattagtatgtatcagcaacaagggtcagatccaacaaagcaatcaccggcaaccggttttccggtgagctatagcaattcaacaacgtattcgaccaacgaggcttcctacgctccagtcccacctccccagcccaaacctcttgtcgattggtccaccggcctctgtgactgcttctccgaatgtggaaactgttgcatgacgtgttggtgtccatgtgttacctttggccgagttgcagaaattgttgacaagggatccacatcatgtggtgctagtggggctctgtatacgctgatttgctgtgtcattggctgtggctgcctatactcttgcttctaccgccccaagatgagacgacagtatggtctaaagggaaatggttgttcggattgcttgattcattgcttctgcgagccctgcgccctctgtcaagaatatcgtgagcttcaacaccgtggatttgacatgattattgggtggcatggaaatgtcgagcaacgaagtcggggagtagccatgactgctacaacagctccatcagtcgaaaatggcatgagccgttgaatagtatgcagttctgtaactaaaacagtttaaacatgaagaattagaaagatctgaagaatagtaattttttctgtaaggttcattttttatattcgatgctcttattaaaattgaagttttaatactttttaataatagtccattttattttttaacttttcttttcaacttatgtgttaccatttatcttattgatgctctatttcaattatagatactgtattacttagtatgtttttcagcacctagaaaaactcgttttgaaaaaatccaaactaccctctttttatattaatgagcgtctaaaagttttttatttgagattctctgacatagatagaagtagccgaagaggttctacttctaggggaggttttagttctaggggaggttccgcttctagggaccggagaggttttaaatcctcacggggctgggatgtggaagactccggtgatgactttggtgatcaatccagtaggagaggtggtagaaattttaaaactggcaacagctggtctcgagcagcaggtaaaagcagtggcgatgattggctaattggaggtggtagacgatcaagcaggccttcatcatcagacagatttggagggacctgttttaattgcggggaatctgggcatcgtgcatcagattgtccaaacgtttcaaacagacgaagctttttttaagttcccacatatatatgtttgggcaccacttttgtccaaacgtttcaagacgtgagctgctgccactgtttttgacctaatgggttccggaaaattgaaagatgcttcccaaaacagttacagaatcaattttaatttgcatctctcgtgttggcgtgatctccaaagggacctctgtttttcgtggagtctcaatgaaatttagtatttgttttgggaagtggtattggataaagaatagcgttaacagtatgattatgttatcttatttttggggtgagtttgggggattgtatgggcctgtattctatttaaccatgttactagtatttaatatctttctgaaccttcctggtttaggaacagacaggaaaaatgaatgaaagatgaaatcccaaaggtttatgcagaagattcatttacattcactttttctgcgtcatatttaaacttttccgaatgtggaaactgtagcatgacgtgttggggtccatgtgtaacctttggcccagctgcagaaagtgctgacaagggatccacatgcctgaatactgttttctatatcagatcagaacatacctagaag

SEQ ID NO: 7670 - DNA, 471 bp, Glycine max
  Clone ID: PAT_MRT3847_106937C.1
attctttcaggccaaggcaatgcaggatcccgaaattcaaaacatccttcaagaccctgttatgagacaggtttgcttcctttttgattgaatgttggtatgtattgtggtagtgaaacaagagtgaaatgtgcttataagttggatgcgtactgtctatgcaggtattgattgatttccaagaaaatcccaaggctgcacaggaacacacgaagaatccaatggtgatgaacaagatccaaaagctggtcagtgctggaattgtccaaatgaagtaaatttgttgcaggtggcagttcgtgtgaaaaagtaatcggcaatgatgtctcagtgtgactattttgacatttaaataggattttgattggggaaaaagttgggaaattttgagttgtttttaccttcgttttgttttagtgaattcatataatttacgagtatcaagtgccagtccatttttatatttaattg

SEQ ID NO: 7671 - DNA, 522 bp, Glycine max
  Clone ID: PAT_MRT3847_106938C.1
ggggtaaacatagttcccatccactgtgacagctcaaacaacttccagattactcccgaagccttagaggccgcatacaaagacgcagaagccatgaactccaaagtgaggggagttctaatcacaaacccttcaaacccattaggtgtaacaattccacgttcggttcttgaggagattcttgacttcgtgactcgcaagaacatccatctggtctcagacgaaatctactcaggctcggttttctcttcctccgagttcacaagcgtggcagaaatcctcgaggctcgccaatacaaagacgcggaaagagttcacattgtttatagcctgtccaaagaccttggccttcctggcttcagagttggcaccatttactcatacaacgacaaggttgtgaccacagcgaggagaatgtcgagtttcaccttaatatcttctcagacacagcacttgttggcttctatgttgtcggataagaagttcaccgagaactatatcaggacccacagggagaggctg

SEQ ID NO: 7672 - DNA, 409 bp, Glycine max
  Clone ID: PAT_MRT3847_106939C.1
aattcgagcggccgctttatttttactacttttcttttcatatctaaggaaaatatccgccccccctccttttttgctgagtttgtagagctttattctatttgctttaaacatgcataggactgatatttcaagatgaatcttaggtattatcagttttgtaaaagagagattgattatttgttgaatgctatttttgattgcttagctatggtaagaccctctactcaacattacggctaagatattgtaattgttcaatcaaaagatggtaaagttgttcttttaatgtgtgtgtggggtatgtgccatattccttttagtatgaaattttggaaatatgtaaggtaagatcaatctcatctgggtttgtttcgttaaatgtattagatgctggagaaaacaactg

SEQ ID NO: 7673 - DNA, 362 bp, Glycine max
  Clone ID: PAT_MRT3847_10693C.1
aaacccaaaaaagtaaatccctctgcttatttgggggaacccccgtttccgagaaacaaagggaaacaaggccctccacacccttttacattttttaaaaagggaggggttaaaaaagtttgagccaaaaccaagggaacattaaccctggcccaactttgtacatacaatttttactgggcatgaaaatatctttttttttttataaggacatgtttttttaccaaaaggaagatgctttttttttagggtttaagggagtcctgcaaagggggctttttatgtttcaattgtccaaccactttttcatgcccactttgggaaaaatttgggcccatgataaaaagtttacgggcccgtgg

SEQ ID NO: 7674 - DNA, 279 bp, Glycine max
  Clone ID: PAT_MRT3847_106940C.1
cccacgcgtccgactagatggtgcttttaggattttccgtgaaatgcctgagagaaatgtggtatgctggagtgctgtaattgcaggctatgttcagaatgaccggtttattgatggatatgaattgatgaaaggatattctgaaagtaggtatgggggtgagtcaatctacctatgctagtgtattcaggtcttgtgcaggattatcggcatttaattggggcacacagttgcatggtcatgctctaaaatctgattttgcatatgacagtataattg

SEQ ID NO: 7675 - DNA, 442 bp, Glycine max
  Clone ID: PAT_MRT3847_106941C.1
gcggtgtaaaagaaaaataaactgggttctcttaataccaactaggcgttcttgatggggatcggatagggcttctccaacatgggttcttacattaatggccaatgtgaagacactgggacttctctgcttctgttatatcctattgacactgagagtattgctaacgggactgaagcgactttgtatgatgattatgagggattgataacttgcagtgaagccatcaccacatgtatgactatttcggcgccgatgagaggtgagattagtggacaaattccggaagctgtgctggccaagttagatccttgggggagactgcgagtgtttgagatgacataaattcttccagagggaattggggaagatcaggaaattgttgatattgccgattatggtgtaggctgatcaaactattgaatggatcagttttgccatc

SEQ ID NO: 7676 - DNA, 300 bp, Glycine max
  Clone ID: PAT_MRT3847_106942C.1
cgcgtgttacaatatggtgcgcggatacaccattatcgtgctgggactcagggataccaacgggtacttgtacggagcactggccaacatctgtttcgctgggactgcaatggagatccgctcgcagtctcccggtacgtcgtgcatcatagtctcgaggaagatgcgcgagatcatcgtaggttccaaacggatagggtgctcactgacataggcggtacagtccactgaatcagaatcagtaggtcccaaacaatgggtaccgtgaccaccatcatctgaagctttcagtagcagcag

SEQ ID NO: 7677 - DNA, 417 bp, Glycine max
  Clone ID: PAT_MRT3847_106943C.1
acaaaagatcattaaccgtgcaattcttttatctttattaaaatatttttactctaacttccttaaccacccaaaaacccttcccttagttttccttctcccatgtttttcttatattaagtctacttaggtaagctgggatcgaagaacagaacatcatgagcataagctagcttcgtgttgtgctgtctcaaatgttcatgaagtcgtaaatgccgccacacacctctgttgtctcataaaaatgtctctttttcctcgtctccatatcttcgctaggcctttactttcctcatctctctctgccccttctggcaggtcctctctccctccctacactttcattagcagtgtttgtgttttccttttccaaagactatcagtctcacatattttgtttggaactactacttaccc

SEQ ID NO: 7678 - DNA, 315 bp, Glycine max
  Clone ID: PAT_MRT3847_106944C.1
gtttagtgaacttttcaatgtcattgattgattctggctgattgaattgattttgttgctcaaacagtttaaatggttaaatttaggtgttttttgagaggtgggatttaaaatttgttgaattgtgtttgtctatgatttcatttgaaattccgctgagagcggtacttacatttagtgtttgactgtatttttaataggattgtctttgaataaggaaatttgtgggcaaaaagaaatgattgcatctgaatgatttggggatttttcttcttctgttaaattggtttgaaatggttattcaatgattatttt

SEQ ID NO: 7679 - DNA, 453 bp, Glycine max
  Clone ID: PAT_MRT3847_106945C.1
cccacgcgtacgacgcctccaagaccagatctatcgagatgacgtgctcgtgctaagcttgcactatgccgagagatcctacaagatcctctaactttcatttctttctcacacacactttctctctcatagggtttcaattttttttctgttcgcttatgtgtttcgttttggttattgtgacaggtttcaaatgattttctgggagtgatgagacaaaggaaaggagatctgaaaataagagtggggaaaaacctgtaagaagaaaacaccaaaatgttttttttcgaccaggaaaagatccgaaaatgaatttgattcctaaagtgaatttcttttcgacaatcaaaaagtttccagcttgttgggtgctgccatggccgacgctcttgttgattacggcagacatgcttcgcaaccttgctgacaagctctatgagaagcataaaaatg

SEQ ID NO: 7680 - DNA, 426 bp, Glycine max
  unsure (1)..(426): unsure at all n locations
  Clone ID: PAT_MRT3847_106946C.1
nnntttcttgttggtttttttttttttttaaaaacaaaccggtgaaagccgaatattggccaccaaaaatccaagccaaaaccggcccattgggaccaaaattcattccctggaaaccaaaaacaggggtgaagaaaggtaaaaaaaagggctccaaaaatccctccggccctaaattttggggtggtaatggaaggaaattttttttttttagcttcactataaaacccccttaacccacaagaaaagctaaaaacgaaaccgccatatgcaaaaacccggggaaaaacaaaacccgcttttcatccccttggctggttaaaaaccgaattgggcctctcaaacaaccctttaaacatgggacaagaaccaacacgggcttaacattacccaaattggtttcaaaacccaccgggtggtccttta

SEQ ID NO: 7681 - DNA, 382 bp, Glycine max
  Clone ID: PAT_MRT3847_106947C.1
ttgtggtatttgtggagatggaggggatttaatctgctgagatggctgtgcatgaacattctatgagagctgtgtggacatacatgagcttcctgctggtgaaatgcattgcactccctgcggcggtgaaccttgtggcctagacatgggaccatctgttatggagactgcatttgagttagtagatcgaatctgcgttggttcgaggatcgaacaccacatcatttggagcttcgttgggcagactccgtcgcacaaaaacagtttacaggacctttctgtttctgagaacttgtgttcattgaggaataactgcgatgaagatttgcgtgtttcactgcagctgggtgacaatgaagcaaagagaaggcgttctgaagcc

SEQ ID NO: 7682 - DNA, 212 bp, Glycine max
  Clone ID: PAT_MRT3847_106948C.1
ttattgattgcctccttcttgctgctcaatcagttatgcaagatttatgctctgcacggcatagtgaggataaaagagctatgaattcaattttttcaaaattcattagcttgaattttcctgtgtttggtcaatttctttatttctagtgtgtgtgtatgtgtttatcttctctccaaattgcagttgcgctagatgactggcatcctgaa

SEQ ID NO: 7683 - DNA, 464 bp, Glycine max
  Clone ID: PAT_MRT3847_106949C.1
cagactttaacgacgacgcacgcagcaagcgacgggagacaaaggagccgtgagaccggcgagcacgccagaacggaacgcaaccgcaacagccaccgaggagggcatgcgacagggggatgagcgcgagaacaaaacacgatgggcgacagcgaagcaggggccacaagaggcccccaggagggaagggaagggaagcaacgcggcatacaggacagggaaaagaaggcaaaaggcgccagagagggccaaatggaaggcaagagacagaatggcgagaaccacccaaaaaagcaccagggggtgaagcaagggaacatgagaaagaggaaccagcagaagcaaagacggatgagaaacaccacgagaggaaagaaaggaggagcgccaaaaacacaaaaaaaaaggccggctagccagaagaggagaaagagaaaggggagcaggcaacaagacccccagac

SEQ ID NO: 7684 - DNA, 277 bp, Glycine max
  Clone ID: PAT_MRT3847_10694C.1
ttcggctcgagagttcaaatacccttaatggcaaaggaggaaattctgtcttctagtgcaagtgattgcagagcagcaagggtgagtaaaaatagcaacagtcatgctactgcaatgcatgtgggagctatagaaattatcaatgatagttacgcaagtcctgaatgcaccatagttggtgcaatgctaatggttgctagttatcataccaatcttgaaaatgcatttcgtagtatcatggttgcgccttgcagatgcggatggcccattcgggtgg

SEQ ID NO: 7685 - DNA, 547 bp, Glycine max
  Clone ID: PAT_MRT3847_106950C.1
agctagcttcaactagattagatggcaacagaaagttgtccaatacaattcccaaagtggctgcacaaccagaaataaaacgagaaataaaggatccaaaaaaatcaaatacatgccaaatttctaacaaccagaccttcacagtgtcttaggcagtatttgccaatgacaattaatatgactaccaagtaaacacctatttttccctaataacctataggctctaacaaaaagaaacaccatccgcagccacaacacagacggcaccaactcaagcacgctcaccacgaatccttcttgccagctgaatatccttgggcataatagtcacacgcttggcgtgaatggcacacaagttagtgtcctcaaagagcccaacaaggtatgcctcagcagcctcttgcaatgcaagcacagcatggctctggaaacgcagatcagtcttgaaatcctgggcaatttcacgaaccaacctctggaaaggaagcttcctgattaggagctcagtgctcttttggtatttcctaaatctcacgaagagcaacag

SEQ ID NO: 7686 - DNA, 1098 bp, Glycine max
  unsure (1)..(1098): unsure at all n locations
  Clone ID: PAT_MRT3847_106951C.1
accggtgcgagaagaccacagaagggggaacctttgcattctattcattcaagattcagcaagtgcgttttggaagcagagaccgaaatacttcgagatggcccgtacaaagcaaactgctcgtaagtcaactggaggaaaagctcccaggaagcagcttgcaaccaaggctgcacgtaagtctgcaccaacaactggtggtgtgaagaagcctcatcgttatcgccctggaactgttgctcttcgtgagattaggaaataccagaagagcactgagctcctaatcaggaagcttcctttccagaggttggttcgtgaaattgcccaggatttcaagactgatctgcgtttccagagccatgctgtgcttgcattgcaagaggctgctgaggcataccttgttgggctctttgaggacactaacttgtgtgccattcacgccaagcgtgtgactattatgcccaaggatattcagctggcaagaaggattcgtggtgagcgtgcttgagttggtgcgttctgtgtttgtgaagatggattgttggtggctgcggatggtgttttgttactaagttttctttttgttgaagcctataggttattagggaaaaataggtgtttacttggtagtcatattaattgtcattggcaaatactgcctaagacactgtgaaggtctggttgttagaaatttggcatgtatttgatttttttggatcctttatttctcgttttatttctggttgtgcagccactttgggaattgtattggacaactttctgttgccatctaatctagttgaagctagcttatcgtgtcaaaaaaaaaaaaaaaaaaaaaaaaaaaaaaaaaaaaaaaaaaaaaaaaaaaaaaaaaaaaaaaaaaaaaaaaaaaaaaaaaaaaaaaaaaaaaaaaaaaaaaaaaaaaaanaggggggggcccttttaagggaccaaagtttacttcccggggcttggaaggtaaaagttttttttaggggcccccaaaataaaataccggggccgcggtttaaaaagggggggagggggaaaacccgggggtacccaaattaaatggctttgaaaaaaatccccttt

SEQ ID NO: 7687 - DNA, 377 bp, Glycine max
  Clone ID: PAT_MRT3847_106952C.1
gcctaccttccgactcgcgtcgcactacaaaccctgactctccaaacccgacggcgggtatgttctaacgagtgcgtctgcttacacctctccctcacacccaacatcaaactcacttccatagctgctgtttttctcaaaccaacaactctgtcgactcatcacttcattacccacgtcgaggcgtcaactgatttgacgcatgaggaggacaccttctgagacgcacacaggcacagcttcttatgcgacacttaagctctctgtcgcgaatattccgtgcaacgtcgacagcgcgcagatagacgagctctatgagagtgctcgtaatgagcatgtggatgacagcgatttatgataagactactgagaggagc

SEQ ID NO: 7688 - DNA, 269 bp, Glycine max
  unsure (1)..(269): unsure at all n locations
  Clone ID: PAT_MRT3847_106953C.1
tgtaggcgtcggaacctgttccatgcggtntcgttgagcatcccccatcttacgaagtaggggattaaatacggattccccgatatcagatactaagatgaccctcccagtcctaccatacgaagtcgcgcgtcctcggtccgtgacaaatccgctcgcgaaccagggtctacatagatagacacagagaaagatcctctacatcacaccgatagtcccctcaccgccatcatcgagatggcataactccgaaaaacaaacgctctcgg

SEQ ID NO: 7689 - DNA, 361 bp, Glycine max
  Clone ID: PAT_MRT3847_106954C.1
tttctttctttttttattcctttcaactgggaacaaaagccaggaccctttagactgttctatcgtaacgccccccacatatggggacaaagacaagacattttcagaactccagagacattcagttccctcaacagaagatgctccaaaatgatgcaaaaaaaaaaaaccacgattttggcaccaacatttttttccccctattcatcaaccggcgctggtagattgagatcaatgaggcatggaacaccattcaggaggagccacttggccttaccacaagtgtgttttccttagaacccccaacaaaatgggacccttttggaaccccccacaggtttggccttgacccggaaaaatc

SEQ ID NO: 7690 - DNA, 654 bp, Glycine max
  unsure (1)..(654): unsure at all n locations
  Clone ID: PAT_MRT3847_106955C.1
gtttaaataatccctgcttttttggggaaaggggttggttcttgaacccatttgggtactgatactctgttctttgcattttattatcaacagaatacttaccaacaatatcacgctgcaaaggagttaaagaagcagtcttggagataccaccgaaagtataacacatggtttcagcggcatgaagagcccaaagttgcaaccgatgaatatgagcagggaacttatgtgtactttgatttccatattgcaaatgatgcatgcaacatggatggtgtcaaagaatcaagactgaattcacttttgagtataattatcttgaagatgatcttcttgtatagaagatgccatctgggacactgaaaggaaagaaaatatgattaaagtgaagataaaataagggaagattgatgaggtatgtatgaactttgtttgaatgtgactgtcaaatagagaaaagtttggacatacaatcaaattataattgaagataagatggcacaagccgaattgatgagggttattttttttttaagaatcaattttggtacttggaagtttataacaacttattcattgtttaacgagttaaatatctttgatgggttcatggttttatgcaagtcaaggaatagattcagctnncatataagt

SEQ ID NO: 7691 - DNA, 3048 bp, Glycine max
  Clone ID: PAT_MRT3847_106956C.1
ccacgcgtccggttcttacgctcgcgagaagacgacagaggggaagaggaaaagaaaaacaaacaaacactgctcagaggttgaatgaacgcacgcacgcacgcagagttgatcatagtactgaaagtgattcaattcagggccgagttgcatgagtggaatcggtggaaatgggagctagtcgaaaactccaaggcgagattgatcgcgttcttaagaaggttcaggaaggcgtcgaagtcttcgatagcatctggaacaaggtttacgacaccgataatgcgaaccagaaggagaagttcgaggcggacctgaagaaggagattaagaagctgcagaggtacagggaccagattaagacatggattcagtccagtgagatcaaagacaagaaggttagtgcctcatatgagcaggctctgatgaatgcacgcaagcttgttgggcgtgaaatggaaagattcaagatctgtgagaaggagacaaagacaaaagcattctccaaagaaggcataggtcaacagcctaaaactgatccaagagagaaggctaaatcagagacaagggattggttgaacaatgtggttggggagttagaaaatcagattgataactttgaagctgagcttgaagggctttccgtcaagaaaggaaagaacaggcctcccagattgacacatctagaaacatcaattactcggcacaaggctcatataaagaaatgtgaattcatcttgaggctactagataatgatgaactaagtccagagcaggttaatgatgtcaaagatttcttggatgactatgtagaccgtaatcaggatgattttgatgaatttaatgatgttgacgagttatatagttcattacccttagataaggtggagtctcttgaagatcttgttacaattccccctggtccttctaaggtgacacctgtgcttagcttgaagcatgctgtgaaagcttcagcttcagcatcacaaacatctgatgattctgccctagagcaagctgatgatacagcttcccaggatagcaattctgattttgttgcaagaactccacctcctaaaagtagtatagttagtcctactgctacaacaccagcagggaattttgctactcctgtttctatgaatgttcctgtgcctaacttgtcgagtccaccagccattgcatcagtcatgcctggttcaaattctgttcagagttccttggagattagtagtcctgtggatgcttcatcttttgttaatcagtctagcactatgaaggaggaagagattaatagtttccctggtcaaagaccatctccatcgctttctgatgttacactcgtaaggaacacagcaaaaacagctcaaatcaagcaacaaatacgcacctcttgttaataatcctggttttcggcaatgggccttggtcttgaaccatttggtagctgatgatagactcggaagcaatgggatggtgcagcctcttgtatcccctttaagtaatagaatgatcatgcctcaggttgcaaggcctaatgatggaacttcctcagttgactctagtagtgttaacgaagctgcaactgtctgggagagttttctccccttctgctgttcctggcatgcaatggagacctggaagcccctttcagaatcagaatgatgtgggtcagcttcgtggaagaactgaaatagctcctgatcaaagggaaaggtatttgcagaagttgcagcaagtgcaacaagggcataagtacccttcttaatatgccatcttttgtaggagggaatcctaagcagttttctgctcagcaacaaaatcctctcttacagcagttcaattctcaaggctcatctgttgcttctcaatctagcgtgggacttggagtccagtcaccaggtcttagtggtattgcttccacctcattaccgcagccacccaattctgtccattccccatctagccaacaatcattgctattagttgtttccaaagatgcagatgttggaaattctaaggttgacgagccacaactacagatttttcctgatgattcggggactgaatctactgctagtactgggattggcaagaatttcgtgaatgaagatgaattgaaatcaacatatgctgtagattctcctgcaggagtacctgcctctcttccagagtctgctcaaacttctagggatattgatttgtctcctggccaacctttacaatctaatcagcgtactggcaaccttggtgttattggaagaagaaatggctgaccttggagctattggtgataattttagtggatcaactgttagttctggtggagtgcgtgatcaattatataatttgcaaatgcttgaggcagcccacttcaaaattccactacccaaagactcagaacgtcccaggacttatactcctaagcaccctacaattacacctcctagttatcctcaagtacaggcacctattgttaataatcctgctttttgggagagagtaggtatcgaaccatatggcactgatactctgttctttgcattttattatcaacagaatacttaccaacagtatatggctgcaaaagagctaaagaagcagtcttggagatatcaccggaagtataacacatggtttcaacggcatgaagagccaaaagttgcaacagatgaatatgagcagggaacgtatgtgtactttgatttccatattgcaaatgatgatctgcagcatggctggtgtcaaagaatcaagaccgacttcacctttgaatataactatcttgaagatgagcctattgtctagaagattcttagaaagatgtttcctggtaaatatgtagcatcttggttcttattagtgttttagttttcacaagcattttattgcatcggtaaacgacttttaccttccaaagaaggaaaaatgtcttgtgtaaagagaacagcacagatatgttgaataagtttccatgcacaatctttcttttccgcaaagtttttcttaatgatgaatgatgatgctaagaaattgccaatgtttgatttt

SEQ ID NO: 7692 - DNA, 410 bp, Glycine max
  unsure (1)..(410): unsure at all n locations
  Clone ID: PAT_MRT3847_106957C.1
ttttattatttatgttgctatatttagttttttttattttttatttttnttgttttgtacgaaacagttatgatgtttaagttggtgtgcctgctggttctggtccggattttctcgggtcagatccattttgttcgtttttgcattaaaaccagctgtacggtgggttgggtataggggatcagtgaaaactttcgctctaggttatgagattgttatgggatttgctattgtaatactactgtatgattttaatgtgattggtttttgattgtgttataagaataatcaaaccctggttgctttttaatcaagtattttacataggtttgtaattttattagatttttggtggccaaaggaaggaacgctttttttagaacaaagaataggatgataagtttgatggg

SEQ ID NO: 7693 - DNA, 251 bp, Glycine max
  Clone ID: PAT_MRT3847_106958C.1
cccacgcgtccgaaaaaaaaaaaataaaaatataaaaaaaaacagggaaaggtaaataataagaaacaaaaaaaaaaaaataaaagaagggtgcctttcttcctagtgtccagcttttacacactggctggcgctgaaactcctttcttttcgggaccctttatttgttggcacaggccttttttatcagcttcctgacttgcttagccatgccgattctaaaatctttcccttggtgaaaaatccccttt

SEQ ID NO: 7694 - DNA, 302 bp, Glycine max
  Clone ID: PAT_MRT3847_106959C.1
tcgggacaactgaatttgccgatttgcattttaagccggagtttcattcgtcagcgtttcaattttggacagcatctcagcccatcacactgcacaatgtacttccacattcaagtgtgctttgcgatgtatggtggcggtgcaactagtggcggatcttggggcagaaagtcatctaacggaggttgaagctgatactcgacgagagccacctgtgtttccttactgtgatatatttttgtagtagtgacatatattgacttccatgtctatttttcttactacatttcagtgtatcatag

SEQ ID NO: 7695 - DNA, 970 bp, Glycine max
  Clone ID: PAT_MRT3847_10695C.1
cgaggcaggagctcaagaatctggtggttgaaggaagggacggcaacgttacatttgaggactttccttattacttgagtgaaagaactcaagttttgttgacaagtgctgcatatgttcatttaaaacatcttcacttttccaagcacaccaggaacctcccaccagcaagcagggctattttgctatctggtccagcagaaccttaccagcaaatgcttgccaaagctttagcacattactttgaatcaaagttgctgttgttagatattactgacttttctgtgaagttgcagaataaatttggatgttctagaaaagaaccatctttcaaaaggtcaatatccgaggcgactttggagcgaatgtctggtttgtttggttccttttcaatgctttcttcaacaggagaaacgagaggaattctgcgtcaacaaagcagtgcttctgtaagttccaatcctccaaagcttaggaggaatgcctctgcttcatatgatataagtagcacttcttcccaatgtggtccaacatttccagctcctttaaagcacacaagtagtttgtgttttgatgaaaagctctttgtacagtcactttacaagcttttggtttctatcacagaaactggttccatcattttatacatcagggatgttgagaagctcattctccaatcaccaaggttatataatttactacaaaaaatgataaagaaactatcaggctcagtgttgatacttggttcccagatattagattcagaagatgattgcaaagaagttgatgaaaggctctctgcactattcccctacaacattgagatcaaagctcccaaagatgaaactcatcttggctgctggaaaggccaactggaaaaggatatgatagatattctgatccaagataatagacaccatatggcttgagtactagcagcatatgacattgattgagatgactttgactc

SEQ ID NO: 7696 - DNA, 1230 bp, Glycine max
  Clone ID: PAT_MRT3847_106960C.1
ggggctcgatgcagattaactctcatggctcatctgtttctgctcaatctggtattggacttggggtccagtccacaagtcttggtggtatttcttctgcttcactacagcagccacccaatcctgtccattccccctctagtcaacagccattgatgccagatgttggcaattctaagattgaagaacagcagcagcatcagaatttccctgatgattcaacaatagaatctattgctagcactgggattggcaagaatctcataaatgaagatgattcaaaatcagcatatactgtagattctcctgcagcagtgtctgcctctcttccagaatctgctcaaacttccagggatattgatttgtctcctggccaaccattacaatctaatcaaccaactggcaaccttggtgtcattggaagaagaaatggtgctgagcatggagccattggtgataattttagtgggtcgaatgttagttctggtggagtgccgtgatcaattatataatttgcaaatgcttgaggcagctcacttcaaacttccactacctaaagactcagaacgtcctaggacctatactcctaagcaccctacgataacacctcctagttttcctcaagtacaggctcctattgttaataatcctgctttttgggagagagtaggtattgaacaatatggcactgataccctgttctttgcattttactatcaacagaacacttaccaacagtatatggctgcaaaagagctaaagaagcagtcttggagatatcaccggaagtataacacatggtttcaacggcatgaagagccaaaagttgcaacagatgaatatgagcaaggaacatatgtgtactttgatttccatattgcaaatgatgatctgcaacatgggtggtgtcaaagaatcaagaccgacttcacctttgaatataattatcttgaagatgagcctattgtctaaaagatgccctctagtaaatatgcgacatcttggttcttatttgtgttttagttttcacaagcattttagtatatcggcaaacgacttttaccttccagagaaggaaaaatgccttgtgtaaagagaacagcacagatatgttgaataagtttccatgcacaatctttcttttccgcaaagtttttcttactgatgatgatgctaagaaattgccaatgtttgattttatagcttgtataatgtttcattcttactttt

SEQ ID NO: 7697 - DNA, 3310 bp, Glycine max
  Clone ID: PAT_MRT3847_106961C.1
aaaaagaaagagttatcgtggtagaatctccgcgccctctgagcaagcaagcaagcaagctagtgcagaaacaaaccctaaaacccgaatcaaagagtaattggttacttacaattggaccaccaccactaccactctggcattgggcactgaagtgagaatcgtaatcgatgggtgcgagtagaaaactccagggagagatagatcgcgttctcaagaaggttcaggaaggcgttgaagtcttcgatagcatctggaacaaggtttacgacactgacaatgctaaccagaaggagaaatttgaagcggacctcaagaaggagattaagaagctccagaggtacagagaccaaattaagacttggattcagtccagtgagatcaaagacaaaaaggttagtgcctcatatgagcaggctttggtggatgcacgcaagctaattgagcgggaaatggaaagatttaagatatgtgagaaggaaactaagaccaaagcattctccaaagaaggcttgggtcaacagcctaagactgatccaaaagagaaggctaaatcagagacaagggattggttaaacaatgtggttggagagttagaatcccaaattgataactttgaagcggagcttgaagggctttccgttaagaaaggaaagagcaggccacccagattgacacatttagagacatcaattactcggcacaaggctcatataaaaaaatgtgaattcattttgaggctactagataatgatgaattaagtcctgaggaggttaatgatgtcaaagatttcttagatgactatgttgagcgtaatcaggatgattttgatgaatttgatgatgttgacgaactatacagttcattacctttagataaggtggagactctagaagatcttgttacaattccccctggtctttctaaggtggcacctagtcttagcttgaagaatactttgacagtatcagcatcacaatcagcatctgcatcgcaaacatctgagtccaggagcaagctgatgacacaacgtcccaggatagcaattctgacattgttgccaaaactccaccttgtaaaagtgggggaattagttctgctacctcaactcctgttgaccatgctactcctgtttctgtgaatgtttctggtcataacttgtctagtgcacctgttgcagtcctacctggttcaaattctgtgcggaatgtcttagagaatactaatgttatcaattcatcatctgtaaatcagtctacctctacaaatgaagaagagattaatagcttccctagccggagaccatctccatcgctttctgatgcaacacttttgaagggcagaagcagcctgtcaaatcaagcaacagccagcattcctcttggttctggaaacatggtttctagcaatggtgcccttggatcagtctcttcagcctctgaaatagctaaaaggaacatattgggagctgatgataggcttggaagtagtgggatggtgcagcctcttgtatccccgctaagtaatagattgatcttgcctcaggctgcaaaggctaatgatggaactgttttagttgactctagtactgttaatgaagcagcatctgggagagttttctccccttctggggttcctggcatgcaatggagacctggaagtccctttcagaatcagaatgatgcaggccagcttcgtggaagaactgaaatagcacctgatcaaagggaaaagtttttgcagaagtatcagcaagtgcaacaagggaatagtaccctccttaatatgaatagtaccctccttaatatgccttctctagttgggggaaaccataagcagttttctgcccagcagcaaaatccccttttgcagcagtctggtattggacttggggtccagtccacaagtctcgttggtatttcttctgcttcactacagcagccacccaatcctgtccattccccctctagtcaacagccattgatgccaggtgtttctatagatgcagatgttggcaattctaagattgaagaacagcagcagcatcagaatttccctgatgattcaacaacagaatctactgctagcactgggattggcaagaatctcataaatgaagatgattcaaaatcagcatttgctttagattctcctgcaggagtgtctgcctctcttccagaatctgctcaaacttccagggatatcgatttgtctcctggccaaccattacaacctaatcaacctactggcaaccttggtgtcattggaagaagaaatggtgctgaacatggagccattggtgataattttagtggatcaagtgttagttctggtggagtgcgtgatcaattatataatttgcaaatgcttgaggcagcccacttcaaaattccactacccaaagactcagaacgacccaggacttatactcctaagcatccgacaattacacctcctagttatcctcaagtacaggcacctattgttaataatcctgctttttgggagagagtcggtcttgaaccatttggcactgatactctgttctttgcattttattatcaacagaatacttaccaacaatatttggctgcaaaggagttaaagaagcagtcttggagataccaccgaaagtataacacttggtttcagcggcatgaagagcccaaagttgcaaccgatgaatatgagcagggaacttatgtgtactttgatttccatattgcaaatgatgcatgcaacatggatggtgtcaaagaatcaagactgaattcacttttgagtataattatcttgaagatgatcttcttgtatagaagatgccatctggtattgcaaattatgtttggaattgttgacagagaagttatttattcaatgcacatcgtgactagcaggttattaggctgcctttctttgtcacagcagtgcctctgtatttagtttttttatgctaattgtccttggttgatactttcttgtaggattttgtttgcaaggattaaaatataacatttttccttttaatcttctctgtatttgagctctgatttctcattcagcttgtttagggacaaattcaaggaaagaaaatatgattaaagtgaagataaaataagggaagattgatgaggtatgtatgaactttgtttgaatgtgactgtcaaatagagaaaagtttggacatacaatcaaattataattgaagataagatggcacaagccgaattgatgagggttattttttttttaagaatcaattttggtacttggaagtttataacaacttattcattgtttaacgagttt

SEQ ID NO: 7698 - DNA, 183 bp, Glycine max
  Clone ID: PAT_MRT3847_106962C.1
attgtccaaccatgacggactacaaacaggaccaggatatcatagattgcatgtggaggaactctactcatggaggagttcaaagaaatacactctggtgaaaggggactaagtacttccaatacgtgctcccaaatgaaggttgaggcgcacgatgactatgaagaggggccaattaaccaa

SEQ ID NO: 7699 - DNA, 1016 bp, Glycine max
  Clone ID: PAT_MRT3847_106963C.1
acggctgcgagaagacgacagaggggaagaggaaaagaaaaacaaacaaacactgcttgaggttcaacgaacgcacagagtcgatcatactgaaagtgattaagggccgagttgcatgagttgaatcggcggaaatgggagctagtcgaaagcttcagggcgagattgatcgtgttctcaagaaggttcaggaaggcgtcgaagtcttcgatagcatctggaacaaggtttacgacaccgataatgccaaccagaaggagaagttcgaggctgacctgaagaaggagattaagaagctgcagaggtacagggaccagattaagacatggattcagtccagtgagatcaaagacaagaaggttagtgcctcatatgagcaggctctggtggatgcacgcaagattattgagcgtgaaatggaaagattcaagatctgtgagaaggagacaaaaacaaaagcattctccaaagaaggcttaggtcaacagcctaaaactgatcctagagagaaggctaaatcagagacaagggattgggttgaacaatgtggttgggggagttagaaaatcgtcccgataactgtggtagctgagctagatcgacttatcaaccggaaaagtttttgcaaggccaccccagattgcaacgggggcatagtacccttcttaatatgccttctcttgttgggggaaaccataagcagttttctgcccagcagcaaaatccccttttgcagcaagtgcttcttgtgtatcaaatttgtcttcactttgcttattggttctttattggaagattcattatgtccaacaaaattgagttgtctagcctaaacatgcatttcatgcatgttcttctaatattaagctttgaccctcttgataatattccaagctaaatttgaattcaattttttgttttctatgtttctctaccttaaatgatggagaaagtttaagggggaaaaggaagaaaattcatatttttccttttctgctggttttaatttactgcct

SEQ ID NO: 7700 - DNA, 267 bp, Glycine max
  Clone ID: PAT_MRT3847_106964C.1
tcggaattcttaactctgaatctgcaaagggagaatgtacagatcattggccgcatgtcgaccatctagggaacggggaaaaagttcaaaagacagggaggagcatttgctctgtgcattattgaacaaaaagagagatcaactgcttaaccttcatctactacttcgccgtgtgcatattatatatgaataacactggtttgtgaaaaagatacagcatcagagaaattcggacagatttaatcgagaattggagggacatgcttt

SEQ ID NO: 7701 - DNA, 367 bp, Glycine max
  Clone ID: PAT_MRT3847_106965C.1
aaaacccccccaagcggaacccctgggataaagggaaaaaaacccttggaaaaaaaggaaatgggtttttcactttagggggtttattaaaaccccggggggggcccaaaaaaggggggggggaaccactggggtgggccccgggcttttttttttttaaaaaaaaaaggggaattttgtttaggcccccggcgggtaaaggaaacacagggctttgggccgggtataaacaggggaccccccccttggacaatttttcatcaaatctttcagaaccaggggaaacgaaaactggggatttatttgattaaaaaacatagagggggacgggggatccggctttaaaaaaaccccttagccaaggggg

SEQ ID NO: 7702 - DNA, 335 bp, Glycine max
  Clone ID: PAT_MRT3847_106966C.1
tgaacttggaattcgggtcgaggaaagacacagacattgcatactcttcattgattgagccaaagctttgggtttgctgctatatttatccattgggtggaagaaagtctcaacctttattatacagagcaagggtcttagttgcattgagtgaacatgtgatggggagcgattatatactactgactaccgacctgatccgacatcaatgctcggtgtgtgaccgacatccatctgaagtcaagcttgaagaaaggatttgtgagccatgtctagactattatcaccaggacgggcttacaatagtcagacgatgattaataaatcgaggatga

SEQ ID NO: 7703 - DNA, 307 bp, Glycine max
  Clone ID: PAT_MRT3847_106967C.1
ccggcactcacactgatcataattgaatcgttcatgctcgcattgcattttcgcccttgctttcctcttcccttccatcgctccctaacagactagggatttcctctactcctctcttttcctctttatctctactacgaagacctttgtccaggcatgtcgaagccccacttcgccttccatgcccctatgtccgggggtccgccccggctctcggcgtcaaaaaaaaaaaccccaaggccttttcccaattaataaaacctaatcccccaaagaaagggaaaaacccccccccgtgatttttttt

SEQ ID NO: 7704 - DNA, 354 bp, Glycine max
  unsure (1)..(354): unsure at all n locations
  Clone ID: PAT_MRT3847_106968C.1
caacagaggggttggtgcaagaattcgatgggagctatcagcgagtttatcgcgaggggaatgtgcagctgcttgttttctttggtgctgcactagttttggtagcatagccatgccatcgggcangctaccaaacgttacctgtccgaatgaaaactggctatggtgagcgttcttcggagggaaaatgcgcaagaattatggcttgctgtgaagcacacaacatacgagcctttaaaaccattcctgaagagtgcgttgaaccaacaaaggactacattaatggcgaacaatctagatcagactctaaaacagtttacccacaagctttcttttatgctagtgaacgcgaag

SEQ ID NO: 7705 - DNA, 885 bp, Glycine max
  Clone ID: PAT_MRT3847_106969C.1
cggaccggccggaattcctgttctctccacgcgccgatcactctccctctcttagcatggaacgggaagcttgagaaagtgccttctctttcaaagaagatatatttcatatccccactttgcacctcttcaattaatcaccttaactgattaatattctagctgatcctctttttttttttgtttttttgctttagggatttctctttatatatatcaaatttcaatctatagtggaggaataaatatacaccccctccccccacaaattctgaattctccttcttggtctcttaggttgagagtggttttcttttcttgtcttgttccctttcatttcaaggttgttatagcatatagcatactatatactatagcttgaattgaaatcatttctgggaatatagtagctaactaaagaaaaaaaaatgccccagaataagattttccaagaccaacaacaatcatcgaatccgattcctgatctttcccttcacattagcctcccaaacagagctccttcttcaatttgcactgaaggggattcaccctttgatgctgaaggcttcaaatcacacagtgatggttcaatcaaagggtgcagtatcccctatcacacagacacacagctttccttagccaaccctacaaatactacttatactccttctgaggctgaaagcacatggcggaagagaaactgtgttcggcttgatgctgagggtcaaataagactcattaatggaatccctctctacagtaacctttattgtttggatactattccctcaatggagagaaaccaacctaccaataagcttcccttttcttctctatatgcatgtccacaccctccttcagctcctaattatggaaataataatg

SEQ ID NO: 7706 - DNA, 361 bp, Glycine max
  Clone ID: PAT_MRT3847_10696C.1
acgccggcggccagaagaccacagatgggggaaaacggctgttgggttatcccaaggaatggggcttgagaagcactaaccggttcaatggccgccacatcgcagactgggcacaacctcctgtccactctactccgaaaatcccgttggcacacagtatggggcatgcgaacaggggctgacaagtgtcaagttctaaccaacgtgaacgcggtgatcccggtactgggttccggactgttacgctttcttacctacaagagaccgcgttcatgtttgcaactgcacaccacaaccctctaagctgctgtctctaaaccaaccttggccaggactttgctcagcggggatgcatggatta

SEQ ID NO: 7707 - DNA, 1413 bp, Glycine max
  Clone ID: PAT_MRT3847_106970C.1
ggaggatttaccacctggatgggtgaaagaattaaagattaggaagaacagcaagggcattcggaaagatccgttttatatagatccagcgagtggatatgtattccgttccaagaaggatgtacttcggtatcttgaatctggtgatatacgttcatgtgcatttaagccaagtagaagacaagtccaagatgaagacaatttaactccaccacctgctgccaagagacagaaactgaagcagtctgcacccgaacaacagctttcttcagccacagaaattcttgataaaagcaacttagaattgctagatgctaacagctcaaggaaagggaaaaatgcaaatgtgtcatctggaatgatggttgcttctgttcccatgggtgaatctgttgaaaagatgcattcactggaggatggagctgcaaactcttctgaattgaagaaaacatctgacccaagtagctcagcacttttgaatgaatccttgaaagaatcagaacaagtactttctgcagatgatgtgcaagagaaggagcatgttgtgaatatgatggagaatgctattgaaaagaatcacagtaactatagcatatccaaaaacaggaaggagttcaatgtacctcaccggtcatcaccaagacttgctggaagtaaacctgtccagttggccaacaatgtgatgaatgaacagactctccaggttcctaaaagaaacttgaggaaaagtagaaacactctagatattgatatttctgaagaccaaacagtttctaaggaacaaccgcatcagcaagaagcagataaaatagaagacaaaaagccagaaattcaaattagctcaaacaaatcaagtaaaaagaaagagtaccaccttcctcgtcgggcttcaaaacgattagctgcaattgaacatgagtcaatgaactccaaagcaaaattgcagcaaagtgagtgtgggccagttacagtgcttgcagatcaagcaccaacaaatggaaagtcagcaaataaaaggaaaaaatcagaacctcagctggggaaacgtgaaaatgaagaaatggaggatgagaaatcagaatctcagctgtcctttgcatttcactactcctggtctgacccaagtttggaatatgcaatcaataccctcactggtgtgttaccaccagctgaaactgatataccaaaaactttggttgacaatgttacgggaaaaggcgccactaccatccctgaaactgatattccaaaatctttggttgacaatgctacaggaaaaggcaccactacagtccctgaaactgatattcaaaaaactttggttgacaatgttacaggaagaagcggaggcagtgaaaacaatttgcttgacactgttgcaggaagcagggacagaaaatcccaggcacgttc

SEQ ID NO: 7708 - DNA, 410 bp, Glycine max
  Clone ID: PAT_MRT3847_106971C.1
cgatacaaggggacagtgcaagagtttgttgtgagctataatctagtttatcgtgaggagaatatgaagttgtttgttttctttgttgctgcagtagttttggtatcatggtcatgccatggcgcatgctaccaaaggttccctctccgcatgacaactggctatggtgagcgttcttcggatgtaacatgcgcatgttttacgcgtgctgtggaaccacacaacatccgagcctttagaaccattcctgaaaagtgcgttgaaccaccaacggactaaattcatggtgaacaatttagatcagactctacaacagttaagcaacaagctttcttttatgctagtgaacgcgaagtccatcacaacgacatatttatattctgcatagataacaccgtactctctaatat

SEQ ID NO: 7709 - DNA, 418 bp, Glycine max
  Clone ID: PAT_MRT3847_106972C.1
tgattgttcaagagtttgttgcgagctataaggtggtttatcgcgaggagaatatgaagttgtctgttttctttgttgctgcactaattttggtagcatggccatgccatggcgcatgctaccaaaggttccctctccgaatgaaaactggctatcgtgagcattcttccgaagtaaaatgcccacgttttaagcttgctgtggaagcacacaacatccgagcctttaaaaccatttctgaagaatacgtttaaccaacataggactacattaatcgctaacaatttatatcagactctaaaacagttaaccaacaagctttcttttatgctagtgaacgcgatgtccatcacaacgacatatttatattcggcaatagatacaccgtactctttaatattccatactatgaaaaaca

SEQ ID NO: 7710 - DNA, 348 bp, Glycine max
  Clone ID: PAT_MRT3847_106973C.1
ggccaaagttatgatttctctgtagttatgcagttggtgaccatgttgtccattaaaccttctgatggcttaaagggtttcatttgcattgtatacagatctctagcagatgctgttggttccttttccaagtggatatctgcttttaaggaaaattttagagccttgctattatttcttgctattgggatttcacaacctctatcttcgaatgcctgtgcatctgccttgcgtaaagtctgtgaagatgcttctgtagtaatttatgaaccttcaaatttggaaattttaatgtggataggagagggttgggacaagtggcatttatctttggaagatgaggaagaa

SEQ ID NO: 7711 - DNA, 944 bp, Glycine max
  unsure (1)..(944): unsure at all n locations
  Clone ID: PAT_MRT3847_106974C.1
ctactgaggatgcgattttnttgaggcttgtaaagtcgtgattgaaacgggccaaaaattggggtttcggaatgaaatgaccaaaagcaaaattgagagaacgaaaaaaataagagaaaaaccaaaacgcaacgattttttttctccgaaattcttaccaattcgagattaagggggaaaagccatggaagagatgtcgggtttagcaacagcaataaactcttccaacataggatttcagctattgaagaagcatgggtggaaagaagggactggtcttggagtctctgagcagggtaggttagaacctgtggagactcatgtaaagaataataaacgaggtttgggagcagataaagcgaagaaaaaggttgtcaaagcaaaacctgatcaaagcgattcctctaaagggaacaatcagcaggatcatttacctcaaaagaaaagcaaaacactttctaaacggatgagaaagatgcaggaatttgaaaagaagatgcgagagaaggaatttgagcgtgctttcttcagagagttctggcctgaaaatgtgtaaacgagaatcaaatgatccatattgtgtcagcatttcctcttgcattactttcgttgtactggtgatgatttcagaaattgtgcaaggtggatcttcagggatataggaaattgtgaaaggcgttttgcaaacagaaggaattcgaacacctttatgtgcaaattttcttcacctactatttcgtttagtgggggaaaacctccttaacctgggttccctaaacaatatattatttttgggcaccttggtagaaatactgtagctctgccgtacacatgtaaagccatgaacatttttttatggaagtgtccaatttgttcccgaaaaaaaaaaaaaaaaaaaagggattcttaaagaaataaaaatcaccaaataaaaaatcaaaaaa

SEQ ID NO: 7712 - DNA, 371 bp, Glycine max
  unsure (1)..(371): unsure at all n locations
  Clone ID: PAT_MRT3847_106975C.1
cccacgcgtccgagagtttgttgttagctataagctagtttatcgtgaggagaagatgaagttgtttgttttctttgttgctgcantagttttggtagcatgtccatgccatggcgcaggctaccaaaggtttcctctccgaatgaaaactggctatggtgagcgttcttcggaggtaaaatgcgcaagttttaggcttgctgtggaagcacacaacatcctttcccttaaaaccattcttgaagagtgctttgaacctacataggactatattaatggctaacaatttaaattagacttttaaacatttaccaacatgcttttttttattctatttatcttcaattttattacaactacttatttatatt

SEQ ID NO: 7713 - DNA, 305 bp, Glycine max
  Clone ID: PAT_MRT3847_106976C.1
cggacgcgtgggcggacgcgtggggtccattaaaccttctgatggcttaaagggtttcatgtgcattgtggatctctagcagatgctgttggttccttttccaagtggatatctgcttttaaggaaaattttagagccttgctgtgagtacacaaaactccatttttccatgattatttcttgctattgggatttcacaacctctatcttcgaatgcctgtgcatctgccttgcgtaaagtctgtgaagatgcttctgtagtaatttatgaaccttcaaatttggaaattttaatgtggatagga

SEQ ID NO: 7714 - DNA, 589 bp, Glycine max
  Clone ID: PAT_MRT3847_106977C.1
gagctatgggctggtttattttgaggagaatatgaacttgttcattttctttgttgctgcagtagttttggtagcatggccatgccatggcgcaggctaccaaaggttccctctccgaatgaaaactggctatggagagcgttcttctgaggtaaaatgcgcatgttttacgcttgcttgtgaagcacacaacatccgagcctttaaaaccattcctgaagagtgcgttgaaccaacaaaggactacattaatggcgaacaatttagatcagactctaaaacatttaaccaacaagctttcttttatgctagtgaacgccaagtccatcacaacgacatatttatattcggcatagataacaccgtactctctaatatcccatactatgaaaaacatggatatggggtggaggaatctaatgatacctcatatgatgaatgtgataacaatgaccacgcacctgcattgccctagactcatcataagtacaaccagctgatgtctcttggctgtagcattgctaccttgtcatgaagatactgtgacataatgtgcgggacacaaccccacctgatgaaggctggcttc

SEQ ID NO: 7715 - DNA, 1458 bp, Glycine max
  Clone ID: PAT_MRT3847_106978C.1
agagtttgttgtgagctataagctagtttatcgtgaggagaatatgaagttgtttgttttctttgttgctgcagtagttttggtagcatggccatgccatggcgcaggctaccaaaggttccctctccaaatgaaaactggctatggtgagcgttcttcggaggtaaaatgcgcaagttttaggcttgctgtggaagcacacaacatccgagcctttaaaaccattcctgaagagtgcgttgaaccaacaaaggactacattaatggcgaacaatttagatcagactctaaaacagttaaccaacaagctttcttttatgctagtgaacgcgaagtccatcacaacgacatatttatattcggcatagataacaccgtactctctaatatcccatactatgaaaaacatggatatgggtacgtatgctcttaaatctttattttcctcagttttccatttttgcatgctaattactagtttgtttccttatttgtcacttattttcaactattttttgtattgatcgagtttcggtttggccctgtcaacaacatgtgtggcaattaaggttaattaatctgtcatgcatatattattatttgaaatctaacaattcgttgtggatctatatatgcgtgtgttcctttgttaacatttcagattatccaacccttctgacaacatgaagcaatgttaacaccatgaagaataatgcgcaattatatttgaaatctaacaagatatatagatgttaaccatccatctcaatttccaggagcatatagatgtacgtagggaagagaaattaaagacagagaaaatatataaaagaatagaaataagatgaaagaaaaagtaaagatataattatgattaacaattggataaaatggtattatgttccagtcttccagaccagccatattgtcatgattttgttagggaaagccttattgtcatgataagtatgaaaaaaatatatattattatttattaattaaatgttagaaaatataatagtgattttaatataattattagagaaatagaaaattcatcatatgtgacaggttttgattggataaaagtattgtaaactttcttattacaatgtacgggcatggactatttattcatatataagtgtaaagtgctttgaggatggtgttcattgactcaatatacgaataatttattgatagggtggaggaatttaatgaaaccttatatgatgaatgggttaacaagggcgacgcaccggcattgccagagactcttataaattacaacaagctgttgtctcttggcttcaagattgtattcttggtcaggaagatatctttgacaaaatggccgtcacagaagcaaacctaaagaatgcctgcttccacacatgggagcagtttattctcatcgatccacactttatcactacaaatgcactttcatacgaatca

SEQ ID NO: 7716 - DNA, 745 bp, Glycine max
  unsure (1)..(745): unsure at all n locations
  Clone ID: PAT_MRT3847_106979C.1
tgaagttttattacatcatataaaattttagcgggatatttaaaattttgttttgtcatcatattaattttaatgacattttaaattctgcccctctccactcagaccattggtaattgtgtgaatttttctggataggtgggttattgtgctgaagtttataaagtttagtactttgaaagttgaaacagatatgttgtgtggttgagaaaaagcaagatctggctgacacaattgggctgaatacaatgttagcttctaggtaccatagtagttgcggtgactaaatttttaaattggccttaaataatttatttccctatgacaattgtacaaggcaatgatctggcctttggcgtcaaaacatttaagacttcctcttccatattaaataagatttctctaaaataatcactatctagccagtaggtagcatcaaattatattgacctgaatcgacaattaccaaatgcatttttctcattcattgtctaatcttcaagatcgtcagtttccttatgtagacctgactgatattagaagcattttatttcccgttctaacatataaaacaagataattgaggatattttataattaagtatgccatataaatgaataatctgttttgattaatttttagtctctcctactgcaagatagagtggtgtgtgctttagaggccaaatgtatattttatattggcctttanagtatatcgtatcgtgtttatttcatatacgag

SEQ ID NO: 7717 - DNA, 384 bp, Glycine max
  unsure (1)..(384): unsure at all n locations
  Clone ID: PAT_MRT3847_10697C.1
cggcgagaagacgacagaaggggatccacgtcttaaaattaactactagcgagtctcagtccagttagcacaccaaccccaaatccaaagggtcatttcaatatgaccatcatgtcaaggtttggacctttgaccattcttaagataagcttggtagggggtggtgtcattggctctggggctgaagctaagccaaaggctttctttggggttggagattcacttggtgataatggaaataacaattacttggctaccaccgcacgtgccgatgccccttcttatgggattgattaccctncaagtcataaaccaactggtcgtttcttcaatggctacaacattcctgatcttatcagtcagcgacttggtgctgagtctaca

SEQ ID NO: 7718 - DNA, 1063 bp, Glycine max
  Clone ID: PAT_MRT3847_106980C.1
acaataaattattggaccgttaaaatcagcttacagctcactaaggttttgtcctcaagccaaataattgaggagtaagactatgaatatcaggaatagtttatttaataaaagaatttgtgtttgatttttaatctagtaaagtaagagaaacttgtgatttcttacacaggataacacttttgatttaattttgagataaaagtgatacgtgtagatctaggaagaggcgttgcctatttaaagaagctaaccctccacaaggaattaaggtgcaagagtttgttgtgagctataagctagtttatcgtgaggagaatatgaagttgtttgttttctttgttgctgcagtagttttggtagcatggccatgccatggcgcaggctaccaaaggttccctctccgaatgaaaactggctatggtgagcatggccatgccatggcgcaggctaccaaaggttccctctccgaatgaaaactggctatggtgagcgttcttcggaggtaaaatgcgcaagttctaggcttgctgtggaagcacacaacatccgagcctttaaaaccattcctgaagagtgcgttgaaccaacaaaggactacattaatggcgaacaatttacatcagactctaaaacagttaaccaacaagctttcttttatgctagtgaacgcgaagtccatcacaacgacatatgtatattcagcatagataacaccgtactctctaatatcccatactatgaaaaacatggatatggggtggaggaatttaatgaaaccttatatgatgaatgggttaacaagggcgacgcaccggcattgccagagactcttaaaaaagacaacaaactattatctcttagcttcaacattgtattcttatcaataagatatcttaacaaaatgaccataacagaaacagacctgaagaagcttacttcccacgtaagaacagttgatctcaaaattcacatctatcacttcaatgcactttcatacaaatcaccagtaaagagatctattgaagcaagttacaaatttgttgaatcttggaaaccattg

SEQ ID NO: 7719 - DNA, 391 bp, Glycine max
  Clone ID: PAT_MRT3847_106981C.1
caccaaacaaataaaataaaacctttttcataggattaccccgaagatcaggatcatttttacataacacaacaccaagtttttttgtttttggacccatacaaaaaaacttgaactagcagtattttgaaaaacacacccccatcttcaaatatctatataagtaggccaccaacctattaggggcccaaacatggcccggttttgtttgttttttttggacaaactattttaaaagattaaaataaacagccgtttatttaagggactttatgccaataccaacttcccaaattaaaatattgaacattaccttaattgggtatgaacctgaaagggggctttaaaagagatgggggtgggtcatctcgcccataatctttgggggtag

SEQ ID NO: 7720 - DNA, 1304 bp, Glycine max
  Clone ID: PAT_MRT3847_106983C.1
aattccagggaagaacaagagatcgtaaggaagagaagaagacgacagaaggggaaggtgcaagagtttgttgtgagctataagctagtttatcgtgaggagaatatgaagttgtttgttttctttgttgctgcagtagttttggtagcatggccatgccatggcgcaggctaccaaaggttccctctccgaatgaaaactggctatggtgagcgttcttcggaggtaaaatgcgcaagttttaggcttgctgtggaagcacacaacatccgagcctttaaaaccattcctgaagagtgcgttgaaccaacaaaggactacattaatggcgaacaatttagatcagactctaaaacagttaaccaacaagctttcttttatgctagtgaacgcgaagtccatcacaacgacatatttatattcggcatagataacaccgtactctctaatatcccatactatgaaaaacatggatatggggtggaggaatttaatgaaaccttatatgatgaatgggttaacaagggcgacgcaccggcattgccagagactcttaaaaattacaacaagctgttgtctcttggcttcaagattgtattcttgtcaggaagatatcttgacaaaatggccgtaacagaagcaaacctaaagaaggctggcttccacacatgggagcagttaattctcaaggatccacatcttatcactccaaatgcactttcatacaaatcagcaatgagagagaatctgttgaggcagggatacagaattgttggaatcattggagaccaatggagcgatctgcttggagaccacagagggcgaaagcaggacctttaagcttcctaatcccatgtactacattgagtagtaccttcacctctctcaacaatctagctagagtttgctcctatctatatgtaataaggtatgctgatatgcactattcaaataggaataggagcattagctatgtttgttaatgtcactttatgttatgtgggtaagtcacctaagacactccacgtaacataaagtgacattaacaaacatagctaatgctcctatttgaatagtgcatatcagcataccttattacatataggagcattagctatgtttgttaatgtcactttatgttatgtgggtaagtcacctaagacactccacgtacctatgttgttttctctttcgtggctttaataaattatgcgcccttgttccatatttactaattatccctttcttcactaaaagaaaattgttttcttttaaaaaaaaaaaaaaaaaaaaaaaaaaccaac

SEQ ID NO: 7721 - DNA, 872 bp, Glycine max
  Clone ID: PAT_MRT3847_106984C.1
gaggaatttgagattaaggattcctcacaagaatatctggctttacatcccatgggttctaagaagcaaacatccttgttaaaggaacattttgaacctgtcatgtcagatgatggtcaaagtctaagtgattctgatgcatcaacatcatcacaagatgaacctgcgaatggaatgaaagacaaatctcgggttccaagaatgtatgaaatcaagaatgagcagcatgcggaggcattctggagccaaaaatcacttgcaggggaggactcacttcctatgggagacagagtagcagctctaagagatgaccaacaatcttctcgtgttccaaaaggtattaagcagggtccaggaggatcacgagaaatcactttcgccacaagaagctcagctaagtacaaggaagacgaggaggataaagaagtgccaaacaggaaaaagaggggagttcaatccttggggcttaagcccaatagaccagtgtttcgtggtcaagggagagggaaacgagggaatggcagaagaggacgtcgataatgacctttacataatgtaaatggcatttgattcttcttagatcttgcttgcttgcttgatccttatggctcagttttccatccatggatagtcctgtgactgaagtcgcacaggatacgtgatctatgatgcatcatcatatgtagcttaacatctttttttacatttttgttctttccccctatttttggacactatcaagataaactattttgtgtggaacctaccttaattgttgcagttttgttcccaaaccaaggattttttttcttaaaaaagcaaatatactataactatatatgaataaaactggtaccagaagtacctaagag

SEQ ID NO: 7722 - DNA, 2888 bp, Glycine max
  unsure (1)..(2888): unsure at all n locations
  Clone ID: PAT_MRT3847_106985C.1
ggctcggattgattaacaatgcccctccctctctctccttggcggcagctggggcaaccaagctctgtgtgcaacgacgccgtttcgacctcctttcttcactctttggcgagcaagcaagcaagtaacaatggcgactcgcgacggcggcatgaagtcgacgtcaataaacggcgttaagatgtacacgatagcgtcgcagcaaccctcactcgcttcctggctcccctcctccaagaagcagaactctcatcgcaacgtcaaaagttacacgcagaacctgcaacttctcgaagacttgcgcttcgccaccgccgccaccaaaatcaaggccactcccgacggcgagtacatcattgcttccggcatctatccgccgcaagtcaaagtctacgaggtcagggagctaggcttgaagttcgaacgccacttggattccgagatcgttgattttcaggttctgtcagacgactattcaaaacttgcatttttatgtgctgatcgctctgtttatttgcatgcgaaatatggaaagcactacagtttgcggattccgaggatggggagagatatttcttatgactgctggtcttgtgacttgctttgtgctgcgtcatccccggatctgtacagaattaacttagagcaggggcgattcctctcctcccttaacacacaatcccctgcattgaatgtagtttctcgaagcaagcttcatggattagttgcctgtggtggtgaagatggtgctgtggaatgctttgacatgcgagtgagatcttcagttggtagaattgatgctgttggacctagtggtgatgttgaccaggaggtcactgcattggaatttgatgaagatggtggtttcttaatggctgttggaagtagtgctggaaaggttctcatctatgatctgcgctcgtctaatcctgtacgaatacaggatcatatgtatggcagttcaatattggatattaagtggcatcatactcttaactatgaacaaccaatgttgattaccagtgataatcatgttgttaggatatgggatcctgaaacgggagaaggcttgaccagcattgaaccgacaacgggaacaataaatgacgtgtgtacatttcctggcagtggtttgatcttgctggccttagattgtagtcaaataccatcttacttcataccatcgcttggacctgctcccaagtggtgttcttcgctagagaatttcactgaggagttagacatgggtggacaaacaactatttatgatcattacaaatttttgacaaaggaagagcttgagaggttaaatttgaccaacctgattggcaccaatctacttagagcctacatgcatggcttctttattaatcatgcattatacaaaaaggcaaaagcactggtggatccttttgaatatgaagcttatattgaacagcagaaacgagaaaagatggaagctgagcgcgcctcacgaatcacggtcaggaaaaagttacccaaagttaatcgggcccttgcagctcgcctcctagaaactgaagaagctgaaaatgagaagagggatgaagatgctgatgatggtgaaactaaaaaggcatccaagaaaaagaaagggctcagcatgcaagatcttcaggacgatcgatttaaagcaatatttacaaatgaggaatttgagattaaggattcctcacaagaatatctggctttacatccaatgggttctaagaagcaaacatccttgttaaaggaacattttattcctgtcaaggtagatgatcgacaaagtctaagtgattctaatgcatcaacatcatcacacttaagaccagcttctgagcactgccacacatatccaggagtacctttgtatgaaattaaaaatgagcagcatgcagaggcattctggagccaaaaatcacttgcaggggaggactcacttcctatgggagacagagttgcagctctcaaagttacccaacaaagttctcgtgtaccaaatggtgttaaacagggtccaggaggatcacgagaaatcactttctccacaagaagctcagctaagtacaaggaagacgaggaagataaagaagtgccacacaggaaaaagaggggagttcaatccttggggcttaagccgcagagaccagtgtttcgtggtcaagggagagggaaacgggggaatggcagaagaggacgtcgataatgaccttttacataatgtaaatggcatttgattcttcttagatcttgcttgcttgatccttatggctcagttttccatccatgcatcctgtgactgaaggcatgcacagggtaggcaatggctgcagggctacatgatctctgatatgtagctgaacatcttaatgcgtttacttattacatttttgttctttcccctatttttggatgctctatcaagataaattattttgtgtggaacctaccttaattgttacagttttgttcaaaaaccaaggataggggaggaggtatgagtaatctcaaatgttacatagggatttatctctccctttaagtgagaatgtaccatgtactccgaattttgttttgattattctcacccattggggctgaattttcccccattatgtttatttgtgggttcgactgcctcctccctcgtacaaaaaaaagctccataatgctattgaatataagttctgacaaaaagaacgttcattggcgttggatgatgattttctgattatttattttgtcaatgtatcccctacaagtagttgagatatgttaaattttcaaaattgtaaccagagcttattcataataataaattaatgggtttgttcccccaaaannaaaanaaaaaaaaaaaaaaaaaaaaaaaaaaaaaaaattaa

SEQ ID NO: 7723 - DNA, 133 bp, Glycine max
  Clone ID: PAT_MRT3847_106986C.1
tttgtattgagcatgataccagtgagtagatgatactgcatttttggggacagtccatccagaagagacgtgcttgagagcattgacatagatagatggcgctcgtttatgatacacatgattttcactcttg

SEQ ID NO: 7724 - DNA, 260 bp, Glycine max
  Clone ID: PAT_MRT3847_106987C.1
tttttcttagcacttttttttttaaaacccaataatcataaatagcaaccatatatcttatttcatttaccatcacacactctcttaccacccataaaataccatcacgggagcacgcatatgtattgcataacatagaaatgatcatgctccctttgatgtttatggaagctactagtaagctaacgtgtcacatgtcccaagtcttacctctacaaaattacactctcaaactgtaaaagcattcactagttattctt

SEQ ID NO: 7725 - DNA, 110 bp, Glycine max
  Clone ID: PAT_MRT3847_106988C.1
gttgtgagctataagccagtatatcgcgaggagaatatgaagtcgtctgtcttccccgtcgccgcagtagtccccgcagcacggccacgccatggcgcaggctaccaaag

SEQ ID NO: 7726 - DNA, 511 bp, Glycine max
  unsure (1)..(511): unsure at all n locations
  Clone ID: PAT_MRT3847_106989C.1
ggatttcttctccgcacattctgtttagggttctgctgagttgctgtccgatcgcgtttcatcgcgctcaccgtcaccggcaaggtgactacacacagggactccagttaaatgccatacacgatgaccctagaacattgaaaatcttccactctctcgtgtccagtgatacgatacggcgaggaatcttgatacgtcaaaacatggtagaagcaggggaagaggaggttattgaattcaagtggggcacaaggaaagggttgggtggcaaaaagaaggatgtgcagttttacgaatcgttcacctacgatggtgtggaatactccctctttgattccgtgtttctctacaaggaaggtgaacccgagcattacattggtaaaatccttaagatatgggagaactctgataagagcaagaaagttaagattctatggtattttagaccttctgagattttgaatttcttggaagggagtgagacactngagaatgagttgtttctggcttc

SEQ ID NO: 7727 - DNA, 883 bp, Glycine max
  Clone ID: PAT_MRT3847_10698C.1
ttcggctcgagctgagagaaccaagaaaaacggactgcatcttcaacctctcgcaatccaccgcgaccaaagatcgtctctgtttcaaaccagttctgttttgatcctctgcgacttgtttctctgcttctgcgagctagctattgttcggaaaagcaatggcaagtgcgttgagtagcagagttgaatctgttcgaaactctccctcattaagattttctctcaactgcatcagagcccttagctcttcttcttcttcttcttctgctgctgctgcggtttcttctggtgagaaccctaataaatcaaagcgaaggaagaagaagaacttgttcgaggtggctcagttcttacctaactggggaatcggctaccacatggctaagactcactggaatgaagtttcttacgaaatcactaaaatcaatctctacaaggatggaagacatggaaaagcatggggggttgcttttaaaaatggcttgccattagcggatgctcccaaaaaaattagtggagttcacaagcgctgttggaggtacctaccaaatgtagtaaaagcattagaaagctcaacagacagtggcttaaaagttgaaactgaagcagcaagttgatactttctagtcattatcccatgtcttagggttgattttcagttgacatagttgttttcgactatggctgcattttttagtccaccatgaaacgtgctttgagggagtaatctgtggatggatttggttcttactttatttgtgcctgtctttgacgtattttacatccatactagtaaatcacttactctgttatattttccaagttggtatatcctcaagaaacataaagaaaacgggatatacgtaacgaggatttgagaatc

SEQ ID NO: 7728 - DNA, 143 bp, Glycine max
  Clone ID: PAT_MRT3847_106990C.1
taaggttcgaattaggatcgagactagtgctagatcacgagcgcgagactagtcatgaccactgcaagaactgagatggaagtttcactcatgagatcgtcaaagcgtacgctactcaactgaagaggtctggcaagatggac

SEQ ID NO: 7729 - DNA, 422 bp, Glycine max
  Clone ID: PAT_MRT3847_106991C.1
ttggctgatgattgctgctggtcgtgagaatgatcagagggggtatcctaaccgtaactaaaccagcctacctctccggtgtagcctttcattctcttcgctaagacgtagactcctgctaagatttctattggaaagattactatttccgaggcggaaagtctcgatattactgataatgctaaggttaagacttaggataaggaaggaacctttttggactagtaatgctctactcctgttggaaagtagtctgaggatggttgcatttctgttgatcataatacttagaaggagctaatttcctattccgcttcctgctcttgcggcggtacgtagactcctgctaagatctctatcggtaaaattacaatttcagaagctgaaagtctcgatattaccgataatgctaaggttaagac

SEQ ID NO: 7730 - DNA, 652 bp, Glycine max
  unsure (1)..(652): unsure at all n locations
  Clone ID: PAT_MRT3847_106992C.1
cgaganagngnaacaanagctagaggatgagaaacgcctagagaatccagagcgttacttggaacaattgcatgctagatacaaagacctttcagagaaagttgaccaacgaaaacggctcaagacaaatggaggtcattctaatggaaataacttatccggtggcattggtcgtggtgagagactcaatgctgctcaaagggagagaatgcgcctcttgacaactgctgcctttgatcgcggcaagggtgaggatacatttggtgccaaagatgaagattggcaactttacaaattgatgggcaaagataatgatgatggtgatgaggaaccagatgaggatgatgcagagctagcccgcatctcttcaaggctactggacttggatccaacatttgtgcccaacaagtcagaaacaggtagctctcaacctgccgaggcaccacgtgcccgccctctcaccaaagaagattttcacattgtttttggtgctgaaaggttcaggtgccccgaaattttgttcaatccaaactggattgcggttgatcaggcagggttagatgagatggctgggggctcaataagaaggttatcatgtaaggatgaaagcctgcaagagagactcactagctccatacttgtgactggtgga

SEQ ID NO: 7731 - DNA, 1697 bp, Glycine max
  Clone ID: PAT_MRT3847_106993C.1
ctcacttcaccgtccgcacgcacgcgcgttctcttcgttcgtgagccaaatttatgagaagtgcttcactcgtaccacgtccatatcccaaccaaacgctcccataaaggacccgaagaaaaaaaatacttataatactattcataataattattattaatttttaacataaaaacaaaacaaactaggcggccatccagccacaggattgaagagtagtaccacattagtgaagaccatttttcaattagtctcctctctctctctctctctctctctctctctctctctcactttggccttaacagaaccgaacacaacacaagagagatagagatacaatacaagaacaaactccgacatctctcgctttctctactttcccctgtttttattcggaagcaagcaaggcttaaatatatagatccctctttcccgtgcttcactgtttctcagttacttggcttcgccttggatgaatctcaatctgaatcagtcctcctcctcgtcgtataaggaataaataatcatcggaagaagaatcaggtatggatgttgggaccgtgctgctactttgttgggttactctgatcccggggattttatcagatccaagcgacgaagcgtgcatgacgcacttaagcaagtcgctgcaagacccaaacaaccagctccataactggaaggaagagaacttcgcgaatccctgcaacgactcaaccacgaatctccgaggtgcaatctgcaacaacggacgcatcttcaagctctccctgaacaacctctctctccgcggcaccatatcccccttcctctccaactgtaccaatctccaagccctagacctctcctccaacttcctcacaggcccaatccccgctgatcttcagtccctggtcaacctcgccgtcttgaacctctcgtcgaaccgtctcgaaagggtcatccccccgcagctcacaatgtgcgcctacctcatcatcatcgacctccacgataatttatttactgggcccatccctcagcaattgggcctgctcgttcgcctctccgctttcgatgtgtccaataaccgcctctcagggcccatcccggcttcgctttccaaccggagcgggaacttgcccagattcaacgccagctcattcctagggaataaggatctctacggttacccgttgccgccgcttaggaataggggcttatcccttttggccattgttgggatcggcttgggaagtggccttgctagcttggtgcttagcttcaccggggtttgtatttggttgaaaattacggaccgcaagatggcgctcgaggaaggcaaaatcaccccccttatgcctgattattgataaaaacttttttttttttttaaatcacaaatttactatactagtttcaaatattccaattccaaggtactactatctttcattattcaacttgatcgatcgctgatgatgcttcttcacctcagaaaaattaaaattaaaaaaaaaaaaaatagtacccgtaccaggtactacttatttttttgtttttataaaagcgaggttaggtgtgggctacccctaatttcttcgtacttatgggtcgttcagatcattgtctcttatcgatcacgggggatatattttattttataatttatatatatatatatataatttctctctctctctgtttttacccat

SEQ ID NO: 7732 - DNA, 1157 bp, Glycine max
  Clone ID: PAT_MRT3847_106994C.1
cacacactttggccttaacagaaccgaacacaacacgagagagatagagatacaacagaagaacaaactccgacatctctcgctttctctactttgccctgtttttattcggaagcaagcaaggcttaaatatatagatccctctttcccgtgtttttccttggatgaatctcaatctgaatggtataaggaataaaaaattcatcgtcataatcaggtatggaagttgggagcgtggtgttagtatggtggtggattagtctgatcccgaggattttatcagatccaagcgacgaagcatgcctgacgaacctaagcaagtccttggaagacccaaacaaactgctccataactggaaggaagagaacttcgccaagccctgcaacgactcctcctcgaatctccgaggcgcaatctgcaacaacggacgcatctacaagctctccctcaacaacctctctctccgcggcaccatatcccctttcctctcaaactgtaccaatctccaaaccctagacctctcctccaacttcctcacaggcccaatccccccagaactacagtccctggtcaacctcgccgttctgaacctctcttcgaacagtctccaaggggtgatccccccggtgctcacaatgtgcgcctacctcaacatcatcgacctccacgataatttgcttactgggcccatccctcagcaattgggcctgctcgttcgcctctccgctttcgatgtgtccaataaccgcctctcagggcccatcccggcttcgctttccaaccggagcgggaacttgcccagattcaacgccagctcattcctagagaataaggatctttacggttacccgttgcccccgcttaggaataaagggttgtccgttttggccattgttgggatcggcttgggaagtggccttgctagcttggtgcttagcttccccggggtttgtatttggttgaaatttaccgagcgcaagatggcgctcgaggaaggcaaaatcagcccccttatgcctgattattgaatattgaaacaaccccttttaatccccaattactacaatagtttcaaattattccaattccaagctagtactagtatctttcattattcaacttgattgatcggatcgctgatgcttcttcccctcag

SEQ ID NO: 7733 - DNA, 537 bp, Glycine max
  Clone ID: PAT_MRT3847_106995C.1
atcgtgaccctgatatgttggtgagaacattgagaaagctgagacgtcgggtaactatcatttcacttttgatttttttacagtcttttttttttcaatgcatctgtcagcaaatagcaacccccttgcccgaattaaaaaaagatagcatgatatagtagataagaaatgataatggtagcattattttcaatgttattatagttgcttagacattttgctgtgatgttttaattgtggtgtggtgcaggttgatgtgaacactgaagttggggttgtcagagatatcattcttaaagaattgcgtatatatacagattatggtcgttgcagtcgtcctttattcatcgtggataagcaaaggcttctcataaagaagaaggatattcatgccttacaacagagggaatcccccgaagatggcggatggcatgatctagtgtccaagggctttatagaatatattgacacggaagaagaagagactacaatgatttccatgaccattaatgatcttgtacaagctaggatcaatcc

SEQ ID NO: 7734 - DNA, 421 bp, Glycine max
  Clone ID: PAT_MRT3847_106996C.1
atttagattcattctttgaaaatttgagattgttcttctgccttcaatcaagccaaaaaatgggtttccgtttcccttctattcgacaagcatcattcatggctagccaagcaacttcaaaatttgtagatgctccaaagggctattttgcagtgtacgttggagagaaacaagcggttcatgattcccgtataatatttgaaccagccttcattccaagacttgttgaatgaagctgaagaagagtttggatatgatcatcccatgggtggcctcacaattccttgcagtgaagatgtattccaacgtataacttcttgcttgaattgacaataaatctcacacattaagtgactgacttagattagtgcagacattttattcaattggtgtcttcttagcctgtaaagattgccaattt

SEQ ID NO: 7735 - DNA, 258 bp, Glycine max
  Clone ID: PAT_MRT3847_106997C.1
cggctcgagatttcattctcttgtatataaaggaagcaatgtgtgtcaggcctctgtgcagtcaacccagcctcctcccgccagtgctaaccccgtgttgagcctgcatgctgacactgtggccgatctggactctagaagtgctagtttgaaatatatccattactgtcatttccttttgagcttgtggacaagctgaatgtcaggactgacttctccagctcccagccctgcgggggtgtccttggcatcccatca

SEQ ID NO: 7736 - DNA, 1173 bp, Glycine max
  unsure (1)..(1173): unsure at all n locations
  Clone ID: PAT_MRT3847_106998C.1
cgcgcgccgctcgagccgtttcgcgttgcggttccgaacggcaattaattcactatggtcttccttcaacaaaccgccacaatggccgtcacgaaaagcctctccatcttcctcttcatcgccataagctgcgtggccgtagctcaggcagcgaacttcaacatcacaaacaattgcacctacacggtgtgggccgccgccgtgcccggcggcggctcaaggcttaaccctggcgaatcgtggaacatcagcgtgacgaacggcacgacaggaggacgcatctggggtcgaacaaactgcaccttcgacaacgcaggacgcgggaagtgcctcaccggcgactgcgacggtgttcttgagtgcaacaaaacaggtacacctccgaacacgttggtggaattcgcgttgaaccagtacaacaacctcgacttctacgacatctccctcgtcgacggtttcaacattcccttgcaggtgagcccgacctacaactgcagctccgtgaaatgcgccgccgacatcatcggagagtgtcccactcagcttcaggttcccggcggctgcaacaacccgtgcacggttttcaatacgactcagtactgttgtagcaccggtgctgcgggttgcggtcccactgattattccaagttcttcaaggagaggtgtccagatgcctttagttaccctatggatgacgcaagcagcatgttcacttgcatgggaggatctgattataggcttgtgttttgcccttaattaattcatcatcaactgcttttaaatttcgtgattcctattcgtcttattgttgtatactttggtttgtgtgttattattttatccccaaataaaagagttcttgggggctttgtgcgcgcatctctctggcgggatgtgctctctttctcctaaaataactaataaacttttacatagttaaattttgttattagagtcctagggagttgatttatgattcattacaaaaagttcgaataatgttcatttgttattatccagttttgttttgaaggtnaaaaaaaaaaaaaaaaacggcccgcactgtgtaggtgcaattgtttgtcatgttgaagttccctgcccgagctacggccacgcagcttatgcgatgtaaaagtaagatggagaggcttttcgtgacggccaataaaa

SEQ ID NO: 7737 - DNA, 901 bp, Glycine max
  Clone ID: PAT_MRT3847_106999C.1
ggctcgaggaacggcaattaatttacaatggccgtcacgaaaagcctctcaatcttcctcttcatcgcaatgagctgcgtcgccgcagctcaggcagcgaacttcaacatcacaaataactgcacctacacggtgtgggccgctgccgtgcccggcggcggcgcaaggcttaaccctggcgaatcgtggaacatcagcgtgacgaacggcacaacaggaggacgcatctggggtcgaacaaactgcaccttcgacaacgcgggacgcgggaagtgcctcaccggcgactgcgagggtgttctggagtgcaacaaaacaggtacacccccgaacacggtcgttgatttcgcgttgaaccagtataacaacctcgacttctacgacatctccctcgtcgacggtttcaacgttcccctacagctgaccccgacctacaactgcagttccgttaaatgcgccgccgacatcatcggagagtgccccactcagctccaggttcctggcggctgcaacaacccctgcacggttttcaatacgactcagtactgttgtagcaccggagctgctgggtgcggtcccacagattattccaagttcttcaaggagaggtgccctgatgcctacagttaccctatggacgatgcaaccagcatgttcacttgcatgggatccgattatagggttgtgttttgcccttaattaattcaacatcatcaactactttttttttattttttatttttattttccttctctaatttcgtgattcctatttgtgttattgttgaatactttgatatgtgtattatttatcaccaaataaagacgttcttaattgggggctttgggcgcggatctctgcctgctgagatgtcccaaaataagtaataaacatttacat

SEQ ID NO: 7738 - DNA, 371 bp, Glycine max
  Clone ID: PAT_MRT3847_10699C.1
ccggccggaaccgggggcgacccacgccccgaataagcccgcccacgcgccgacagaaaggggggaaaccgagacacagggcgccgacccaaaaccggaaacaaaagcaaacgcaccagacgcaagaagcaccaaaagcagccaacacccggagacgaaccccaagggaaagaaaaaaccccccgcgcaggcacagacccgggaacacaaccagccccacccaaagaaacccgccgaacacgcaaccacagacacaggaccgcgagccagacacaaaccacaccagccccccccacaggacccaggaccaaaccaagcgcaagcaggcgaaaacccggaaaagggcccccaccccccaaccagggacagga

SEQ ID NO: 7739 - DNA, 215 bp, Glycine max
  Clone ID: PAT_MRT3847_1069C.1
ttgagaatgggtgcttcttcttctatgtcgacggtctgtgtgattttggcatcactggcctctgcagcactctatgccaacccacagagggcagtggatgtaccatttggccgatactatgtggccacatcggcctttgctcacatcggttatctcaatggtggtacctcacattcagcttccacctaacccttacacttgtaatggcctccagt

SEQ ID NO: 7740 - DNA, 275 bp, Glycine max
  Clone ID: PAT_MRT3847_106C.1
attcgccaggatttgtgttttttttattataaaaattggtctttatatattgtacaattttttccagagggtctaaatgcatgagtaggtttgtttgagagaagttattttagctctaaatttgtatatctgttggtgcatctttatttttaatagcaaatttcatggtttgtaattattgtatattcgttgataaaaaaaaaaaaaaaaaaaaaaaaaaaaaaaaaaaaaaaaaaaaaaaaaaaaaaaaaaaaaaaaaaaaaaaaaaaaaaaaa

SEQ ID NO: 7741 - DNA, 248 bp, Glycine max
  Clone ID: PAT_MRT3847_107000C.1
cggctgcaagcagacgacagaagggggcatcaattcaaaatatatcatcgattataagcatgggtttgtggagcactacgaatgcagtgtcccgccgctttcacaagttcggagatgaccaaaagaatctggtcttccaagatgatgccacgtcttcttccaggggcatagaactcacaaagttagacggaggaggacaaccagtgggtggcagtgtggggacagtggtatactctcgtccagtgcac

SEQ ID NO: 7742 - DNA, 429 bp, Glycine max
  Clone ID: PAT_MRT3847_107001C.1
gaatttgccaaggaggacagcatactttgggacctctgtatcatctattttcaaaggcctttccacccaacaaattcagcattgcttttggagaggatttgtttgtgtcaggggatttgatcaaaaggaacgtgcaccacgacctcttcaggccagattgcatttttcagcaagcaggttagcaaaggcagaaaaatgataacaagaataatgggacatgttgctgagatatttaccaataaaagctaatattgaagatccaactttttaagatctaaggtgattgctgcccgagtgacaggagatctgatatgaaaaaaatatacagcatgttacaaagaaagtagaagaatcttcagtttaggatatgaaatcccataagtgggattgacctgtaaatcatctctattcaagcatgaaacagtcatt

SEQ ID NO: 7743 - DNA, 412 bp, Glycine max
  Clone ID: PAT_MRT3847_107002C.1
tctgctaggaattctgctcgaggattaatatccttcgtgactttttttcaatctaggtcggcgaaagaaagtgtgtgggctcacttaaacttgtttgaatcctcctctgcacatatatgatttattttttaaatggcaggaaacgattggctgaacaactaccttgaatctatacttgacatgcttcctgtcctgctctattccaagtgctgtcttgatgccagacagagacgtacgcccattccttcttgcttctccacccaagaggctttgggcttccatcatacctatctgtatagctctagagatatctcgataggtctcacaggagtcctcactatatgctcaccatggtccatgcttgctgttccagggattttgacctcacaggcattgggcttatgcaactggg

SEQ ID NO: 7744 - DNA, 211 bp, Glycine max
  Clone ID: PAT_MRT3847_107003C.1
cgcctctctcgaccgatctccggtcgaagtacaacgtgcggtctatttcttttcgcaaggacgactacgtgcgggtgttgtgttaaacctacaggggccgggaggtcaaattttttcatgtctatcgtcgtatgtgggttatccacatttagcgcattacccgcgagagggttaacggcttcactctttattttgtcattcacccttctca

SEQ ID NO: 7745 - DNA, 465 bp, Glycine max
  Clone ID: PAT_MRT3847_107004C.1
atcaaaggggggaaaccccaagggggccgcttaaatttgcccttgcaatataattaatattttctggaaaaatagcccccctttttgggggcgggaatataatttaccccatttaacatactaacactggttccagggggcataaattccacagacccctgcaaaagttacaagggactttacaaaaaaaaaatgggccttgagcaaaatacccaaaatcccccctggtctctttggatctgggcctttgcaatttttaaagggtcagcccaatttcattggtgctttaacaagaccaaacaatgccctaacccaggttcctgagggacaaggggctcccaatcacatgggttggtgaaattaactccaaaagattacaaaaattttacttgggggcttcaatttgggataaagacctggggggtttttatttggggatttaggggtgccaactccttccatttt

SEQ ID NO: 7746 - DNA, 153 bp, Glycine max
  Clone ID: PAT_MRT3847_107005C.1
gagggccggttgccataacgatatgatggattgtaatgcatctcgcaagcatctagactcaggctctaacccagcacactgagagcctctcgtatccgtcatgaaaggaggaaaaggcggccactctatatgatacaaccttacctacgcttg

SEQ ID NO: 7747 - DNA, 367 bp, Glycine max
  Clone ID: PAT_MRT3847_107006C.1
ctctgaaccagttttttgtggaaatcgatagctctctcaattaggggctcgcgataaatggcacggttggttctgccatcgaagacattgattttttcgaggaacactcttctgggtttgatctcccctgctcctaatacagcaagagggagcatcagattcaagcatttccttgcatcagaggtcactttccgaaagaagtattgcccattatattcttcactaccaagggtcaagcaagtaagtaggcgactaatttgttcagttgccacagaggatttaccaaaggaagttgaaaaatctaacatggagacaccaagggaaatattcttaaagattacaaaatgccgattactactttgacact

SEQ ID NO: 7748 - DNA, 257 bp, Glycine max
  Clone ID: PAT_MRT3847_107007C.1
gaaataataggggggggggagagattttttatacgactgagtctagagggtgtgtgaatagacagagtgatgggtcgagagggctgctacaattcatctcctcatgtgacttcgaatttagacctccgcttgtggcttcattggcattcgtgtttctttttccctctatatgggtctctactcatttgctggcttattaagaattgggtcgggctccggaccttgggcgttcctaccgagctcatgactgctcatgg

SEQ ID NO: 7749 - DNA, 3216 bp, Glycine max
  Clone ID: PAT_MRT3847_107008C.1
cccgcgtccggttttttgtggaaatcgatagctctctcaattaggggctcgcgataaatggcacggttggttctgccatcgaagacattgactttttcgaggaacactcttctgggtttgatctcccctgctcctcttaaggctaattgcagtgttagttattttcagaatacagcaagagggagcatcagattcaagcatttccttgcatcagaggtcactttccgaaagaagtattgcccattatattcttcactaccaagggtcaagcaagtaagtaggcgactaatttgttcagttgccacagaggatttaccaaaggaagttgaaaaatctaacatggagacaccaagggaaatattcttaaaggattacaaaatgcctgattactactttgacactgtggatctaaaattttccttgggagaggagaagacaatagttaattctaaaattgctgtgtatcctcgcattgaaggttctactccccctctagttttagatggacgagacttatctttagtttcaattcacctgaatggcaaggctttaaaggaggaagattatcatttggatgcacgccatctcacaatccgatcacctcctagtggtaaatatgatcttgaaattgttacagatatttgtccacagaaaaacacatcattagagggactttacaaatcatctgggaatttctgtactcaatgtgaggctgaaggcttccgtaaaattacattttatcaggatcgacctgatataatggcaaaatatacagttcgcattgaggcagataaatcactgtatccagtgttattgtctaatggaaacctagctgaacaaggtgacttagaggatggcaggcactatgctgtttgggaggaccccttcaagaaaccttcttatctgtttgccttggttgctgggcaattgcagagcagagatgacacatttatcacccattcagggcggatggtgtcccttaggatatggacacctgcagatgatgtacctaagactgtacatgctatgtattctctgaaagcagctatgaagtgggatgaagatgtttttggacttgaatatgacctggatctcttcaatgttgttgctgtcccagattttaacatgggagccatggaaaacaagagcttgaatattttcaattcaaagcttgtattggcctctccagaaactgcaactgatgcagattatgctgcaatattgggagttattggccatgagtatttccacaactggactggcaacagagtgacatgtcgcgattggttccagcttagcctgaaggaaggtctcactgtttttcgtgatcaggaattttcatctgacatgggaagtcgtactgtaaagcggattgctgatgtttcaaaacttagaaattaccagtttccacaggatgcaggtcccatggcccatccagtgcgaccacactcttacatcaagatggacaacttctacacagttacggtctatgaaaagggggctgaagttgttagaatgtacaaaaccttgctgggaagtcaagggttccgaaaaggcatggatctttattttaagagacatgatggccaagctgtaacttgtgaagatttttttgctgccatgcgagatgccaatgatgcagattttgcaaatttcttgctatggtattctcaagctgggacccctgttgtcaaagtaaatacttcttataatccagaagcacatactttttctttaaaatttagtcaagagataccgccaactccagggcaatcagttaaggaacccacattcattcctgttgcaatgggtttgcttgattccactggcaaggacattcctctttcaactgtttatcataatgggactctgctatctgtttcaagtaatgatcaatcagtctgcactacagtccttagagtgaccaagaaagaggaagagtttgtattcactaatatatttgaaaggcctattccttctttgttaagaggatacagtgctcctgttcgtctggaatctgatctcactgatagcgacctgtttttcttactagccaatgattctgatgaattcaaccgttgggaggctggacaagttttggcacggaaattgatgcttcacttagtggatgatttgcaacataacaaaccattggttttaaattccaattttgttgaagggttcaaacgtattttatgtgactcaagtctggacaaagaatttgtggcaaaggcaataactctgcctggtgagggagaaataatggacatgatgggggttgcagatcctgatgctgttcatgctgttcggactttcatcaggaagcagcttgcgagtaaactgagatcagagttcctcagcacagtggaaaataatagaagctcagaagaatatgtcttcaatcactcaaacttggcaaggcgtgctctgaagaatgttgctcttgcttacctgggatgccttgaggaacaagaattcaccaatcttgtgctgcatgagtataaaactgctacaaatatgactgagcagtttgctgctttggttgccatagcacaaaaccctggtaaaacccgtgatgatgttcttgctgacttttatggcaagtggcagcatgatttcttggtggtgaacaaatggtttgctcttcaagcaatgtctgacattcctggtaatgttgagaatgtgcggaaactgttaagccacccagcatttgatctgcgcaatcccaacaaagtgtactctctcattggaggtttctgtgggtctccggtgaactttcatgcaaaggatgggttaggctacaagtttttgggagagattgtgctgcaacttgacaagctaaatcctcaggttgcctcgagaatggtgtcagccttctcaagatggaggcgttatgatgaagacagacaaaaacttgcgaaggcccagttggagaggatcatgtctactaatggactatcggagaatgtgtttgagatagcttcgaaaagcttagctgcttaaaagtgccaatgacgtatgaaaaactgccatgatgtgttagtggcgaaacatttgcagcaacgatccgaataaaaagtgatctagtttatctcggtataacttaaaaatgattcagtggataatcgttcgttataccgttttttattgttggtttttaatgatattttgataaggaaatatgggtgcgttttattgttatgtttttgttttttt

SEQ ID NO: 7750 - DNA, 615 bp, Glycine max
  Clone ID: PAT_MRT3847_107009C.1
cccgcgtccggtttttgtttttgtggaaatcgatagctctctcaattaggggttcgcgataaatggctcggttcgttcttccatcgaagacactgaccttttcgaggaacactcttctgggtttgatctcccctgctcctaatacagcaagaaggagcatcagattcaagcatttccttgcttcagaggtcaatttccgaaagaagtattgcccattatattcttcactatcaagggtcaagcaagtaagtaggagactactttgttcagttgccacagaggattcaccaaagcaagttgaagaatccaaaatggagacaccaagggaaatattcttaaaggattacaagatgcctgattactactttgacactgtagatctgaaatttaccttgggagaggagaagaccatagttagttctaaaattgctgtgtatcctcgcattgaaggttctactcccccactaggtttagatggacaggacttatctttagtttcaattcacctgaatggcaaggctttgaaggaggaagattatcatttggatgcacgccatctcacaatccaatcacctcctagtggtaaatatgatcttgaaattggtacagatattt

SEQ ID NO: 7751 - DNA, 494 bp, Glycine max
  Clone ID: PAT_MRT3847_10700C.1
ccatgcgttcgttcattttttttttttgatcaacattttcaagaagccgaaagagaagagcctgtgcttgcttgagggtcacaattgctacacaaacacaagcatattttatcttttggggcgctagcgagaaacgccggataagcacataaaaatcacatgatgtggatctaatagaatcatagagccaccacagggagcaattgcttctgacctcggaagatgttaaaaaaaaaagaaaacgcgggcgcgcgcgcgggccccccggggaacccgggaaaggggcccgggcgcgtgccagcttaccatatattgcagtaaaatgagagattgacaccttgaggggcatagcggtataccgtgtgaaagtgggaaaaggttaaaatttcacacaatataaaagcctgaaacccagaaggataaacctggggggcctggggggcaagagagaaaacataactaccgttgggctcactgccccatttcccgtttgg

SEQ ID NO: 7752 - DNA, 157 bp, Glycine max
  Clone ID: PAT_MRT3847_107010C.1
gggcccaatttaactactcaaaggagtaacaatgtggctgtcgttcattgaattcaaaagacagaaaccagtcttggaacactcattaccatcattatcactagaccgattccaatgattaactggcttagttaaagctgctccactctacaatgta

SEQ ID NO: 7753 - DNA, 1321 bp, Glycine max
  Clone ID: PAT_MRT3847_107011C.1
ccacgcgtccgcgagaaccgacgctggtctagggtttaaagggttctttgtttctgcgttgtgtttttgtttttgtggaaatcgatagctctctcaattaggggttcgcgataaatggctcggttcgttcttccatcgaagacactgaccttttcgaggaacactcttctgggtttgatctcccctgctcctgttaattgcagtgtttgttattttcagaatacagcaagaaggagcatcagattcaagcatttccttgcttcagaggtcaatttccgaaagaagtattgcccattatattcttcactatcaagggtcaagcaagtaagtaggagactactttgttcagttgccacagaggattcaccaaagcaagttgaagaatccaaaatggagacaccaagggaaatattcttaaaggattacaagatgcctgattactactttgacactgtagatctgaaatttaccttgggagaggagaagaccatagttagttctaaaattgctgtgtatcctcgcattgaaggttctactcccccactagttttagatggacaggacttatctttagtttcaattcacctgaatggcaaagctttgaaggaggaagattatcatttgggatgcacgccatctcacaatccaatcacctcctagtggtaaatatgatcttgaaattgttacagatatttgtccacagaaaaacacatcattagagggactttacaaatcatctgggaatttctgtactcaatgtgaggctgaaggcttccgtaaaattacattttttcaggatcgacctgatataatggcaaaatatacagttcgcatcgaggcagataaatcactgtatccagtgttattgtctaatggaaacctagctgaacaaggtgacttagaggatggcaggcattatgctgtttgggaggaccccttcaagaaaccttcttatctgtttgccttggttgccgggcaattgcagagcagagatgacacatttgttacccgttcagggaggaaggtgtcccttaggatatggacacctgcagatgatgtacctaagactgcacatgctatgtattctctgaaagcagctatgaagtgggatgaagatgtttttggacttgaatatgacctggatctcttcaatgttgttgctgtcccagattttaacatgggagccatggaaaacaagagcttgaatattttcaattcaaagcttgtattggcctctccagaaactgctactgatgcagactatgctgcaatattgggagttattggccatgagtatttccacaactggactggcaacagg

SEQ ID NO: 7754 - DNA, 1268 bp, Glycine max
  Clone ID: PAT_MRT3847_107012C.1
aatggatctccccgttatagatctttctccctccctctccggcgagtgggacccacttctctgcgccgaggtcagccgcagcctcagggaaaccggcgcgctcctcgtcaaggaccctcgctgcaccgtcgaggacaacgatcgcttcatcgacatgatggagcgctacttctcaaaaccccgcgacttcaaacaccgccatgagagaccccacttgcattaccaggttggggttacaccagagaaagtagaagttccaagaagcttggttgatgaagaaatgcaggagaaactgaaagcgatgccaaaagaaaaccagccaaacactcctgttggacctgatctcaaatggagatacttttggaggatcggtcctcgaccgtcaaatactcgttttcaggaacttaatgctgagccagtaatacctgaaggtttccctgaatggaaagaaactatggattcctggggatacaaaatgatagcagcaattgaagtggttgctgaaatggcagctattgggtttggtcttccaaaggatgcattcacttctcttatgaagctgggcccgcatctgttagcaccaacagggagtgaccttcaaaaatatggtcaggagggaactatctttgcaggatatcactatgaccttaacttcctaacaattcatggtagaagtagatttcctggtttaaacatctggttaagaaatggacagaaagttgaagtgaaggttccaataggatgtcttcttattcagacaggaaagcagatagagtggttaactggaggggactgcatagctggcatgcatgaggttgttgccacaaagaggacacttgatgcaataagtttagcacaagagcagaatcgtagcttatggagagtctcttcaacgttgtttgcacacatagcatcagatgcagttctgaagccattgggacattttgcagaatcaccccttgcaagcaaatatccacctatgtgtgcaggagagtatgttgaacaagagctttcagtaatcaatctcaagggaaagaagtgagaactttcattgttgacaattataataaaaagttggatacatttttctttcactggatcacagtcacactgccttacaagctattgagaaaaaaccattagggcaagaaactgaaaattatggtttcatttttgtcccaagaaatggaacaattgtgagcttccaattgaacactgattaatttcaatacatataaatgtctacatgcttcagcgttttaaaaaaa

SEQ ID NO: 7755 - DNA, 671 bp, Glycine max
  Clone ID: PAT_MRT3847_107013C.1
gcccacaacgcactaacgtttatgcttaattcagtatccaaggtggtttcattgatacgtacgaattccacgtgagttcagcaaaaaacttggagcaaccaaatactcaaaatcaaatacaatgctaataatagctatcatcatcgtctgcatctctaagaacaagaactagaagagaatgctattctacatgtcaagtttcatccacccaaaatgcgtagggagcataccgggtctgcataaagactagaacgagtaaccaaagaaaccaacaaatattctgtgtatagctgatagtgatacattccgcgttgacacagaaacacttcaattagttggtggaagagctttagcaatttatttgactaaggaagaaggtgctaaatttggtagcccgaaactactcaaatagaaattcgcattttgcaagatgtgtcaagcattggcgggtatggtatggtatggtatggtatgatgaaaagcaggaatttgatactgtagaaatatgaagaaatggacttagcggccagacaaaatgacaccccttttttcagataaaactagtgggtatccacaaagttaaaccacaaattcaattgattcgtaagaagtggttggttactctctttccctagtactcagatttctttttcttcttttaagcttaaagg

SEQ ID NO: 7756 - DNA, 498 bp, Glycine max
  Clone ID: PAT_MRT3847_107014C.1
aaaaaaaggggacccctccggaaaggaatttttttaaaaaattgcccccccggaaaaaaggggaaacatcatcgccatcatacaaggaaaattttcgcaacaaacccaccctaaaaaagggggtttaaaactacctgaaacaaaatatcctttgtttaaaggggggggaggaaaagggttcaaaaacaagggaattgccctgaccgatgagttaaagactaccccaaaacccaaaaggctttggtaaagggacggtttttccttgttctggcggtggaaaaaaaggagggacgaaactttttttttatcaaaccctttaaatcttgaagaggaggcccccctggggggcaaaaaagggggcaaacccaagaaactcccccgccctgagcttaataagggggttaagggaagggccaaatgtttcctttagaggggccccaaggggggcaccaataacaggtgccttgggaaaatttgacccttttggaccaagggttt

SEQ ID NO: 7757 - DNA, 513 bp, Glycine max
  Clone ID: PAT_MRT3847_107015C.1
gaagaaaaccccccattccttttcagaaaagggaggccaaaaaggggaccttaaaaatgggggcagggggaccccctccccttttaaaaaaaaaaacaatattaggggtgggccccacccggcaaaccaaaaaaccccccgggggaaggccccatccaaaaaaaaggaaaaggccggggaaaggggcccccccaaaaactcctcccttttttttttggggcccccccaaaccccccctgggaaaaaaccccaatttaaccccccccttgggggaaaaaagggacccccccggggggggggggcgggcccccccccctaaaaccaaggggtcccccggaaaaaaggccccaaaactttcccggaaaacccctcccccaaggaacccaaagccccaaaagggtggaaaaaaccggggaaatcccccccccgggcaaccccccgctgggggggccaaaccccaaaagcggggggggggccccccgggaagggcccccttggattccaccccccccg

SEQ ID NO: 7758 - DNA, 245 bp, Glycine max
  Clone ID: PAT_MRT3847_107016C.1
tcatccaaactatatttctagggtaagttttcttacaacatgactacctcacacacttacccctctcacaaatcacactttcaatcacataaaaaacaacaaaaaccacccagcacgtctaaatactccaagcttacccacacctaaataccacctcatacaaacccaaaatatacaccataatacacattactgtactatatctaaatacatccaaacttataaacccctaaaatcacccaact

SEQ ID NO: 7759 - DNA, 498 bp, Glycine max
  Clone ID: PAT_MRT3847_107017C.1
gggttgtctaaacatggcaacgattttgatgcaattgtgggggtctttgtgagagggccattgatggatgcatacgctgggttgttggaaacaaatattggaatgttgtcaaaaaaatctactatgtctctatacacagcacccgttgtaagacttacacaattccacttttatgttcataacaacataaatggggaacacccgactgctatgaaaattgctgagcgtcctaaagcatccatttgtcggttagggactatttacatgatggatgaatctcttagcgaaagatcaagttctacttcaatggttgtttgaagatgagagggaatatatgctgaagtcttaacacatgaacatgctatactgatagtgacaaatttgctgttcactgacggcatttacaatggctgtacccttaacattcttgggaagaactatattttgcagagtgttaaagaaatgtcaattggtgggggtagggggatctttaaatat

SEQ ID NO: 7760 - DNA, 141 bp, Glycine max
  unsure (1)..(141): unsure at all n locations
  Clone ID: PAT_MRT3847_107018C.1
ttgttctctctaatctctctcactacatggagactccatcatnacagcaagaagatcacaagttccaaatcggcttcaacaacnacatcccggttcaagaaaatgacgagactgtcagnnagncgtttcaaaacgcgcagg

SEQ ID NO: 7761 - DNA, 316 bp, Glycine max
  Clone ID: PAT_MRT3847_107019C.1
gggggggggagaatatttctcagaacatggggggggaatcaaacccatgtttgaattgaaatggagatactgaggcaagttcttcccttgtggatggggggtgtggcatatgtggaagagggggacaataggttttttgaaaatggactattgaggcctgtggggcagggggggcggaaatggggtggagggggcggagtgggtcggcgagcgagtgggggggcgcggggtgggggggcggggggggttgggggcggggtgtgcgggtggggggggcggtgtgggggggaggggggggggggtggggggggggggg

SEQ ID NO: 7762 - DNA, 2164 bp, Glycine max
  Clone ID: PAT_MRT3847_10701C.1
gcgccacgcgcacgatcatctcagggttgggttttcaaccctcaaaccctgccttgccttgccttgccttgccggacaggttggggttgcattgtgatcatcgcacgtgacgtggcagtcccctattggcacatgtcacgtgacaaaccaccttcccggttgccccaaaacccaatccacatgacccaacctacacacaccatacatcaacaacactcccaccttaagttccctgaactaacgttgttcttcttccaattccaacaccaacaacattagtaagtaacaaattaacaacaacaacaaagagagatagaaagacaacgacaacaatgaataacggcgttagtcaagaatcgagcgtgctcctcgatttggcgtcccacgtcaaccgcttcgctttcgattccttccgttccgacaacaacaaaacccttctctccaatttcttgcacttcaacggcaacacaagaaccggagcagcagcagcgaaacgcggcgtttctctgggggggaaggttgggggagcgagtgttaggttcgggaacattctcaacgacttcaacagagccgttaggtttcattgcgagaagatcccgattgggttcgcctcgcttcgcgtcggtgacggtggtgacggtgctgatggtaacgggaacggcgaggggaatggggttagagtggatgagtgtggcggtgtggagaatgaagggtttagagggaatggtgtggagggtgagaaacctaaaaaagttttgattttgatgagtgacactggtggggggcatcgagcttccgctgaagctatcaaagctgctttctatcaagaatttggagatgattatcaggttttcgttactgatttgtgggctgatcacacgccttggccattcaaccaacttcccaggagctatagttttctggtgaaacatgggccgttgtggaagatgacctactatggaactgccccacgtgtagtgcatcagtctaattttgctgcaactggaactttcatagctcgcgaggttgccaaaggcctaatgaaatatcagccagatataataatcagtgtgcatccactgatgcagcacgttccacttcgaattttaaggtcaaagggtcttttaaagaagattgtttttactacagttatcacagatttaagcacatgccatccactacaacagatgttgcgcaaagggcattgaaagcgggctacaacagatgttgcgcaaagggcattgaaagctggactgcaaccttctcaagtaaagcctgtccggccaaaggatgaactaacgagagaattacggatggatgaagatcttgaagctgtgagagaattaggaatggatgaaggatctgcctgctgtattattgatggggggaggtgaaggtatggggcccattgaggctactgctcgggcacttggagattcattatatgacgagaatattggggctcccgtaggtcagatccttgtgatctgtggtcgtaataagaaacttgctaataaactgagttctattaattggaaggttcctgtgcaggtcaaaggatttgttaccaaaatggaggaatgcatgggagcttgtgattgcataattacgaaggcgggcccagggacaatagcagaggcccagatccgaggcctccctattattctgaatgattacattgctgggcaggaagctggcaatgtcccctatgtagttgaaaatggatgtgggaagttctcaaaatcccccaaggatatagcaaaaattgttgccgagtggtttggtccaaaagcttacgccagatgctgtgttcaagattgtacatgaccttcacgagcttgttagacaaagaagctacctaccagagtattcttgtacaacttaaactgacacacgagactgagggttttttttggtacagcttaactgacacagactgagggtattttttgcaacactatttctgagaaaaatgtacaaggaagcgatgatgtatcactagcaaaaattcttgtattttcatccatcattatttttcagatgctcatttgaaaattttaaatagatatagttttgaatgtttcttgattatcacttgtgttcatgttagagaaacatctttattttagtaacattactatgaaatactgaacagaaacttgca

SEQ ID NO: 7763 - DNA, 553 bp, Glycine max
  Clone ID: PAT_MRT3847_107020C.1
cccacgcgtccgcccacgcgtccgcccacgcgtccgacggctgcgagaagacgacagaagggacctccgatccaattaagttataagaaataagttctagtgtaaaattcactacaacttgtttcttataaattgaactagatatagtattttataatgttaatgacaatttacatactttctaaaaaaatcccttaccttagtaagtaatcaatgtgtgatttattaaatatagtgtttaatagtacaatcacacaaaaattaagagagatatataatgagaataacttaattaattaaaatgtttcattcattaaagtgtttattatctttctaatctttgtttcaaagaacatttaaaagagaataaaggagtatatatctaatctttgtttcaaagaacatttaaaagagaataaaggagtatatatatatgcggagttgaatctaatggaagtggtccacaacttaaaaggcatgtccacatttaatacataattgtgtattgaataaaagtttatctaaaaaaaaaaaaaaaaaaaaaacaccaaaa

SEQ ID NO: 7764 - DNA, 358 bp, Glycine max
  Clone ID: PAT_MRT3847_107021C.1
ccacgcgtccgagttccattcctgtcccgtgtttaccttcacccagcggcgctgcccccgtcgtcgtcttcccgcacgcttccgagcgccgccctccccagccccagccgtccccttctttccccatcgcctcgcttgcactccctctcatctccgtctcccgcgccgacgacctaagtagggtttggccttagggttcaggcaagatgggtgagcgcaaggtgctgaacaagtattacccgccggacttcgacccgtcgaagatcccgcggcggcggcagcccaagaaccagcagatcaaggtgcgcatgatgctccccatgagcatccagtgcggtaccttggggacatacatata

SEQ ID NO: 7765 - DNA, 336 bp, Glycine max
  Clone ID: PAT_MRT3847_107022C.1
gcacgcgttatgcacacatatatgaatcctgcagaagcgaccgcactaatatcggaaaaagcatgacacagaataacaacccatctactgccctaacaatacacaaaaacgggcactcaaaggtggcgcggggggaaagggctcaaaacctaagtggatgctactagttggagaactacacccaccgaacctaaaatgaaactaaccggacttttaactaacaggagatagctgacccaaagagtgttagggaacgagttgttgctgcatgcatatatatcgctttagatacatatatctagatcccgaggaaaagaggctcaagacgaattacaa

SEQ ID NO: 7766 - DNA, 169 bp, Glycine max
  Clone ID: PAT_MRT3847_107023C.1
atcttgggggggggggggggttgcgatcaataataataaaactgccttttatctttcgggttgtggagaatattattagggaccattgaaatcaacctttttgatactttaccatgaattgttatataaagattctctgatgctgaccaagttctactttgatggatgc

SEQ ID NO: 7767 - DNA, 359 bp, Glycine max
  Clone ID: PAT_MRT3847_107024C.1
gtgaatgaataagggtaagctggcaacacgtatattatgccaaatattcacatatatatggcctcacacgtatagtgaaccatttgaacatctgagatataaaggaaactggatacacctatcttatgccaaacaacattttgaaaaaagactatatgcatagcaaattttctaacacaaatttatgggtacatgcatggcgtaagtcctacaaataatcctcaggttaaagaaatccattgcattacgatggcctcacaggtggggggacacatcaacaagttcatctggcatgagatcttccagaacatgatttcttgagtgatttggagcctgaagaaagatgcatactcaagcaa

SEQ ID NO: 7768 - DNA, 640 bp, Glycine max
  Clone ID: PAT_MRT3847_107025C.1
aataatgatatgatcgaacgcattatgacaactctgtgacagaaacagcgagcagtgccatctatactacaatgatgctgtactgcacccttgaatacaggccttagaacgcagaccttactgatagctctttggaacatatacgcatggagattttaaagccttatggtgaccgaggcggaaactgtgatccactgtaatcctgagaaggagctgggtccttatgagcaagagagggaacatatgctaacatagatgcacgagctacgacagagaaagcttagtactgatcatgtgagtagtagcaggccttatgatatggtacgtcatatgaaaagagagctagaagtgagtcttgaaagcttcgatgagccacaaggagtaagaatcactcttcttagttagctgctgaactattattgacggctttaaaggggcatagtaaacctgtgtacttatctcgccaatatctgctatcctataaaaagtcatagcagttgtgctagctactctgacctgatctgaatgaaggagagcactatctatagccataggctcatataacgcgtgatattgaggtataacactatcgtacttagaaacaacatctgcagaactaataagattgattacctactct

SEQ ID NO: 7769 - DNA, 453 bp, Glycine max
  unsure (1)..(453): unsure at all n locations
  Clone ID: PAT_MRT3847_107026C.1
cgagactacctatgttccattgcaatgggtggaccttcacgtggggcgtggctgcacgtggtggaacaaacgtgtgccttcgcaccacagctgcacgtgacatatacaggaacatagtagtccacaatgtgacacacatgtgctgtgcccccattgtgttcaacataatcttggaggcaaaacaaagtgaaaggattgacataaaggtaataaatgggaagagaaaatcaccggttgagattctcactgggggagcaccaccaccagcatcattgctagagcaaattgagtcacttgggtttcatgtcacacatgcatatgggctaactgaggcaacaggcccagcacttgtgtgtgagtggaagaaggagtggaacatgttgccaaagaaggagcaggcccaacttaaggcccgtcaaggngtgagtgtgttgactatggctgatgttgatg

SEQ ID NO: 7770 - DNA, 1072 bp, Glycine max
  Clone ID: PAT_MRT3847_107027C.1
atcactaagcctcaaaactaatagtttgtgtttttataaaataaattaacaacatgcgagttaaagttttttgtagccaagcaaaattgtgcttatatcccatgattctataccaccaagcacaaaacaagaaatctgcggtacatgattaaagttatagaatgtttatcatgttactgggtctggatgccaacaaagaaacataaagtttaagtactcaacatgagagtaagaatgcaagagccattcatcaagagacttctgatcatgaatccgtgacttcatgacgccttcatatcatccaaaccacaacgagccagaaacttgtgattctcttcaaagataggagaaaagtcagtacaaaatttctgtatatcagcactgatatcaccagtgccttgtatcacctccatgaattttttcctatcaggagcaagcttcattgctacactgaagcttgaacttgcaagccagccatgccacttctttagagtcttgttataggaatctgtacaggcttgtgacattgaccaatctgcatgctcaattaagttttggaacaatgccaccaagaaatccattgctcttgtaagccaaagaagtccattggtacaactggatgatgatttagccgttttagtttcaacctcaacttgtaccaaactgtacaggtagttgaatttggttggattggaggagtacttagattccaatctcgatatgttaccaccaatgtcagatttaacaagggccatagcagctccaaacttatctataacaggaagtatatgcttgcaagcatccaagaaaggctgggtcaaaatttctccttgctctgattttacaagcttaagttccttccagtgcaggagtgaaaacagtcacctccatttttgtgctttgattgaatggggtaagacctcgacggtgatcttgagggctgagaacaacaactgcaggcgtttagcgaatttttatcagtcattatgtttatagttatggtttgaatgttgttttattggaatgggaattagagtggaattgtaggaagccgtaggcgtcgaaatattct

SEQ ID NO: 7771 - DNA, 1399 bp, Glycine max
  unsure (1)..(1399): unsure at all n locations
  Clone ID: PAT_MRT3847_107028C.1
cccacgcgtccgcccacgcgtccgcccacgcgtccggtctgatgcaccctctcaattgagaagctcagctagtgcagggagcttggaggctgcaaaccatttaaatgcaatacaagtagactattctgaaagtgatctagagtcaatggattatgctggaatgtttacaaatacccaatggacttcctatgtgtcttcacatcacaagagacaagcttttgtgatgtatttgcagacgaatccaggaggaatcactatatttggatggacagtcgaccggtctctagtcaacacaatatttttccttgaattaagtctggttacctttgttcttggtcagactctaatctaaggataaaatttgcacaatgacaccaaaaaacccttgagctttaggtcttctgggttatcactatcattttgattgaaagtcctacactagtatgccgagccagaatgttgcatgcacacagtagccatgcaaagtagataaacagtgtttgctggccacacgaggacttggccaggcacacggccgcttcctccctcccccgcttcccagatgtctccaaaattctatgcgtcattctcattcctcagtcagcatacttatctccgtggatcttgtgtcgtctattttgctcaatatgcaatcaaacagcattccttcaactaataccaccttaaaagatacttgggagtcttcgcagttctcgggctccttggagcagtggttctcaacttgttccaattcataacctaaggtttgcaccatctcatttgtaatcgaaggattgtagctatagtcatgtctcccccagcgttgaagattccatgctctggacatttgtgacctttataagagcgttcgcatgttgaactcgtatgtgttttgcttgggaggagttggaagaaagggagggtgttgggcactaggaaggacataaaggtttaaattttcaactaggaatggggagagaacataaggaccaatcgtgttgggtgtgcaagtgccggtggacagacatatcacaggtaatgttgcttgcaattctgatctagttagattacagtgattttttgtataattattatttgagatatggctaaggctgttttcgagtggctgaccggcaataatagagttgctgatttcggttgcctggtgcatgttgcctggtccctcgtgcaccaaccnncttttactggggaatgccttgggctgttgcccaatgcccgggggcacaggtgggtgggaagtgctttggggggttctggtggtgggggtgctggtgtgggcggggtgttgggggctggggatggggggcattgtggggggggagcaggtggaccctggggctggtgcggggcggggggtgctggagggggggtggggcct

SEQ ID NO: 7772 - DNA, 365 bp, Glycine max
  Clone ID: PAT_MRT3847_107029C.1
aaaaactacataatgctggacatactttaagtaataaaaaaatagaaaatgagcattttctttacacttcaatgtattacttatgagttggacaaatctataaattggtattaaatattatatattttatcagtaaaaaaaatattattttcctcggcaggtccctaaaatttggatgcattgcaggaattggaaaaaagatgctattgaaaatactctactgagatattatgttcaaaagggaagctctagtcttaatcaaatgcctaaacaaactctccaaaccattctcaaaactttcaatggcatcctccaaagcctccaacctttcatgtgccacatgtatcttgtcatcattagtccct

SEQ ID NO: 7773 - DNA, 139 bp, Glycine max
  unsure (1)..(139): unsure at all n locations
  Clone ID: PAT_MRT3847_10702C.1
gggattcttttttttgaaagcaggggcgcccaaaccgtggagaagtaaatgnggggcgaacgccaagaccaagctatggattaaagccgacccacgaattcacgaaccaaaaggttctgaaccagtaaggggggcccct

SEQ ID NO: 7774 - DNA, 471 bp, Glycine max
  Clone ID: PAT_MRT3847_107030C.1
aacatagataaaaatatatttaagtaaatttaaaaccctttaacatggcttttcttgaaaatgaatgtaagtgtaacctacacttggatcaagaggaatatacacatgtataactactttgataatgtattgttacatatttgcagctgcctgtaacctctaacttgtggtaaacgagctaaaactcattgttttacccttagcccatgattcctaagtcgagaaaaattgatggtatattaattaaagatataaatcatcgcgcccatgccgactgcaaggaaaaaggcataagcttggaatgcaggtataattgatcatgcatcagtgttcgttatgttgggcatggaggtgaatttgcattgagatctgacacaacaaaacagtcagggttttgcgaaaaaccatcgagctttcttagcctctgtgctcgaggatgctgaatgattaccaaaacttcatctttggagc

SEQ ID NO: 7775 - DNA, 520 bp, Glycine max
  Clone ID: PAT_MRT3847_107031C.1
ggctcgaggctgatgcaatcaatgatgctgatgaagaaaccatcaaaaagctgatttatcctgttggggggtatactagaaaagcctctaacttgaaaaaaattgcaaatatctgtctcatgaagtatgatggagacatacctagctcaattgagcaactactgttacttcctggcatcggtcctaagatggctcatttggttatgaatgttggatggaacaatgttcaaggaatatgtgtagatactcatgtccaccgcatttgcaaccgccttgggtgggtctcaagactgggcacaaaacagaaaacttcgacacccgaagagacgagggaggaattgcaacggtggcttccaaaggaagaatgggttccaataaatcctctattggtaggatttggacaaacaatttgtacacctctaagacctcgttgtggagaatgcagcataagtgagttatgcccctcagccttcaaggagacctcaaactcaagcccatcttctttcaagtccaaaaagtc

SEQ ID NO: 7776 - DNA, 1024 bp, Glycine max
  unsure (1)..(1024): unsure at all n locations
  Clone ID: PAT_MRT3847_107032C.1
tcgngnnaatccattaaaaagacaacataatttggaacagaaccgaagcgaaagagcagcactcacagagagagtgagacagagagatggcagcaacagagattgggttgttggagtgggtgagagtgggaggggaagaagaagaagcagaacaagcaaaagggtgtttgagcaagttcgtcgataatggcagcgtggagagtcacagatactacttgtctcgcagaaccactctcgaaatgctcaaagacagaggctactccattccctctcacgaaatcgacctttctctctccgatttccgcgacatgcacggccaattccctgaccctgatcgtcttcgtctctccctcactcatgccaccaactcctccaaaaggattttagtcatattctgtgggccaggtgttgtgaaagttactgccattcggaacattgcggggcagataattaatagagatactttgactggcctcatattgatagtggagaatcatattactagccaggccttgaaagcggtcaatcttttctccttcaaggttgaaattttccagatcacagacttgcttgttaatattacaaagcatgtattgaagccaaagcatcaggtgctgactgataagcagaagataaatctcctgaagaagtacaatatcgaagaaaagcagcttccccgcatgctacagacagatgcaattgcaagatattatggacttgagagggggcaagtagttaaagttacctatagtggtgaagtcacccagatgcatgtcacatatcgatgtgtttggtgatagtttcttgtgctctcttgtattttgctggttgaactcgtagtactcagcttttgtattatgcttaagtttatatttgcatgagttccagataatcaatcctaatgatctgaactctgtaaatttggttctgttatttctctcataaacttttgaagaacaatccgcattgaacaactccaaaaaaaaaaaaaaaaaaaaactcgagactaggtctctctctctcc

SEQ ID NO: 7777 - DNA, 447 bp, Glycine max
  Clone ID: PAT_MRT3847_107033C.1
gagcctgtagttttttcatatgaagaaattttttcttcaactgatggtttctctgattcaaatctacttgggcacagaacatatggctctgtttactatggtctcctcggtgaccaggtttgtggttgtatactttaattctgttatagaacaaggcaagtgtttcaccagaaggaaattatgacaccaatattattctcatattgttttggtatgtatttaaatcttctaggaagttgctattaaaagaatgacatctactaaaactaaagaatttatgtcagaggtaaaagttctgtgcaaggttcatcatgctaatctggtatgtctttgttgttcgaaataaattacatgcttggatttcagaataaattccttgcagcatttatagagtttgagtcctatttcttattaattttgtcaaggtagaattgatcggctatgcgg

SEQ ID NO: 7778 - DNA, 1000 bp, Glycine max
  Clone ID: PAT_MRT3847_107034C.1
aactttggctaatttttgctttatataaaaaaaattcactgaattttactattaacttatttttaggataaaaaaatccaaatcgcattacgttagaatcaattttaaccgaaatcaatttcatccaaaatcaattttgttaatgctcactcaacacacaccagttcatgggcactgctactgaaatttttcacatgttttgtgcttgtttttgtgtaaaagtaatgtaatatggagtcctcgtccttgattgttgatgatttcagattttagtcatattctgtgagccaggtgttgtgaaagttactgccattcagaacattgcggggcagattattaatagagacactttgactggcctcatgttgatagtggagaatcatattactagccaggccttgaaagcagtcaatcttttctccttcaaggttgaaattttccaggatcagttgacactattttttcattactgacctctgcgctacgccatttgaaatagttgggttaaccatgttgaacagccgctatgagtgttgtggtcacatgcatcctcttgtcatctctgatcacagacttgcttgttaatattacaaagcatgtattgaagccaaagcagcaggtgctgactgataagcagaagaaaaatctcctgaagaagtacaatatcaaagaaaagcagcttccccgcatgctactgacagatgcaattgcaagatattatggactcgagagggggcaagtagttaaggttacctatagtggtgaaatcacccagatgcatgtttggtgatagtttcttgtgctctctcgtatttttgatggttgaactcagtagtactcagctgttgtattatgcttaagtttatatttgcatgagttccagctaatcaatcctaatgatctgaactctgtaaatttagtggtaagatttctctcataaactcttgaagaacaatccgctttgaacaattccattcacaatttttattctttttacatt

SEQ ID NO: 7779 - DNA, 119 bp, Glycine max
  Clone ID: PAT_MRT3847_107035C.1
gtgaaagcgaaacacatacactccacttttgattttcaccaactgacaacacttgcgtgtaggattttgagagaggggatggactaataatatcaccctaaatagtccggacacagagg

SEQ ID NO: 7780 - DNA, 276 bp, Glycine max
  Clone ID: PAT_MRT3847_107036C.1
aaaataaaacacactttacacattattactacaattaaaaaatgtttgacaatttttaaattagcctatctttcccaacaaaatggccatccctaattttcttttttgttttaaacaaaccaaccatccttaaaaaccacaatttccatatctttcaatttattccattttttcaaaatatcttgcaatatccttttcaacataaaaaacttgccttacaattttccctactttttaaataatttttatattattccctcattaattttaaaaact

SEQ ID NO: 7781 - DNA, 867 bp, Glycine max
  Clone ID: PAT_MRT3847_107037C.1
cccaaagaaacaatatgataatgatgaagtgacggaaaaaacagaaacaacatccaattatgctgctattcgtgctcctgtttcaccgtttagcatggatataacagataaagaaacctcagagaaccaatcacacctgcaacccatatctaccgaggtcaaaatggataatatagagaaagaaacttcaaaatcatccagtctttgtattgctggggaaacatatcatgccccatatgctcgagtttcttctatggaagatcctagtaccagaaatagtgagtatggtaaagcagccccctcaagtttagagactgcagcaattggtgtggagactgttaaagtacatgtgtctaacatcgggaactcaacacttgagaagattcctgaagcaattgagaagccccaggtaaaggaatcatcatccaaagggtttagacgactgcttaagtttgggaaaaagagtcatagctcagctgctgaacgccacactgaatcagataatgtaagcattgacgatgaggcagatgaggttggaaccaacagttcttctaacgaagttcatactttaaagaacttgatatctcaagatgaaactcccactgccagcacaactcaacaaaagtcttctagatctttctccttgttatcaccatttcgaggcaagaacagcgaaaaaaagataatgatggcttgatagagtggatgctgttattgataagattgatgcagtgacaagctagatcttttcatttttttcaggtgtcatgagttattgtctagctagaaaagaagactgagtaatgtgttgctatgtgaaattggtctttttgtatatttatgtttggatgtgcatatgcccaagtg

SEQ ID NO: 7782 - DNA, 361 bp, Glycine max
  unsure (1)..(361): unsure at all n locations
  Clone ID: PAT_MRT3847_107038C.1
ccggcncgagagcagatacactatacactcccattttttttgctgctatgacgtcatgtcggtgcggaatattcgccgagggcggaaccctatccaaacctgcttccaccagaaccttatccgtcaccaacctcactcttcaatcgacgatttccaagctcggattcaaatcccaaagacttccccgatgcgccgccgcctccggctccgccctcggtgcgcgcatggtgtaagtgcctaaggtcaaggcccccgcgctactccaaattgacaccaaggttttcaagaaggagaagattaacctctccggacactacgagtacatcttaaaaggacgcattcatttgatacacttgttgcc

SEQ ID NO: 7783 - DNA, 578 bp, Glycine max
  unsure (1)..(578): unsure at all n locations
  Clone ID: PAT_MRT3847_107039C.1
gtcgactctagaatcaatacccttacccatgaatatgaattatttaggatgaaccctaatgaaaatatccatagtttgcagaaaagatttacacatatagtaaatcaccttgcatctttaggaaaaatctttcctaatgaagatttaattaataaagttttaagatgtttaactagggaatggcagcccattgtgaatatgtggtaatgaccagtggaggacctgtccttggatgcactagttgacgacatgtgcgtattaaattaatcatttacagagatcattctaagttgactccttaacttaatcaacctttcttaagttaatggttttgtaaaaacatcaacaagttgttcatcagtgggtacaaactctaaatccactttaccattttgaacatgatctcttataaaatgatgtttaatttctatatgcttttcttggtggatcaagtggcatcagaataattaagaaggggggttgaattaattattccgaaatctttactaattaaaaatttactcttctaggcttttaccatngtgtaagtnaataaagagtagaaaagaaacttaacc

SEQ ID NO: 7784 - DNA, 532 bp, Glycine max
  Clone ID: PAT_MRT3847_10703C.1
ttctgggttgggttttcaaccctcaaaccctgccttgccttgccttgccttgccgcacaggttggggttgcattgtgatcatcgcacgtgacgtggcagtcccctattggcacatgtcacgtgacaaaccaccttcccggttgccccaaaacccaatccacatgacccaacctacacacaccatacatcaacaacactcccaccttaagttccctgaactaacgttgttcttcttccaattccaacaccaacaacattagtaagtaacaaattaacaacaacaaaacccttctctccaatttcttgcacttcaacggcaacacaagaaccggagcagcagcagcgaaacgcggcgtttctctgggggggaaggttgggggagcgagtgttaggttcgggaacattctcaacgacttcaacagagccgttaggtttcattgcgagaagatcccgattgggttcgcctcgcttcgcgtcggtgacggtggtgaccgtgctgattgtaacggtaaaacgcgagggaatggggtta

SEQ ID NO: 7785 - DNA, 322 bp, Glycine max
  Clone ID: PAT_MRT3847_107040C.1
cctttccttcctgcctctctttgctttcctggctctttcagaagatgttgaacaagttgtggacataagtggcaaccccattttcccaggtggcacatattacattataccatcaacttaaggcactacccatagtggattgaaactaagccggacaagaaactcaaactgcccatttactattttacaaaattactcagaaatcttccataacacaccagtcaaattcagcatacctaaaataatccctagaatcatctttactaatactccacttaaaatcaagttcgcaaagaaaccttattatgctaaatcctccaaa

SEQ ID NO: 7786 - DNA, 350 bp, Glycine max
  Clone ID: PAT_MRT3847_107041C.1
ggaagcaggcgaaaatccctgctaattggaagcctggagcaacttatgacaccaaagttcagatcccaggaacatattacaaataataattacagatgtgtatgtattctaataataattatttatgaaaaatacgcatgcactttcagacccgatgaaactattacaaataataagtacttgtattaattctgttaatttgtttgttatcagtactcgatgttgttgtaatgcacttctgtcaaattaatggactagaataatggggttcatgtacttacatagtttccatctaagactgcatggaatatgaatatgaataaaatacatatgccttgatgttgttaaaa

SEQ ID NO: 7787 - DNA, 683 bp, Glycine max
  unsure (1)..(683): unsure at all n locations
  Clone ID: PAT_MRT3847_107042C.1
caaacagtttatnnnnnatnnncnattcnnngtnnnaattggaatgtacggaggatatttctccagcgatcctttgctnnttnnaactctcatgaaatcnnnnntcaattcagcaggactagaccctttcaaagatgtagatgatgattattgggctatagatgctgctactaaaacaattcaaaagctgttggagattgagaaaacaagtttgcatccaaaggagcctgtagttnncattaaagaggagtcacatgagcatgagaaccaaatcaatcaatcagcatatgaatgtaatttttccaaggaaaatgatataagttaattcggctcgagcgtagtaaaacatgaactagatgaggttgcaaaacatgaactagaagttgccattgatgcaaagatggcttcactagacacggtatttagccccggagagggatctttagtgaagagagattatgttgatacagactcttcaaatttgagaccaccttctatcatgactttgcaattagaggatgctgattttgtagaggcaacggatacaaaaaatgatgaattgactccaacatcttccgtgggtgaggtaggactaaattctgaggaggaaactaaatcaaattcagacgaatgaccaacatttatataatttactaatatatatttacacaattttaatttaa

SEQ ID NO: 7788 - DNA, 114 bp, Glycine max
  Clone ID: PAT_MRT3847_107043C.1
ggctcgagttcccccaccgaccagtacatgccccggcacagggacgacgaccggggggcatgaaggccagggcaacccgcagacctcataatgctcaggaaacgaggcattgaa

SEQ ID NO: 7789 - DNA, 918 bp, Glycine max
  Clone ID: PAT_MRT3847_107044C.1
attcttgctaatcatttctgcagcagcagtgggagtatcacttcctttcttgatcggttcaatcttctatagtaaaattgaagggtggttagaaaagtatccaaagagagcttctgttctaagatctgctggtgggggaaattggtttcatcaatttcaggcagttgctttaatcagggtttctccattcccatacataatctacaactattgtgccgtcgcaacaaatgttgagtattggccttacctgctcggttccatggtaggaatggtgccagaaatatttgtttcaatttacacgggaattttgatagaaacattggctaatgcttcacatcaaaatcacactctatccactccacaaattgccctcaatgtagttggtttctgcataagtggagctacaataatctttttcacagcctatgcaaagaggcagctcaaggagttacaacagaaagaggatggtttgctcttgcaataatccagtaggtttagtctgggtttatttgctggcagcatgaggcagttatcactatcttgaacgtcacatgttaaggcttaccacagaacaagctaacgcggctaacatcagcatttctatctcttttttctatatgttgcctacaacaactgctttctttgatggtgtttccgtctcatttcactactagcatgtttggttctacattttggatgtgattttctacatcacagatgtgattttaagaagctaatagttatagttcctacatcctaaatgtaatttttttattcttaacgaatttccaaacacgccatatgtgtattaattaaatgaaattcccacttttggagtaatcgttttcaacatgccaagattcgtctgtgtaaatccagtatcgtcgttgttgacttgtcatatgattgattcaaaaa

SEQ ID NO: 7790 - DNA, 513 bp, Glycine max
  Clone ID: PAT_MRT3847_107045C.1
aattcggctcgaggttgatgctactatggtcctctctggagctgtattgactgcttatgttggtgtgaatggacttgcaagaagaatgagtatggatcgatgccttcctcaattcttgatgacagagaatagacttagacatactaatcactttattatcattggatttttcttaatcacttcatctctttacttaattgtaaatggaaatgtggaaacactagcaggagtatacactgtagctttccttggagtgatgtctctatttgctgttggtaacatgctagtcaaatacaagagaggaagcttgtacagacaaatcagagcaagttggctttctacagtgtctgctttgctgtttgtcttggcaggcttagttggcaatgtggtgtacaatcttagtttgttgaagtactttgctttatacttctccatcacagttctggtggtcatgttgatgtttgtgagaatcagaatcctgaagattgtgctctacttcttatccaaaaattc

SEQ ID NO: 7791 - DNA, 1380 bp, Glycine max
  Clone ID: PAT_MRT3847_107046C.1
ccacgcggaattcggagaaagcaaaggaagagtgtgtgttacaggaggtacaggttttattggttcatggataatcaagaggctccttgaagatggttactctgttaacaccactgtgagacccgatccagaacacaggaaagatgttagctttcttactagcttacctagagcatcccaaaggctacaaattctcagtgctgatctcagcaatccagaaagttttattgcttccattgaagggtgtatgggagttttccatgttgctacaccagtcgactttgaattaagagaaccagaagaagtagtgaccaaaagatccattgaaggtgcacttggcattttgaaggcatgcctcaattccaagacagtgaagcgagttgtttacacctctagtgcctctgctgtcgataacaataaagaagaaattatggatgaaagctcatggaacgacgtggattatcttagatcttcaaagccatttggttggtcatattctgtttcaaagacattgacagaaaaggcagtgcttgaatttggagaacaaaatggattggatgttgtcacactaattccaactcttgtttttggacccttcatttgtccaaagcttccaagctcagttcgtaattcattggattttatacttggagaaaagggtacatttggtgtcgttctacagacagatatggtgcatgtggatgacgtggctagggcacatatatttctgcttgaacatcctaatccaaaagggaggtatatttgttcacaatgttcagtaacttatgaaaggatctccaaacttgtttctgccaaatatccagaatttcaaccaccacctgtagagtctctgaatcatattgaaggtacaaaaggatcatatttgtcatcaaagaagctgatagatgcaggatttgtgtacaagtatggacttgaggaaatggttgatgatgccatccaatgctgcaaagaaaagggttacctgtgaagtagctagcggtgtacccttttttatgttattataggatgaggatggctatatatccatacaataagacaataattaactactttgataaatggttgttcatgctaccaattgaatgcttttgccttttggaattggattgcagttggcaatggaaactaactatttcagttggtatttaaacctttaaataacacgtgctgtgttagttgtgacaatatataccaaaggtccaattcagttggtatttaaacctttttatgtattcaattcttacagctaaaaaaaagttgtgactatgtacatatcttttacaaaagtagtaatagggagctctttcataaataaaaaaaaaaaaaaaaaaaaagggcggccgctctgaggagtcaagc

SEQ ID NO: 7792 - DNA, 346 bp, Glycine max
  Clone ID: PAT_MRT3847_107047C.1
gattcttgatattatcctttggattatttaacaggacaaaaactttggccttagctgtttgggatctgaatcaagactccccgagattttatttaagacagttgtactataacagcttttttcctgatatccaatcacaaattgtcaaatttaatggcattctggtgttgaagaaaaccttggactcccccggccttatattccagagatggttattggctcgatgtgacaatgaccccaccaacagattgtgaatcttggggattttatcggttccattcattcaaccaaagatggcgggagctcttacgcctgcgtgaaataaaaggaatgggttggactaatg

SEQ ID NO: 7793 - DNA, 372 bp, Glycine max
  Clone ID: PAT_MRT3847_107048C.1
gtcgtttttgtcttttggttcaacccatctgcgatcataacaaacaccggtgatggttcatcaaaacgacaacgacgacagcagcaccgccaccttccaccatctcgtgtagcggacaacgacaatcggcgattgaattgttcttctacttcttccgcggggatgatgtcgaacctgtacggcgaatacaaccagaagatcgactacgtgttcaaggtggtgctgatcggagactctgcggtggggaagacgcagctcctcgctcgcttcgccaagaaccaattcagcgtcgattccaaagccaccatcggcgttgagtttcagaccaaaacgctcatcatcgacaacaagaccgtcaaggcccaaatatgg

SEQ ID NO: 7794 - DNA, 382 bp, Glycine max
  Clone ID: PAT_MRT3847_107049C.1
aggaggaggatactgatgacgaaggtcttgaagaggaggaggatgatgagagtgcaaatgaatatacagatgatgaagatgtaagctggaaagttcggagagcagcagctaaatgtttagcagcattgattgtttctcgtcctgagatcttgtcaaagctgtatgatgaggcttgtccaaaactaatagacagattcaaagagagggaagaaaatgtcaagatggatgtatttaatactttcattgagctcttgcgtcaaactggaaatgtcacaaaagggcagacagatgcagatatgagtcctcgatggttgttgaagcaagaagtgtcgaagattgtcaaatctataaataggcagttgcgtgagaaatctatcaagac

SEQ ID NO: 7795 - DNA, 818 bp, Glycine max
  unsure (1)..(818): unsure at all n locations
  Clone ID: PAT_MRT3847_10704C.1
gagannnnttaataggtatttgttagtgtctttctgttcctgtaacatcaaagaaggaatataagagatccaaatcttgtcttgaaggctaccttgttaaagccaaactgttactttttgtcactaaaattaataaattggccttggcatgattcaaaagacaggtttctaggaagctagtttcatgaagaataagaaagcagttagggacgacacggccagaacaaggtataaaactcttttagccttattcccgaattctgacaccataaatgaggctatcttctccatgaattctcccaagcctattttcattttcagtccaaagggtttcaagtggagcagtggttccataaacgtctcaatattccttattactgctcttccgtggtaagtgtggcttatgtgtaagccgaaacccttccaaaggggaaggtgtatcttgttccattcgaatttccactggagaccaacatttacgccttcatggggagtcggtttaaatataatttgaatgttgtttcctaatatacttgtcagataagaaaagaattccaacacttgcgttcttccttggaaggtttcgaagaatgagaggaaattgctcacacgtcggcgctcatctgcagataattcgtgtgtgtttttgttcttgaaggcagagtacagtttcattactgagtccagggcatgatcatcttccgcttctgattctgagttattgccatcaaaggcaatcagggattggcctctctgcagcttctcagaatacaagctcctatgacacgaggattggtatgaaaatgaagatagagaat

SEQ ID NO: 7796 - DNA, 480 bp, Glycine max
  Clone ID: PAT_MRT3847_107050C.1
gcgagcgtgaagttgcagttattgattccaattccaagtcctaactatataacagaaaaatccattttctctcgtaaaccaaacacacgcaaacccgcgcgaatcgaaaatggcggatccgatcccggcgccaccaagatccgccactgaactcttctcggatccgctggacgcccacccgctgtggttcaaaccggcgtcgtttctctcccccgacttcgactccgaatcctacatttcggagctccgaaccttcgtccccttcgacacgctccgctccgagcttaacagctacctctcctccctcaaccacgagctcatcgacctcatcaaccgcgactacgccgatttcgtcaacctcagcaccaagctcgtcgacgtcgacgctgtcgtcgtgagaatgcgggccccggtcgtcgagctccgcgacaagatcgagcagttcagaggatccgtcgaggtctctcttgtcgccatcaa

SEQ ID NO: 7797 - DNA, 466 bp, Glycine max
  Clone ID: PAT_MRT3847_107051C.1
gctgatgaaaaggcttaaaattcaccctacctatataacctttatttcggttttgaatgcatgcgcccatgcaggattagttgaagaagggtggaggcaattcaaatccatgattaatgactatggtattgagccacgggttgagcactttgcctcccttgtggacatcttgggacggcaagggcagcttcaggaagctatggatttgataaataccatgccatttaaaccagataaggctgtgtggggtgcattacttggtgcttgtagagttcataataacgtagaattggccctagtagcagctgatgctttgatcagacttgaaccagaaagttcagctccatatgtgttgttatataatatgtatgctaatttaggacaatgggatgatgccgagagtgtgagagtgttgatggaagaaaagaatgtcaagaagcaagcagggtatagttgggtagactga

SEQ ID NO: 7798 - DNA, 1636 bp, Glycine max
  Clone ID: PAT_MRT3847_107052C.1
acgagcactatcactgcgtctctatcctctctcactcactcactcactcattcacggcgccagattcaaacgaaaacgaaactcgctcgcactcatagttagttacgcatcgcaagcacactgccaaaaatggcggggcgcaagcacgcgccctcctccttcacgcgcctcgacgacgcgcgtcttgcgcattcctcctcctcctccgtcgccgtggtccgcgccctcgaggagcgcgtcgaggcgcgccaccgcgagatccaggccctgctcagcgacaaccagcgcctcgccggcatccacgtggcgctcaagcaggacctcgccgccactcaggaggagctccgccgcctctccgccactgccgccgaggtcaaggccgagcgcgacgccgaggtgcgcgagatctacgagaagtcactcaaggtcgacgccgaggtccgcgccgtcgccgccatgagctccgagctggatcgcgtgcgggcggacgtgcaggagctcgtggcggagcggaaggagctcgcggcgcaactgcatgccgtggagagcgagcttgcaaaggcgcgtgcggaggcgcagtttgtgccggcgattaaagcagatatagagaccatgcgccatgagattcaacgaggaaggaatgctattgagtttgagaagaagacacatgctagtaaccttgagcacagacggactatggataataatatgattattatggaccgcgaggttgaaaagttacgtgctgacttggctaatgcagaaaaaagggcaagggctgtgatggctgcagatgcaaaaacaaatcctggatatcctgctaactatgacaatcctgagatgggatatggaggaattacatgtcctcctgattcttatagcatgcatcagctgcaagctgtggttgacactcattctccacatgaagctggagcatcattacattatccgaatgacctgcaacatacacaagtgcctagatagtctttgggatgctttagtttttaaagagaatgtagcattgccatctccttcccctcccccaaaatgattttaaattcttaagcttgtatatatgctttactatttattttcgattgtaacatattcaggtagtttgcgcaggttcaattttcctgtatctcctttaattctttcatgagacttgttcaaatttagaaagctagtttttgtttcgtaaaaagcataaaaagtttcttagattctattctggcaagttgtggttaagttccgatgagttgtgatcgagttcctggtcttcgtagaatctttgatctcctactccagtgttggggaggtacttacaaaaaggactctgacgatcaagtcagttgagcccaaggtgtttgtgtatttgtgtatgggatgataaaaaaacgtatcttgttgtgttttctttgggtctatatgtacacgttcaaccttgagaagattacattgactaattgattctttaggcattgtgcatgatcgtggggagctagtggtcaccattagttgttaactccttgacaagtgtatcaatttattatagtaatactaaacagtaagatcgagtatcgagttcacatgaattttgattgtgctcaaagtttatatataccgaattctaatc

SEQ ID NO: 7799 - DNA, 169 bp, Glycine max
  Clone ID: PAT_MRT3847_107053C.1
tgaagattccgcaacagagagtagacaagatggcgcggttgatcacagtggtgtggtgcgcggtggcggtgctactttgcgctcgcggcggtcgcgtcgttggtcgaggaggcggcgaacccgatacgaatgctggtcgtggtcgatgcggaggtggttcgggtgatag

SEQ ID NO: 7800 - DNA, 273 bp, Glycine max
  Clone ID: PAT_MRT3847_107054C.1
cgaaaaggccctcaggatgggaacaattcattcactaagcaattaacatcaaaggacaatataggaatttatcgtgtagtgcttgatttccctgagtatcattagtgcctatccctgctagtgcttgtcccccatgatccaatctgttatggcttgtcccctgtgtgctggcaagacctttaggattaatcattatcattttcatatacactcactataaatatatgaaatgaataaagggaaggcaataagaaattttagaaaaaaaaaaaa

SEQ ID NO: 7801 - DNA, 186 bp, Glycine max
  Clone ID: PAT_MRT3847_107055C.1
tttgaatagaataaattagagaagaaaaagtctcaaatcaggtggaatgggtatctgcatatcctctgaatcttcagcgattcatggagcccctgaagaggctcgtgatgaaaatgtgttagtgtttgaagcaaccaaggttctaagtggactttgctctgcttacactaaacaaggtagcaaagg

SEQ ID NO: 7802 - DNA, 893 bp, Glycine max
  Clone ID: PAT_MRT3847_107056C.1
aaaaaaacaaggagaaaacaatcattttttcccattggcattaatttttatggaccatatctctcagcaccaaccttagcattaactatcctttttgccaactcggggctccattttctccacttttcttcagtgcccagattctccatataccattatgcttttgatggtcttgctctcctcctacttctggttccctctacctgtgcagctattggccactggttaaagtttatcttttggttctatgcatttgatgccacctccttttgtgtgaatctaccagttttgcaggtcatggcaagacgcactgtggcaataataggcccccatagttctgtaacagctcatgtcataactcatattgcaaatgagctccaagttcctctgctgtcattttcagctttggaccctaccctttcttcacttcaattcccattcttcattagaacttgtcacagtgatctttatcaaatgactgcaatagcagaccttgttaactaccatgattggaaagatgttattgctgtctaccttgatgatgataatgggagaaatggaattggcgcattaggcgataagcttgctgagaggcgttgcaggatatcatataaagcacctttgagcccggacgcatctatggaagagatttctaatgtgcttgttcaggtggctctggcagaatcacgggtaatagttgttcatgcaaatactcaatttggccccaagttgtttagtgttgcaaagaatcttgggatgatgggaactgggtatgtctggatagccactgctttcctctctgctctccttgatatcaacagtcccctctctccagattcattggatgacattcaaggagttcttacaccgcgtatgtacacgccggattcaca

SEQ ID NO: 7803 - DNA, 152 bp, Glycine max
  unsure (1)..(152): unsure at all n locations
  Clone ID: PAT_MRT3847_107057C.1
caaagaatctgccaattttgcgntcgtgatatttaggntgganagnagaacagatgccgttgaaggtgtnagaggcgacagtatcnagtttcgcatgtggcntttgagaattccnatcagaggcnccacaaanaaggcccnatctccatccc

SEQ ID NO: 7804 - DNA, 501 bp, Glycine max
  Clone ID: PAT_MRT3847_107058C.1
attctcttacttggtccaaacgttttgactcattaattaaaataagtcaatgctcaatcttcttaagaaatgaatatacgaatcatagttatagttcctcttataacgagtaatatcattcatgtattataatatgctcaatttctcaagcactatactcaaagtggtaataaaacttaatgaataaactcaatatttattgataactgtgaaatttatgttaatttgatagtcagttttggctaagaatgattgcaatttctttactttactattatttttaatgaaataataaataaattaatatctttgtaattttttattagcagaattcaaaagaagaagatttcaagtgttttagaggaaaattgatgcaaaaactggaagaaaaaaccttgaagaaaagttggaagaattgaacagctcgcttagcgcacaggttaggcttagcaggcaagttcgggcttagcgcaaagaaggcccacgaagaagtccaaaggt

SEQ ID NO: 7805 - DNA, 718 bp, Glycine max
  Clone ID: PAT_MRT3847_107059C.1
ccaaccttagcattaactatcctttttgccaactcggggctccattttctccacttttcttcagtgcccagattctccatataccattatgcttttgatggtcttgctctcctcctacttctggttccctctacctgtgcagctattggccactggttaaagtttatcttttggttctatgtatttgatgccacctccttttgtgtgaatctaccaggcccctcatccaacgatgattaaagcttggctcttggttttaatggttctctccaatgggttcttttcaaatggggatggcatgcataattccacaataccagattttgtaaatattggggctctcttctctttcaatactagtgttggtagaagtataaaaattgctatagaagctgcggttgaagatataaattctgaccctactattcttggtaaaaccaagctgaacctctcactgcaagaagattctaagtatagaggtttcctgagcatttctgaggtatgtctttcatagtatcacccgtatgtgttaaagccttctcatgttacttcaactctatcgatacttgattttgcaggtcatggcaagacgcacggtggcaataataggcccccatagttctgtaacagctcatgtcataactcacattgcaaatgagctccaagttcctctgctgtcattttcagctttggaccctaccctttcttcacttcaatt

SEQ ID NO: 7806 - DNA, 842 bp, Glycine max
  Clone ID: PAT_MRT3847_10705C.1
aattcggctcgagctacaacagatgttgcgcaaagggcattgaaagccggactgcagcaatcccaaataaagatttttggtctacctgtccgaccttcctttgttaagcctgtccggccaaaggatgaactaaggagagaattagggatggatgaggatcttcctgctgtattattgatggggggaggtgaaggtatggggcccattgaggctactgctcgggcacttggagattcattatacgacgagaatattggggctcctgtaggtcagatccttgtgatctgtggtcgtaataagaaacttgctaacaaactaagttctattagttggaaggttcctgtgcaggtcaaaggatttgttaccaaaatggaggaatgcatgggagcttgtgattgcataattacaaaggcaggcccagggacgattgcagaggcccagatccgaggcctccctattattctgaatgattacattgctgggcaggaagctggcaatgtcccctatgtagttgaaaatggatgtgggaagttttcaaaatcccccaaggagatagcgaaaatcgtagccgagtggtttggtccaaaagcttacgagctacaacaaatgtcacaaaatgcattgaggctagcaaggccagatgctgtgttcaagattgtacatgaccttcacgagcttgttagacaaagaagctacctaccagagtattcttgtacaacttaaactgacacacgagactgagggttttttttgcaacactgtttctgaggaaaaatatgtacaaggcagcgatgatgatgtatcactagacaaaaaaaaattcagtgtattttcttccatca

SEQ ID NO: 7807 - DNA, 800 bp, Glycine max
  Clone ID: PAT_MRT3847_107060C.1
gtgtccgttggatagtctttgggctccgtacgatctcttccgtcacttgccgtcgctgttctccgattcatagctagggttttggtgcgggtgcatgggcttttgacgtggggagtgcctcacttgattgctgccacttgctcctcctggtcgtcgtcgtccagctgaaaggaagtgtgattgcaaatgacggaaaaggacacgcgagtgtgagggagatgtgatacgtggataaagggtgacgtggctatgtgtttggatgatatgatattatacggtgacctattttgagtttggatgatgatgatgatgattgggttgcgatggttattaattttgtacagtattggtaggtagatagtgcagtttacactcttgccccttgtggtagggtatgcgcgttaggcactcttcaccggttcttagttcttacacttggatggagggtttcttcgcctaagttctagtgttcgtttattttttgttcaaataaaaggaactaaaagagtgtagtgtggcgggtggtatggttgacggggcaattatcattttgtttcagtgagaccaaatagaaaatatcaaaatacgagttcgacacagcaatgttttcagattaaaaacactgttgtcataagcagtgttaagaatctgtttattttagtttttaggaaaattatttttgaaaatttccagtgtatttctttaaggattgaactttaacaaggttatatttatattgttttgaattttgagaagttattttggaataaacaattgaaatgatcatgaaattttaagat

SEQ ID NO: 7808 - DNA, 633 bp, Glycine max
  unsure (1)..(633): unsure at all n locations
  Clone ID: PAT_MRT3847_107061C.1
cacacatcacttattaataacacagctgaacctgaaaannnnnncacnnngatataatcaaacattcattcattcacaaagacatatatgcatgaactcagggtcgcttcccatggcctctaaaacctcataaggaaggaacacttcaatgacaatntnaccttcttcacagccaccaaacataaaaacaatggaatacgacatagaatcaccggcacttcggaccgccatgggctttccccacccaaaatcattgccgtaaatattgaaccttggggaactgccaacgtttaaggtattactataagccacgccacgctgccgtggtgttctcgcccaagactcatagtggttctttaccttctcatcagagtgcgaacaaatcatcttgttaatctccaaagcactctttccaagctcaccttgtaatacctctcccgcgtttcatggcaacacgaccaatacagtgctgcgtttccgaaataatcttctggcagtggcggaactacccttgggctaacgccaacgggcattgcaaactgaatctcttcatgtggctcaacatgttggcagcgaatcacagaacgccaaaggttagctaatagcgcttgcagagaagatattttgtccgtg

SEQ ID NO: 7809 - DNA, 156 bp, Glycine max
  Clone ID: PAT_MRT3847_107062C.1
tacgtaaaaccagaattcggctcgacaagtttgagggaaaatgggtttcgtgaaagtggttaagaaccgtggttacatcaagcgctaccaacttaaattcaagatgcaccgccaatgaaagaccgattactttgccacgtaaccgtttgactgtgc

SEQ ID NO: 7810 - DNA, 406 bp, Glycine max
  Clone ID: PAT_MRT3847_107063C.1
tcttttggctaacacacacgaactctttgatggaaattttccattggattctcggtttccaattttctgtgaattgccttcatcctgtatgtcaattacctccagaagctgtcgttgctaatgttacatgcggttgtggacgtggtggttctacccaccactgcttggattatttctgcagataacaatcgcttcctcatatatcaacaaaaggattcgcacagtacttgtgaaaggctagaaaaccgtttttcttactagagttgattctttttcagcagctctactggctgctcttttggtgttaataatgaaattcttagttctaacctcactaactcttatcttgcccttacttcttgagaacagtaagagtcttaaatatctcgttgatgagtgtcctttt

SEQ ID NO: 7811 - DNA, 469 bp, Glycine max
  Clone ID: PAT_MRT3847_107064C.1
atacataaatgatttatgtttatagaagtgtgtatcttttgtccataaatttagtactagattagtatttttaaagagatgtttcatagcaaaagaaaacacaactttgactgtaagctaggatagttggacactaggacaagattgaagactaacctcagaagttatagttgtgacactagactttgtattttgatactagtttcacatgtgccaagtgttaaacatcaactcattcttcattaggcaacagcatttggcatgaaaagcgtagtttacgtgcctcaaatcaaattagacacggtagctgcattatctgcattctgcgacaaggccagcatggtgagcatggggtgagacaaataagaacaatacaatgtttacttcaaattatttctgttcaccttttccattttatggtttgtttggttatttcacactccccttctgtcgtcttctcgcagccgta

SEQ ID NO: 7812 - DNA, 125 bp, Glycine max
  unsure (1)..(125): unsure at all n locations
  Clone ID: PAT_MRT3847_107065C.1
ggncgtcgcangcacgcgtangtaagctcggnattcggctcgagaccttatcccttgancnncccngaacnaaaccatgnntacntgccggcagnttctactcgcantgcnnaagccctcaagtg

SEQ ID NO: 7813 - DNA, 262 bp, Glycine max
  unsure (1)..(262): unsure at all n locations
  Clone ID: PAT_MRT3847_107066C.1
aaaacccgggccgacgcacacatccgcccattcctacaatcacacttccatactcattcatttctttaaccatccttttctctgtggctctcacaggagagagccacgtccatccatcnctacctccattaacattatctcagaagctttttctcctaacactcccatacccactgcactgacataacttctaattcctctacctgcagatagatacatcgcataactccctaaccacattgatgatacacaatacccaaaa

SEQ ID NO: 7814 - DNA, 415 bp, Glycine max
  Clone ID: PAT_MRT3847_107067C.1
ggctcgagcacataatgaatatgttgctctggctcccagcatacccaacattccaacctggctgggacctagatgatgaaatccatgccacattcttcaaatgcatcagttggcaagtggaggaaaccttggatacaatcaattgcccttaccattatttctgtgacaaaacatacccttcaaactaccctcttgttgttgatatcttggtccttctctttacagcagcttcttacttggtgactcttgtcatattggtaatggacatgagttcaggaagaggcagaatctttttgggtcaatcaaaaagattccttctgccctcaggtcctatatcgctccctctaataatcttagcctttgcaaagggtcctcaaatcaacacaatattcccactaacttgtgtaggtgctgc

SEQ ID NO: 7815 - DNA, 498 bp, Glycine max
  Clone ID: PAT_MRT3847_107068C.1
gctcggaagctcggtagagggctcgagcggatcgagataatattatgtaacgcgtaggacacctactttactgtctctctctatctgagtgatttggtggtggccatagtgagtagccaaagtgcaagagaacaaaagggtgatgtttcgtttgttttgtgagtgttgagagtgtgagacatggaagaagcagagaaggagttagagagaaggagcaagtttctgaacagtttgatacaacagaagaagaaagccgccatagagtcagagcatgaacatgagagtagtctcaaggttgatgtcagagcttgtgacatgcccctccctttgcagaaccgtgccttccaatgcgcacgtctctacttggagtctatgccacctgccaacaagcttgacagtaaacgccttgcacttgcccttaagaaggaatttgattcttcttatggtccagcttggcactgcattgtgggtactagctttggttcctatgttacacat

SEQ ID NO: 7816 - DNA, 455 bp, Glycine max
  unsure (1)..(455): unsure at all n locations
  Clone ID: PAT_MRT3847_107069C.1
cataagcaaaagcaacggtgaactgaagatgccggttctcaccctttctactaacgttagccttaatgattgagacgcctcttcgatactctcggaagtaatctccaccgtcgccagcatcatgcgcacacctgagcctgtatcactactttcccccctctctctatgatatctatatatgaccatgatttatagcgttgatgttttatatatagaattaagttgaaagttaattcatgaaaattatttcaccccatccttgtcgtactattcctttgtagttaattatattacaaaattgattttatctctaaaatggttcaatttttaaggggaaatcattttgttagtactggtcatagccagtataagatcttctgtatgttaattgcatgaaacaacatagaaaagatttcattnttcctccggacagtttacttttttcagtttttttt

SEQ ID NO: 7817 - DNA, 247 bp, Glycine max
  Clone ID: PAT_MRT3847_10706C.1
accaccccttccggcacggacccccgcaccaccgtccaatccaaagacgtcaccatcaacgcccaaaccggcgtcgccgtccgcctctacctcccacccgccgccgcttcctccgccacaaaaaaactcccccttttgatatacatccacggcggcgcgttctgcgtatgcaccccctacaaccccgcctaccaccaccacctcaacgccgtctccgccgccgccaacgtcgtcgtcgcctccgttc

SEQ ID NO: 7818 - DNA, 160 bp, Glycine max
  Clone ID: PAT_MRT3847_107070C.1
acatactataatgcgctctatctctttctttcgagcgggttactaacccttgccgtgcttataactacatacttcctaagtctcaccattccttttatcatcaataccttcttcttcttcaacttactatcttcaacaaacaccctttttctaccaaaca

SEQ ID NO: 7819 - DNA, 304 bp, Glycine max
  Clone ID: PAT_MRT3847_107071C.1
agagacatcgggcgaaactcaaaaccggaaaaatagaaagtgccattttcctactgcaggagcgggaaaaaaccccacctcctttaattcctgtgtccaattccccctgggggtctcagggggaatccccaggggatatcattcccaaccaattgggcctgcattgtctccccgaagaaaaacattatggggtgtccaactcaatacgggggaccttttcctttgaatttaagggcgagacttatgtggggaatgcgccccgcatgtagaagatcaactccccccttaatgcaccttggggttg

SEQ ID NO: 7820 - DNA, 381 bp, Glycine max
  Clone ID: PAT_MRT3847_107072C.1
aataggcgtttgaaaagacacttgtgctgtctccttgctctccatcgtaagatgtaagaaggatgaagacatgtctcgtggttattcaattacagagattactaaccatcaataaaataaatgtgaatctcacattaaacatcaccgaagtgataacgctgattccggtcactaagaccaaaccgtgggggcgattcgcggcggagattcgagatccgtggaagaagcagcgcgtttggctggggaccttcgattccgccgaggatgccgcgcgggcctacgacaaggcatcaaggaggctcaccctacccaaggccaaaaccaatttcccccccttccccggcccggcagaggcggaccaccactcgcagattccgttct

SEQ ID NO: 7821 - DNA, 434 bp, Glycine max
  Clone ID: PAT_MRT3847_107073C.1
gttagataaccaaggtgcataaatagaacatatatatcgacaacttacatacgtcctttgagagtgagtatcacccccattgccagacattgtctggtgggtggccaataaagcacggttcataaatcacccagcacaccaaaccttattaatgtgcttctggatgagcctttgatccaaatgagcaaagtcacggggcttcagcttctcctactgcctctatggcttgagtcgaatatttggtgccaatcgcctattggatatccgctgaagatttaaacatggaagattctctaatttacagcttaactagatgacataaaccaaaccctgcacatggactctggccatgttgctgagggactagttggaggctaggttgctaatatgctctatgcccataccttggaggcatttgtaacctttagatctgc

SEQ ID NO: 7822 - DNA, 427 bp, Glycine max
  unsure (1)..(427): unsure at all n locations
  Clone ID: PAT_MRT3847_107074C.1
taagctngggaagacgacagaaggggctatttcttgttcccactaagaaactattttgatccgctacagcgcatcaacattctagttaataagttaaagcaaaactttgtttaaatagatttgatttgtttttcaaaaaatggagatttttttataaaaaaaaagtttaacatgttattgaatgatataatgatgtgacatgagaaaaggaaagaagaaattatcaaagtgtttgtgctattaaatttgtataattaagataagaagttaactcttttatttataaaatagttaaattattcaaccttctaaatatatatttgaatgtaaataagttcactcaaataagttcaattcaattgtaaaaatttatttntattaattctaatagcatgaataattatttatattctataaactatacgtg

SEQ ID NO: 7823 - DNA, 404 bp, Glycine max
  Clone ID: PAT_MRT3847_107075C.1
ggctcgagctccctccattttacctcgagccttacaggcattgttctatgggtggatcgaactgtgatctagggatgaatcgcgtcctggctcattaacctgcgacacccgctagcgacttgtgctgacggcaaaagcatgtttgttgatatcctacaccatccacactcataccacggactccgtgcccacggtatctgacagtcactgtgctaatgctgaagtggatgagcgcacctgaaacttggcattgtggatactgatggacggatgatttcatgggcttagacccttgagctatctaggagctgacgttcacatacttgactttgacctcataagcacggctagctatgaaaactattgcagagaagtgcatccccgagctcatgcattatgcccct

SEQ ID NO: 7824 - DNA, 575 bp, Glycine max
  Clone ID: PAT_MRT3847_107076C.1
cacaaaacagaactccataaagacggctccggcgcggggaaagcaactactgtctcttactccacacacaatcccttgattctctctctctatgagcttgctttacaaggagatcccaatgtggcaccccaccaaccgccatttcttcagctgaaagcctcttatccatcaaacactcgtgtcccattacagtactgtctgttaggcagagaaagaggaaaaaaaaggatataattgagatggatgtgagtaggagaagacttggagttagatgcagtgtggttgcagggtcagtgtgggagagcagaatgaagagtgatgaagttggtggtggagttaaggtcttcactggagaacaaagtgctgaagaaggaggcaatggtggcaccagattgaagagaggccaaattgggagtgtggttgcttctggaaagagaaaaacttggaaatctgaagggttagaaaacaaccatattcaaatagccataggaaaagcagaaccccataagaatggtagtaatagtagtagtagtcagcaatgcaagggatctaacatatcttctgattcaatcaag

SEQ ID NO: 7825 - DNA, 211 bp, Glycine max
  Clone ID: PAT_MRT3847_107077C.1
cgtatggcccacctactatacactcagaaaagacaaattggggtatatatgtttgtgaaggagctttatatgatgcaaatccatgacaaaagctacagaaaaccctttatagaaacacctactagctctacatgactatcaatcattgcttcctcaacgcaatcatgaaccactttacaacgatcttactgcttctatgggccttgataac

SEQ ID NO: 7826 - DNA, 845 bp, Glycine max
  Clone ID: PAT_MRT3847_107078C.1
tccagttaaggaggtagtagaccactagatgaatagataggtactgttggttcgtaatttgcattttgctgtgctgtgcgggtttcctcttcagattcatggcggcaacccaaccaccgcagggtccggatcgtaccaccgaagagatacccgccgaaccagataacttgaaggagcagggtacagcaattataggtcattcaagggagaccacaagtcaatcaggatctttaggttcaagtggagattgtcctctgtatcctcctaatgtgtatgctccccaagcccaggctttctactatagaggttttgacaacggcaatggtgaatgggatgaatattcttcatatgtcaattctgagggattagacattggatctcctggtgtttacaatgaaaacccatctcttattttccattctggttatggcttcaaccctcaaatgccttatggaccatattccccagttaccacacctttgccttctgtaggtggagacacacagttatactcccctcagcaatttccatacactgggccaccttattatcatcagctggttcctcctagcttaccatatcttaattcacctactccagtttcacagccagagctcaccagcctggtaggtattgaccaacaagttgataacatgttttttggaccaagagcgggctatccgtcagtgggatcttttggtagaggcaactttcctgtagcacctggttcctttggctttcatgaatcccaacaaggatttgaaggatcaagatctggtggaatctggtcagactgctcaaaaccatctgaaagacagagatctttgatgcctctatcgccatct

SEQ ID NO: 7827 - DNA, 520 bp, Glycine max
  unsure (1)..(520): unsure at all n locations
  Clone ID: PAT_MRT3847_107079C.1
gtttatatatctgttaggcaacttcacttagtgccaattggctttaagttgatatctgacatgatatcagagcctatagcccatcttagttcttgcctattctagtaggctcgcctgtattggcaggcatatgtggagggggggtgttaggaagtcccacatcgcctgcctcagttcttgagcttcttcccgtggttctgggaagcatcctcaacttgtgccttcaactccaagatgggctgttgccaatggtgctggtgttatattgagtgtttgtgatgatgaagttgctcgcaatgagactactactttaacagcagctgctgtccctgcacttttgcttcctcctccaacgacagctttggatgagcatcttgctgctggattaccagctctggaaccatatgctcgtttatttcatacgttattttgaacttaatacctttcttgtttttagttgttcatagagttcatctgcctgacaaaatatatatacacctaacattngcagatattatgc

SEQ ID NO: 7828 - DNA, 173 bp, Glycine max
  Clone ID: PAT_MRT3847_10707C.1
ggagtgagtaacttataatttttcaaatcttaacagtcaagaacacactgtacttaggtgatttacaggatacaggataatcgattgaccacgaaacatgcctcctgggtagaaattagccatcaaaaggcgtaggcactgggggggggagcattatttattttcctaaccac

SEQ ID NO: 7829 - DNA, 1346 bp, Glycine max
  Clone ID: PAT_MRT3847_107080C.1
tgcacgttgtaggctctttgtacgttttacacgtcagctcttcaaaacgacgcctccgtgagagagagagaagaaagaatcaagcttagtcaaagtgtcggactcgcggaagaggcgaaaacgaaagaatcaagcttcgtcaaagtgtctgtcacacacagtctttaagatctggaagcgcttctcacttgcccacaataagaattcctctcaaatttcaatttttcatttgaaaataataaaaccctaaaagaggggttgcaagcaaaatgagaagctcgaagatgtggatggttttcatgtgtctgacggtgagcttcttcgctcgcattgaatcgctatccgtgacggtgaacgacgtcgagtgcgtctacgagtacgtactttacgagggcgacaccgtttcggggaactttgttgtcgtcgaccatgacattttctggagctctgatcaccccggcattgatttcacggtgacaactgctgcagggaatactgtccacagtatcaagggaacctctggtgacaagttcagttttaaagccccatcacatggaatgtataaattttgttttcataacccttactcaacacctgagactgtttctttctacattcatgttggtcacatcccctctgagcatgatcttgccaaagatgagcatttggacatctgttacagctgaacaaaagtactcgaaagctcgtgatgcgagacattgacatacgaatgagagcacaaggaagcgtgtggtatgctacactgtgggagagtaccttctcttggctgctggcagtgtagtgcaatacacttaggtagagcgccttttcttggctgctgttagtgcactgcaagtcatatacattaggcgccttttcagcaagtcagtggcctacaatcgtgtttgagtcgccttcatgattaacgttaatggcttccttcattagcaacagggttaggtttacatatgcgttctctattcattcaacagtacgattacgatcccttggtgaacactttttttttttcttttcaacagagactccacttgtatgttgatacccaacaagatatttaaattccttagcttgaatttcaatggattcacagaaatcaaaccgtgtgggaatcaataccaagtttgtaaaatggtagtctgagttcctaaaatggttgaaaaactgaaagtaaaattagacttttttggtaaaaaaaaaaccatactgcttattttttacctgttcttttaggacttggctctttatgttgttcacttctactggcaaaaggtgaaacatctccacaaattaaaaatttgatgttatatatgattgtaatttgtaat

SEQ ID NO: 7830 - DNA, 1197 bp, Glycine max
  Clone ID: PAT_MRT3847_107081C.1
cggggtggtggagtggaggagagagaaagtcggcgctgcactcgctgaggatagagagagagagagagagagaatcaagcttagtcaaagtgtctgtgactgtcacacacagtctttaagatctggaagcgcttctcacttgcccacaacaacaattcctctcaatttcaaaattttcagcttcaaaataataaaaccctaagagaggggttgcaagcaaaatgagaagcgcaaagatgtggacggttttgatgtgtctgatggtgagcttcttcgctcgcattgaatcgctgtctgcgacggtgaacgacgtcgagtgcgtctacgagtacgtgctttacgagggcgacaccgtttcggggaactttgttgtcgtcgaccatgatattttctggaactccgatcaccccggcattgatttcacggtgacatctgctgcggggaatactgtccacaatatcaagggaacctctggtgacaagttcagttttaaagccccaacacatggaatgtataaattttgttttcataacccttactcaacacctgagactgtttctttctacattcatgttggtcacatcccctctgagcatgatcttgccaaagatgagcatttggacccaattaatgttaagattgctgagctcagagaggcactagaatctgttacagctgaacaaaagtacttgaaagctcgtgatgcgagacatcgccatacgaatgagagcacaaggaagcgtgttgtattctacactgtgggagagtaccttctcttggctgctgttagtgcactgcaagtcatatacatcaggcgcctcttcagcaagtcagtggcctacaatcgtgtttgagtccccttcatgattaacgttatggtttccttcattagcaacaggattaggtttattacatatgcgttctctattcaacagtacgattacaatcccttggtgaacactttttttcttttcaagagagactccacttgtatgttgatacccaacaagatatttaaattccttacaacttgaatttcaatggattcacagaaatcaaaccgtgtgggaatcaatgctaagtttgtaaaatggtagtcaaagttcttaaaatgttgaaaacctgaaagtaaaataagacgttttttgtaattttaagcccatactgcttatttttaacctgttcttttatggtttt

SEQ ID NO: 7831 - DNA, 120 bp, Glycine max
  Clone ID: PAT_MRT3847_107082C.1
cgagcgatttacaatacaattatcacgttttccattcacatttgtcagctagttagcacagtgccaagacttgagaatggccttgccagtggtcgtcgacccatagttcctcaaagaggt

SEQ ID NO: 7832 - DNA, 334 bp, Glycine max
  Clone ID: PAT_MRT3847_107083C.1
cccttttgtcctgcctataggcccgaatggaggctgcataagggggtgtgcgatccagagtgcacctctaagtgccctgttaagcacgctgttgttaaggctggtgtggggaaggacttggcgaaggactagactatgaccgatatgaaggccgtcgtggttgcgcttgatattcggttcgacaatccggttcacgaaccccattatcgagcccgggttaaccgctagtttaataggtggttttacaggtcggtttcctgaaaggaaatgaatacagaaaggagttcacaacaggattgtcaataggattatgaatagaatcattaaatgaagg

SEQ ID NO: 7833 - DNA, 479 bp, Glycine max
  Clone ID: PAT_MRT3847_107084C.1
catcgtctagctatctcgatcgaactgtccaaggtcctgtcacataaccgcccatgggagaggtaataacggggtgcgtaaatttcccgtacacccacctgtacagtagcaacaagatgaggacgcacgcgcaacacccagccaagtaaaccgacaccaaaacgatgcgcttatggtctggcaagttagccggcagggtactatggttaactggccaaagaagcggcacccggcgcgttatacaacgccataaccaaatcccaggctacaaagatattcgactattccccgcaacaacggagtaccccataccatgcgcacacgttagacgtacaatgatttggacgtgcggggggatgcgtataaaattcacattattacagtggatgtgcgcttgggccacccgatgaaccccggacccggaaacgtcgactacgcgcttatatgcatatagtacaagccaatttgaaatagggcct

SEQ ID NO: 7834 - DNA, 452 bp, Glycine max
  Clone ID: PAT_MRT3847_107085C.1
cttaaactgacgctaaaaagtatcttagagagatgtgtggaggcgctatcatctgtgacttcattcctgacgcggtggcggccggggctggccgcctgaccggccattacatgtggcctgatctgaagaagcgtaagaatgacttggacgttgacttggacgctgacttcagggattttaaagactattctgacatctactacgacaacgaccgccacgacaagccctttgctaaggcctcctcttcttgccgctctaccacagcgaaaactgcggcattacaagtgcgagctgaaaaacttgctgataggaagaggaagaatcagagtaagggaatccgtcaacgcccttgtggaaaatggtcaggtgagatgtcggatcctagaaaggaggctcgagagtggcttggaaccttcaacactagctaagaagctgctagagcttatgatgct

SEQ ID NO: 7835 - DNA, 378 bp, Glycine max
  Clone ID: PAT_MRT3847_107086C.1
ctcgagcttttctagccgcgctcttctggccgattgtgcagtctccgtcatcatggcatctccacagcagctccgcaccaccaccaccgatctgctcaagatcaaccaccccgtcctcctggccggcatgaacgtcgctgccggccccaagctggctgctgctgtcaccaacgccggcggtctcggtgtcattggcggcgtcggatacacgcccgacatgctgcgggagcagatcgccgagctcaagggctacctgaaggacaagaacgctcccttcggcgtcgatctgctgctgccgcaggtcggcggaagcgcccgcaagaccaactacgactacaccaagggcaagcttgacgagctcattaccatcatcatcgg

SEQ ID NO: 7836 - DNA, 256 bp, Glycine max
  unsure (1)..(256): unsure at all n locations
  Clone ID: PAT_MRT3847_107087C.1
cttgccttccacactctgtgcgactnncccaagacattgctacagtcgctactttattgtatacactcttggcacaccatgtctggaaccaaggtcttttcgctggagggcaagggcctcaagctcaccaccgctgaggacatcgagccgcacattcaggatctcaagagcaatgatcaggtagaggagatcaagttcctaggcaatacgctcggtattggagccatgaggctcttgccaaggttctggaaggaaa

SEQ ID NO: 7837 - DNA, 486 bp, Glycine max
  Clone ID: PAT_MRT3847_107088C.1
ccacgcgtccgaggacgcgtgggaaacacagttatataatgaagctcctcagctcagttgattaatggcttcaactttgaagtcacttggacatgagacagtgctattactaggttgtttacaacacacagaacagagggtgccctgaaactttcagcgcaggatgtgtgggatccagcagtgtgggtatcaggagatgctatcagtggacagctggcaagcgaactgcaacgacattgatgacataagtgtcggagcaacattcccaccatgttgtctaaattttaacggagggagccctactggccgattatacagtggaaaggttacttaaacacattttagaagaagaattaggctttaaaaacattctaccctgatatttggatccaaatatccagcttaatgaattacccaccgctgtgtgctttgcatacactagttgcggatacgatactattacatgccaaactgcaacaggtgtac

SEQ ID NO: 7838 - DNA, 2383 bp, Glycine max
  unsure (1)..(2383): unsure at all n locations
  Clone ID: PAT_MRT3847_107089C.1
acgaagacagatttctgcaattatacggcaacgtataaagtgctgtgttctgcggctctgttttctgttatgcacttccggcaccgctgtttcccatagtaaggttatttccacacactcagttgtatgacacgtgtctcttgatctgtcagatttcgtcgtcgtcgtcagtacgcctccctcggccagtaaataggaaaacaagggttcacaatgtccggcccaggggtacagttgcacatccaagatcaccatgtggtgatggataatggcatagtccaagttaccttatcaaatccagatggaattgtcactgggatacgatataatggtgttgacaatttgcttgaagttctcaacaaggagactaatagagggtactgggaccttgtttggagtgcgccaggaagcaaaggaatgtttgatgtgattaaaggaacgtgttttaaagttatagttcaaaatgaggaacaggtggagctttcatttgcaagaatgtgggatcattcactagagggaaagtttgtccccttaaatattgacaaaagattcataatgctccgtggttcatcaggcttctactcttatggaatttatgagcacctaaatggatggccagattttgatattagtgaaacaaggatcactttcaagctttggaaagacaagtttcaatacatggctatggcagacaataggcaaagggttatgccttttcctgaagatcggttagcaggaagatgccaaaccttgggctacccagaagctgtcctgctagtcaatcccaaggatccacgattgaaaggagaggtggatgacaagtatcagtattcatgtgtaaacatgaataatcgagtccatgggtggatatctttcagtccaccagtgggattctggcagatcacacctagtgatgagtttcgttctggtggacccctcatacagaatttgacctcgcatgtaggccctaccacgcttgcaatgtttcttagtagtcactatgcgggacaagatttggtgcctaaatttagaggtggtgaatcatggaagaagggttttggtcctgtatatatttatcttaattccggagcagttggtgataacccactttggctatggctcgttgcggctcgagagatgatgaatgaagttctttgctggccatattctttcccagcttcagaggattttttaaaatcggatcaacggggcaatgtcagtggcagattacttgtcttagacaggtatgtctgcacagacttaataccagcaaatagggcttatgttggcttagccccacctggagatgcagggtcatggcaaagagaatgcaaggactatcaattctggaccagagcagatgaaaatggattttttactattaaaaatgtacgtccaggcgactataacctttttgcttgggtacctggttttgttggggactacaaatttggtgattttatgaagataacatcaggttcttacattgaattgggtgaacttgtatatgagcctccaagggatggtcccacattgtgggaaataggtattcctgatagatccgctgcagaattttatgctcctgatcccagtccacaacatattaataagctttttatcaaccatccagacaggttcaggcagtatggattgtgggataggtattcagaattgtatcctgatgcagatttggtttacacaattggtgttagtgactatacgaaggattggttttatgcacaggctccgaggaaaaaagtggataacactcttcaaggaacaacttggcaaatcaagttcgaaatctgtagtgttgttaaaggaagtacatacaaactgagagttgcaattgcatctgcaacattagctgaattgcagattcgagtaaatgatcccaatgcaaggcgacccgtatttaccagtggattaataggaagggacaactcaattgcaagacatggaattcaagggatctattggctgtaccatgtgaatataccaggttctcttcttgttgatggcacaaataccatatatttttcgcaaccaagatgcaccagtcccttccaaggtatcatgtatgattatattcgtttggaaggcccaccttgtgaagaaatttaagttaacctttgggaataaatgatactaaatattagtgcactgttatcatatcagaatatatttatctgtgagcgttgtatacgttatatcttatattttttttctctgttttttcagtaattttgttgttgccatcgttgtgtgtgtatatgaacaaacatcaaatacttttacacataaattcatatttatatttggtgcttttgtccaaaaaaaaaaaaaaaaaaaaaaaaanaaaacggcccctctataggattcc

SEQ ID NO: 7839 - DNA, 397 bp, Glycine max
  unsure (1)..(397): unsure at all n locations
  Clone ID: PAT_MRT3847_10708C.1
angaataattaagaaagnnaaaagaagagngtnngagtnaaggtaagaatnatggnntgagttggttggagtggaaggaanggtggnggtggntanaattgagagggagaatnntttggtggangntaanantgtgttgaaaggaannatagtnannnntgatttnngatgtgatagggtttgggtttgggtnannaaagaaggaattgtttatnaggttnnaanaattggataagaagtgtttanantaaagnananttnatatgatgatntaagaagtnatgaatataatatttaaataaggagttattnttnnaantatgttacttgattgaaaataaaaanaagnttataagaannnnnnnnnnnnnnaaannaaaaaaaaaaaaaaaaaaaa

SEQ ID NO: 7840 - DNA, 400 bp, Glycine max
  Clone ID: PAT_MRT3847_107090C.1
aattcggctcgagagactagttccttctttaacactctgtgagaccttgcaagcagcgcctctggaggaagttgttgaagcacgaacagttcctactgccactactcacatcccaccatggatgctgcatccatttacaagataaattaatcggcatgacaccgttatgtttgtgacatgtgattaatgttaaaagcataagctatatatatctatatgtcaaaaacataatgttatagctaattgttaagtttgataattaactgctcgtccttgtaagtacaggatgtgccctccaaatttgatcgtttgccaaaaaaaacattcatagacgaaggctactacatggtgcaagagtgcaagtgatttgtataagaaacagttaaaatggctttattaa

SEQ ID NO: 7841 - DNA, 724 bp, Glycine max
  unsure (1)..(724): unsure at all n locations
  Clone ID: PAT_MRT3847_107091C.1
tgtgctgatggcctgaccctatcaaattgtggtctactgcacaggcctcttccctgctctctgtttgaacattctagaccactgccctacgtttgaatttctctggcttcattttgttgtggtatgtttgatattaggtcatttgattttgacagaaagtgccccaaagaaagttgtttaatttcaagtccttctgtatattctgttagtaccttaaacgaagatacgggctcagtgcagcagaaacccatagtgtagagagtctctgccaggaaaaataagaggcagggaaggaatgatgaggtggcagagagagaaaggggtgagcaaattgtgtgagggataactcagaattacaataatattcagattattatctttcaagttggagcatcctttcatgtgaccgataactcagaatatccagcaaacttctccttttgagggtccagacctgatcttcattggtaatggacaaggattccaataaaatccttctacaaggaggtggtattggatttgatggcttgtatcagtttcccaatcttcagttttgctctgctgtgtcttctccagcttgtataaacattgtttcttctgttggttgtaataatacccttctgttggttagaataataccgtgcctaactccatatatttggcaccttagactagatcactccaattgtcangcttttaagcttgttcttaatcattgaatttc

SEQ ID NO: 7842 - DNA, 454 bp, Glycine max
  Clone ID: PAT_MRT3847_107092C.1
gcttaggtttcacggcagatcctgacactgttttggagaaagcatgtaacgaaatgaaaaagagttctaaaaaactaaagatgggagaatttctcaagaaaatacatgcatattacatccacattgtcatcatttgttctcattcttgaaggattcatcagtttctttgccggataacctcatgcttatgcccgatgccatgccctgtctttgtcatatacacaaaattatctctactggataccatataaccaacagatcctgaaattttatctccagccatcaataatgcattgtaagaagctcatgatcagtctgaacgaagacatcaaatgtgaaatgaatccatctgattagactctagcatttgctttctctcaaattgaataagaccgatatgggtgtaggttaagcgagagtggattgtgtatcttctagcttaatcatgtagtct

SEQ ID NO: 7843 - DNA, 266 bp, Glycine max
  Clone ID: PAT_MRT3847_107093C.1
ttgtttcgatgcagaggatgatgaatgctcctgtttcaaatgataatattgatctactgttgagcatagatttgtagggtgtacaaggcgcaggataagcttaaacaaacaagattggttcttgatgagaagcaacgcgtaggttaacacacaagaatcagtttgatggaaatttcacaggggattccgggttaccagatatagcgaatggacatcaacctgtaaggcaattacctacagaaagctgtcgacgtaaatggcacatg

SEQ ID NO: 7844 - DNA, 541 bp, Glycine max
  Clone ID: PAT_MRT3847_107094C.1
tcgcgcacgcttgtgggcagtgtgagtaacagatagagtatgattcgtaactactgcacgctaccacaggaatgatcgctgaacaactgcgggaaacccggaaggaggccatgggggcatacaccggctgagctccttaaacacttacggaccgggctggcgcgtattctagcagataactactacgtgactgaaggtgctggtcacttctacaaacaccaccacagggaacactcacccacgcagggggaaatgcaggctactggcctctcagtacaggtcggacagatcactgcggccgagctcaaggcctacgacggcaccgatccagataagccctcgctcatgggcatgaaggcccagatctatgatgtctcccacagcagaatggtttatgcacctggcgaaccttatgccctatgagctggcaaggatgccagcaaagccatagccaagatgtctctagaagagaaagatctgactggggatatctctggtctgggcccattcgagatggatgcctcacaagactggcaatata

SEQ ID NO: 7845 - DNA, 639 bp, Glycine max
  Clone ID: PAT_MRT3847_107095C.1
ggctccccctttaaaaaaaaaaaaaaaaaaaaaaaaaaattataaaaaaaaaaaaaaaaaaaaaaaaaaaaaaaaaaaaaaaaaaaaaaaaaaaaaaaaaaaaaaaaaaacccaaaacccaaaaaccaaacccaaaaaaaaaaagggggccccggggccccacgttttggcccctttaagggggggaaatgggccccttgggggaaacaagggcaaagccggttccggggggaaaatggttttcttttcaaattccccccaaaaaaccggccggaagcaaaaaggggaaagcccgggggccccaaggggggggcaaaccccaaataaagggggggggcccacgggccgctttccaggggggaaacccgggggccccgggggattaaagaaacggcccacccccggggaaagggggtttggcaatggggcccttttccccttccctggtcaagggcccgggggccccgggccttgggcggggggggggggttacaggccaccaaaagggggaaaaccgggttccccacaaaacaggggaaaaccccggaaaaaaacgggggacaaaagggccccaaaaggcccgaaaccccaaaaaggcccgcttgctggcgtttttccaaaggcccccccccccggggg

SEQ ID NO: 7846 - DNA, 289 bp, Glycine max
  Clone ID: PAT_MRT3847_107096C.1
ggattttaaggttgacttagtaagcacgacctcgtggaatagactgcaaatctttcacatcgcactcatcaccactgctaccgtatataccttccaacacactccaacaacactcgtaataatcaactgttgaaccctaacctcaacgatcctgtcctttaccaacaatccaccgctccaaaatgggcaaatccgacttcaccacctccgactgcgcccatgttctcctcctctatttcaatttcccatcaaccgcatacatcaaaaccctcacaataacctcctacac

SEQ ID NO: 7847 - DNA, 581 bp, Glycine max
  unsure (1)..(581): unsure at all n locations
  Clone ID: PAT_MRT3847_107097C.1
ttattaatataacagaaaaaccaacaaatcttggcttaatgtttgatagattacaatccttttctcattcctttgcaacaagactttgaaaattagccatatgttttcagcctgcatgtttagagaagcattgaagaaccaacattagctctgatgacatctatgcaaaaaaatctcaatagtgacaaactgctagttaatttcacatctgtttgctttcttgtgatctacaagataaacttcaacattttgcctataatttccccaatggcaatactaaatcagaagtctgatatctgcaagccattggccacaaaataaatcaaatacaattcaatcacattatatttgcacatttcttatagtctactctacaccaatccgtcatcgtcactgccactgatagaaaatattgaacccttcatttgagatttgtcctgccgtagttttctatccttaaatctacggaaagaaagtgtaggatcatgcttagtgatagaaaccccaagactccgtgaagctgcaagaagacgattcccaattttcgattttctattttccccccctgattgaagatgnnt

SEQ ID NO: 7848 - DNA, 900 bp, Glycine max
  Clone ID: PAT_MRT3847_107098C.1
ccactagtaaccagagtttaaagaaccagataatttttcagtgaagaagaaaaatcccaatgattgtgactcgttctgctttgatgctccatctccaaaacccaccaattcgctaccacttcttctcccacttcagctatgctcccaccttccctactctattcaaacctcgccctttctctccaaccactccacgccaagcacaaaccagaacctttgtaagcgctgttgcatcatcatcatcagcagcacatggttccaatggcagagacactttctttgcagaagaaaacgtttcgtggagttcactcggtctctctgataccatttctcgagcgctctctaacattggcctcaataggccctctctcgttcaggcttcttctgtaccgtctgtgctgttaggcaaccgtgttattattgctgcggagactgggagtggtaaaacatacagttacctagttcctctaattgataagcttagagacgcccaggaacattctctacatgctgtgttggatcaaaaagtgacctcaccacagaacgttctgctggtgctttgtccaaatgtgcaactttgtgagcaggtagtgaggagggctaacagtctctgtagagatgatggcgagacaatagttagtgtggcagccatttgtggcaaacagggatggccaattcgggaacctgatgtcattgtgacgacacctgcgggtcttctgaattatgttgaccttgacagaacccgacgcatggaatttatgcgtggggttaaatatgtggggtttgatgaagctgatttacttccctgtgggagctttcagaataaagaaatccggctgataaacttgctccgctttgatgaaaaactattgtgtcggtcaaaaaaatcagtagcagagt

SEQ ID NO: 7849 - DNA, 331 bp, Glycine max
  Clone ID: PAT_MRT3847_107099C.1
taccaagtagctgatgatacattacttgtctattatgtcacacgccaggctacatttgagaatgctacaagatggttgaaagagttaagagatcacacagactccaacattgtggatcatgcttattggagataagtcgagatcttcgacaccttgactgctgtccacaacagaatatggaaaatttactgccgagaaggaatctctctacttcatggaaacttctgcattagacgcatccaatgttgaaaatgcatttacagaggtgatctatcagatataccgaatagtgagcatgagaactgttcaagacctcaagaatgccaaactt

SEQ ID NO: 7850 - DNA, 382 bp, Glycine max
  Clone ID: PAT_MRT3847_10709C.1
aaacatagcacattggatggtaagagagtaatattgttctcgtatggaagtggcttaacttccacaatgttctctttgcaattacgagaaggtcaacatccattcagcttgtcaaacattgctaaagtgatgtttctagcaaattgaagtcaaggcttgagtttccaccagagaaatttgttgaaaccatgaagccaggaagtcaactgtgcttagcaacatttagaaggttgtttttgtttgcaatagtttcttcttaagggaggacagatgaacaattatgaaatccgtagaagccaggtgttgttagttcaaatattttacgatgtagttactcttcaagtttaaatgattccatcaaaatttgtttctaggcaaaaaa

SEQ ID NO: 7851 - DNA, 1315 bp, Glycine max
  Clone ID: PAT_MRT3847_1070C.1
ttttcccacgcgtccgcccacgcgtccgcccacgcgtccgaattaggctcgaggctgggtggactgaaatcggtggagaacgcgcacgatgattcggtgtgggcggtcacctgggtacccgcaaccgccaaccgaccaccgctcctcctaaccggttccctcgacgagaccgtcaggctctggcgctccgacgacctcgttttggaccgcaccaacaccggccactgcctcggcgtcgcctccgtcgccgcccaccccctcggctctgtcgccgcctcctcctccctcgacagcttcgtccgcgtcttcgatgtcgattccaacgccaccatcgccaccctcgaggctcctccctctgaagtttggcaaatgcgcttcgatcccaagggtgccattctagcagttgctggcggaggtagtgcatctgtcaagctttgggacacttcctcatgggaacttgttgccactctgtcaattcctcgtccagaaggacagaagcccacagacaaaagtggcagcaagaaatttgtgctatcagttgcatggagtcctgatgggaaacgacttgcttgtggttcaatggatggcaccatttcagtttttgatgtgccccgcgccaaatttctgcatcaccttgaaggtcacttcatgcctgtgcgatctcttgtttattctccttatgatccaaggctgctgtttacagcttcggatgatggaaacgtccacatgtatgatgctgagggaaaagctttaattgggaccatgtcaggtcatgctagttgggtactgtgtgtggacgtgagcccagatggggcagccattgctacaggttcaagtgatagatctgtaaggctatgggatcttaacatgagggcatctgtgcagacaatgagcaatcattcagaccaggtatggggagtcgcatttagaccacctggagggagtgatgtgcgaggtggtcgacttgccagtgtatcagatgacaagagcatatcactgtatgattattcctgatttagatattgtgtgctgtatttgtactctttgtggaatgttatttactcttttgtctacaaattgattttgaattgaagaaaatgcatggttgtacatgctgtatccgtgttttgattctgtatcatttatgcatgattcgttccctttgtactcataaatgctttgtttgcaaattaatttttgaattggagaaaatgcatggttggacatgtctgtaccctttatttatgatttgttccccgtcttaaaaaaaaaaaaaaaaaaaaaaaaaaaaaaaaaaaaaaaaaaaaaaaaatat

SEQ ID NO: 7852 - DNA, 559 bp, Glycine max
  Clone ID: PAT_MRT3847_107100C.1
cgatggttctatgctgcatctcccaactgttgactgtgcctcataatgagcatgtctatggtggagggactatggcgtgaaatctcacatactatcgtataaaaactccatattgcccaacaggactaaagtggagagcggaccaaatcatgaaaccaatagcttgagagtctttctgtcttcatatgtaagagtcatactcttcacacacttattttatctatacttgtcaacaaaaaaatgatggtgtatgaagatatcttgaagagactgaagaatggctttataaggatggcgttgatgaagctgaacatgcttattctacaaaactggccgatctctgaaagctgggatatcctacttggattcggatacttgagatgatataacctagtgcatgctacacgaggtacatcatgctgcattttcgagcatcgtgcttatgcagattcccttccgccctggagtaagaactgatcatcaatgactgcactagacaggagcattgggttgttgagagcatccaacggcatgcttgatttcctacggatactgaccc

SEQ ID NO: 7853 - DNA, 348 bp, Glycine max
  Clone ID: PAT_MRT3847_107101C.1
aaaaaggaaataccccgcttaaattaaacaaaaaccgggggaaaattttgaaaaaacaagaatcctcaaaactccaattttgaaatgattacaaattttttgcaaaacactgtttcaatgatttaccaatcaacttcatagtcaaaagctttgcaagacaaatcctttttttttaaaaagggatcacgaaaattcctttttgctacaatttaaatctcaaaatcctgggagcagaggggggacttaattagttgctttggcttctacaggaaggggggcaatgttccccatcggcgaggatacctagggctcccttcctttccataaaaaaacttttttaaacccctg

SEQ ID NO: 7854 - DNA, 297 bp, Glycine max
  unsure (1)..(297): unsure at all n locations
  Clone ID: PAT_MRT3847_107102C.1
cggaaaccggagacccaananaccangaggacaaaaanaaaanaaaaaagcaagccaananaagaacaaaccganaggngccgcaaaacaagaaccctttttttttaaactccactctcactaccatcaaagtattatcccgcanaccgtacatacactattaaaaattaccntcttcttcaccttccagcgccaaacaaacacccttacccctcacataccaaaannaaaacccaggcatattcacattttacncacttnccaaacagaacacccgcttnaccatcctcttcctcc

SEQ ID NO: 7855 - DNA, 545 bp, Glycine max
  unsure (1)..(545): unsure at all n locations
  Clone ID: PAT_MRT3847_107103C.1
aacccgaactttttttttaaaacaagaaataacgatacatacaaatttaatttataggagtacatcataacctttacccactaaaactgaaaacagggttttcctaccaattatactggggggggaaagggcaattcctacgaattatactcggagctactgcaaaaatattgatcctataactatgaaaaaactaattttttaaactgcatttcgaattcaaatttaagcaatacaataaccattgaaggagaggttccctgaccagatgttttttaaagggcacccaatgctatgatcaaatttcaacatgggtgccatttgaagggggttcattcttcagcttctttttttgctttgatttcctttgcttctgtttcaaccgaaattgatcttttatgctcttctcccattcttttttatttctttggaaaagcagcatggcagcacgagcattttctattggacagggctctcctgtttggatgttaacaccaagatgtttggcagcaagatgccgcagngctcttctgctacttgacttt

SEQ ID NO: 7856 - DNA, 1668 bp, Glycine max
  Clone ID: PAT_MRT3847_107104C.1
gcctcacgtccagggacgcgtggtctgtaagcctcaacgccagttcatttccgtttccttattttcagcaccaaaaccaaagtactgcgcatattctccctctttgccatttctctctcactctgcactttcttcttgaaatttgatctcacttctcgcatctttcaacatttttctctctcaatctgctgtttcttcttcaacatagagatggttaagatggaagaagagaagaaagaaacaaaagtggtgctcacaaggccactaacaataggaagggaatctgattcagacgcgtcttataaagcccctaatcttttgcaacgaatactcagtttattcaacaatgtacgcccaggctctgatctcacacgcttccagttgccacctctgttcaacttaccaaagtcacaacttcagtgctatggtgaatcagtgtattgcacaggttcggacttgctaagcatgtgcaacaatggtcagagtccacttgataggttcatatctgtggtagcatggtgcatatctaccactcgccctgtgacttttggtgttgctccttataatcccattcttggtgagacacaccatgtttcaaggggaaatcttaatgtgttattggagcagatttcacatcaccctccagtaactgctctccatgcaacagatgagaaggaaaacattgaaatgttatggtgccagcgacctgatccaaagtttaatggcacatcagttgaagctaaagtgcatggaatacgccagttgaagctcctaaatcatggtgaaacatatgaaatgaattgtcctcgccttttacttagaattcttccagttcctggtgctgattgggctggtacagttaatatacggtgcctagagacaggtctagtagctgaattatcctacagatcaagttcttttctaggaattggggggaatcatagagtgatcaaagggaagatccttgactcttcatcattgaaagttctatatgaagttgatggtcattgggataggaccgtaaaagtgaaggacacaaataatgggaaagtaagagtgatatatgatgcaaaggaagttatgtcaggtctcgaaactcctatactcaaggacatagagggtgtgtggcaaacagaatcagctcatgtttggggtgaattaaaccaagccattgtgagcaaagactgggagaaagcaagagaagcaaagctaaaagttgaggaaagacaaagggagcttgtgagagaaagagaatcaaaaggagaaacatggatttctaagcattttgtagtttctaacaacaaagaagggtggcaatgttcacctattcataagagtgtacctgcggcccccatcacagccctataattgttgtcactgtcaagtagtgtaaagcattaaagtacattttagaagagaatgttcataaaaaaatttaatggttgaaattttgacaacaatgaagtatataacaaaatttaaaattagttacaattttaatcgatgatttaaaaaaagggcgcccgccgaggacaaaaatccaggtaaatgtcaaaagtatccttagatttgacatgcgtaaaaaaataacaagaatcagatatgtaaatttcttatctagacaatatatatatatatatatatatatatatatatatatatatatat

SEQ ID NO: 7857 - DNA, 406 bp, Glycine max
  Clone ID: PAT_MRT3847_107105C.1
ttcgacccacgcgtccgctcacagattcactttgtcctctctgcagaacccaacaagaggatgcatcccatcttttctttcactgcagcaaacttcaacccatatggtgggaaaccatgtcatggctgcaagttaagggtgcttttccattaagcccaaagcagcacttccttcatcacttgggtgttcaacctgctggtgtaagatataatagatggcattgttggtggctagctttaacctggtccatctggaaacttagaaatagtatagtctgctctaatgcgaattttgatgctaataagctgtttgaagaagccatattccttctatggtcttggcttaggggttttgagaaggatttcacagtgcatttcaatcactggtcaagtaatctaccacaaag

SEQ ID NO: 7858 - DNA, 446 bp, Glycine max
  Clone ID: PAT_MRT3847_107106C.1
taagatgaattcatgacatgatgatgatgatagaatatgaacaaatcatttcttgctcttcttaaccttcccaacacgtaaaaatgaacccaaaccaaacagatgtgcacttccctttgaaacacaaggggttggtacgttcaagacaggattaatcctaaggcctttgggataagaccctccataactcttacctgaaggagatttttgcatgggatacatatttaagggggaaaacgaatatgatgatgatttagctgctgatggatgcttgtttgaactcactctcttcggattggccactgaacctgttgagttgcttcttgacagaagaggtatagagcataccaagtgcttctttgtatcacaattgagacttttacttgtatcgatgccccaaaaggatttggaatgaggcttcttctcatgatcaggattcacatcta

SEQ ID NO: 7859 - DNA, 377 bp, Glycine max
  Clone ID: PAT_MRT3847_107107C.1
aaaaaacccacattcaagggaaacattcccaaataaaacatgcatgaaaggggcccggttttaagttgccaagggctaggggaggttaaaaatttttgaaaacttgggtttccaaaaaaaccccacactaagcccgggagaccccggaaattttacctcaggggggggaggggttccttccaaaaaaaaattcaaaaaaccttttcaaacaattatttgaaggacaaaattaccttggggttaaaaggataacccctggagccatcaagggggaaactatcaccgggccggttttaagcccggaggaaaaacaactgggagctttcggtggctcaactattttttgggaacaaaaaaaaaaattttgatgctgcggg

SEQ ID NO: 7860 - DNA, 443 bp, Glycine max
  Clone ID: PAT_MRT3847_107108C.1
gggccacaaggggggcccaacacagcatcatccaccaaaaaaggtcccgcataaaactaaaaaaaaagacgtcccggcaaaaagaaggggaaaaaaatgctgaatagagaaaatcatgaaaaaaaaaatcatgggcgggttatcacagcttccacctaaaaggggggaaaaaaaagaaatgggggagcccccttggaaatgtaaacggtggggggagggacctttttttccaaaactgggttaaaaagggaaaaagcaattggctcggctttttgaaggggaaggcccttgttgaattgttcttgaaaaaaactgtttgccccttcggaccctgaaccaaaagcttttgcattgcattgccaaaaggggcccgagggatcaggggagaaaaagctagggccattctcatcagggccagcaaggaggagagaaactccaaaggg

SEQ ID NO: 7861 - DNA, 108 bp, Glycine max
  unsure (1)..(108): unsure at all n locations
  Clone ID: PAT_MRT3847_107109C.1
tctctctctccattccgtgttttcagctccggtaacctncttccttacttccgccgccgttgctattcttccggccgtgaaccttccatcccttcaacgccccaacag

SEQ ID NO: 7862 - DNA, 216 bp, Glycine max
  unsure (1)..(216): unsure at all n locations
  Clone ID: PAT_MRT3847_10710C.1
cgtatctgttgtaaganagaaaagtattgaacttgcctatcttgtgttgggtgcacaagaaaagtgcgggtgcagnaatcaattgccaacgagggttaacgttcttgcatcttttcgactcacgttctantttgagtcactcagnagatctantctcntgttgtcgtcagtgtgcatgttgnaagtgtctgctgatgctgnctgatctgagcgtct

SEQ ID NO: 7863 - DNA, 179 bp, Glycine max
  Clone ID: PAT_MRT3847_107110C.1
ccggacccggggcttgaacccggaaaatctgaaccgataccgggaggtataaaagtttgcccaaaacggggggaaataaagagttggtgaaacaagggcaccacgtcgcacctcgagaaaaaataaaagcgggaaaaataaagcgcaaaatacggggggcaaaattaatgggcaaagca

SEQ ID NO: 7864 - DNA, 605 bp, Glycine max
  Clone ID: PAT_MRT3847_107111C.1
agtaatggagagagattactcactacttaatttggttactgattgatcataatgacattattaacgctggtaataatagtatgataatagcccacaaatgctatgacatcacaacattcccattccattgattagcaacatgaaatcgttattaatagaaattactaatgtattattaatggtaggaaatgcttcattatttccttatgatgtgtaaatgttggggttgttaacttgttttcatcctatcatttgctttgaaattttgtggccccgttgagtgcaacgagatcatcatagtattgggcgatccaccctttcataaccatgatctctctcttccattgttcgaccaaccattctggatcgctatgatttgcatttgcacccagaatgtccaggcaatgagatccatttactgtatggatggcaacaagactgtctgatatgtttttcagaaccccgtcgctactataagggtctcttagtccattagagaaaatgatgttgctaccaaacttttgaaggaccaattctatactatggcctccatagtaagtagtgacccaatgagggcgaggtgagacaccaaattgtttcttgca

SEQ ID NO: 7865 - DNA, 670 bp, Glycine max
  Clone ID: PAT_MRT3847_107112C.1
gaagagcaatggtttaaagggttcattcccctcctcactatgcaaaattaagacacttgaagtgatttccttgtcccacaatgagctgtctggggaattacctgatctgggttctctcactggtctacatgttctggatttaagagaaaaccatttagaatctgaactaccgttgtttcctaaatcagtggtcacagttttgcttagcaataactcattctcaggagatatacctaagcagtttggtgaattagatcagcttcaacatctagatctgtcttcaaatcacctcagtaagacaccgccatctaccttgttttcttcgcccaaaataagttatttgaatctggcaaacaatgtgctaagtggggccctccaagacaaacttagctgtgggggcaaacttgggtttgtggacatttctagtaacaagttaagtggtggacttccttcttgcttggccaatactactgatggtagagttgtcagatatgctggaaactgtttatctctgaattctcagaaccaaaatagtgggtcttattgtaaaaaatctagctctggatggaagaacttgaagaaatggaaagtagctgcagcaatggccatcatttgtggacttgttcttggggttttggcgtctggagtcttcttatggaaaaaatatcat

SEQ ID NO: 7866 - DNA, 120 bp, Glycine max
  Clone ID: PAT_MRT3847_107113C.1
tacagttgcgagaaaacgaccgaatatggccgcagatcagcatcaccactttgggctgcaccacatgatgcagatttaagtcaccctgccagcaacctcttcacgcgtctagagcgtata

SEQ ID NO: 7867 - DNA, 365 bp, Glycine max
  Clone ID: PAT_MRT3847_107114C.1
ccctgagaccaggagatgttctttctattattttcggacagaagtgcccttgaggttgggaaaaattactttgttgcatgaaccggcattgctcgtcaaccgtagttacttataatcacaattagggacgtatgaagggtcccaaatcacccaacacgtgttaaacgagagccacatcgtgccacgtgtgagtcagccatgcacggatgaaagtcaaagttactaagtactgtagtggttaaataaagaatagatggagttaattactaacattaatgaggtaattaattgagacataaagaaattataaataaaactaagaaaacgccaagaggaaaacagggtccagtatggagggcactgag

SEQ ID NO: 7868 - DNA, 119 bp, Glycine max
  Clone ID: PAT_MRT3847_107115C.1
ccctcgcatgcggacgtatataggctggaagcatgcgaattgttcagaggcgtgtgggtccagcacaagcagagggggcgtattctgctctgagctatattgaccatgaacagaatgag

SEQ ID NO: 7869 - DNA, 219 bp, Glycine max
  Clone ID: PAT_MRT3847_107116C.1
ctcgagccgctcagcaaattgttgcagaacagctcaaggctcagcttcctaccaagccactccctccctctcaggctggtctattctcttctcttcaatttgcattttttctttaaagattcttattattgttattcccagcaagcaaattgttgacttcttttgtgatagtgagggaagcaagaaatgtaaattcacgcggtggtcgaggaagtggcc

SEQ ID NO: 7870 - DNA, 285 bp, Glycine max
  Clone ID: PAT_MRT3847_107117C.1
accgacaattggattgtaatggaaaagatgaaatgagagaattaataagtgtccaaaataataattaatgaaaattgttaagaaagaagaagaatgtgtccccgaagtcaacgggtccggtgaccggaaggggaaggttcaaccgattccaaacggtgcctcaacctccgaaacaaggctttaagggttccaacaaccaaaaaccttaaaaattcctcaacgaaaccgttcaaaaggttcgcccgctggtccggccccaacctttcaacaaacttaaccttcttc

SEQ ID NO: 7871 - DNA, 537 bp, Glycine max
  unsure (1)..(537): unsure at all n locations
  Clone ID: PAT_MRT3847_107118C.1
gtctttgccaaaatcgcatcactcgtcgcccccaattcacattccctcccccaccccctttctctccaggatctctcctcgtaccaccgccacctcgaaccacccctccaaggcggaacaacctcgtcctcacgcaacaaatgcctcagactctcactctacctcgccaccttcctgttcctaacttacctactcttcctcctcctctactcctactgggcccacgcttcctccgccaagtactacgttgtcctcgactgcggcagcaccggcacccgcgtctacgtctaccgcgcctacgtgcgcttcaaccgccacaccactctgccaatcgccatcaccttcctgagaaacccctcccacaagaagcctcccaccggccgcgcctacgatcgaatcgaaaccgaacccggtatcgataaattagtaaacaacgtgtctggtttgaacaatgcactgaaacctttgctcaggtgggccaagaagcagataccagtgcgtgctcacaagtctacattnntgttcctttatgccact

SEQ ID NO: 7872 - DNA, 427 bp, Glycine max
  Clone ID: PAT_MRT3847_107119C.1
cgggcaccgtcccggaataaattcccggttcgacgcgctcattagtcggcgggcgccctttatttttttttgtgagacttatcaagcgttgtgtggttcctaaccaaacattttaagtcatacaaacaatcttcccctgcctgcgtcaacactcaactatgatgagatgaagactattacatacactgatggagaagcatgcatgcaaaaaatgatgccaaaacattgggatctcacaggataagagctctgctccactggtacagggagaaaaactacctttgacatcaaaaacaaaggaatcctgttgagactgaaatgccaaaaataagccaaagtgcgtgatgagaagctagccacctttcatgcacttgctcaaagccaatgcagtacggcaatcgatgtaaccccagagagataaaaccct

SEQ ID NO: 7873 - DNA, 416 bp, Glycine max
  Clone ID: PAT_MRT3847_10711C.1
ccccaaaccaaaaaaaaaaaaatggaaaacccttagggacaaaaaaaaaaaaacccccggaaaacgagtttttggggttccacacagggggggccctaaaaaaaccaaaaaaaagcccaaaacgggataagctacaaaaaaaaaaaaccccaaaaaggcttaaagaaggggggttttttggggggggattccatcaccaaaatcaggaaaaaaattttgggggttttattaacaaaaaaggggataggagggggttaaaaaaaccccggccagggaaggcaggtccccaaacctccaaaggttaaaagggttcccagaagaatccggagaggcattttcatggagaaaaaaccccaaggcagaataaccccaggcttaataaaaaaaagagggggtctaaaaaaacttcaggggga

SEQ ID NO: 7874 - DNA, 589 bp, Glycine max
  Clone ID: PAT_MRT3847_107120C.1
ggctcgagcggctcgagagatgatgagatgcatccgcagtgcttcttaacatatattatttgaattttgattatgttttcttgagtttaaatcttgtctatcaataattgaaatcatcttaagtattaattttcaaatgattattacaaaataaaaattcttattaacaatcaccatataattcttccattacgcactctaagtctctaattaaattctattaaagagttatacagtcacgaaacttgtgctgttttttttgacaaacaacttatttgttagttgctgcccaaaatcttcagtagcagtagtactgggtgaattctactttataaccctgaaaaaatgaaggagctaagtacatcatcatgatgttaaagttagttgatggtgttgtgtaattggagaaataacgaggcagtgtcccatttaatttcaggaaaaaattccagtagaggaagtgtttgagtcgctgaaatgttcaagagcacgtttaacatcagacgaaggagccagtcggcttcaagtttttggaccatacaaattggaagagaaaaaggagagccaacttttgagtttctgggtttat

SEQ ID NO: 7875 - DNA, 352 bp, Glycine max
  Clone ID: PAT_MRT3847_107121C.1
cccacgcgtccgcccacgcgtccgcttttgacttggtgccccagaacggtaaaaaaagattaaaataaactaaagtaagaacaaacaaaacacaaagccatcactgttgaaattcgacatgctcttatcacactcttctgctgcatccatgtcttctagtgcaaaggagcaccatggtgacatcaggttaaccattactgatttctcgtggcacatgttggcgacagagactacattacacgtatttacgaactgacacctcattgtaagttagtcccctaagcactcaatcctattaccctgtgatgaaaattgacatttaaggtttaactcattatgaaaattgacactt

SEQ ID NO: 7876 - DNA, 815 bp, Glycine max
  Clone ID: PAT_MRT3847_107122C.1
ggctcgaggtttcaaaccatatagacatcaccgtgaaagaaatcctaaggaaacagttggaagactaaggaggctgaaaaataagttaggactaatctttcaccaccaccaccaccatcaccattaccatcatcatgatgatgatgttcatggtcatagacatactatgtggaatcagttgcagaatgtcttccaccataaagtcaagcatggggtgacaacaaataaagtagacaagacaaggagaggggctgttgcaagagtgttgcctcagagaaaccatgtcgggcagtttcatagacttgcggaaggggtcctgagacacatccggcattcaaagaaaccaaatcctttcaagcttgatgggatgaaacagttaaggaatggacattctcagaagaagctgcgttggtggcaaaaccttcgaccgcaccgtaaagtgaggctgaaaaagaaaggccgagttaaaatggggtttatgagccaaaaatcactaaagaactattgagtttgggtgcacgttggaatttctcaccttgcatctaccttcttctggctcatggtattcaagctcctatcagatatgcagaagcaggtatatcctctgatttttcttcaattttggctctgtcgaatggacgcttgtgatgcttgaaattcaatagatatggacctggtgatgcaggattttgttagtgactgcatggtgattctgcattttgtacgcgccgcgtgctcctgggtttggccacttggggcgttcccccagattgctgcatctgcgtgtattttttagaactcagcactatagcaga

SEQ ID NO: 7877 - DNA, 508 bp, Glycine max
  unsure (1)..(508): unsure at all n locations
  Clone ID: PAT_MRT3847_107123C.1
caaaaaccatttattattattgtgaagtgaagatcaattaaatagttatgatgacatagtatgagctcatatcttatgcttgtatgcagtgtcattgcaataataggtaaaatgacagctgtatatctttaaggatttctacttggagtgcatttgggtaaacaaaataattatgcacttaagtggttatcacatgagggttacttgtgagctttactgtgaagcaactaaaataagttaataagaacttgttttgataagcttctgatttatagcttgttgaaagaaattaaaaagaacttataggaaggttatgagccagtttcataagctcaaataaaccttgtaggattttattttaccaaacctgccctaatgctacaaatgatttatggcatgtattaggtatgcactaaaaaaatattgtgcttggattcttcatataagtgctntatacttctaaattttcttttaagccttaatttctgttttttttttcctaagcatt

SEQ ID NO: 7878 - DNA, 487 bp, Glycine max
  Clone ID: PAT_MRT3847_107124C.1
gaaattgcaataacactatagcactgtggaatttaccatgtaaatttccaccccatcaaaattctatttgtatcactttgttggattgtaggttacaatgaaatcttggaccacaggagcagacatgtcctgatttttttccccttttttggaagggaggtgggggtgaacatgttgaaaaaatatatatacttacgtaaaaaaactatatacctacctatgtctatgtacaacagacataacattatttttccccgctctctgtatagcatgctatatatagggttgattgatgattcaaaggcccgttgatcattgacgtgcaagatcttaaagttgcaacattttccgactctgacttttcaatgcgatgctacatatctcacagttttcctgctaatcaggctagctcctataagcttcatccgtgcaagagcagatgcctcccttgaaatggtgaaattgttcagcatcccttacagaaatc

SEQ ID NO: 7879 - DNA, 165 bp, Glycine max
  unsure (1)..(165): unsure at all n locations
  Clone ID: PAT_MRT3847_107125C.1
gtcgcangtacgtgagctgcggganttcgnggtcgaagcgggntcggagctcaggagtncntgnattnagcgagcantggncttnncntngagggcnggataggaggcagccctgganaggcccgttgnngnnnncagtntagtcgtctgnccncgcacagatgg

SEQ ID NO: 7880 - DNA, 324 bp, Glycine max
  Clone ID: PAT_MRT3847_107126C.1
acgacggctgcgagaagacgacagaaggggattggggaacgtgcaaaggtagatgttgaaaacaaataggtttaaataaccggcgaggctattggcacctcgggtaaggaagacggaccaccagtggagcggtcttgaaagacatttgaatatatgactaagtattggcgtgctagaaatttgggcacccgggctgttgaaataaatatggatgcacctgtcatgggcaaaatggagggggaaactttcccactcgaaacttctatttaggagcttggagaggggaaaataccctttacaatttggcacctcttggctgatgga

SEQ ID NO: 7881 - DNA, 1868 bp, Glycine max
  Clone ID: PAT_MRT3847_107127C.1
gctacgtttccctccccaagtgcacacaaaaaaatgggtcttcaaatcaaggaaccgctccttttcactcttgtaacaatatcacttatttcaattacaaaactcttgcattcttatttttctatacctttctctccatccaatctttccattgctattgccaccctcatttttgttctaatctcatacaaattttcctcatcctctataaaacactcttccactactctgcccccaggtcctctatctgttccaatatttggtaactggctacaagttggcaatgaccttaaccaccgtcttctagcatcaatgtctcaaacctatggtcccgtgttcctactcaaactaggttccaaaaacttggtcgtggtctctgaccccgagcttgccacccaagtgctccacgcacaaggcgtagaatttggctctcgcccacggaacgttgtgtttgatatcttcacggggaatggccaagacatggttttcaccgtctacggcgaccactggcgcaaaatgcgaagaataatgacactgccattcttcaccaacaaggttgtccacaattacagcaacatgtgggaggaggagatggacttggtggtgcgtgacctcaacgtgaatgagagggtgaggagcgaagggatagttatcagaaggcggcttcagctgatgctgtacaatatcatgtataggatgatgtttgatgccaagtttgagtctcaagaagaccctttgttcattcaggccaccaggtttaactccgagagaagccgtttggcgcagagttttgaatacaattacggggattttatacccttgctccggccattcttgagagggtacctcaacaagtgcaaggacttgcagtctaggaggttggcatttttcaacacccactacgttgagaaaagaagacaaataatggctgccaatggggagaagcacaagatcagctgtgcaatggatcacatcatagatgctcagatgaagggagaaatcagcgaagagaatgtgatctacatagtagaaaacatcaacgttgcagcaattgagacaacactatggtccatagagtgggcagtagcagagttggtgaaccatccaaccgtccaaagcaagattcgtgatgagatatcaaaagtgctaaaaggggagccagttacagaatccaacctacacgagctaccatacttacaagccacggtgaaagagacactgagacttcacaccccaattcctcttctggtgccccacatgaacctggaagaagcaaagctaggagggcacactgttccaaaagagtcaaaggtggtggtgaatgcttggtggcttgccaacaacccttcatggtggaagaacccagaggagttcaggccagaaaggttcttggaagaggaatgtgcaacagatgcagttgcaggaggaaaagttgactttaggttcgtgccatttggtgtgggaaggaggagttgccctgggatcatacttgcattgccaatactggggcttgtgattgcaaagttggtgaaaagttttcagatgagtgctccagcggggacaaagattgatgtgagtgaaaaaggagggcaattcagcttgcacattgccaaccactccactgtgttgttccatccaattaagacactatgatctgttaggtcataacaaaacaagcacttagcttctgaaaaagtcttgagagttgagtcttccggtgttgctttcttagatgcatttgtttatctttctatttcaattatatacagtatactgcgtgtaatgtttctccataaggcagtttgaattctgtcgttatcacttatgattaattcaacagtataaaacatagtttttctgtttttgca

SEQ ID NO: 7882 - DNA, 435 bp, Glycine max
  Clone ID: PAT_MRT3847_107128C.1
gggtcaataagagttaagttttgtttgatattatttctgtaaaaatgtaaggaaaatgtttaaggaatattgaacatgaaaattcgtataagaaattcatccaacattccctagtcattataaagaaagaagaaaaaaaatccacaaattaaaaggtactatatatcaaaataatcattaagcaattaaaaactagataaagatatggacccaagttgaatgtgtgccattggataagatccatgagattcagaaactcaaatcttgtaaagcggggaccaagggagggaaaatacaggccttggaaagaggctaaggattaaagggttagttgtgtggtggaataatggaacaaacattttacatttcaacttgttagggagggaacacaacacaacacaaccatagataggacaatgccacatctttaaatat

SEQ ID NO: 7883 - DNA, 1396 bp, Glycine max
  unsure (1)..(1396): unsure at all n locations
  Clone ID: PAT_MRT3847_107129C.1
cttgttaatttttttttttttttagaatctccaagagtaaaaaatgcattgattaattaaaaaattacgggcaacatagcttgaaaaatcaaattaaacagttgaacacaataagaacgttaacacatgcatggtacaatagaccggtagcactccctgtgttgcaaaattgctgcattttaaaaatatgcaaaagtagatcgttacatcaagtaatttttactgtttcttctggttgtcaaaattaccacagcagctttctcgatcaaatttagtttgagccttttaactcattatctacaaatccagaaaagaagctagctactgcctccacatcataacttagccactgataacttgggccaaacctgtccctttgagatatagctcccttctccatacatgacaattattggtttgcttgttctataggcttagggttcttgagaattccaatgtcaattaaaggctgtagctcttttttaacaagttttagtacagtcggatctggtgattccaaaaatgcagaaataaccttacagctgtggccatgcacccataactcacttttcccttttaaagctttttcccataaggtggaagcaaagttggggcaatccaaaatcagttttctaatggtgcgacttgaatggaaattttcaaggacatgctcctcttgtgaatcttctgatttaggcattgctgcaagagaagctacagcattgtggagagaatttatcttatcatccaaaactgggtgcattatgccatcagaaccccctgttgcaacctcatataagacctctttgccaaaatttgactgaatcagttctcccacgctctcgatacatatatcaagaagactatctgcaagtccactcttgatcaatagctcctgccttctgacaaatgggtcttttttcccactctcagctaggtcagaatcatccgcagaagttttatctttattaacttcatccactgccacctctatgtcttccttggattccttgtcaccaagtgaaacctttgaagtttctgtcagagagcttgcttctgactgatccttgagagacagagaaggtatagataaattcagagaagcaagatcatcaggactgaaataacgtgaactattaggatgtagtaattggagtaagggacgccttccattcttatctagaacaagctcctttagaatagactgaagctcacgaatgataacctttgtaatcagttttgtgtcgtcaacaacagaaaggatgcaaaccagcaccatgcacccatattgatgataagctgttttgtctatgtgccccttcaatcctttgataatcttcttcctttccttggcatgcccgtacgcgtgggtcgtaggccggacttgcgnatccgg

SEQ ID NO: 7884 - DNA, 690 bp, Glycine max
  Clone ID: PAT_MRT3847_10712C.1
gctattgtggagaaacttgcggagaatgcaaagttccagaatcccccaaaattaaaaaagattcttcaagatccgaaggaaactgttgtggagtctgatttaagaaatagaatgcagccactgaaagatcagttggctaataccataagccacctttacagtgtctttgagactcatgttttcattgccatatgccgaggttattgggatcgtatgggacaggaaattttaagtttcttggagaacagaaaagagaatagatcgtggtacaaaggttcaagggttgctgtttctattctggatgatacatttgcttcacacatgcaacagcttctaggaaatgcattgcatgagaaagacctggagccacctagatccatcatggaagttcgttccatgctatgcaaggatgctcccaatcacaaagacaacacattttactattaggctaattctacatgtaaatatgaagagaggaatgcacggggtaaaaagagaatggatcaccaattttgttgtaggagcaagcaactcaactgctccctgaatgattgatgtgcttttcaatgggaatagtgattttttaatacacgatatatacacagtaaaattactcattgtaatacttggtagtagtaatatataaatgttagttttttgcattctattaatcaaaaaaaaaaagggcgg

SEQ ID NO: 7885 - DNA, 412 bp, Glycine max
  Clone ID: PAT_MRT3847_107130C.1
aaaaataggtcctttatttactactccacacacactctttcacttgatcacaatataagagtgtactactacttaccaatcactcaaagaaagcagggctaaatggatatatcaagttcacaatacaatagtgctggtgagtctggttggacacgttacttggatcattcctctctctctgagagttatttccagaggagaggtgggatagaagactatggaggaaagggggcaacactggaggaagaggaagaagatttgtccatgatctctgatgcttcatctggtcctccacattaccatgaagatgatgatcaaaactactgtgtaaattggtatccttctacttctcactacaccaaagaatcagaaaacaacaagaacaagaaggtcaaagaatatggtaacaatc

SEQ ID NO: 7886 - DNA, 648 bp, Glycine max
  Clone ID: PAT_MRT3847_107131C.1
tttagaatctccaagagtaaaaaatgcattgattaattaaaaataacggccaacatagcttgaaaaatcaaattaaacagctgaacacaataagaacgtaaacgcatacatgttacaatagaccggtaacactccctgtgttgcaaaattgctgcattttgaaaatatgcaaaagtagatcattacatcaagtaatgtcattgtttcttctggttgtcaaaattacgacagcagctttctcatcaaatttagtttgggccttttaactcaaaaatgaagcttcgctactgcctccatgtcataacttggctactgatatcggggagcaaacctgtccatttgagatatagtttccttctccatacacgacaattattggtttgcttgttctttaggctttgggtttttgagaattccattgtcaattaaaggctgtagctcttttttaacaagtttttgtacagtcgggtctggtgattccaaaaatgcagaaataaccttacagctgctgtcatgcacccataactcacttttcccttttaaagctttttcccataagggggaagcaaagttggggcaatccaaaatcagtgggaaattttttcgaactggctcgacttgaatgggacatgctcctcacatgctcct

SEQ ID NO: 7887 - DNA, 147 bp, Glycine max
  Clone ID: PAT_MRT3847_107132C.1
cgtcatagttcaaacagtatgtgcactattctcaatacatagactcatttaagctaagcctttgccttttgtcttgatggcatacaacatagcaagttctcttatactaatattttcgatctgattccttgtaacagcaacagccat

SEQ ID NO: 7888 - DNA, 256 bp, Glycine max
  Clone ID: PAT_MRT3847_107133C.1
cgcggtactatctcccgccttcttttttttttgttatcagcagatctaactgtgaggggagtcctccaaaaggctgctaataattgacggcagaaccttatgggaaacaaatgttaaggattgccggtttaatgtacattaccaactctcttatcgactaaaatgcagggaccaaatgtaaatcgacagatcttcaatgacgctgaacatgtcaaccaaccactccctttttttgaccaggtttattttcttttga

SEQ ID NO: 7889 - DNA, 341 bp, Glycine max
  Clone ID: PAT_MRT3847_107134C.1
attgaagattccacaacatgtgtgagggagatccaaaaagagagagtggaaaagatagcgcggttgatcatcagaggagaggtgcgcagcggcatcagctattatccaccgcgaccaaagcgtccaaggtggaggaagcgagctactcaaggcaaatggcgtctggaacggactccttggtctgaaggacatataggagtgcggctacgacagacaaaccgtgctaggtctggctcacacaaaagaagagagacacccacaagtgcgacaagatcgggaagcgtgcctgctactcgcccgaggtaactggtcatgtcaacaaggtaaaattaccaaactca

SEQ ID NO: 7890 - DNA, 260 bp, Glycine max
  Clone ID: PAT_MRT3847_107135C.1
ggcagtgctactgttgttgtcatggttgtggactgtgttgatttcgatggttcattccctagaactgcggtgaagtcgttgttccaggcgttggaaagaattcaggataactcgaagaggtccaagaagctgccaaaacttgttcttgtggccacaaaggttgatctccttccgtcgcaggtttctcctgcaaggttggatagatgggttagaaaccgtgcaagatccggaggagcgcctaagttcaacggggtttatat

SEQ ID NO: 7891 - DNA, 478 bp, Glycine max
  Clone ID: PAT_MRT3847_107136C.1
aattcactctgtgtaagcttgctttggacgaagacgaacacactatctgttgagacttgatgcataggagaatgacattattgctcagcagacaggtggaatccgtactgagacaccacagcagggcgtcctaggactatgcagagtgcctctgctgtcgataagctcatcttgaccacacttcctctactaagttcgttggcatcattaagtatttaacattcttatgctatacttgattactttatcattagtaagcagtaggtcattcgctgaacagatttgatgatcctctaacttttgatcctctcgagaacccgtgcgtaccgagggcaaaccttgagattgtgacatgcgttagaagcttatgtactggatggacttgcactctctactactgctgaatgacaacagcggactgatgacactcatgatgtcacatattgtcagaagcataggccgtgatcatatactgagg

SEQ ID NO: 7892 - DNA, 321 bp, Glycine max
  Clone ID: PAT_MRT3847_107137C.1
aaaaaaaccccggaaacccatttgtttttaaaaaactttcttcccgcaccattgggagggggttttttttttgtttaaccccgaaaattccttgggttggggggaaaatttttccttttccaataccttgaggttaaataaaccccccatttttggggttgccgggggaacctaagtgggttttcacttgggggaaaacaactttttgggttttttgttcctcccggaattctttgacacccccacttgagcaaccggttcccttcctagcctttccttttgaataaattttacaaaaaccagccctttttcaaggggttt

SEQ ID NO: 7893 - DNA, 403 bp, Glycine max
  Clone ID: PAT_MRT3847_107138C.1
tacaatatggccgattaaatacgtcgaacaatattgaatattataacataaaaaagaggggtagctttgctggaagagttgttgatattggaggtcacctctatcgtctattgatcgtcgttgaagagtgtgtcgatgatttatagtccaagacgctgatttcacgtttattaattccctccctcagcctattatttctccgaccccttcccatttttttctgctcttctcaaactcaataagaataactaaccttttctcattcattcacaaacaaatcttaatgtttcttttcgtactcaagttggttcagcctgttactcttcaacatcacagatccaatagcaccctcttccttggatccactcataagttacgcttcatttcccccattaaactcaat

SEQ ID NO: 7894 - DNA, 408 bp, Glycine max
  Clone ID: PAT_MRT3847_107139C.1
tagaagacgacagaagggattagagtaataaggaggtaatagtttcatgatttcaaattatcactaacataatatactaattatcaatatttatggattaaaaatatcacttccagttagtgttttaaattcaaagattggaaattaattgtgtgctaaatattttatttaggtttttgaatttatcataattaaagattaaatgtgcattttatgtttattattatttttttagttgttgttactactcttaatttcactactcaaattaatcatatcctaaaattacatgtacaaattttaatgtttggaaggagtctcttgagattgttctcaattgcatggaatggacgaatcagtccattttaactattaaaaaatctaataagacttaattttttatgacac

SEQ ID NO: 7895 - DNA, 423 bp, Glycine max
  Clone ID: PAT_MRT3847_10713C.1
gggaaaaaaaaaattgcaatgaattattggccgtaaggagaaggcaagaaaaacctttgccttttacttttagggggacattttgtcgccccggataacgaaccatttttgttcacagcgaatttaagggattgtttgagagtgctaaggcaaacactattattcttttccctacccttggagcaaagaaccaatatgcttttgattctgcccccaacccgggctttggcagctttaactggtgtaagtcccacccctttggggactgggatggcctcagggaacagttgtgggggatactaacagaaaaaaaaagcttggattgtgaggtttcccttcaaaaggtccacttttttgggggagctgaaactggaggttgggggacgcccatggttactatgtaagtttcactgggaacgggaa

SEQ ID NO: 7896 - DNA, 264 bp, Glycine max
  unsure (1)..(264): unsure at all n locations
  Clone ID: PAT_MRT3847_107140C.1
aacataaatgggggacatttttttttttttttttttaatccttttaaaaaaccccacaattaaaatcggtggaacaaaagctaatccccagaatttttttaaagaactcccgcaaaaaaccaaaattttttttattgggaagggcgcccaaaatgtctcaccaccaaaaataaagagggngctttatatcccagcgttggaacttttaaacaaacaattttttcaaatgtttttaaaaaacaatgggcgtttgcctaatagaag

SEQ ID NO: 7897 - DNA, 549 bp, Glycine max
  unsure (1)..(549): unsure at all n locations
  Clone ID: PAT_MRT3847_107141C.1
ggctcgagaaaaatgtcaaggaaaaatgtaaatcactaattggtaaaaaaaatgtttgggagtatgtcttggatgcctggagaaatctggtagatagtccttcggaacaacagtttgatgaatgccttaagaagtttgaaattgtttgttcaccttggccaatgtgtgttgcctatgctaacgaaacatggataattccccacaaggaaaaatttgttacaacctagacanataaggtgatgcacttaggaaacacaacaacaaacagggttgaatatgctcattgggctttaaaaagagtattacagaatagccttggagacttatgtagtgtttgggatgccatggacaacacgatctcgctacagcacactgaaattaaagcatcctttgaaacaagtacacatgttgttagacatgtttttaaagttaccttatacaagaggcttcatggaatggtntcaaggtatgctttaaattacattgctgctgagtctgagtgtgtacattatgctggcaagaatccttcttgttgtggttgtgtcatga

SEQ ID NO: 7898 - DNA, 239 bp, Glycine max
  unsure (1)..(239): unsure at all n locations
  Clone ID: PAT_MRT3847_107142C.1
ttttnanngtataancgtanntaagctcggnatnngncttnaancagtaanncaataganccntnannccantgnataccnnnntcnctctcgtccaaattccattaatagnttnncatagaacttcaatgnnttnncaatgtncnnantatnngnanattnnnntaattnnngagnntcnaacttnanananactcgttctantatcagaanattgannctcannaanannttngnnt

SEQ ID NO: 7899 - DNA, 240 bp, Glycine max
  unsure (1)..(240): unsure at all n locations
  Clone ID: PAT_MRT3847_107143C.1
caacanncggcaaagcaaagcanngtgagtnactctggagtttatgacacagaaggacgttatgtgccagcaaanattgagaacanatncagnaagnangctncgnacagcaccggacaagcncacacntggggagcgctgggacttgacaganggnaaccgaaangcttcnnacanatgnnggcnnccttggagcaaaatngaatgnggagcacgtgcagcggcaagggatgaggnagg

SEQ ID NO: 7900 - DNA, 341 bp, Glycine max
  Clone ID: PAT_MRT3847_107144C.1
gatgaattcggaaccactccattttcttttgtttttgatgaattccatatagctagcaactcgcgttgttttccttttgaggattaatctgatgctgtctgtaatacagcggccttgatctgcaaatcgtgctaagggagggctcgacccactgatgcatttcgcgctttgttatgagccctcggaggcaacagagatcaaagtgaatcaccatatcctctctaccacattcagggactcgcctcaatgccccatccaaggctcgcccacaaacatccgacttattgatctcctcactgataaccacagttgagcagctcccagtgctagaacaacgcctg

SEQ ID NO: 7901 - DNA, 351 bp, Glycine max
  Clone ID: PAT_MRT3847_107145C.1
ctggaaaaaaggggggggcttggttcccatcgagtggggataccgctcccttgtcattgttcttcccgccttccctgcccggaattttttaaaaggcgaaacttcccccccccccgcctgaaaaaaattaccgggtgccaaagaaaagctgggccccccccccttgctccccccggggtgaaaagccccgttttttcccccccttttttttttggcgcccccagaacccagagccctaactaatttttagcacttgggaattttggaaaaccccccttttttcaaccccccccataaaaaattcctgggggaagaacttggaaagaatactggccccgggactggttcccc

SEQ ID NO: 7902 - DNA, 255 bp, Glycine max
  Clone ID: PAT_MRT3847_107146C.1
gcatgatgatgaatcagaagcgattaacattgccaagaacatatgcacaccagaaattgaactagacgaaaagtcaactgttgatgagcaatgtgaacaacacgaaaccaaggacaacatcggcatattacaacaacaagcagaccaccaatcagtacaatcaagtgtgccaagtgtcattacaaattatgcaacagcagaaggacatgttaaatcaaaaagcagcacaaaattaactgatgatgtcaatgtcga

SEQ ID NO: 7903 - DNA, 304 bp, Glycine max
  Clone ID: PAT_MRT3847_107147C.1
cccccctcccaatatgatacaagtggggctttttttacatgcttccgatggttttcctgaaacagaagatcaagaataacccaaaacgattgtggccagagtgtgtcaatgaatggatcctcactacacagaggctccggctccagtgggaacaacatagccgcactcggctccagggactgctgaccccctaagagtacctgattgcatcgagaaaccatcagtctcaccagagggactgccaccacactgcaggatggtccagtctcaagcgattggtttatgcgctttcagggacgggctg

SEQ ID NO: 7904 - DNA, 393 bp, Glycine max
  Clone ID: PAT_MRT3847_107148C.1
acctaaaacctttcatttcattcaaaaaaaaaatccccggaaaaaaactgggggaccccccaaaagccggtttaacccccgaaccaaaaaaaggggccccaagccgtttatttgcccccccaaaccgggcccccggaaagggggtgggaaaaaccccaaaggctaacccaagcccttggcccaacccccccttttcaaaaaagccccccaagcccggaccgggggtattcaacaggcaaccctttcccccaaaaaaatggcaggcctcattaaacaatgggcccccaaggccccttttaaaaaccaaggggaggcccacccgaaccccccctaataccctcccgcattgaggaccccacacttggccccaaaggccctccaccacccactttt

SEQ ID NO: 7905 - DNA, 385 bp, Glycine max
  Clone ID: PAT_MRT3847_107149C.1
caatgaacccactggtgctgcccttgcctatggatagtactttacaagtgtttagaagaacattctagactttgatcctggtggagagacctctcatgtcagtaccttgacaattgacaatggagtcttctaagttcttgccacaaatgcagatactcatctagaagagtgatactttgatcagataatattgcaatactccattcaattcacctatacaaatcatgcaaacgatattaccaagaacccccaaccacttagcacattgaagatagaccctgtacatggcatctacgtgtctcatctaactcaccttatccgagaaggaatatgctcactttaagaaggctttgactcttctgacccactcacaccaaatcgcttt

SEQ ID NO: 7906 - DNA, 232 bp, Glycine max
  Clone ID: PAT_MRT3847_10714C.1
ccacgcgtccgctgtgattggaacttgattttggagagtgtgcaagagggagtgcctctaataccatggtcactctttgcagagcaaaagatgaatgcagtgatgttagtcgatggcctcaaagtaggatagaggctaaaactgcatctaaaatttaatgagaatgacatagtggaaaaggaggaaattgcaaaagtgataaagtatttaatggaaggggaagaaggtaaag

SEQ ID NO: 7907 - DNA, 501 bp, Glycine max
  Clone ID: PAT_MRT3847_107150C.1
ctcgttgtatctgtaaaataaaaaccccaactttcctcaaattttaactttctaatgcaaaaccaaagctaacccacttggcgtagtagtaactgccgcttccatactcctttcctcgaatcttcctctcttcatatttgtcattggcttggtcctcttcttcttcttctttctctctttcatcttccaccgcaaccagtttcagtgttttcagtttccaagattagggagtttgtggtgcatgaaggaagcattcagtgagatttaagaggctggttttttctgcattgtgtttgaattgaagggtacaagtatgagtactacaccacaagagaagtttgttaggtttcaggattggaattcagagaaaggttctgagagtaattatcctgcaattaaataacacactccgagagatttagaactacattaagttcagtttctgagaagtttcaaaatggattggaatctggttctgagaggatgaagagatttagaaca

SEQ ID NO: 7908 - DNA, 310 bp, Glycine max
  Clone ID: PAT_MRT3847_107151C.1
ggatcatgctagttaatatatgaaactgctttgaaagtatacagagcgaagcttttgggctggactaccctacatgtgttcaggtgcgtctgatatgctagagactatgctcatctgttatccatacaggcgacttacacattgtgacgcgttgagccaatcatacatggcacctgtccatgacaccaatgtgtaacctgtctgcaccagacctttgattaattactttcagcatccataattcactgattaagacattacggtactcatctcgagagaatatgaccagcccaatcctgtaccaccagtc

SEQ ID NO: 7909 - DNA, 148 bp, Glycine max
  Clone ID: PAT_MRT3847_107152C.1
catcctcaccttaatcacctaccctccatttcactaatctgtctcttaatcacttactcagttaaactaatcactcaatcaccttggctaagctcaaggaaagaaggacatacagacacacacactatactcgttttcttctcgtata

SEQ ID NO: 7910 - DNA, 201 bp, Glycine max
  Clone ID: PAT_MRT3847_107153C.1
cggtatgcactgaggccgttgttgtcaatggcggtacaagctcttccgccggcagcaatggcgacaccccgtaaataacagaccccctgtgtaatatgtttaaaaggaaccatgtttgtgaaattgtttctaaatcaagccctgtatagtaaatatgtcgagattaaagagtctttacttaagcccgttatacaatacaca

SEQ ID NO: 7911 - DNA, 427 bp, Glycine max
  Clone ID: PAT_MRT3847_107154C.1
gtagccattatcgttacccggcccctccctctcatcagtcaagacacactctctgctctgctaatcgcggcgtttaattgattctccatggcaactatgagaggctgtaatcaattagaaggatgaaccactggactactctacttcaatttttgaaggaagaaagggttctaataacagcagatttttgttccatcatcatattatctgaagttctggtggaaaatggctgctgaagaggataagaatcttgttgaaattttggaaaaccagaaatccaatagatgttgcgaaatacatgaattttgtcagtgccccccaagctggtgctatagctacattttcaggcacaacacgagacacctttgaaggaaaaacagtcatggagttgagatacgaagcttatgttccaatggcaatacgctgt

SEQ ID NO: 7912 - DNA, 2146 bp, Glycine max
  Clone ID: PAT_MRT3847_107155C.1
cagggatgcagcgacctgcaggcaatcaataagtaagtataacaggacaacagcgaaatcctattcactctcgtgcaaacccaccaggtgggagcagcagctacgtaacagccatgccgaaaacagtccttgggaagagaaagaaaccggatttagccggacaggtggacccgcttgttaggctgaaccccgaagttatagatcttcttttcgagcttgttggtgacttccttgattctgcaactacacatggttgtgttttggcaaaacatagaaaatcgtcaactttggagtccaatgatttattgctacaccttgagaaaattgggatttaaaaattcccggatactcaagtgaagagaagaagaatcagaacaaacctctattaaatgacctccacaagaggcgcctagatatggttcgcacattgatggaatctttgccctctgagtcgagtgttaacagttctaaagagatgagtatacagggcatttctaatcctccccctgtgggaacccaccatctagtaagacccttgagttcagagcagttgatttctcatgcagctggtttaatttactctcctcgccaaggcagaaaggtgggctagtccagtcgtctcaattctcttcaggtaattctgctggacaatcactgcaaggaatgcaagcaatgggtatgatggggtcgccaaatctcacctcgcaactacgagcaaatggagccatggcttatgcacagcagctgcgtatgagtcagggtcaaatcaggcagcaactatcccagcaaggttcacttaacactgcacaggttcaaggtttaccaaggtcatcatcccttgcttttatgagttctcagttgtctgggttgtctcagaatggacaacctgcaatgattaactctttaacacagcaacagtggcttaagcaaatgccagcaatgtctggccctgccgcaccattgcgtcttcaacaccagaggcagcagcagctgggttcttctacccaattgcaacaaaactccatgaccctgaaccaacagcaattgtcccagctgatgcagcaacagaaatcgatggggcagcctcagctgcttcagcagcaacaacaacagcagcagcagccgcagcctcaacagctgcaacaacagcttatacaacagcagccacaacaacaatctcatctacaagtttcggtccatcaacagcaacagcaacagcaacagtctccaaggatgccaggacctgcaggccaaaagtcacttagtctaacaggatcacagccagatgtgactgcatctggcgcaactacaccaggtggtagttctagccaaggaactgaagctacaaaccaagtccttgggaagagaaagatacaagatttagttgcacaggtggatccacaaggtaggctggaccccgaagttatagatcttcttttagagcttgctgatgacttcattgattctgcaactacacatggttgcattttggcgaaacatagaaaatcgtcaactttggagtccaaggatttattgctacacctagagaaattgggatttaacaattcccggatactcaagtgaagagaagaagaatcagagcaaacctcaattaaatgaccttcacaagaggcgcctagatatggttcgcacattgatggaatcctcatcctctgagtcgagtattaacagctctaaagagatgagtagacagggcatttctaatcctccccctgtaggaacccatcatctagtaagacccttgagtccagagcagttggtttctcatgcagctggttctcaaatgctacagcagatgacaaggttttaatgaacctctgattttggtcttcatgctgctaggtttgattgcctgtatgcagggtctgtgaagagatcgcttgctgaaactgattagcatacaagggaactgtaattacttagtatttagacatgaaaaatagttgttaaaaggatcccagttattgactacctcttgttatttgccccaacccctatatagtcatctcgtttcgctgtttgagcctaattaattaattaattaattatggatttttaatgtacattggtgcctgaatcgagtttatttgttgtctaaacttacactttcttggatacttgcttt

SEQ ID NO: 7913 - DNA, 617 bp, Glycine max
  unsure (1)..(617): unsure at all n locations
  Clone ID: PAT_MRT3847_107156C.1
gcagcgtagtagctggattcggctcgaccggaataggtctccttcagaatttctcaaacaaatggcagtgccaagagcgcacaagcttgttgagaaatctgaggttgctccagcaacaacgagaacaacctcgtctcttcccctctcattccttgacttgcctctagcaggtcctatttatgtgagacgccaattcttctatcactttgcacaccccacacaccatttctgtcaaaccacactccccactctcaaacactcactctctctcactctctctcacttttttcctctcgctggcaacctcctctgtccttcaccaccccacaaacccttcattcgcaacaccaatgatgacactgtcaccttaacagtcattgaatccgaagctgatttcaagctcctctcatccaaccaccccaagagtctcaaagaattagatcacttggttccagagttgagtttctcattctcaaccatgcatgatgacacgttcattntccctataatggcattgcaagccacngttntcccaanaccatgcctttgcatcgccatcacgtactgtcatgcgatttgatgtaaaagntgcagtcatttcatgaagtcttggtctt

SEQ ID NO: 7914 - DNA, 431 bp, Glycine max
  unsure (1)..(431): unsure at all n locations
  Clone ID: PAT_MRT3847_107157C.1
tcgnggctcgagctcangtgaatgtgnnttcccaggactctaaattgtgtnntttaaatcccccacaaaatccctctttgtggttannaataggttnggatgtggaaaaccctgactttctcctcaggagcaccttctccgaagtagttaacgagggaatgcctctcttctatacgggggagggagcctggtgccaaagaatggctattctcatgaatatgccaaattgctgttctttcaatgtggagatattttgttggagatctcgtctttgaagtttctaagatgacttctccctacattaaatgtacagtctctttcttcatagcatttgaaatttggcctgatgaaaccatcatttttgaggcttttccccacaagctgttgcagttggaagagattcaggaaaaagttgtggtggaaattttcac

SEQ ID NO: 7915 - DNA, 707 bp, Glycine max
  unsure (1)..(707): unsure at all n locations
  Clone ID: PAT_MRT3847_107158C.1
cccgcgtccgtcgtggaaaagaacaaccttatatgtggacgaagagctggatgcacttaacttcacgtactaaagctggaggaaggaaatacaaagttctagaaatgtcacttttcaggggagatggttacaggaaagggaagttgagttgacaatcaaagttatgcagaagaagggatctattgagtattacaaaaacaacccagcaatgtccatgtgtactttggaagaaaggtagcatcttggcgttcaaaaagtcgtgatctttgtttggaaagattttatccctctccgacttgggtaatgaaagcatgggaaacaactcaagatgaaatgatgattgctggtggtctgcatgttgtggtttttaacaaaatggttgtgttcacggtgttcaatcattttaaaattgacacttttgaagcttcatgtcttatactgtggcaggttatggtgaaatggttatactataagttntaatttgaaatccacaagatgtcaacctactaagtgaagttaccttaatcctatatnaagttgaagtgaatagatggtatggtattaggcttaattattttgatatttcctttgnntttgaagtctactttctggatgaacctggtcctaggaatcatatgccaagagtacatgtttttgataacatgacaccaacattatgcactacaaaaactcttaaaatcaatatt

SEQ ID NO: 7916 - DNA, 370 bp, Glycine max
  unsure (1)..(370): unsure at all n locations
  Clone ID: PAT_MRT3847_107159C.1
cgngacgtggngggaaaaaaaaaaaaaaaaaaaaacaaaaaaaaaaaaaaaaaaaaaaaaaaaaaaaaaaaaaaaaaaaaaaaaaggaaaaaaaaaaaaaaaaaaaaaaaaataaaaaagaaaaaagaaaagaaaaaaatatttttttggtgaaacctaagttaaattttttgaaacgtagttttataacttaagtgatggggggggcctttttttttttttatttaaattgtcttgctttagatagggggtttgttggttattttttttgcaaccataccttttccgatcgcccttgcttacagattcgcaaatggaatgaaaactgggacggcccctgttttttcgctttaatggcggctgcttttta

SEQ ID NO: 7917 - DNA, 452 bp, Glycine max
  Clone ID: PAT_MRT3847_10715C.1
ctttcttttccgcccacgcgtccgcaagaggaaggaggacagagtgagcaacttacccgatgaagtgcttcatcgcatactttccactttggacgcaaaatcagcggttcaaacgtgcgttttgagcaagcgatggaggcacgtttggacttccctaccagtcctcaacttactcgactcttgcttcgacgattttctccatttccagtgtttcgtggaccattttctgtctcgcagagatgcttacagcaacatctccgtactcaactttgcgtgcacagatcatgaacttgatgatgggcacacgcacatcgtagattccatcattgaccatgttaccctcacaccacccatgaccattcagggtctctacatcgtcgctgaatgcatcgtagggaagcttcctcaactctctatttgtcaatctcttactaccctcaagcttgtcacat

SEQ ID NO: 7918 - DNA, 568 bp, Glycine max
  unsure (1)..(568): unsure at all n locations
  Clone ID: PAT_MRT3847_107160C.1
tgccaggtctgtcactatggtaaaccccgtaacacagtaggtaaagaagctaagccgcccttactgacgggttccgcgaaggcacctgctagggcagctaccagagggctggacgcggacacggccgcaggtgaagatgatgggcagcccctgaagtggtaacttgccatcagatcggttgagggtattgcagaagcagcggctgttcacgcggttaagcagttaaacaaagcaacgggctggttttgtaacactgctgtaccggtaaatgttgtgtttaaaccaaaccaagcaatacttgcgcaagcggtagacacggcaaatgtggctaagcaagcctgtattagtgcgattgtaacgattgccaccactgcgtacggtgacgaatggacggcttgtgattacaaatactcgcttggtgcgcatcccttacattatgtagtaatgattgacaccgaagcgccgcttgcggtgcgtttaattgaagaaggggataaagccncgcttacgggtgaagtaattagtagtacttagcatttagcgggtgtgagccacgccacgccggctg

SEQ ID NO: 7919 - DNA, 195 bp, Glycine max
  Clone ID: PAT_MRT3847_107161C.1
aacaataccctttctgggaatgtacctcctgctcttaagagactagatgatggatttctgtatgaatacaatctggggttatgtggagttgggttttcatccctgaaagcttgcaatgcttcggatcatgttaatcctagcagacctgaaccttatggagcagccacaagagatatcccagaaactgctaatgtg

SEQ ID NO: 7920 - DNA, 476 bp, Glycine max
  Clone ID: PAT_MRT3847_107162C.1
ctgtggaagatcataaagctaaggatttgaagagtagagggttgtgcttggtcccggtgtcttgtacccagaatatgcatgttggaagctattactgggcgcccgcatacggcagaggattttaacatgtagccaattaatagcaacgatatatctttttcagaggaagactatttgatataatatatataacatcgtgagcagtcaatctgtgccaatgaattaaaaggttgattgctcacgatgctatgcctcatattcaattctaatttacccttagtttgttaaattagttatgcactctctctgatctacttagaataacttattttttaagctttgtcaaaacattattaattgtttggttcttctaaatatgcgttgggggggagctggaattctttcttattttgttcacatgattagtgatagttgctgataactattttaaattcagtttttaaaattgtaatacc

SEQ ID NO: 7921 - DNA, 389 bp, Glycine max
  Clone ID: PAT_MRT3847_107163C.1
catgactatatataggctaattctctctaacagaatgcatgaaattctatccaaatccataaggaatctaatagaaatctaataacgatattctgttatgcaggatctgtgctagcaagatttgaggctggtattcaaaagctttcttccaattctaccctcctgctacacgtaatcagccagcaacagtcctcatacccgctgccgtagcaaaaacatgaaaaggggatgttcccaaatcagttccactactactactcctcatcgccctgtcttctgcctggacaggggatgattccaaatctgcttcagtagcactactactccttatggcactgtccactaacgaagcaaagctacggacacgagattctccaaaaatggaccca

SEQ ID NO: 7922 - DNA, 581 bp, Glycine max
  Clone ID: PAT_MRT3847_107164C.1
ttttccattttctttttcagccaagctcacctttttcaccaaggaagtccttgcatcatgatgataagaagcaccatgatgatgaagataattggtctgttgcttcctcgtatcctcaaaacttaaacattttgattgtttattctgaccagatcaatttttaggtatattggaaaaaaacttgaaatcttccatactgaatactactaaatatcaaaaagttcctttatgaaatttaataaaaagaactatttggaactctctaaatagacccacattttacctatattagatgtaatatggtgcttattttcatttgttctttaaccataattagtagcgttgcatctgcacgcactgccaaatctaaggtaactgtaggttcagcccctacttttagatgctcggatcgtgcagagaaacggagggaggtaatgttttactaaatatttaattctgctgtatattctggagttgtttgttcctggttagcaactttggtgttatcagttgaatctattttgtgttttttgttcttattgccactttgatttttctatccatttttatctgaagttaga

SEQ ID NO: 7923 - DNA, 763 bp, Glycine max
  Clone ID: PAT_MRT3847_107165C.1
agcaaatagtgccgcctccgccaaatctaataaaattgatactgaaatcgttgagagcattgatgtcacagatgatgcaaggagttttagctgggcagtggacagcgccataaggagtgagactgggtccatttttggagaatctcgtgtccgtagctttgcttcgttagtggacagtgccataaggagtagtagtgctactgaagcagatttggaatcatcccctgtccaggcaccagtcagggcgatgggcagggctatgaggagtagtagtagaactgatttgggaacatccccttttcatgtttttgctacggcagcgggtatgaggactgttgctgccacccagagttaccgagaattatttaacctgttagagcttatactgataatacttttattgattaatgagtttgttaaacaagcttatggattgttgttacgcatgaattaagaatgccatacacacaggaaacaccagcatccatggtgcagaggaaggaagagaccaagagaaagatagtgaaacctgcttacctggctgattacgtgtagcaggagggtagaattggaagaaagcttttgaataccagcctcaaatcttgctagcacagatcctgcataacagaatatcgttattagatttctattagattccttatggatttggatagaatttcatgcattctgttagagagaattagcctatatatagtcatgtaaataatcaaagcaggatatgagaaataatacttttcctttt

SEQ ID NO: 7924 - DNA, 1373 bp, Glycine max
  Clone ID: PAT_MRT3847_107166C.1
atggatactgaaatggttgagagcattgatgtcacagatgatgcaaggagttttagctgggcagtggacagcgccataaggagtgatactgggtccatttttggagaatctcgtgtccgtagctttgcttcgttagtggacagtgccataaggagtagtagtgctactgaagcagatttggaatcatcccttgtccaggcagaagacagggcgatgaggactgttgcagcacgattaacaaaagccgtgtcaaatgcaaaaagacattttgctaaaggattatttacccgggctgagcttataccagtcacccaggctgagcttgaaccagccaccaacaatttcccaggattattatttaccctggatgagcttaaagcagccaccaataatttctcatttgacaacaagattggtactggaggctttggtattgttgagtacagaggcaaactcattgatggtcgtgaggttgcaatcaagaggggtaaaacctggtcaaactcatttggtaagtctgagtttgccttgttctcccgtttacaccacaagaatttggttgggctggttggattttgtgaacaaaaagatgaaaggctcttggtgtatgagtacatgaagaatggggcgttgtatcatcatttgcatgacaagaagggtagcagtgtgttgaattcatggaaaatgaggatcaaaattgcggtcgatgtttctgagggaatacaatatcttcataactatgcatctattattcacagaaatatcaagtcttccaatattcttttcgatgctacttggacagcaagagtatctggttttgattttgcagtgggaacctttggatatgttgatcctgaatactttcacctaaatgtggtgacggaaaaaagtgatgtgtatgggcttggagttgtattgcttgaaattctaacaggaaggagagctgtactcaagtatggggcgaaagattatgtatgcaccccaataaaaagtgtggtggattttgcagtgcctgttattttggccggagaattagagaaaattttggatccaagggttggaccacccgatgagaatgaggccgaggcaatggaattagtggcctatacagctattcattgtgtgaatttgaaagggaaagatagaccaaccatggctgacattgtggtcaatttggagagggctttggctatttgtgagagtagccatatatgataggcattttcatcgatactatctctgttgaaatcaaatctaaagctcttttatttctttcttgttttactttcaacatgatattgccatcatatctaccatttctagcggtaccgtgtgacaccttgtacaatttttatctaaattcttgttcaatt

SEQ ID NO: 7925 - DNA, 1646 bp, Glycine max
  Clone ID: PAT_MRT3847_107167C.1
tcgggatatgacatatgtgctcagtgcctccgccaaatcaaataaaatggatactgaaatcgttgagagcattgatgtcacagatgatgcaaggagttttagctgggcagtggacagcgccataaggagtgagactgggtccatttttggagaatctcgtgtccgtagctttgcttcgttagtggacagtgccataaggagtagtagtgctactgaagcagatttggaatcatcccctgtccaggcagaagacagggcgatgaggagtagtagtagtggaactgatttgggaacatccccttttcatgtttttgctacggcagcgggtatgaggactgttgctgccacccagagttaccgagaattatttaacctgttagagcttatactgataatacttttattgattaatgagtttttctaacaccgcaacttactgtacgtaagacagcattgtagacaatggacaagcttcgttgataagaagaggaagcagtggctcaagtggtgggggtgcttctaataatagcaattcttcgatatcatctatgattatgcgtcagacttcaataataatgaggcggcagaggactgaggagttcactctagctgagcttgtggctgccaccaacaatttctcacttgaaaacaagattggttctggaagctttggtgttgtgtacaaaggcaagctcgcggagggtcgtgaggtggcaatcaagaggggtgaaaccgggtccaagatgaagaagtttcaagagaaagagagtgcatttgagtctgaattggccttcttgtcacgcctgcaccataagcaccttgttgggctagttgggttctgtgaagagaaagatgagaggctcttggtgtatgagtacatgaagaatggggcattgtatgatcatttgcatgcaaagaacaatgtggagaaggaaagcagtgtattgaataattggaaaatgaggatcaaaattgctttggatgcttcccggggaatagaatatcttcacaattatgcagttccgtctattattcacagagatataaagtcttccaacattcttcttgatgctacttggacggcaagagtatctgattttggattgtctttgatgagtccagaacctgaccgtgatcaccgaccaatgaaggcagcgggaacagttggatatattgatcccgagtactatggtctaaatgtgttgacagcaaagagtgatgtgtatgggcttggagttgtattgcttgaacttttaacgggaaagagagctatattcaagtatggagaagatggaggcaccccattgagtgtggtggactttgcagtgcctgctattttggccggagaattagtgaaaattttggatccaagggttggaccacccgatgtgaatgaggccgaggcagtggaattagtggcctatacagccattcattgtgtcaatttggaagggaaagatagaccaaccatggctgacattgtggccaatttggagagggctttggctatttgtgagagtagccatgacagcacttcccctccagtaccaatcttgttgtcaaatgagaaattattggtggctgctttaagctcatccagggtaaataataatcctgggaaattgttggtggctggttcaagctca

SEQ ID NO: 7926 - DNA, 745 bp, Glycine max
  Clone ID: PAT_MRT3847_107168C.1
attcggctcgagctagtcaccaaccaaacctctgcattattctcttctctcactctctctaagctctcttttagtcttactcacaaacacttttttcactgcttccattacgaacatatatttattatatggctcctgaacttgtccccaccgttgtgaaatccagtgctgcgttcacgaaacccgcgacccttccaaggcgtgcctacgtgacattcctcgccggaaacggtgactacgtgaaaggggtggttggcctcgccaaagggttgcgaaaggtgaaaaccgcgtacccgttggtggtggctgtcctccccgatgtgccggaggagcaccgtaagatcctggagtctcagggctgcatcgttcgcgagatcgaacccgtttacccacccgaaaaccaaacccagtttgccatggcttattacgtcatcaactactccaagctccgtatatgggagtttgtggagtacagcaagatgatatacttggacggagacattgaggtatatgagaacatagaccacctatttgacctacctgatggtaacttttacgctgtgatggattgtttctgcgagaagacatggagtcacacccctcagtacaaggtgggttactgccagcaatgcccggagaaggtgcggtggcccaccgaattgggtcagcccccttctctttacttcacgcttggcatgttcgtgttcgaacccaacatcgccacctatcatgacctatttgaaac

SEQ ID NO: 7927 - DNA, 478 bp, Glycine max
  unsure (1)..(478): unsure at all n locations
  Clone ID: PAT_MRT3847_107169C.1
ctgcattactctctcactctcttttaggctcactcaccaacacttttttcactactttcattacgaacgtatattatatggctcctgaacttgtccccaccgttgcgttcacgaaacccgcaacccttccaaggcgtgcctacgtgacattcctcgccggaaacggtgactacgtgaaaggggtcgttggtcttgccaaagggttgcgaaaggtgaaaaccgcgtacccattggtggtggcggtcctcccagatgtgccggaggaccaccgtaagatcctggagtctcagggctgcatcgtccgcgagatcgaacccgtttacccgcccgaaaaccaaacccagttcgccatggcttattacgtcattaactactccaagctcgtatatgggagnttgtgggatacaccaagatgatatacttggacggagacattcagggttatgagaacatagaccaccctatttgacctacctgg

SEQ ID NO: 7928 - DNA, 1325 bp, Glycine max
  Clone ID: PAT_MRT3847_10716C.1
gtcctcaatttctaattctctctctcttttttttttttgctaaatgcttgttccttttcttatgatgcttgtatttggatttcaccgtctgtatgcttagattactcaccttgtttgttatggttgagccaacaagtaaaatgttttgcaatttcttatgttcttttactaaaaaaaaaaaaacaaaaaaaactaatattagttaattgctccagaaatgtgggaaatcataaataggaacttggcaccttggtcaaagttgggaattgagtttgttgttacagaatagagaattatttcgtcaattcaggcatgcgagggaaactgagggttgatagttaaagacttatcttgccgtttctcattctgtcagaggtctgatcgatggcgctttgtagaactgggccgaacccaattccggggagttattcagctcaaaatttgtcgacaaaacttattgtacctgctcccctgcgttttaccagacaattctctaatttagtcaggagaaagcgcaagggagtggggggctcttcattaaggaatgctgcatctgcatcttctaaggagtcactggaagatgctccaactaccttgtcagtttgcttggaggaggaaacagatcatgttatacagttcaaaatgtcagactttaagattttagatactgttagtgttggccttggcgggaggccggatgaggtaatttttgaaggcatggtaaaggatagtggtagctctttgtgtaacacaagagttgtacttcgacagctttccagtgcacaagctcagcgtcgtgggaaacgagcaatagaggtattaaagaagctggttcggcgtaaactgctaccattcttactcaatgcaagttcatggttatatctctttgcctgcaagtgatgctagtggttcatttatcctagtacatgggtatcacggtagtttttctttgagacactggcttcaacagtcggattggcttccaactttggaggctactcttgcactggatgaagagtctgttaggaaggtaggagaagatttcactggaggtcctgcagtttctaggcagttgcgacttgttcgaatattgatgagggatcttcttattggggtaaattacttgcacagccatggtcttgcccatacagagttgagactggaaaatgttcatataagtccaatagacagacatattaaagtaggtatattgggtaatgctgctgacttttacagggatggttcgaatggtagctctttggacaacttggacaggagacagatgatgattgcatttgacatgaggtacatgggctttcataatg

SEQ ID NO: 7929 - DNA, 452 bp, Glycine max
  Clone ID: PAT_MRT3847_107170C.1
attcccgtggtcgactccacgcccgtccggaatgcaacgaaagggaatactatccgatggcgaactaatatacgatcgagacgtccgaaaacgagttaggcgcgaacaagctttacgttttgatgcgcgagagactcttcgaagtcgcatgcccgaaggacacgatttgtcgttcaagtattatatggcactcgtacttctctaatatgtgcatacttacaagaaaacatgtgatatgtgggtggagaacatttaacgtcgactcttgtattgatgaatgggttaacgaagggcgaatgcactcggcacttgcgccgagacttcttatagaattacaacgaagctggtgtgctcttggctttaacgtttgcgttctgttactggcctgtttgtcccagtgttcttcctgacaaggaatatgaatcttgaaaggttctacgatctgcgagcgt

SEQ ID NO: 7930 - DNA, 795 bp, Glycine max
  Clone ID: PAT_MRT3847_107171C.1
caaagaagaaagaaaaataaggggatcttttgagattctggcggggatttttaaaagggacaaggcaattatagaagatgtcaagaagaaaggggtaagggtgggtgatctggcaagggctctaaaacaaaatgtccatgaggcaggaattctaatctatttaataaatgcttcacctatcgatataaaaacattgggacttcttccaatattagggggggttgggtgcacttcaaatagttacaaagataagcaagaggcacttcttttgacaccacgtgcagcatcattgatgatcatcgaagaactagtaacttcatttgactatgccacaaataacatgcatttggccaccatcaggtctccacatgttctcagcggatttcttgaagttgccaggaatgataatctagaagaatttttctctttaaccaccattcttataaaatgcatgcagtatgatgcacaatgcagaaagtatgtgtcacaattcactccacttgctccctttatccaccttctgcaatcagaaaacacccgcgccaaatgcacagctcttgaattttttcatgaaatcctttgcataccacggtatataactatgcagacaaatatttaatttgaattttatttgaatataactgagtagaatttgtagcaaatatgtatttaacaagtaaatccgatgctttgtttatatattagttgtaatcctcgtccaaagagagttttctgtaaccgtgattcatttctttcagatcatcagctattagtctgctgcagcgtatacagcaa

SEQ ID NO: 7931 - DNA, 342 bp, Glycine max
  unsure (1)..(342): unsure at all n locations
  Clone ID: PAT_MRT3847_107172C.1
gggaggctcttagcagccgctgctnnntttttttttttttttttttttttgggaaaagcaaaaccttcatagttttttttgggcgggcattaaccaataaacaaatgtacatctcattcttaaaaaaaaaaacaaggatgcctaaaatattacattttccaccattttcaacatctattattttttcccacacacttcctattaaacaatttatatccgcaaatcctcaactttttttcaccacaaaaatttaatcatcaacattttcatagtgtacccttttttttaacattagaatcctcattttacccttttatttcaaacctttacttttaatttttc

SEQ ID NO: 7932 - DNA, 275 bp, Glycine max
  Clone ID: PAT_MRT3847_107173C.1
cgtgcatacattggttctatacactctggtacgtatataccgtaaaattgattttcgacggaatgaaaaagacatatatggtggaatcgtaaccatagaatatgaccctaatcgaaaagcctacatcttgcctcatacactatggggatggagagaaaatatttatcttacattccagaggggctataaatggagataccattgttcttgggacagaagttactatacaaatgggaaaagccctacctttgacagcggtttaaacctattgattt

SEQ ID NO: 7933 - DNA, 243 bp, Glycine max
  Clone ID: PAT_MRT3847_107174C.1
cgactagttctagatcgcgagccgccgccctttttttttttccttctcgacaaatataaatatatatcataagccgttttgttttaccgcacctttttatttaacacgaccattgtgattttggggtttgggccactgtaaaattggttggtgccggattatggcctccaaaattcttagctttgggtcattattaaagagattggtaggttggccttcaaaaaaaaagaagggggggccccc

SEQ ID NO: 7934 - DNA, 262 bp, Glycine max
  Clone ID: PAT_MRT3847_107175C.1
cgacaacggttcaaacaattctgcatttgctgaccctcttgcatttggtccaggccatgttaaccctgcgagagcttctgatccaggcttagactatggcatctccactcatgattacttgcattacttgtgcagtttgtggtccacatcctcccagtttgctatactgtcggtcggttcttttaaatgtgacatagaagcatctcatcgcgcaggcgacttgaccgacgcctcatgtgctgagctaactagggcgagtgct

SEQ ID NO: 7935 - DNA, 312 bp, Glycine max
  unsure (1)..(312): unsure at all n locations
  Clone ID: PAT_MRT3847_107176C.1
gctaaattatctatgcgctccctaaatcttgattcgccctctcttccatcaaggagcatgagatgcggagaagagaattctaacacaaaggagacatctgcaagcacgaggagcttataagtggagcttacagtccctgttgctgttaaaaaaatggaagctgtttcaacctctcataccacttcatgttcggaggacatagcattatcttttaagtctttgggatgacggtttccaccattaaactatgaattgnagctgtaaaaaaaatggatgctgtttcaacctactgaagaggatgctactcattaa

SEQ ID NO: 7936 - DNA, 496 bp, Glycine max
  Clone ID: PAT_MRT3847_107177C.1
gggtatatttgcgctgctcctcttgatttccacctcttcctttcagcttctacgcgcttccgatgacgccgatgatgatgcgaccttctatgattcgcacgactaggatttcgaataccgatgggttgtgtctcagaaagatgagtacagcggtgtctggacacatgccaagagttagggacatgatgatcatggtcttcttgtcagtgacaaaacaaggaaatatgctattgtaaaagaacttgatgaggccgagagtctcaaggatgatacaagtgttattcagttatgaactcgactctagaatgggcttcagtgtggaggtgcatatctaaaatatctacaaccacatgaggctggatccatatccaaggagattgatagtgtatctccatattctatcatgcttgctactgacaagtgtggtgccacaaacaaagcacactacattctcaagcataagatttctaagagaggtgtatatgtttgacaccat

SEQ ID NO: 7937 - DNA, 177 bp, Glycine max
  Clone ID: PAT_MRT3847_107178C.1
atcctgagggacgtgctactcacataatcatcctcaatgctgctaacattctccccttcaacacaccaatcaccaaaataccatactactatacaatgatatttgacaagttcttccctcataactcatccattccttatgttcctagattaccaaatgtcacatgtaacacatcca

SEQ ID NO: 7938 - DNA, 1115 bp, Glycine max
  Clone ID: PAT_MRT3847_107179C.1
aattggtgtcgcctttcggaaagactgatacagcctcagtgctctctgaagccattgaatacatcaaattcctccacgaacaggtcaccgctttaagtaccccgtatatgaaaagtggagctccaatacagattcaacagaattctggtaaatctaaggaagctgagggtccaaagcaggatctaagaagccgagggctatgcttggtgcctgtttcaagtacatttccagttacccatgaaaccacggttgatttttggacaccaacattcggaggaactcccagataacaatataaataaggataaaatgtgttttaggtcttaaattttattttttttatcaaaattgattttagtccatattttaaaagaaatattttggtctttgtattttataattgatgaatttcgtcttcttcatgaaacctaacctagctgtggtagtaagatgagagacgaaattcactaattataaaaattacaaagactaatttttgatggaaattaaagaagttaaaacacattttaccctaataataatggatggatggagaattgggacacgaaccaataccctgcaagtagctagctaggacatgcatgtaccttatcacacacctggccaagttgggaatgatatgatgaaagaaaagagaaacaagaaagaggacacagaagcccacataaatatgtaaaggtagttagttctgctggggtgtggaaaagatgtataaaaaagagatgggggaaaatgtgtttgaaagagaaagaaagggatatgacccttcaaaagatagccatagttggaccaactacattcagaattatgtaggttttggggcaatattgggaccattgggggcagaataagttgttgtaataattgaagaattatgcttagaattgtgggattaattaggcataacaaattgctgaatatatatagagaaagttaagttctttcgaattcctagactaaacaagagggagaaattgttgttagcacaagataaaggagctttattagtttcttgttgctatattgtgaatagagctggcactatgtaccttgatctcaagagataaaagattttaatttgagagaatcattga

SEQ ID NO: 7939 - DNA, 165 bp, Glycine max
  Clone ID: PAT_MRT3847_10717C.1
caaaatctgttgatgggtaacgcggattacatgagctgcttcgatcgcgatccatacgagaatcgacaccgcgccgatcgtatgcccatggcacgcattgatgtgacaatgaggacagctatacatgatgtgtgaacgctgatcacgctcgtcgttgtgatgtga

SEQ ID NO: 7940 - DNA, 254 bp, Glycine max
  unsure (1)..(254): unsure at all n locations
  Clone ID: PAT_MRT3847_107180C.1
tccaaangtttattcttttcccaccaccgggccaacagaggggggtttatattttgccagccggcagaaaacatcataccttagggatcgtacagtataaatcacacacaacacatacaggtggaaatgaactttgagcctgtacctaaacatgtcttatggatgatacattcatcccgatcacaaattttatattagtggcaagagtcctcttatgtttgatgggaaagaaatatggggatcaatgagtcaat

SEQ ID NO: 7941 - DNA, 404 bp, Glycine max
  unsure (1)..(404): unsure at all n locations
  Clone ID: PAT_MRT3847_107181C.1
aaccggacccaaaagccgggccgggacattaaaccgcgggaccggcacgcgcacgaattcccgctaccgcaactgggaggggggcgggggccccaaaagggaacggaaataaaccgtggggaaatgaaaggcgtatacggttccacggggaaaaagaaacccaaccaaaaagcgaaaaaccaaacgcgccgaaggcgaaagaggaaaagaacggattgcctaggggggaagggaactgacataattggggaagcnaaaacggcacgcccatcagggaaaaaacctatncggccgggcagggggaggaagcaaacaactccagggaagaggcggttttcaccttggacacnaagaagggcaggaggcccaccaccgaaagggcctaaaacagggggacctggagg

SEQ ID NO: 7942 - DNA, 205 bp, Glycine max
  Clone ID: PAT_MRT3847_107182C.1
tggcggcagcctttgtgaccttggctccggtggggtctttcttctcaacactcttgatgactccaacagctacggtctgacgcatgttcctcacagcaaaactaccaaagtgatgattctcatagaaagttttaacctacatgggctttggtggaaccatctctccataccatcataccattcttcaaaatgtaggctccttctc

SEQ ID NO: 7943 - DNA, 380 bp, Glycine max
  Clone ID: PAT_MRT3847_107183C.1
ggggatgatgcaggtattattaaaactccaagctatatataatcccgttagatttaagcttgcatttgcattgctggatgctgctattgtcttttcttttttggtcgatcgatgctgctattgtctatgttatgataaatttatgtcaactttaaaggaattgatactaatgccttttgataaatcgttatacaaagttgttgcctttcaagctgatgcatctgtgcctttggtttttctttctcgacttataatactctgcattttcaagctatatgaatatggcaaataaatgcaataataatttgtaaacaaaaggaaaatgaaaacagaatttggaacatcgcatgcatgtgtaaattttggtattattttgggat

SEQ ID NO: 7944 - DNA, 1017 bp, Glycine max
  Clone ID: PAT_MRT3847_107184C.1
ccacgcgtccgctgttagtgaatgctggtgtatctaagagtgcgttacgttaaattttgccaaaggattttacatgaggagtgactcagatatttcactcacgacagagccaggaggaggaggaggaggaggacaagttcactgtagcattgctcaactgttttgttgtgtgtacttgtgttcaaataacaacaagaaagactgaaccagagctccataacataagtttcttcttgtttttccttgtgtctatttccccgagacaaaggaggttgaacttgaaagttgaaactctcttctgttctgttctgtcttttaacacaaaaattatggttataattttttctggttctttctgaggggctgtttttagcggttgaggttgaagctgtaaatgccgctgagatagatttacatggggaagaagggaagtggtagttcatggttaactgctgtcaaaagggcattcagatctcccaccaaagacagtgacaaaaggagtggcagaagaagagaagactgtgatcaagaagaagacgaagaaaagaagagggaaaagagaagatggattttcaggaagactcacatgagtcatgaaggagggaacaacaacagcaacactcagccagagttgaagcatgatgtggcagcaagtgttgctaggtcaagggcagaagccgctctggccaacgctcaggcggcggcggaggtggcaaggttgtccaaacctgctagccatgccagggagcattttgctgctgttgtgatccaaactgctttcagagggtatcttgctagaagagcgcttcgtgcactgaaggggttggtgaagttgcaagctttggttaggggtcacaatgttaggaagcaggcaaagatgacccttaggtgcatgcaggctttggttagagttcaagcaagggttcttgaccaacgcataaggtcttcacttgaaggtagtagaaaatccactttcagtgacactgctagtgtttgggactcacggtatcttcagga

SEQ ID NO: 7945 - DNA, 796 bp, Glycine max
  unsure (1)..(796): unsure at all n locations
  Clone ID: PAT_MRT3847_107185C.1
tacggctgcgagaagacgacagaaggggacgacagaggcatgaggatgaggaggaggacaagttcactgtagcattgctcgactgtgttgttgtgtttgtgtgtacctatgttaaaataacagcaacaacaactaagactgaaaccagagctccataataagtgattcttcttgttttttcttgtgtctatttccccgagacaaagggttaaaggaggttgaacttgaaagttgaaactcgaaactttcttctgttctgtctttaacacaaaaatatatagttataatttttctggctctttctgaggggctatttttagcgggttgaagttgaagctgtaaatgccgctgagatagatttacatggggaagaagggaagtggtagttcgtggttaaccgctgtcaaaagggcattcagatctcccaccaaagacagtgacaaaagaagtggcagaagaagagaagactgtgatcaagaagaagacgaagaaaagaagagggaaaagagaagatggattttcaggaagactcacatgagtcacgaaggagtgaacaacaacagcaaccacactactcaacaaaaggtgcagcatgatgtggcagcaagtggggggtggttcaaggacagaccaggatcagaagcatgcacttgctgtggccatggccaccgcagaagccgccatggccaccgctcangcggcggcggaggtggcaagggtgtccaaacctgctagccatgccagggagcattttgctgctgttgtgatccaaactgctttcagagggtatcttgct

SEQ ID NO: 7946 - DNA, 413 bp, Glycine max
  Clone ID: PAT_MRT3847_107186C.1
agtttttcaactcttccatagcctttgtcttctgtcttcgggtaaaacagtttattttggacctgcttctgctgcaaaggagttttttgcttcaaatggttttccttgtcctcctctcatgaatccatctgatcatttactgaaaactataaacaaggattttgatcaggatattgaagcgggtttagcaggaactgaaaacatactcacagaagaagtaatccacatccttgtgaactcatacaaatcatctgaaaggaatcaagaagttcaaaatgaagtagctttactatctaagaaggacaccagttcattggatatgaagaaagggaatgcatgcttccttaatcaatgcttagttctaaccaaaggatcgttcattaacatgtatcgtgatctaggctattattggt

SEQ ID NO: 7947 - DNA, 154 bp, Glycine max
  Clone ID: PAT_MRT3847_107187C.1
ggacaaaaaaggaaaacccccctttaatttttggtcaggaaagggaaaaacatatagggtttggcattaaataaagagtggaattaattgggtgaaaaaaaacaagatggtttaccctattgcaaaagggcgaacccctgggcggacccctggg

SEQ ID NO: 7948 - DNA, 367 bp, Glycine max
  Clone ID: PAT_MRT3847_107188C.1
aaacccccaaacattacaaatttttttaacaaacaaaaaccacaggggggggttattttaacattaaaggcccaaccataaaacaatcgggtggtctttggattcaaaacacttttacaaaaaaaaaacacaaaacagagacataggggggcttttgtccacaatcctaaaacacaagaaaaacttggtcatcacagaggttttttcacccctaaaaatcatcaaaggggcaatggaatttaatatccccaccatgggagcccataaacaccattgttttggagagcccagaaaaaatccacgcaatttttcttggtgggaaactcttttaaagaacccccctccttttgggacaattggaaaacaa

SEQ ID NO: 7949 - DNA, 261 bp, Glycine max
  unsure (1)..(261): unsure at all n locations
  Clone ID: PAT_MRT3847_107189C.1
tttttctggtcgatacacaccttgtattgcttctcatttcaccactcttgcttctttcataacaggtggaaacaaaattattgatcttatacatgggaaacctcaagttcaacaaaaaattcaggactaaaacaaatagcactcctnctggatacgcctgggggaacaagcaatagtaactatctgnttacatgacgagtgagcgnactcaagaactcaaatatatgaatgtgggttggaatatggagtgttaaacaagag

SEQ ID NO: 7950 - DNA, 3345 bp, Glycine max
  Clone ID: PAT_MRT3847_10718C.1
tttcggttttttttcttttacggcctagacgctggcgctatgcggaaggggtccgatcccaaacccggggagtggctcacctcaaaatctgtctacaaaacttattgaacctgctctcctgccttttaccggacaattctataacttagtcaggagaaagcgcaagggagtgagccgctcttctttaaggaatgctgcatccgcctcctctaaggagtcacaagaagatgctccaagtaccttgtcggtttacttggaggaggaaacaaatcatgttatacggttcaaaatgccagactctaagatttcacacactgttagtgcaggccttggtgggaggccggatgaggtcatttttgaaggcatggtaaaggatagtcgcagccctctgtgtaacacaagagttgtacttcaacagctttccagtgcacaagctcagcgtcgtgggaaacgagcaatagaggtattaaagaagctggttcggcgtaaactgctgtatcattcttactcaatgcaagttcatggatatacctctttgtctgcaagtggtgttagcggttcatttatcctagtacatgggtatcatggtagtttttctttgagacactggcttcaacaatcagattggcttccaactttagaggccactcttgcactggatgaagagtctgttaggaaggtaggagaagattctactggaggtcctgcagtttctaggcagttgcgacttattcgaatattgatgagggatcttcttattggggtaaattacctgcacagccacggtcttgcccatacagagttgagactggaaaatgttcatataagtccaatagacagacatattaaagtaggtatattgggtaatgctgctgacttttacaaggatggttcgaatggtagctctttggacaacttggacaggcgacagatgatgattgcatttgacatgagatgcgtgggctttataatggctaaaatggtaatgcgagaacttatggatcccttgatttttgcaaagttcaaattgttcctcaaaaaggggtatgatccttcatgtttgcgagagtttatgttggaaatccttggcagaagttccccttatggaaatgctggattacaaatacttgataggaactggggagctggttggcaccttttatctttattgcttgcaactaaaccttctcaaaggataagttgtttggatgctcttcgacacccattcctttgtgggccaagatgggcgagtagtcccatcaatggatattatccgatggggtctgggttctactgcaatgcgtattagggagaagtacatctatcgtcagcctcagcaaagcaggcttgcccacttcattgacttaatggagatgttgaatccccatccacagccaaggaactggttggagctgcttccaggcaaatggcgtctattatactccactgggaagcatgtaggcctgacccttcgccaacctcctctccgtgtactcgtcagcgacgtgcatttaaccgtgacaagagaatcaaaattgaaagataatctttcatttggctctgacattggattctctgtaatgattggtcaggactggcctcatgacaaagctggtaagagtggaagattgcaggtgaattctttatttacactaagatctgggagacggttatatctgaaacaagacaagaccacagagaagttcttctttggcccttccagcaatgtggaggctttagctcagaaatttaagggcaagaaatggagaaagatagtccctttcaaggagtttccatcaagtcttccagcagccaagcttgcatctggtgatattgatgtgagaatgaatcttgatgatccattaaatcgaaacgttgatactgcgagaaatgttctacaagaactaagaacacaaattccaccagaaatatttgatttgtcaaggcttgtgtgtggaacatatgtggactcaagaatgcttgtcctacgaggtgttaatggatccgcgctcctatttacaaggtcttttgtggatagaaacggttctagttagttgttgctgtagcagattcaaaattattatttgaatgcatatttttccttttcgattcgcttggtcgattgtgatctgaaatgaacgatttcctcccatgccccaagaagtggttatgctggattacaaatacttgataggaactggggagctggttggcaccttttatctttattgcttgcaactaaaccttctcaaaggataagttgtttggatgctcttcgacacccattcctttgtgggccaagatggcgagtagtcccatcaatggatattatccgatggggtctgggttctactgcaatgcgtattagtgaggagtacatctatcgtcagcctcagcgaagcaggcttgcacacttcattgacttaatggagatgttgaatccccatccaaagccaaggaactggctggagcttcttccaggcaaatggcgtctattatactccacagggaagcatgtaggcctgaccctccgccaacctcctctccgtgtaatcgttggcgatgtgcatttaactgtgacaagagaatcaaaattgaaagctaatctttcattcaactctgacactggattctctgtcatgattggtcaggactggcctcatgacaaagctggtaagagtggaagattgcaggtgaattcttcatttacactaagatccgggagactgttatatctgaagcaagacaagaccacagagaagttcttctttggcccttccagcaatgtggaggctttagctcagaaattcaagggcaagaaatggagaaaagtagtccctttcgaggagcttccatcaagtcttccagccgccaagcttgcatcaggtgatattgatgtgagaatgaatcttgatgatccattaaatcaaaacgttgatactgcgagaaatgttctacaagaacttagaacacaacttcccccagaaatatttgatttgtcaaagcttgtgtgtggaacatatgtggactcgaggatgcttgtccttcgaggggttagtggatccgcgctcctatttacaaggtcttttgtggatagaaacggttctagttagttgttgttgtagctgattcaaaattattattcaactgtatattttttcttttcgattgtatagcttggtcgattgtgatctttaaacattagatgtaaaaaatgtattttttttattaaattgtattttattcaagcagtaattgcattaaatttgtctataataattgtaatattcttccaaaattgtcgcccggtatagacgagagggctttaagttatttttccggttt

SEQ ID NO: 7951 - DNA, 481 bp, Glycine max
  Clone ID: PAT_MRT3847_107190C.1
gataaggaccataagcttgcttccatttatctggatcaggacctcacagtccagtgaagacaggttggaaggagttcatgccatgaggactcttgaactgaaggccgtacttcagaaactaaagaggatcatcaatcattgctagattgacattgtatgactttgctaaacgaagaaactaataaaatggtgactcgagaccttatggaatgaagcagcttagacacggacttaaactgctacattcccttgttcgactttttttacgcagacttgcaaagacagacctcctgagcctgtgagagcgacctccaagctgtactcaatttctagtaaggtttgcggaatgcactgctctcatctttgatgagaaaagggccctaattgctctcccctatagggtttgaagggacttctgccttatcctctgacttagatggaaccttatgggtttttttcacacttttccatgctattaaag

SEQ ID NO: 7952 - DNA, 704 bp, Glycine max
  unsure (1)..(704): unsure at all n locations
  Clone ID: PAT_MRT3847_107191C.1
ggccggnaaaaacccttcgacccacgcgtccgtacgttttcngacagacgacagaaggggacagacacaaatcacaaaccccatttccaaccccgcattgaacctaaaaaagcaatgtcacctccaccattttccccccctctctctatttcccttctctttgtcttcctgttagcaccattactcttagctcaatctccaccttctccttctcctgcgggttcttcttcttcttctgttgcctgcaaaggcacactatatccaagttctccataaaacaaagcctcaaacaggcaagaaaactagccaaagtctttgaggactttctccaacgccaccaaaaatcaccttccctcaaccatgctgagactgcatcacttggtgactgcagagacctaaaccagctcaatgtggactacttggcgtccatatccgaggagctcaaatccgcaagctcctcagactccgaactcatcgagaaaatcgagagctacctcagtgccgtggccaccaaccactacacttgctatgatgggttggttgtgaccaaaagcaacattgccaatgcacttgccgtgccactcaaggatgtgacacagttgtatagtgtgtcacttgggttggtcactgaggctcttgacaaanacctaaggaggaatattacccgcaagcatggtctccccaccaagaccttcaggttaggc

SEQ ID NO: 7953 - DNA, 257 bp, Glycine max
  Clone ID: PAT_MRT3847_107192C.1
cgaggctcatgataaaccaatctgcattgcgtcgctaacacatagtccttgcattcgttggtccgatacccattgatgacaactatccactgacgactatgatcatccaatctatctatacgtacacgactactacgtacactgtgcctagatcttatgctactcggattccaatttttctatgacatgcacttgattatgggaatgctcgacacaagcactgatgttggacccacctgtatcaaacgggttgctta

SEQ ID NO: 7954 - DNA, 2269 bp, Glycine max
  Clone ID: PAT_MRT3847_107193C.1
caaaatcattttggaccagctttcctaattgctttaaagcttttttttttttttttctgcaaacttgtacatattcttattaagacttgaattttcataagaacatcaatgcctctcatcccttttggatgctattcctttaaaaggaaaatcatgtagttacattacatctaacaaataatgaatcaaatttatttttttcaatttaagctttcagctgtctatcttagtagtccttcagtgtaaggtatatctgtgtcaggaagccaagtatttcccaatgtaaaattaaggactgtgaagttccaagcttgagtagcattcaacagagagtaaccaggccatgttactctattgctagtgttagaaccaggtccatagttgttgaattcaccataaaagagagtgtctaatccaactgttccattccactctagccacccagcaggttgaattacatttccaatgtatgactgcagatagacagtcctcgaatacaccttccatggacggcctaagaaactcatcgtggaattcaagtccgcgaccaagtccggtgcagcatcaatgctgcagttttggatcgaaatgccagtgttttgatttggatcagttcttccttgtgctgtgacagcattcttctggtttggcaatggttttctggcatagattttgcaaccctggaagaccacagctgcattgccgaaaatgaagtccacagttccatagatttcacattccctatagaattgcctcaaggagtgaacatagagtgtgtcttgatatccttcaaaactgcaacggtagaatgtggagagatcagcattgttcctcactgccactgcttggtgcttttcgggtccagctgtgtttctgaatgtaacatccactgctataaatctttctccagaaacagcaaaggtggaagaattgaaagtagtccaaccatctatgacactatggttccctgtgatgatagtcttgttaataccatctccaactagcaatatattcttcttttctttgggaataactacatattcctcatagagtccctccctaacatacacaaggaaatatccatcttcaggctttgtattattgggtgcagcagcaatagcatctccaatggaagtgtagttgtctattccataatggctcacaatcacaaagtcgtacaataaaattccttgacttccactttctttaagaatcctttcagttctactagtacaattggataatttggcgcaactatactttgtgcgaagaagcttgatgagcttctctagtggttgcctaaccttgaaggtcttggtggggagaccatgcttgcgggtcttattcctccttaggtttttgtcaagagcctcagtgaccaacccaagtgacacactatacaactgtgtcacatccttgagtggcacggcaagtgcattggcaatgttgcttttggtcacaaccaacccatcatagcaagtgtagtggttggtggccacggcactgaggtagctctcgattttctcgatgagttcggagtctgaggagcttgcggatttgagctcctcggatatggacgccaagtagtccacattgagctggtttaggtctctgcagtcaccaagtgatgcagtctcagcatggttgagggaaggtgatttttggtggcgttggagaaagtcctcaaagactttggctagttttcttgcctgtttgaggctttgttttatggagaacttgccatagccataagggtctgaaggggatgaacgaatggctgagagaatggaacggcagagttttggatatagtgtgcctttgcaggcaacagaagaagaagaagaagaagaaggagaaggagaaggtggagattgagctaagagtaatggtgctaacaggaagacaaagagaagggaaatagagagagggggggaaaatggtggaggtgacattgcttttttaggttcaatgtggggttggaaatggggtttgtgatttgtgtctgtccccttctgtcgtctcagttccatagatttcacattgggaaatacttggcttcctgacacagatataccttacactgaaggactactaagatagacagctgaaagcttaaattgaaaaaaataaatttgattcattatttgttagatgtaatgtaactacatgattttccttttaaaggaatagcatccaaaagggatgagaggcattgatgttcttatgaaaattcaagtcttaataagaatatgtacaagtttgcagaaat

SEQ ID NO: 7955 - DNA, 486 bp, Glycine max
  Clone ID: PAT_MRT3847_107194C.1
agcaaggctttgaaaagaaatgaatggctcctctgattcggtgtggtttgggtgttcctttcccttcatgtcacgccctccctcctccaccaccaccaccaccactgcgagtgccacccctcctcgcactcgcactcgcagccgcatctcctccgtcttctcctgggtccgacccctcaaacgctccaaaaccgccgacaaactctacaaaaaatacgtcctctcctacaaactcaaataatacatccccatgcatccaataaccaatttcattgcctgattcattgatatatacctatagaaattggaaaaaatgtctcaaatcttggcaccgttccagttactggaactgaacgtgatttccgcccaggacctggctcctctgggtcgcaacatgcgtacctacgctgtctcctgggttcacccggaccggaagctctccacacgcgtcgactctgagggccacaccaacccaacttggaatga

SEQ ID NO: 7956 - DNA, 461 bp, Glycine max
  Clone ID: PAT_MRT3847_107195C.1
atttggccctcgaggccaacaattctggaggaaatttgttgctgagtattttgctccaaatgccaaaaagaagtggtgtgtttccatgtatggaagtggcagacaaactactggagttttccctcaggtctgctgcaagagaaaaccttataaactatttctgatgcctggataacttcatctaagttagtctcttgattattcaataatgtctgtagtattctccattgtaccattttcctttgttagcatcttaattttgatgttgttattgccatattattatgtatcaagcaacgtttgtcttggaaattctatgggaatcaaggtgcaaccatgttgagttcctgaagctaagcattagtttaaggcgctaacatattgacttttgaaatattttcaggatgtatggcactgtgaaatatgtaattgcaaacctgggcgtgggtttggtaagttct

SEQ ID NO: 7957 - DNA, 135 bp, Glycine max
  Clone ID: PAT_MRT3847_107196C.1
gcgttcttcaatttattttctttctgcatctcatggatgtctccacacactctacatagaggactgtcggagtaacaccttctgatcctcgaaaatcacttccacaatggggtcgtcagatccacaccacacaac

SEQ ID NO: 7958 - DNA, 205 bp, Glycine max
  Clone ID: PAT_MRT3847_107197C.1
gctcaacaggggtatagaagttagctccaccatacactgcttacgcaccgagctcctactcaattctcaggagctggatatatataactagaccctctgacctgcctggagctcgaggattaatttgacccgttgcgagaccaacagaaagggtcagaatgaaggtatcctgagtatctgcacttatgtgacgcgccatgacccc

SEQ ID NO: 7959 - DNA, 475 bp, Glycine max
  Clone ID: PAT_MRT3847_107198C.1
gaaatgagaaatgaaggcttgcttccaaatgtattttgttatactgctctaattggtggtcactgtaagttaggtcagatggacatagtggggagtatcttactggaaatgtcttcaaacggcatacgacctaataaaattacctacactattatgattgatgggtattgtaaattgggaaatatgaaagaagctagggagcttttaaatgagatgataagaaatggaatagctccagataccgtcacttataatgcattgcaaaaaggatattgcaaggaaagggagctaacagttactttacaaagtgatcataaatctaacataggactacccttagaagaagaaattacttataacacattgattcacaagttgcatccacatacagcaattagcaatagagaatgatgaggaaacttctcaaactttggatgcttacttgataccagggtttatatggttgagcctgcta

SEQ ID NO: 7960 - DNA, 377 bp, Glycine max
  Clone ID: PAT_MRT3847_107199C.1
gaagctggcacgcctggcggagccggtaccgactttccgggtttacccacgcaccgggttgttcaactgatccggcgcgttttgtccaacgagaaacataaaggggccatcttgctagatagcagacccacaggagtgtcaggcgtacatagagggagtgattcacagccctgagcgagatcagagttaagtctgtggacagatgtcaagacgaaagatgaaccgaatgtgaggaaacgctctcttgggaaacaactgaaccatgcaactaatctgacctggacccataaaaaagccgcacggccaatatgaaaggaaacagaggatctgggatgcacgaggcctaagcttggcactgggcgacgtttacaaacgtg

SEQ ID NO: 7961 - DNA, 218 bp, Glycine max
  unsure (1)..(218): unsure at all n locations
  Clone ID: PAT_MRT3847_10719C.1
ctngaganangaagttgnngggttgagttggattggatttctaatctaatctatacctttcttttttcctatcgcttttaaggnacaaacccttctttcttncctcttnttnnttntncatattgtnattccttgcntttaccctttanggaangaagaaggaanaantatantactattntccttattattgntantattgtaattnatcttnnnat

SEQ ID NO: 7962 - DNA, 742 bp, Glycine max
  Clone ID: PAT_MRT3847_1071C.1
cccacgcgtccgcccacgcgtccgcccacgcgtccggctgagtggactgaaatcggtggagaacgcgcacgatgattcggtgtgggcggtcacatgggtacccgcaaccgccaaccggccaccgctcctcctaaccggttccctcgacgagaccgtcaggctctggcgctccgacgacctcgttttggagctcaccaacaccggccactgcctcggcgtcgcctccgtcgccgcccaccccctcggctccgtcgtcgcctcctcctccctcgacagcttcgtccgcgtgttcgatgtcgattccaacgccaccatcgccaccctcgaggctcctccctctgaagtctggcaaatgcgcttcgatcccaagcgacaagtgttgaaattgactctttcattgtttttgtcggcacccgtgcactggcaattttgtgtgcttaagttcaacatctcatgaatttgattggttaacttatacttgtaccaactgcagggtgctattctagcagttgctggcggaggtagtgcatcagtcaagctttgggacacttcctcatgggaacttgttgccactctgtcaattcctcgtccagaagggcagaagcccacagacaaaagtggcagcaagaaatttgtcctgtccattgcatggagtcctgatgggaaacgacttgcttgtggttcaatggatggcaccatttctgtttttgatgtgccccgtgccaaatttttacaccacctt

SEQ ID NO: 7963 - DNA, 108 bp, Glycine max
  Clone ID: PAT_MRT3847_107200C.1
acgcgcacgcttgtgacaaatgctatactgaatctttatatggtaggcatatacgcacgtagccgaggcatggggatgagtgactacccaagctaaagctgctgatgc

SEQ ID NO: 7964 - DNA, 428 bp, Glycine max
  Clone ID: PAT_MRT3847_107201C.1
cgctcgcttataacttttacgactgctcatcgccgcttggttctcccgtcggtacacaaggtttaagaggcgctacgcggacttccacggccgcgctgccgatctcgtccacggcctccggggcacggcgatgcccaggagacaggccctcgaggaagagcaatgtacagaagagaaaggtatctcgactattccaaagcacaagtatgcatccaaagcctgttccccaaaaggaacctttatctgcagctctctctgcgcttactcttgttgtgcaatttaatgggtggctatcatttttcctcttgctttattataaacttcctctgcggccagaaactcacaagacatactatgaatacactggcttggggcacatctatgggctccttgccatgaattcatggttctggggggccatatatcac

SEQ ID NO: 7965 - DNA, 327 bp, Glycine max
  Clone ID: PAT_MRT3847_107202C.1
agaaaaagggggccacagttggaattcttgagaatacaggtatatcaggggcctgtgctatgaatagtggtttagggggctcgccagttctgatatttacacccatttgttctaagactgtgaattgtggaatctgcttgacaaaagcatgactatgttatttaatccaaacccgtgttctgatgcatggagtttggaatttcttgaagcgtactggatttcattgcgatattcatttgagtcactggatggactgccactcccaatgcatgattgttaggttacaatctgattggtttattttcctctcaaggaatgtgtttccca

SEQ ID NO: 7966 - DNA, 148 bp, Glycine max
  Clone ID: PAT_MRT3847_107203C.1
gcaaataaaagaagacaaaaaataataattgaatgtaaaagagcacgggatctgagactgacacacctcctacgggttattaagagagagtaagagatacctaattttagagagagcacctccccggcttaaacggtcattactttcc

SEQ ID NO: 7967 - DNA, 438 bp, Glycine max
  Clone ID: PAT_MRT3847_107204C.1
gagaaaccaaccctcatttttcaagatcatcacagcctgaatatatagatgatcgtgataccgaaccttatccacttgtgccacgccgaaaacgccgagaccaaccatccacacaagtagctccacctataccagttgcattgccagctgagcatgaagatcgtgttccattacgaacacgacctcagcatgaagaccatgttccattgcaacctcaggtagaagatcatccacacccaccaccacctattctccaagaacctcgccgtggcaagcaaagaagtccacgtagacagccaacaaatcaaggtttccggccggttaagtcaaaggtaaattttcaagaaccacctccctcggctgatgtccctccacttgttgcaccggtgaactattcccccgagcattgggaccaagcaagcccggaatcccggctta

SEQ ID NO: 7968 - DNA, 926 bp, Glycine max
  unsure (1)..(926): unsure at all n locations
  Clone ID: PAT_MRT3847_107205C.1
acgaggacccgtgcaatgcatgatttttggggaaaaaactaagaggaaaagaaaaggtgaaattaaaaaaaaatctgacagcattgtccaaccgacacatggtgacgatcagacaattttcatatagttattgattattggatatgatatgaaccagacttttcatctcatttttctcaagaaaccgccaacccaacaccttctctggtgaaattcccttcttcttttttctctgttgacagacaccacttcaacttgcctcatgcctcacttcaacttgtattcatattttgaaggcatcgcaagtaaaaaaaaaaaacctacttttattattatcgcccttggatttatacaaaaagatgactagggagcaaagcaaaagtgctggggaatcggtgctaaaaatccaattggaaattgggaatttggtgacggttggaagaagtcaagcctatcaaccatgcttgatgtgcgttaatatcgactgaaattacatgaaatggttttttaatcagtacttttataaggtgtatataatgccctttaagaaacaaaatttagattttgaagtcttctgctcttgttgaaaattatgtctatcatgagcaattctttcatataggcatcaacaaggattggtttatgtacatagagtctatttggtggctaggatatgataggagaactatcttatcctactgtaatcaattgattggtgcaccgacagaataggatttacttattttattgtctatcatgttctactgatgttatgtatttcttactctggaaggagttggattagaaaacatgatagaatagtccttctttatccctcccttcctctcacccccatttccccattattcataatcactatcactgttacagccatcaattanaaaatgagtacttagtatctttcc

SEQ ID NO: 7969 - DNA, 795 bp, Glycine max
  unsure (1)..(795): unsure at all n locations
  Clone ID: PAT_MRT3847_107206C.1
ggctccccgagggactcctctcatctcccctcacatcaagtgggaccacagtcagacttgggatgtcccggttgctgaggacttcccaaacggctccagctcctcctctgctacagtctacagcatcgacgccagtcctgagtcgcccgaccactacctggtagaccactgcattgacggccgggtcatcttccctggcactggctacctgtgcctggtgtggaagacactggctcgcagcctgggcttgtccctagaagagacccctgtggtatttgagaatgtgtcgtttcatcaggccactatactacccaagacaggaaccgtggcgctggaggtgaggctgctagaggcctcccatgcctttgaggtgtctgacactggcaatctgattgtgagcggaaaagtgtacctgtgggaagacccgaactccaagttattcgaccacccagaagtcccaacaccccctgagtctgcatcggtctcccgcctgacccagggagaagtatacaaggagctgcggctgcgtggctatgattatggccctcagttccagggcatctgtgaggccacccttgaaggtgaacaaggcaagctgctctggaaagataactgggtgaccttcatggacacaatgctgcaggtatccattctgggttctagccagcagagtctacagctacctacccgtgtgaccgncatctatatcgaccctgccacccaccgtcagaaggtgtacaggctgaaggaggacactcaagtggctgatgtgacaacgagccgctgtctgggcat

SEQ ID NO: 7970 - DNA, 418 bp, Glycine max
  Clone ID: PAT_MRT3847_107207C.1
aaaacacaaatggttttgcctttgattggaacccaaaacattgttttgtccatttttttttgaaaaatagaagagggaaccttgataactttttgttgcaacattgaatgacccccccccccccagattccaaaggggttgatgaatgaatgatttgtttaaccaaaaaaaaagttgttggaagcacccttagcgatttgggttttgggctccaaaaccctttggaaaagttgttttttttttttgggcctggactttttccccgaaacaaaaaaaaccttgtaaaattcccgggttccagttccaccacgggatttttttaaactttggacccttctttgggactcctaagcccccagattagaaagggcagacatcctggaacgtaatttttttattttgcaatatgaaaccgggt

SEQ ID NO: 7971 - DNA, 549 bp, Glycine max
  Clone ID: PAT_MRT3847_107208C.1
agttgtaaaaaggagttttacaaaattagtgaaaatctcaagtgggttgcttgagactggacgtaggcacgggaagtggtcgaaccagtataaattgagtttgcatttctcttttcctttatctcatttatgttattgcaattagttttgtcttgcatgtttaaaagaacattgttaaattgattgctttttcttcttcttcttcttcttcttcttcttcttcttcttcttcttcttcttcttcttcttcttcttcttcttcttctgcattcgaagtctatcatttaaaaatgaggttaaagtttattagtggaaaaattttaaaacttaattcacctccatcttaagttattgagaccatttgttcaacaattccttacatttctgttgtgtgcatgtgtatatgattattttcttttcttttcgtgtaagtattaaatcactctgtggtgattcttgtggggacttgtgtgtagggagttggatgttttgtcacggaagcatatatgctttaatcttcattcatgtgctactacgcttggatcactt

SEQ ID NO: 7972 - DNA, 408 bp, Glycine max
  unsure (1)..(408): unsure at all n locations
  Clone ID: PAT_MRT3847_107209C.1
ccctcgagccgcccgccccccccttccccagtgagtttgttgatggagaaactagaacagtgtgatgaaaatgaaggtncttgttttnttngttgntacaattttggtagnatggnaatgccatgcgtacgatatgttccctctccgaatgaacactgggtatggtgcccgtactccggaggtgaaatgcgcaagttggagggttgntgtggaattacctttatgtttgggtttgagaccattcntgaagagcgngttgaagtaacaaaggaatacatgcatggggaacaatatagatgagactgcaagagagttaagcagcaagcttacttttatgccggagacctggaagggcatgccaggggcgcgtttggggtgaggatagatggagcggaactgtgtgatatg

SEQ ID NO: 7973 - DNA, 390 bp, Glycine max
  Clone ID: PAT_MRT3847_10720C.1
ccatcatgtctgtctggaaacttgaaacaggttgattttaacgctgaccatattgccaatcctatattacaagggagaaatataacttctgaaggaagagattctataggtgttgggatcagtgagaactcggcattggtcccagaacatgattcacacgagactgaatttgtggaagtagccttaacaaagcaaaatgaagatgttgggatatctttcaaggatggccactgcaaaacacaggagcctgatgaaagtgacgtgttaactgaagttgtaactgatgatgttgacagcagcagtagccaccatgaaagagagcaactggaggaagatgaggagaatgatgaaatgcttggtggcatattttgccttttccgaagaaggttg

SEQ ID NO: 7974 - DNA, 2895 bp, Glycine max
  Clone ID: PAT_MRT3847_107210C.1
cggctcgaggattgacaaaagactttctggaaaaaggacgttcattgtacttgatgacgtgaatgagtttggagattaaaagatctgtgtggaaatcatgaatggtttggtcaaggaagtgtattaatcattacaactagagatctacacctactggacctacttaaagttgattatgtttatgaaattgaggaaatggacgaaaatgagtcccttcagctttttagttggcatgcctttggacaaccaaaaccaagagaagacttcaatgaacttgcaagagatgtagttgcttattgtggaggattaccattagctcttgaagtccttggttctcatttaattagtaggacagagacagagtgggaaagtgcattgtcaaggttaaaaatgactcccaatgatcaaattcagcaaaaattaagaataagttttgatgatttatatgatcatatggaaaaacatatatttcttgacatatgttgtttctttattggtaaagacaaggtctatgttacacacatactaaatggatgtggactacatgctgatattgggttaacagttctcatagagcgtagccttgtaaaagttgaaaagaataacaaacttgaaatgcagaatttgctacgagaaatgggaagagagattattcgtgaaggttcaagaaagaaacttgggaagcgcagtcgtttgtggtttgatgaggatgtagttgaaattttgacagagaaaactgggacagaggctattgagggattggctctgaaattgcattcaaacaaaagatattgcttcaaagctgatgcttttgcagaaatgaagagattgagactgttgcaacttgataatgtagaactcactggagattataggttttgcagtggctaaaattcctcaatcttagtgaaaattgtaactagtaagaatcaagagcagtagaggtttcaaccaatttgtactgggcatgccaaagtattagtatagttttctcaaactttatcattgagaaaggacgcaataacctatactttttgataatattgaataatgcgtcatcttaagtaaactctcaatatcggtatatcattaataaccaaaaagaaatcaaagtcggtcccgctaattacatatcggcacacccgaggattttataatggccatggctttaaaggctactcttattgctgaaaatactgctgtgaaacaagtgccctttccaatagtaagttcgaaaggcattgggtatatatccatttatggatatgaaggattttcacatcatgtttatctttctatcatgcggtcttggatgctaccaaaaatgaatcccctatcttgtattcgctcgtttagtggcacttcatcatctccaattcccatggacatgcagaataaaaatttgagtgatctagcaccaccaatttcaaattttcgaagtgttgtggtgcaatgtgagacagagattcaactatttaaccaaataagaacaattctagatgatgtgtatggtgcaaattttagtgaattagaaataacatcatatacatcccaaagttcaaatcattccgtgaagtcttatttgattggcattggagattttgagcaagtcttcatttctctcagcaacagcatatctgagggattggcaacctgtgagtcttctgatgtttttctccctggtgactattatccgtattggttggctcatacaggtgagggacagtcagtgtatttcactgtgcccgaggattgtcgcataaagggtgtaactttgtgtgttgtttatttatcaaccctcgaaaacatggctactgaagttcttattggtgttttaatggttaattacacaaagtgcgccatccagtttcacaagcgagagactttattttcctttaatgatgtagattggcagggcataatatcattttttggacctggaagacaaggtggagatttttgttatttttgggaatggattggcgatcaagaagacagctgtgtatttaatttgtgatgaatccattgaaatggaaatgacaaagattgaaatggacatggagccttcacatttgtattgtgatgatgtcattgaaaaggacacggagccttctaatttgtattgtgatgatgtcattgaaaaggacatggagccttctcgtgagcaaaagaaagtgacaaagaatgagagattagtacgactcaacaaaattttaaaaaaatattttccaagaaagtagagttttgaactaatttttactgggcatgccaaagtcattgtctaggattttggaaagtgccaaaattatgtacttttagggtgtttttaagtcatttttcttgctcttaccttgatttagaaggttgttgggacaaagattgctttgtttccactattttctgaatttaagtttagtattttgatttctttgttatatattgtagtaatttatcccatattttttttagaaaaaaagggtctgaagatggagaatttatcttggggagcaactatgatgtgttgaatcttcaaacggatcaacttggtcaacaaaattctggaagaataaaaactggcatatggtcaagccaaaatttcatggctgagtggatttacacttgaaatggaaatgttgtttatgtatttttaggtctaacccgtgaatatagatagattctccctcccttttgctttcatcattgtaacagtttgcaacttttgtactgtttttgtgttttcttcatccatcttcttccccaccatggataatcccatgtcgcttattgtcatgagtgactaagttctcttgttgtaagggataaatgtaatcatttcttaactctcatgcatcttttgatataaatgattatatatttctcatatttttgttcaat

SEQ ID NO: 7975 - DNA, 387 bp, Glycine max
  Clone ID: PAT_MRT3847_107211C.1
atggcttcattcaattcaattcagaactccaccaccccaatcttgcttattactattctcattacatttctactccaccatcttctgtgcccagtttcttgtttcaaccagccacaacatgcaattcctccaccggaccctttatgtgaggagaaaaacagattaggttcaatgcctcctacttgccacaacaagtgcaaccggtgtcatccatgcatggcagtgcaagttccagcctcgcctaaccatgaacgagttcacccaggtcttgccccaactgctgcaatggaagttttctttctccaaggtaacagggtcaatgggattgcttgggttgcaccagatgagtcattttcgtcagcattgattgtgtggattggagtttga

SEQ ID NO: 7976 - DNA, 906 bp, Glycine max
  Clone ID: PAT_MRT3847_107212C.1
caaatacgataaattaataacttagatacattatttaacttaaacaaataaacccaaatacaagctaaattgggaaattctaatgtattatggccatctatatattcttaaaaatcaacttcgccacccttgaacaagtaagcttcttccttttacacattattgtgtctatatatattaaagaaaaaatagatcactaactaaagattgaattaattctttttgcgtgcagaattttcctttttcaacatttcaaacaagcttccatcataaacacttcggattgtttccttctgtagtaagccattcttgtctttggcaagtttgtaaaggactttccattcaaccaagccaccaatccttcctttgaaatctttgggctctctatttgcttttagcatctcctttagctcatcatatgttaaagcatttggatgagtatgtgaatgttttgtgaaaattccttcaaattttgaaggaacaaaccttccttcagtatcataggctccagtgtcactgccgtgtttgccgagttggatattcttaatttctattgggaaaagtagagatggaaactttcctggtcgagtggtttgactaagagccaaattgatgaatagagaaagtccaacggacgacaagatcccatttccaatttcacgtaagccttgaaatgtctcccatgggtaaataacaccatcgtgattcttgtcaaagaatgcagcatgcttctgcagaacattttcatgaagtggaatgagtttctccccaataccaccaactactccctcttgttttgtgctttctgaggaagccatatggatatagaatgctggatccgcaaattcagaaggatcgagagaagagtttttctgggttcgagctataataagaagatctcgagcc

SEQ ID NO: 7977 - DNA, 106 bp, Glycine max
  Clone ID: PAT_MRT3847_107213C.1
gcaaagcagtgggcggtcagcaaattccgacaatgcgagctgctttgttctgttgtccattggtgaatgttgatcgcgcacaccgtcacacattctcctgagttac

SEQ ID NO: 7978 - DNA, 169 bp, Glycine max
  Clone ID: PAT_MRT3847_107214C.1
ggactatggagatggccatagctgcactgtttccatagatgacagttttgcacatcctcatgcatttcggcgacctaacttaacgtggcgttgcacgactcatgccctgactaaaattcattctgaaccgcgggactccttgactaccacagaccaactagaaagtggc

SEQ ID NO: 7979 - DNA, 551 bp, Glycine max
  Clone ID: PAT_MRT3847_107215C.1
gagagaactagtctcgagttttttttttttttttttatcacaaaagtataatcgtgaaaataaagcaatccaatatgtattacaagtatgggaaaattaagaataaaaaagttctaaagatctgggaaaaagtgacaatgtgatacaaaagatgtactacttgacaacaaaatttccctgatgattagttattttttttaaggcagtgagcgacctctgagatagagccaaggtcctgtcccagttcccatcctccatataccagccaacatgcgaagagtcatatagatggttaatgcaatccaaatcccaacgaaatgtttggtcctgtagagaatgaattctgtggctacgcttactagtgacaccagaaccagagagtatgctgaatatgcaaaatcagaagctccatagttcactccatcaaatacaaaggctaatgaattgattggttgagtagcagccaccaacgggatgcctatttttattaagtgcacaacatgagcatcttttgaaaacactccagctccaaagtataatccaagtgcaac

SEQ ID NO: 7980 - DNA, 537 bp, Glycine max
  unsure (1)..(537): unsure at all n locations
  Clone ID: PAT_MRT3847_107216C.1
aaggaacttcactcaaagctggggaagtaatgaagggtaaatagcataagaaagggcgtcgttagcaggctagacagatattgaatgaagaaagagagttcgacttcctcacccgttgaagaagccgtgattgcttgagttgaatcagttgagtttggtcctaacgtatataagagagaggtttaggtatgaaagaagatcttaacttttaatttcataagagaagaaagagaggtaaatgagactggtatgccggtttccatcttgtttttgtcgggggttttggcagaattgggttcgactcccatagtcccgcggcattccccctgacctcgagataaaatgaaaaaacggacgataaacagtttgattgttaagggtaccattatttcattagtaagggaatttttattggaacgggcttcgattccctttatacgcgatgtggcgaattagactgatttaacgacgacgagatatgcgatttaaaactcgtcgtctacttttagganatgtttggaacagagaacttacaat

SEQ ID NO: 7981 - DNA, 776 bp, Glycine max
  Clone ID: PAT_MRT3847_107217C.1
cagtttgcaactggatacttcggagatggagttcgctgatcgtgcttgagttttgcggtggctattttgtcgcagttcgcagaggatcgacttcgcggtgctgttatagagaatagtgaaacaacccaagaagaggtggttttaaatggtatttctcgggccgaggtgaatgaaaatggattttcgcaaattcagcgtcaaacgtcagtgtttaccgtggcagctccaactcgtcgtctctattcttctgttcttagcagttagttcacttggatctcctattgaaactcgcaaaactggcagatcatctgtattctcactttttaacctcaaagagaagagtcgattttggagtgaggatgttatacacaatgattttgatgatttaaagttttcaagccatggcaaactaagcgtatttaattataccaatgcaggtaacattgctaactatctaaagcttcaggaagttgattccatccaccttccagttcctatgaattttatatttataggatttgaagggaagggcagccacgaattcaagcttcttctagaagaaattgagcgttggtttactaaaattgatcatgtctttgaacacactcggattcgacatgaagaagttgtaattccattttacaaaaccaacatggataaaatgcgatggcaccaacttgctgttgtcagtgacataaattacaacttttctgttcatgctattgaaatgggagagaaggttacttccataattgagcatgccataaatgtgtttg

SEQ ID NO: 7982 - DNA, 111 bp, Glycine max
  Clone ID: PAT_MRT3847_107218C.1
gcgtccacgcgtgcgactacacatccgtatgtctctgctgagcaaacaatatcgatgacgctgcatgctatcatagtcgaagatctgggctgtgggatgcttgaatgcttc

SEQ ID NO: 7983 - DNA, 764 bp, Glycine max
  Clone ID: PAT_MRT3847_107219C.1
aatttctagctagttgtctacaaaagactttcttcgaaacttgtgttctctcttcgaatttcaccaaaacactaaattataaccatcatgggtgatgttctaagccccttcaccatctcatcccctcctccaccctcctctccatcaaccaagagcaacagcatgcccatgttgtactacggtctcgtggtggtcggaaccgccgccatagtactagccatatacaacctcgtcctcctaagacggagccacacgcgccatgcgctgccgtcgcaaagtactgggcaaaatagagatattgtacgagtgcccgagatgagaacgaggagcttcgaggacagccaacaaaggaacttgttgtcgagcttcaagtacaagaaagaagttgtggccaaagaagaagaacaagaagaagaagagcaagatgatgatgaatttgagtgctccgtttgcttatcggtttatgaagaaggtgaagaggtgaggaagcttccacagtgcaagcactatttccacgttctttgcatagacatgtggctttactcccacttggattgcccgatttgtagaacgcccgttgatgttgttggccctttgtgtccgctggagaattcacctgatgggatgatggaatccggtggtggcataccatcatctctctagattatgtggttggggagaaattattagataattatctcacattaatcatatattcttcttcgattttcatatcacacctaattaaattgagcttaacgagg

SEQ ID NO: 7984 - DNA, 406 bp, Glycine max
  Clone ID: PAT_MRT3847_10721C.1
ctcaaggaaagtgaagaaaaaaatgtttatttttgttttttcacgagagagagagagggagagagagaaataattcaattcaggtgctatgttttctcatgcatattttgtagtatggtctatagaaagtatctacctttcatagtttcatagagttgtggcaagtgagaatgaaaaactaccattgttaaattatggtcttaaattcacttctttgggtactttttggaattcttgaaaaggtgtcaagaaatattgatctggtttatggaggaggaagcattggtttgatggggttggtttcccacgctgtttatgaaggaggtcgccatgtaattggagttattcccaagacactgatgccaaaagagattactggagagacagtgggggaagtgatggcagt

SEQ ID NO: 7985 - DNA, 307 bp, Glycine max
  Clone ID: PAT_MRT3847_107220C.1
ctttctaagaaagttagcaaagcctggagatcatggagatgatttttgccgtattgacaatcatagacatgaagttttcttgctgaccttgggaagtttacagatagactagtaaccatttttctgttttcatttcttccctttcccttaatactccaccactttctcaatcaaaagggtttagtaactggatttgttggcgccttatcattattctcttgtgaccagagatacttgccaacaagtataggcatggtgttttgatttgtcaatgcattttgcagttaaatttaaaaaaaaaaaaaaa

SEQ ID NO: 7986 - DNA, 464 bp, Glycine max
  unsure (1)..(464): unsure at all n locations
  Clone ID: PAT_MRT3847_107221C.1
cccctaattaagcttcctttcttccacattcagaccacactctgacacaccctctcacgcaaactctccttcctcacaagctccgaactttgccttttcccgagacacccattacctcaaaacccccgaatccgacccatgtccgcctcatgcggggtggtggagtgcgttttcgttctgggctgcgcgcggtggctgtggaagcgctgcacctacgtgggcagctacgacagcgccacttggcccgccgccaccgccgacgagttcgaccgggtgccgcgcgtctgccgcctcatcctcgccaactacgagcccgatctccgcaccccgcagtaccaaaaacccaccttcgncaccggccaccgnctgaacccggactgcgtcatcaagcgcgtgacctacgaggacacgctgggccacgcgcctncgtacataatctacctcgaccacgagaacaaggagat

SEQ ID NO: 7987 - DNA, 1237 bp, Glycine max
  Clone ID: PAT_MRT3847_107222C.1
acaccgcaagaaatagctagagtgagaaagaaaaatggagggaaaagaggaagatgtttccttgggagctaacaaattctcagagaggcaaccgattggaactgcggctcagagccaagacgatggaaaggactacacagagccacccccggctccacttttcgagccctccgaactcacttcttggtccttctaccgagccggaatagccgagtttgtagccacttttctctttctctacataaccatcttaaccgtcatgggtgtcaataggtccagctccaagtgtgctactgttggcattcaaggcattgcttgggccttcggtggcatgatcttcgctctcgtttactgcactgctggcatctctgggggacacataaacccggctgtgacattcggattgttcttggcgaggaaattgtcgttgaccagggcgctgttctacatggtgatgcaggttctgggtgctatcgttggtgctggcgtggtgaaaggtttcgagggaaaaaccttctacggccaacacaacggtggtgccaactttgttgcccctggttacaccaaaggtgatggacttggtgctgagattgttggcactttcattcttgtctacaccgttttctctgccaccgatgccaagcgtagcgctagagactcacacgtccctattttggcacccttgccaattgggttcgctgtgttcttggtgcacttggccacaatcccaatcactggaactggtatcaaccctgcacgaagtctcggtgctgccatcatcttcaacaaagaccttggctgggatgatcactggatcttctgggttggacctttcgttggtgcagctcttgcggctctttaccaccaagttgtaatcagagccattcccttcaaatccagttaattaattggattacaacgattcgtggtcaatcaagttgggtaaattaaaagacccaaaccaagcaagtttctggttttattttatgatatatcgtcatctgttttcttttctccttatttttctttctttttttattattaaaccttctattttgtatgtaaattatgtaatgtaatgtaatattatgagtatgattatggtggtgcgcgtgtgttgttgcctaaggggccaggtttcctctacttttaagttggaagatggccatgcgtgtgatgtaattgtgatcaatctatcaaataaaaaagaacgtcctctttttttgggcttatctgc

SEQ ID NO: 7988 - DNA, 282 bp, Glycine max
  Clone ID: PAT_MRT3847_107223C.1
cttgaacactctctttttgatattgatattaagagacacattggtagggcatacatacaaacggaaggtccttgttttaagtggaccccgtaaaaatttccaaaggaccttccaattaccaaattggggggaggggggaggaaccccccaagttagaaacctggaaaggtattgatattaaacatattattagggccacgcttaaaaaacttccagcatagagcaggggaatgaattacttaagccttctcccacttgaggggtttgaccacttcccatgtg

SEQ ID NO: 7989 - DNA, 223 bp, Glycine max
  Clone ID: PAT_MRT3847_107224C.1
cttaaatccaccttcgaaattctttcacaattgcctacccactaaacaataacaggaataaggttatcaatggcttcaaatattaaatatcattatgctcataaccacgccacacaggaactcgatgtcatctgtctcatgatcaggaataccatgcaccttaaagtcttagcacaacaccgcaagtactataacctctttaatacttaattcatatcataat

SEQ ID NO: 7990 - DNA, 306 bp, Glycine max
  Clone ID: PAT_MRT3847_107225C.1
agcgaacctccggctcatacttggaagctgtggtgatccttaccgtcatgctagcaaggctttcacccacacaacgctcacatgcctctatgggtttacgaaaagatgtcacttctcatcataaaagccgttcctcactcatcttctacaactcctccatgatctcatattccacttccccactggcgtactatcgcacctgcccccgtttccagcttccagaaactttaacccgaccccatctcatggatcatggactcgtactcacccgattccttgtgcagctttttcaaccttgtctttact

SEQ ID NO: 7991 - DNA, 249 bp, Glycine max
  Clone ID: PAT_MRT3847_107226C.1
gtggttttctgattccatttgggaaagttttgacttttcatggttcaatccctcctcagttgttgttgttgttgtagatgagtttgaggaaatctagttccctgtaagtgtctgtgaaattagtctcagaaggtttgtttttggggacctccctttttggctttgagacttgttctcagtttgtggataaagtgatttgtaaggtgtttctagttttcttcttctgaagggtaaaagatggataaagat

SEQ ID NO: 7992 - DNA, 432 bp, Glycine max
  Clone ID: PAT_MRT3847_107227C.1
tttccttccgaaatcatcgaaacccggaatcttttgcaccgctactggcgcacggaagcgctgcgcgacctgaacctggcggcgccggtctggcagcgtgttcgccctgctcggagacaacggagccgtcaagaccactgccatcaaggtgatcatgaatcttctccgatccaaagagtggttcacgcgaatccttgaagtgaactaacaccgcttggaggagagtgagcccgacttatctaatatgtgaattataaccagcaacatgaccattttgatgacttgatacaaaggtgttgcaaataactgccttgaaatagatgaaaaaaagaaacaaaaaaggaccctatgatgtcgagcgagcgaactaacatgaaccatcactctaatcaagccttttgttgtctaggctattgaaacaacatattatcc

SEQ ID NO: 7993 - DNA, 131 bp, Glycine max
  Clone ID: PAT_MRT3847_107228C.1
caggataggaatttccagctagacccacgcctacttctagatctttaacttatccttttatattatccagagcttaggctctcatgcatagcgacctcttacctcttctatctagtcacctatattcaatt

SEQ ID NO: 7994 - DNA, 663 bp, Glycine max
  Clone ID: PAT_MRT3847_107229C.1
cggacgggcgggattgcctctaccaaaatttgcattttccaaaataaatctatctatcacatactcatggcttccctatatcctccacccttttccattgcaaccaataataatacttccaccccagctgccaccggaacccatgtttctacctcttgttccatccccttaatcagaaatcacaattccaatgccccaaaagttgcgaagtctagagtgtcatgcaaagccacaaagggtggtgaccaagaaaaccaatcaataaaaaacatcaacaaagacacccaagaagaggcctttatgtttgacagaagaaatatcctcattggcctaggaggcttttatggtaccctaagcaatgattcattgtcccttgcagcacctatctcccctccagagataaccaaatgtggcccacctgaccttccctcaggagccaaacagaccaattgttgccctccaatttcctcaaacatcatagacttcacacttgcaatcaccccccaagttaaggtcagacccgctgcacatttggtagatgccacataccttcaaaattacaaagaagcccttcgtcgcatgaaagccctgcctcccaacgatccacgaagcttcacacaacaagctaacattcattgtgcttattggggatggggcatatca

SEQ ID NO: 7995 - DNA, 171 bp, Glycine max
  Clone ID: PAT_MRT3847_10722C.1
tgcaagacgacagagggggacgggaagaattcttgggacttacgagaaagagagaaaagtgtgtgtattgaaccattgtatcgatgtggccacttgtaaaatggtcttttgatcttatcataatgcttctttttacatatccatatcatatacgggccctttgccaatcct

SEQ ID NO: 7996 - DNA, 304 bp, Glycine max
  unsure (1)..(304): unsure at all n locations
  Clone ID: PAT_MRT3847_107230C.1
ggcgganngtcagcagctgcagcagtngcaggagttcgatatccccacgggccggnaggtctgcngggcaacacagcgccntgctaacgggtggccaactactgngaggataantacttgcaggccacagacaagcggaaggcgctggaagagacgatggctttcaccacccaggccctggccagtgtagcctatcaagtgggtaacctggcggggcacacgcttcgaatgctggatctacagggtgctgccctgcggcaggtggaagccaagatgagcacactgggccagatggtgaacatgc

SEQ ID NO: 7997 - DNA, 335 bp, Glycine max
  Clone ID: PAT_MRT3847_107231C.1
aaatataatattgaaaacgggggatctgcaccagagggaattacttacaatatatattaaaacacaacaacaattaatgagtacttgattgcatcatatctgccagatgtgtatattaccacaacatgtgttacaagctatacagtcccttaaggaccatttgatgttgaggtttttgattcagcaattgattatatataatataataattcaatttttgatttttaatttatcatgaaactgctgtcatcttataaattcacattctttttattatgcacttcattaggttttttgtagcatattcaaatattatattttttgattaacttttt

SEQ ID NO: 7998 - DNA, 703 bp, Glycine max
  Clone ID: PAT_MRT3847_107232C.1
tacggctgcgagaagacgacagaaggggaacaactgcaactactactactcatcattgtctcaaaaaccttctctctcaacaaaacctacaacaacaacaaaaaaagagaaatttttttagaacaatggaggcatcaaagatgaagtttttcttggttttggtgattgccatgttggcgatggtagcaactggggtttcagctgctgaggcacctgccccaggtccttcatccgatgccaccaccttctttgtacccactgctcttgcttctctctttgttcttgcatttggccttctcttctaattaattcttcaacaacctttggttatttgttacattacatatatggaattcactttgttcagaggtggttgtgttttgtgtttcgttcttctctttttttccaactcagcttgagtagtggttggtcactactctcttgtgagtagaagggtttatttttttgaggatgcattgaattggagatttggagtgagggaggaagagaagtagatgatacaatataggctctttttgttgggttttctgtattattatcattattcatattcttatgtaacaaattcattattattcctcattgtactttctttatatgggttgtgacaatgtaatcttattgtgatttgtttggttccctggtttgtctcgcatttatggttaagctttagcttcaattt

SEQ ID NO: 7999 - DNA, 333 bp, Glycine max
  Clone ID: PAT_MRT3847_107233C.1
ggaacactacaaatagaaaggtgacatttaataaaccaaagcaacacaacgcagcaaagtcctgaaactcgctgcgcttaacaaaaatgtaatcaggggttccgacaaacacaacacattaaaacacagataaataaaagcaattttgccaccgtcgatcaagaacccagttctgggaacaacagttgccaaatgaagggggaaactttaaacttttgcccaaaaacaaggttccttaaaaagaagaaccagagttcagaaaagaaacccacctttattggaacccacattccctggtgaaccaggccggacgattaattttttttttgggca

SEQ ID NO: 8000 - DNA, 1584 bp, Glycine max
  Clone ID: PAT_MRT3847_107234C.1
ccacgcgtccggtttattagattctgcaatggcccttcgttgttctcaaaactcttgtggtcttttggccttatttttgtctcttcttgtcctagtagtttctcttcaatgccaagtagcttcttctgctgtgctgttaagcatgaaacataagcacaaccatgtgaacaatcagagaccaatggtccaaaaaaccaaccaaagcatttgttcattgtttgagggtgcttgggtccgtgatgaaactgaaggataccctctttaccaatcttctagctgccctatcatagacccagaattcaattgccaaatgtacggtcgacccgattctgattacctcaaataccgttggaagcccgtcgattgtgaactcccaaggttcaatggggttgagtttctgctgaatatgaaaggcaaaaccgtgatgtttgtcggtgactcgttgggaaggaaccaatggcagtctttgatttgtatgctatcagctgcagcacctcaggcacaaacacatatggtcagaggggatccactttcaaccttcagatttttggactacggtgtgaccatttcattttacagggctccttatttggttgatattgatgtgagtccaaggaaagagaattttgaggctggaggaggttgatgggaatggtgacgcatggagaagtgcagatgtgctgtctttcaacactggacattggtgggatcatcaaggctctcttcaagggtgggattatatggaattaggaggcaaatactaccaagatatggatcgtttagcagctttggaaaggggtataaaaacatgggctaattgggtggactccaatattgatagtagcagaaccaaagtgttcttcctgggaatttctccttcacataccaacccaaatgaatggaattctggagtgacagcaggactgaccacaaagaactgctatggtgaaacttctccaattattagcactggcacagcataccctggtgtataccctgagcaaatgagggttgtggacatggttattagagaaatgagcaaccctgcttatcttcttgacatcacaatgctatcagcatttaggaaggatgcacatccctccatttatagtggtgatttgaatcctcaacaaagagctaaccctacctactcagctgattgcagccactggtgtcttcctggattgccagatacttggaatgaactattctatactgccttgttctattaaattttgtggtttgcttactaattaacacacttcctcttcactgtttttatgagtaatattaggtaatacatttattgagagggttgcatgatatagctgcaactgattcatatgtaaagatatgctaatgagatgaaatatttttttttattttaaaaaatttaggaaaggaggattaggatagtttccaattcaaggaatgagaagtctaccttaccaaatgtaacctatcaattatgaaagctctacttgggcaatccctagagattagaaaaggagttttctttgttctattaatgtaagcagacaattttagtatacatttccaaagtaaaagaaaaagtttaagtac

SEQ ID NO: 8001 - DNA, 504 bp, Glycine max
  Clone ID: PAT_MRT3847_107235C.1
tttgaaattcttaaaaccctaactggtccgaaccattggagccaccgtgcaatagttcctcctctcactctctccctcaacacaccattgattttggtttcagctttatttgacaaagatgcaggcttgtacaacgatgagttctttgcagcaacaacctatttggaccaaagggttaaatttccctgcaaaagggtatggcagcaataacgggtttctacctcaggtgaggttctgcaatattaagccatccaaagcttctcatgttgaagcaagtttagtcactgggaagccgtcatctgtgcctttctctgtgcctgaaattggaggcgatggaagtagcttcctggactatggcttgagtgaagctgatcctgatgttcgtgcaattattgacaaggaaaaggaccgacaatttaaaagtcttgagcttattgcttctgagaattttacatctagagcagtgatggaagcagttgggtcgtgcctcacaaacaagtactc

SEQ ID NO: 8002 - DNA, 2073 bp, Glycine max
  Clone ID: PAT_MRT3847_107236C.1
aaaggacctaagtcttgaagtggtctttcaattcaagtacaaagcttttcgaaccccaagaagtcgggccactcgttaccaatttgctttccattcatctacaatattaattactaaggaatatttgaaggatcaaggattggattggtttgcttccaattataaatgggataatcataaagctgctgctgcatttgccataaaatgttacaacatattattagcaacacacatcgaagcatgattattgtacaaaattttttaacagcgtcttagttttaagtattcattatgcgggtacacttagactccgggtattggatactgagtagtaagagcttcaactttcctacgcaactctgataccttctctcccaaaggaaattcagaagatgttacaaacttcaaaaaatcttggagcttcgttcctgagaccaaacttttggcttcaagacttatttgcacaccctcatgaatgaaatcagcaatgagtgaaaattctttctcaccaagtcctcttgttgtcattgctggtgccccaatgcgaatgcctcctggaactagggcactcttatcaccaggcactgaatttttgttgagggttatagaagccaagtcaagaattttctccacccgagcaccatcaagaccagatggccttagatcgacaagaaccaggtgattgtcactaccaccagaaaccagtttatatccatgctcaattaatcgcttagcaagagctctacagttagcaaccacctgattttgataatttttaaattctggagactgagcatacttcaagcaaactgctagtcctccaattgtgtggttatgaggacccccctgtagaccaggaaaaacagcattgttaatggcaggctccaaatcaaccccatgcacagtatctttcttgaagaatatcataccacctcttggacctcgtaaagacttgtgggttgtggtggtcacaatatcacaatactcaaagggattagaaagtacagatgcagcaacaagcccacttatatgagccatatccatcataagaaaagcacctacttcatctgcaatttttctcatacgagggtagtcaatgtcccgaggataagcactagcaccagcaacaatgagttttggacgaaacagagtagcagttttctccagcatatcataatcaataagacctgttgattcatcaagtcgataaggcatagattcaaaataaattgatgtggctgatacacgttttttgggtgtcatgaatccatgagacaaatgtcctccgtgaggcaagtccaaacccattatccgatcatgtggtttaagaactgcagtgtatactgcaaaattagcaggggaaccagataaagtttgaacattaacaccccatttgttttcatctacatgaaatgcagccagtgccctttgttgacataggatttcaagctcatcaatgtactcattgccaccatagtaccttttacccggcaatccttctgagtacttgtttgtgaggcacgacccaactgcttccatcactgctctagatgtaaaattctcagaagcaataagctcaagacttttaaattgtcggtccttttccttgtcaataattgcacgaacatcaggatcagcttcactcaagccatagtccaggaagctacttccgtcgcctccaatttcaggcacagagaaaggcacagatgacggcttcccagtgactaaacttgcttcaacatgagaagctttggatggcttaatattgcagaacctcacctgaggtagaaacccgttattgctgccatacccttttgcagggaaatttaaccctttggtccaaataggttgttgctgcaaagaactcatcgttgtacaagcctgcatctttgtcttcagaaaaatttcacgtcagcgttacaaccctcttccaaataaagctgaaaccaaaatcaatggtgtgttgagggagagagtgagaggaggaactattgcacggtggctccaatggttcggaccagttagggttttaagaatttcaaagttgagcggacgcgtgggcggacgcgtggg

SEQ ID NO: 8003 - DNA, 1630 bp, Glycine max
  Clone ID: PAT_MRT3847_107237C.1
gagtcgacgtggagcctaatcttgcgaatttggaattagcgagcggtggtaggttctagaaagtcctgggggctctaatcttgtaattttctgtgtcgcttcgtggttcattcttctcgttcttgtgatctgttctattgtgctttctaatcttgtaattttctgcgttgcttcgtggttaattcttcgtgttcttgtgatctttctgttggagtatttacaacactcctttgtaagtttaactaaagaggctaattaattttcaattggaccacagcagatggctgaggagggtcacagggttactctaaatgtttatgacttgagccaaggtcttgcacggcagctttcaatgtcctttttggggaaagctattgaaggcatatggcacacaggagttgttgtttatggtaatgagtattactttggtgggggtattcaacactctcctgctggatcaactccatatggaactccactaagagtggtagacttaggtgtgacacatgttcccaaggatgtctttgaaatgtatttgcaggaaatcagtccgcggtacctgcctgaaacatatagtctgcttactcataattgcaacaacttcagcaatgaggttgctcaatttttggttggtgcgtccattcctgaatatattctccagctgcccaatgaagtcatgagcagcccaatgggagctcttatattgcctatgatacagaatcttgagacaacactgaaatctggtggagttcctcaagtaccacaattcaagcctgcaactactctgaatgtttcagctaacacccaaaagaactcaagtacctccaactcatccagtgagaatggggtgagcagagaggtgaacaaggaagtgaagggcaaagatgaaaactctaaggcagcaccttctgcaaacacaacagggcaaccacaaaagccatcactaaatggggtcacagcagaccctcttggagatgcacgcaacaaggttcaagatgagattctcaaagagtttgctgcaattatggcaagtgggacaatgcgtgctagtgaggctgcagctctagccactaaaagagtcatgcaaagatacggccatactactgccgtgtctcagaattagctacttttcttcatcagaaaacgatttgtgggtctaaaacccctacttactatcactgcactaattgcagtgtttcatatcattggttattatttgaaccggggaaaacatgatcaacttgtaacatctattctatgaggagactactttattggtaatgtgtatgtcggattaagtggattcgagtgaaatgttgatcaggggagtcatttcgacatattttctggaatataactcttggattataagtttttaagaaggctcttttcatgttgcagaacaaaagtataaaaagtgtaatgaatggaagaaccaattcagctttggataagatatccaaaacttctggaacaaaaattgagtcgaaaattgtttagcttatgcataggttaaaaagcatagaagagatctgaggaatgagaaatctaataaacgacgacacgggatcgcttctatggcgtcacctagtgactacatactgactggctttttgcaacagggacattg

SEQ ID NO: 8004 - DNA, 171 bp, Glycine max
  Clone ID: PAT_MRT3847_107238C.1
tccggttttccgagctacgacccacgcgtacgcgtacgtgcaagccttatccaacacatttagcgacatttcttcttcatacctcatttacttattgaggaggggatttctaagcgaggcatgcaccgtcctatggttgatgaatcatgaccctatcatcagaacatgaat

SEQ ID NO: 8005 - DNA, 599 bp, Glycine max
  Clone ID: PAT_MRT3847_107239C.1
ttcagctaacccccaaaagaactcaagtacctcccaactcatccagtgagaatggggtgagcagagaggtgaacggctaagggaagggcaaagatgaaaactctaaggcagcaccttctgcaaacacaacagggcaaccacaaaagccatcactaaatggggtcacagcagaccctcttggagatgcacgcaacaaggttcaagatgagattctcaaagagtttgctgcaattatggcaagtgggacaatgcgtgctagtgaggctgcagctctagccactaaaagagtcatgcaaagatacggccatactactgctgtgtctcagaattagctacttttcttcatcagaaaacgatttgtgggtctaaaacctctacttactatcactgcaataattgcggtgtttcatatcattggttattatttgaaccgggaaaaacatgatcaacttgtagcacctattctatgagtttacttaatggtttcaagttaatgtgcatgtcggatgaaatgctgattaagggaatcatttcaccacattttctgaatataactattggattataatgtttttaagcaggctcttttcatgtaaaaa

SEQ ID NO: 8006 - DNA, 155 bp, Glycine max
  unsure (1)..(155): unsure at all n locations
  Clone ID: PAT_MRT3847_10723C.1
cttttgttgaaccatacacaagtctctgnnaaaattataacacttagagggatttatggacctaagaaatgtaagttgatttggttcaaaaactacacaacagtttaccnngaagattgtgtttnttatttggggattttttccccccaacaatt

SEQ ID NO: 8007 - DNA, 598 bp, Glycine max
  unsure (1)..(598): unsure at all n locations
  Clone ID: PAT_MRT3847_107240C.1
cggcccgaggaaccgtgttctctaatcttgtaattttctgtgtcgcttcgtggttcattcttctcgttcttgtgatctgttctattttggagtacttacaacactcctttgcaagtttaattaattaaagaggctaatcaattttcaattggactgcagcagatggctgaggagggttgcagggttactctaaatgtttatgacttgagccaaggactagcacggcagctttcaatgtcctttttggggaaagctattgaaggcatatggcacacaggagttgtggtttatggtaatgagtattactttggtggtggcatacaacattctcctgctggattaacaccatatggaactccacttagagtggtagacttaggtgtgacacatgttcccaaggatgttttcgaaatgtatttacaggaaatcagtccgcgatacctgcctgaaacatatagtctgcttactcacaattgcaacaacttcagcaatgaggttgctcaatttttggttggtgcgtccattcctgaatatattctccagctccccaatgaggtgatgagcagcccaatgggagcccttatattgnctatgatac

SEQ ID NO: 8008 - DNA, 290 bp, Glycine max
  Clone ID: PAT_MRT3847_107241C.1
acggctgcgagaagacgacagaagggtccacaactgctacacagtcagacttgcattccacagatttatagactcggtcccaagtataattgagaccatgctcaattgcaaggagtttagccagcaaggggtcgccctcattcctgtggcaatagaaaccacctagccaacatctcacttggttacatatcacaccaccaaaacccataaccatggcattcatcttatagctaccattcacgttgactttgacaaaaagatgaaaagggggggccaactagggctaacta

SEQ ID NO: 8009 - DNA, 249 bp, Glycine max
  Clone ID: PAT_MRT3847_107242C.1
aacgattatataagattactagaatctttaacaatataattaggatatgtggaggctttggccattgagatagagagcactggcggatggggcaattgaatcttttacaaatattttaggatcctattggagcaattatatttaaaggggaaactgctaattatacttacttgcaaaagagcctgactatcaacaggagtttatggtacatggatattataccattatgatcggattaaaaaaatatgg

SEQ ID NO: 8010 - DNA, 767 bp, Glycine max
  Clone ID: PAT_MRT3847_107243C.1
attgtatttgctataccttgagctattatggccaagtaaattccaggtaattgtccagctccatgacctctccaacacggggatgaaactcattgtgcagcgaaacaactagcttccataatactgaccaaaataaagaatctttgatttataacagaaaggcaactgcagaggtatattgcatgcatagaaatccatgatgtatatctgtgaagattcggattgcacaacaattatgagacaagtagcgccagaaaatatttttgacaaaatcgatgttggggcaaatcagctcaggcatgatattggttccttatatattaaaacagcaccagcagccaatcctagaccaagtgaagtgatttcagtaattggcaaacatatccatcactaggcagatgaaaagttgaatttgctctgttcaatagaggctcgtaatgagttttcctttcagtacttacagagcatccctcccaagagtcatttcgtaactgtaaatggacagggaaatattctgaaatcagtaaatcacttaatagagattagtaaacaatttattgatctttccaaattgttctagcaaggacacaataaattcattgacagtgtcagtcagaagcccaatggatatacctattgaacaagtttcttgcaccaatgaagaattcggaacatttgtgctccaacaacattcctaaatgatctcttgcttgctttggcatattcaagatcaagtgtccgatatgcaagagcaaacagatacattg

SEQ ID NO: 8011 - DNA, 385 bp, Glycine max
  Clone ID: PAT_MRT3847_107244C.1
agttgtcaaccccagcgagcagacgtaactcggggccattttggggcagttcccgcgcaggtaccaaaagaaagctgaaaaggtctcgatgaaggggacactgaggaaacggaagctcatgaaagagaggaaaaggctgaggaggccgcaagatgaacccagacatgagccacactgagtaaaccaccaccgagaccttggaacatgggagaggcacctgaaaaggctaaattagagggagctaaaaaggaagagacccgtgagaaccaaggctgcaaaggtgaaccaaactgctactgcaacccaagcaccagcaagagaagtcaagggagagcaagcttcaagcacagatagccccaaacaaggaataatgaaaaaacgaaaa

SEQ ID NO: 8012 - DNA, 379 bp, Glycine max
  Clone ID: PAT_MRT3847_107245C.1
ctctaccagtcactctccaaaatgcaaataatcagtcttcgcaaataggtgatcaacttcaaaagggtattatacttgagctctcatcatgagtgcttccgtcgcacacgtgcagcctcaggacgccttgaggagcttgaaactgacgaagacactgtctcacagttcagctggaaaggctccgacatcagggtaagcagctacgacctcgtctacgactaactcaatcaaggactcatcgacctccgcaagcttagtgactgtgcgtcatcaaccgtatgtatcatcaccaaaatgtacaagtgtgatgcttccagcaatgatcgtcatgttgcaaagtgacacacggaggtactcgatgcttctgataataatacac

SEQ ID NO: 8013 - DNA, 436 bp, Glycine max
  Clone ID: PAT_MRT3847_107246C.1
ccacgcgtccgggacacaagggctagaaatagaacgaaagcgggcgaccagaagacagaaaaacaaacacgaaagagccggcatgggagccttatgtatagatgaggttagactggttgtgcagggtaatagcactaggctattcggtctgcacgcactcagcttgtgatcgatgaccacgataggctcgtgacctgattggagattttttcggtatactggtacagacggtggaggaaaacccccaactattaattgagagagatgaaagcctggataagtgttgacccagtagaactaaagaaactttcgccaagtttcaaggagaatggcggggcgggtgcagttggaaatgctcttagtatagccgatggagctgctgaattaattttatttagtgggcataaagctcaatagcttggccttcatgttcttg

SEQ ID NO: 8014 - DNA, 576 bp, Glycine max
  Clone ID: PAT_MRT3847_107247C.1
cttactatcaaatttaaactcatattttattagttatcatatttaagacttcagtgatgtactattagtatcatatggctcaccgtggaaagcccatgattaagctaatgtataggagaaggaagaataggtgagatgcacctaatcagaactagggagggagaataggcaactaactgcctagctggctgtggagtgtggcatgacaaatgtgatgtagttgggagagaagtgtagcgagtgaaatgtgattgaggaagataggcagaaattgggttgaactcttgatctgggagactgagcactctcaaactgctcagatttgttttcctttcattactatagttctaaacattgttttaggctctgataagttgatctgagtaaattgcactcccctccctcgagaaattataaatgggtgcttaaaacttcattttgtcttgtgaagtctcaaacaataatatgatgtctcctttcagcaatgagtctgttgtctgtataaaatttttgaatatagcatgtttttgtctactgtcaattttttttggaaacaatgttgaaaagtctattcaa

SEQ ID NO: 8015 - DNA, 275 bp, Glycine max
  Clone ID: PAT_MRT3847_107248C.1
atgtgttttatgtattgcacagctgcctgcggagggctttatccacttacaatatcagtggtgttgtcgcatatatgagtggtgctagtagttggcttggtaatgaatttcatgaagccttgcagcacatacctagagagccaaaccttggtgcaaagtggttcttcggtgtcgttggtgaccaaaagcccgggactgaatttgtaacagatttccatcttatggttgttctcaacaaatttgttctgaacctgagacatgtaattgatgaacaa

SEQ ID NO: 8016 - DNA, 1039 bp, Glycine max
  Clone ID: PAT_MRT3847_107249C.1
ttttcataaaagtattttccaaactttaatccaagcataaccttaataattcgtgccaattcaattgtagtaacttacacacataaagttaaggtagaccataggcgaagagtttatttcctacaaaaaccaagagtgcaacaataatttacacttgaaatccatagaaccttcctctatagcacggtttaataatagccagttcaaatgtctacaaaacaaccgtacttttatgctctcctatgtcaaggctgtcaaacattccatggcagcctacacggatacattcaattgcttcctcatatggcttatttgaaatgacagattatgcatataactcattgttgcatataataagcaaaaagcaattgtcaagaaaagaatttcattcactgcagaagccaccactagtctcttgtttcttttgtacactaggcctctaaacagcacttcacctgtgaggaacagacgtatgctgcatagggtacgtcacagggcccatatttaccggtgcaccaggtacaactgcaccgggtactggggctcggaccccatatgccatgtgtgcaggtgcaggaaggttcactgtggtgccaacagcagatactaagggtcctcctataggttgtccaatggttggagctgcataaattccaacacctggcaccccagttgaggccggggtggccgctttggctgctttggcagtagaatttccagcagaaccgtttgtttgaccggttattggcccttgaggtgctgaaatatctccattgttaacactggtgatatcatgtatgctggatcgccttctatctttgttcattgagttcaaacgaatgaagtatttttgggcatggcttgctacttgtgtaggagttcgtgtcaccacaaagttccttgatatgcttcgccagtctccttttccatacttatccaagcccagaagaaataacctgtgttcatcctcagtccaagcaatcccctttcgtcgttcctgatctgatcttgaagccttagttccatgattagactcacc

SEQ ID NO: 8017 - DNA, 372 bp, Glycine max
  Clone ID: PAT_MRT3847_10724C.1
cttggcttcttaataacaaattacctatcctaatacaaaccaatcccacgccaaccacaccactcacacgaaacaccactgaactacaagggggaacaaccccacagaacccaaacaaaaaacccaacaaaacaaagcacacaaaaaagggaaacacccaaacaacaaaaaaaaaaaaaaaagaccccccaaaacacggaaagcgcaagacaccccgcaggggggcccagggcaaaccccaaagcggataccaacccccccccaaaagggggccccgctcaccccccccccaaaggggggcaacccaaaacgaaggagggccgccccggaaggaacccacccgaggggggaaccccacacaccaaggggccc

SEQ ID NO: 8018 - DNA, 334 bp, Glycine max
  Clone ID: PAT_MRT3847_107250C.1
tacggcagcgaaagggacaaagaaaggggttctaatgtgtgattgtttgttgttgtaactcgttcttcatcttttgttgttctgtgtttgtgtttgtcttttcactcacctgaaaatgtcttgctgcggtggtaactgtagttgctgaagctcatggaagtgcggcaacggctgcagaagttgcaaaatgtagccagagatgagctacactgagtcagacatcatcgagactttggtcatgggagtggcacctgttaaagcacaatttgagggtgctgaaatgggtgtgctcgctgacaatgatcggtgcaaatgttgatcacactgctcctgc

SEQ ID NO: 8019 - DNA, 528 bp, Glycine max
  Clone ID: PAT_MRT3847_107251C.1
gcaatggacgcccacatcaaagaaggggacgtgttcttcattccaaggtactttgccttctgccaaatagcatcaaggggtgaaccacttgagttctttggcttcaccacctcggctcaaaagaacaggccacaatttctggttggtgccacgtcactcatgaggaccatggtggggcccgagcttgcggctgcatttggtgtgagcgaggagaccatgaatcgcgtggctagggcacaacatgaagctgtgattctaccaactccatgggctgcacatgcacatgatcacaaggtcaaggaggaagtggtggtggatatttttcaaaagcttgcaaggaatgagattatgggcttttgattttttgctaaatggttaaggggaacattttgatagtgctagtagaataagggtggaacattcgggctttttttttttttctcttaatgttttgaggttttgttttccttttgttgaggttgataattgtgatcattattcacgagttgtgctgattagtgaaagaaa

SEQ ID NO: 8020 - DNA, 375 bp, Glycine max
  Clone ID: PAT_MRT3847_107252C.1
acaaaaaccttgcataaatgggaaaaataaaactgaatttcaaaataaccaactttagctgaaaaaaaaaaaatcttttaccactaattttctggtttttttaaaaaaattctccccaaataaaggggggacccaagaaaaaaaaataataacaatgacccttcactttggaacgccccaacccaatttacccccgtaatcctatggggggaaaaacatactgggccaatcccacgggttggaagccccttataacaaggggggattgggtcaatttgaattggcctaacctacaaacacctacgttccggaatttccctttgaaaacccaatgggggccccccggacccggatcatttgccattaaaacacccc

SEQ ID NO: 8021 - DNA, 377 bp, Glycine max
  Clone ID: PAT_MRT3847_107253C.1
ggggaaaagaaaagggaaaaatttttgtttttttaaagggaaggggcccctttaaaaaaaaaaaggaattaatttttggaaccccctgggggggattctttggccctatgcctttccccaaaaaaaaagagtaaactactctttccctttgggccttaataatgcccatttttttggccttttccacttttttttttccccccaaaaaatgggtttttcccgctttttgcccccccccttaaaataaaaaagtttttgacgggtcaactcaggcccagttggtgttggtgttggtgataaggaccaatgttttttaccaaacccaaaacctgttgcattgggggcctttttgaagggctttcagcattacacaaaaa

SEQ ID NO: 8022 - DNA, 293 bp, Glycine max
  Clone ID: PAT_MRT3847_107254C.1
cccacgcgtccgcccacacatatcaaagactcttccacatcaacatttatattcacagcataggttgtatttatgactgaaacatcccataaccacctcactgctaaaatcattcaactcatttccctttacatgcttcaacacagtttgtatttgctcattatcatcctggaacacccatctattacaacaacagctacaatctaaatgcgatcgtcaacacataccaacttccattacacaactatactagatgtatccagacccaataccacatatcctgcataatattc

SEQ ID NO: 8023 - DNA, 243 bp, Glycine max
  unsure (1)..(243): unsure at all n locations
  Clone ID: PAT_MRT3847_107255C.1
ggcattttgtntgtnaagtccnctagagcanttgtcttgntttgatagggncttctgtagnannnttctagtanttttgcngttnttttgtntactataagggaagctgggttgggtgggtttgtggnttcnagaggaagttgttnnntgggnaagggtgttttggggntaagtgtgtgtatacgatgtctttaaccnaatcttggaatactttttggtccttctgnnnttcttnaantgtcc

SEQ ID NO: 8024 - DNA, 388 bp, Glycine max
  Clone ID: PAT_MRT3847_107256C.1
acgcaacgcatatattgcaaatagggtattagcttatattaatcaacatctacaatagatttcgcagcttataatacagaagcagatatcaacacctaaaatactcatccaacaactttagattcttcttctcaattggcatctacacttgattccatcaacaaagaaatctaataactacattctcgtaaactcaaacccatacttcaccccctcaagcacaattttgtcttctggtacactctcctaacacttagagttctaaatcaatcatcatacgatgacaacatatagaaaattgttcaatttagtacggttgaatgattttggttcttctactgccatctttctcttcccgcttctttacctattccaacatattttcacc

SEQ ID NO: 8025 - DNA, 465 bp, Glycine max
  Clone ID: PAT_MRT3847_107257C.1
ttgtttttttttttgctttaggggaacaccaaaaaaaaaaccattacctattccagtaagcttaattgcatcataaatctacaggaccaaaaaacagcaaactgaacaaatcttaaaacaaaccaccaatttaggggcataatactaacgggggaacatctattttctttacttgcacactactataataaacacccattcacagaatatatgtcacttacacacgctgtgaggagacactctttattaacaggcttgtttaatgaaaaaattgctcctgtacatgggcaaagcttgtaaggttgacaccgtgtatccctaatccatggggattttgtcttttacaatctttcctaaccagatgattaccttttgttgctcctcatttaaaatattatgagatggctcaacaaaaatttcacattgaatgcacctgactgaacccactgaaacacgacccttgaa

SEQ ID NO: 8026 - DNA, 284 bp, Glycine max
  Clone ID: PAT_MRT3847_107258C.1
ttttagtattaaaacttttctttcaagaataacttttccataataggaataaaaaccggacaagtggacacgtatacctggggggcccaagcccttttgcagaacccaccccctacctagtccttgttggcaaaaaacaaggccggattaaaaaacttattggggccagcgccaaatccgaaaaagggtctgggctcccaggataatcgcaataaacacccaggcgggggacccccctttttgggggccggaatggacaaaaaggctaattttttgtccaaaac

SEQ ID NO: 8027 - DNA, 241 bp, Glycine max
  Clone ID: PAT_MRT3847_107259C.1
gatcacagtcagcaagatatctagatgtaatcattatgactatgctctccagatcatgcttccatacatgactacattaaatgggcacacccgataaggctcatatcaacattcggggtgcttagacgtgccaagcatagctagtctgccagccactgggaaatagatctcactggccaggcaggactcatcaagagcatcgtcgataggttagcagtagaaggcgctgcattcagcaagg

SEQ ID NO: 8028 - DNA, 466 bp, Glycine max
  Clone ID: PAT_MRT3847_10725C.1
tgcgatcccattttcttccgttttgaaacatcggttatccttaagctccttaggggctgaacacttgctattcacataatggacactcaagcgatagtaaacaacgtgaatccccaagtgtacaacaaattcactgagaaacgagccatttatgagcctgccaaagagaagcttaccgactacagacttcaccgtgtgaacgaatccgacgacgatcacttagtctacgacggcgtaaaacccagggacctagttgacataaccttccgcaacaacatcgagattggagaaatgttcctagccgtaattcacactcgagaaacaaccgagctgaaaactcgggttgcacagcggcagagttacaggtctacttatgagaatcgcacagcatgctactcctaacatgaacagaaggaaacaagcttgctcaaggcgcggatgccaagctcatactaccccacgccac

SEQ ID NO: 8029 - DNA, 259 bp, Glycine max
  Clone ID: PAT_MRT3847_107260C.1
tgagtggtgagaaggaaggtctccttcagctaccttctgacaaggctcttttgtctgaccctgtattccgccctctcgttgataaatatgcagcggacgaagatgccttctttcctgattacgctgaggctcaccaaaagctttccgagcttgggtttgctgctgcctaagcaacgtttagagaaatattatgggcaccatgcctcttcaacaatcccctaaacgttgcttaggcatggtgcccataatatttctctaa

SEQ ID NO: 8030 - DNA, 271 bp, Glycine max
  Clone ID: PAT_MRT3847_107261C.1
tacggctgcgagaagacgacagaagggggatcttcacccccaacttttcgcaagattactttagaagcagaaaaaagtgcatgaccccatttccccttacgcaagactgagctgtgaaaatgtgtactatgatcggttagctaagttggttatctagctggtaaagacctccaattttgagcactccacctcccgagttctgccacctactatataaccacctcaaactacttacacatttcgctcactctcttaataattgaaagctatg

SEQ ID NO: 8031 - DNA, 369 bp, Glycine max
  unsure (1)..(369): unsure at all n locations
  Clone ID: PAT_MRT3847_107262C.1
ggaagnnggcacgaggacaggagagcactggacacacaaaaggaaaagccaccccacattatgccttctaacaccacggacacaacagagctttgggagaacgaaaaggagggaccagggccaccccacaacccacaaaagaaggggaagccacaaaacggggcctgccaaacaagaaacaaacggccaacggggccgcgcagccgtgacactcatagccaggcacagaaaatcagccagcgactcgagcaaagcagagagacactgagagaggaggggacccaccgaggcggtagatgaccaacaaggtgcagggcgtgaacaagaaaaacaataacaaaaccacacacacaggataccgaagaaaaa

SEQ ID NO: 8032 - DNA, 224 bp, Glycine max
  unsure (1)..(224): unsure at all n locations
  Clone ID: PAT_MRT3847_107263C.1
ccaaacccncccnnccggaacgtattattttttgtgctgaccagacccgcctccacatgccaaaagcagcacatgctagctctattcctcctccttgcagacgcgatttcacaggtgatgtgtcgcaagctgcacgagacatcgatgcgagaaagacacgaacaatggatgaccgaatatcggaaaagtgtataaggatgctgcagagaacgacaaacgttttc

SEQ ID NO: 8033 - DNA, 513 bp, Glycine max
  unsure (1)..(513): unsure at all n locations
  Clone ID: PAT_MRT3847_107264C.1
attgatacactccttttcattgtgtccatttgcgtagttttttctagctgagtttattaatgagacaaaggaaattaagcgagaagtgaatgataactaagaaggaagcataattgatatgattatattaataaatttttggaatgaaattacagaaatgcaatatcacggaggaatgctagttgtataaatattattccctttttttatttttctacaatataataaaatataaacattcatttaaattttttttaaaattatattatgtctcttaccacattgctacttgtcacgtttttaggtaaatctctcaatctcaaggtgtatttgatgattgaactgtatctacataacataattcttaatttaaacacttatttgatgattgaaaacatttttagttcggtgaaggtgcttgttctgcgagaaagactctaattataattaggttgaatgatttattgaatttctatagttataaaaattctctcttcttctcaaannanaaaa

SEQ ID NO: 8034 - DNA, 379 bp, Glycine max
  Clone ID: PAT_MRT3847_107265C.1
actgtacgactccaccgctttccgtcttataatcgggtggagacacgcgaggggtgggggctgaatctaccttgggacataatagctagaaggatgactacaactgctgagagatgggtaggcacacaacattaggtaggttacggagagtgttgggggtattcaaaaatgtgcgccttccatgatgcccttatattaataaattctttttaaggttgcacaataaatggttgaggaatggtatgattgtgttaatgaagaggatttctttgaagaagtttgtttaagggcagcacttaatggtgttgagggaatgcactatatggaaagaattccatctgccacatctgaggggttttcctcatgtgcttttacgcac

SEQ ID NO: 8035 - DNA, 371 bp, Glycine max
  Clone ID: PAT_MRT3847_107266C.1
agagctgctaacttaggaaagcaatcatcagatggtctgtatcaagacttatctaaaacgaccatagcaactagctaaactacacactgatgatgacactgatcattaggtccagatattgtaacataattttggtccctccgagccgacgtgcatgccctatatggatgccctgactttttctcacaacagttttactcgtatggggtgctctaggtcaataccacccccatgtgactgaccttttctacctctgaataacttcattcgaaacctagttgcggtggactagtacactaagactgggcaattccgatactatcggatccgctaataacggcgcactatccttatgaggtatttactgcctg

SEQ ID NO: 8036 - DNA, 1065 bp, Glycine max
  Clone ID: PAT_MRT3847_107267C.1
atgccaccgtccaccatcgagggagcttcgtcaccatccatcgtcgaggatctgcaaatcatggttaggactagaggcctaggccgtgctttaggtacggttagtggtagaggtctggggagaggtgatcatgatgattctgacgattctccccagcgccgaaggcctaccgcatccgcacgtaggcaacgagtacctgtgactgttacggatgaggctgacgtacctgcgactgagattgacgtacctggtcctgacttagcctcgactgaggctggtctagatgcggatgagccaatggtagaagctgacattcaggacactggtgcaaacactgctgcagaggatgatgtagacactggtgcacaggctgctgaggatgagcctgagggatttctgggtggtccgagcgacccatctgtactgaccgagtatgcggatcacgtcgcaggcagcgtatggacaggagaggagcgtcctgagttgaagttatcctctcacgggaggaagatgcatagtttaggcaggcctgtccctaccattgaagggctagttgctgggacaggactaagtcctctgattgcgtgctcgatagacactggcgatcgaggacttttgttgtcgtttgtcgagcagtggcaccgggagacttctagtttccatctccctatgggagaggtgatgatcatgctgggcaacgtcgcgtctcttctgcatctgcccatggttggcgacttgcatgcctttcagcccgtgcacatggatgatgttgtacagatgttggcccttcatgacctcaatcagactaagaggtacgcttggggagtagctgcgttggtgcatatgtacgaccacctgaatgatgcttctatcagcaccagccgacagcttggtggttacatcatgctgttgcagtgctggatatacgagcactttccctcagtcgcagagtccactgctgatccggactacgacgaggattcactgtgtgccggtagatggattgctatgaagaagaccgtgaagagcatacgtacaccgacgtacagggaacgcctagattga

SEQ ID NO: 8037 - DNA, 322 bp, Glycine max
  Clone ID: PAT_MRT3847_107268C.1
ctctaaattttgccatactgactagtttctccacataactcactacagatagatcagagccgcatcaactaatactgtgtaccattccatcttatcttcctttattaaagacaacaaacatgcagccaaacacttctagccactgctattgattgcatatttgtctctgtttctttcacttaaactcctataacacatatctcttgattttctaactataccaaataatttatcctttcatacttcatatgctcttgctacctcttttactcataacgcttcacataacctctaccatctgaatattcatcaacttcattaa

SEQ ID NO: 8038 - DNA, 140 bp, Glycine max
  Clone ID: PAT_MRT3847_107269C.1
cttcaaagaaatctatttcaaatagaagtgaagattgggctattcatcatgaaggtgatgatcaaagccctaagattggaattttgaagaaaaggaaagcctcctcttggactgactccaagaaggcattgatcatataa

SEQ ID NO: 8039 - DNA, 448 bp, Glycine max
  Clone ID: PAT_MRT3847_10726C.1
agctgctaccactgtgcaccgtgcctgcgcctgcctgggagcaccatatactgctcccaagtccatggctggattaccacccagagagaccaacattgacattacctacatcgttactaccagcggaagatcgcaatgcttgcccgtgtggccaacagtgcctatgaacaagtcagaaactctttcctacctgccttactttgctgatgctcaattggcaaaggaagaatactgcgtgcttaagaaaggatggatatcttgcttgaaattccagatgaacctcagaagagtctaccgtgagcacatcgagtcatcatgattctacgatggactctactggaccatgtggaagctgcctatgtaaggcatgcctgatagctctcaggagtagaatggtgctgcagaacttaacactgcattgccctcagccttaggtcgaatcctcggt

SEQ ID NO: 8040 - DNA, 470 bp, Glycine max
  Clone ID: PAT_MRT3847_107270C.1
tcggttatgctcgtgaaatgcaagctttttataggcaggactatgaaaagtatattcaagcgttagataaggctgctgataaggaccgtgcacagctcacaaaagcatatcaaactgctgctgttttatttgaggtattgaaggcagttaatcgaatagaagatattccagtatctgatgagattatggaagctcatattaaggttgaggaacagaagcaattatatgccccttataatattttgccactcgatcccaatagtggaaaagaggctataatgagatatcatgagattcaagcttctgtttctgcactccgaaataccaggggtttgccttggtcaaaggaacatggcaacaaagtaaatgaagacattctggactggcttcagctgatgtttggtttccagatagacaatgtggaaaatcaaagagagcacttgattcttttgctcgcgaatgtacatata

SEQ ID NO: 8041 - DNA, 412 bp, Glycine max
  Clone ID: PAT_MRT3847_107271C.1
gtctttgagatcaacaccctacagaactatctctattttctctttattatatttttagacctacctggtccatgctatgaattaacatacatcaatgccagcatgaactctatccagggacacatactgacatatacaaacgcatatcggcggatgagaatgaccgtgtagtgcagtcatgaatcacaatacaagagaccctagctggaaacaacagcagatgtgaactcactgtctagagcatggagcgaatgactgctcaacagcgagaaagactggcttactccgcaacgacgctcaacataagcctctttgcctgctgcgagcacagacacgtggcgaccgcattctatgtacagcgaatcataccttactaattatactgcgctcgctgtaaaacacgactctcaaa

SEQ ID NO: 8042 - DNA, 851 bp, Glycine max
  Clone ID: PAT_MRT3847_107272C.1
gatgaagcagagctattttccaagtctgcgcagcatgcttataaacaatttcgagataaggcagctttatccagatctatgactgtagacaagatggaagaggttgcacaaggaagggtttggactggtaaggacgcagcttctcacggtttggttgatgctattggtggcctttctcgagctgttgccatcgcaaaagtccgggccaatataccgctggacagacaggttactcgtgttggagctctcgagaccgagcccttctctacccgagattttacgtggtctaggtaattctctcgttggagtagacagaactttcaatgaattactacaggacttgacattttcccatgaagtccaagcacgaatggacggaatcatgtttgagaaattggaaggatatccatatgccaaccccattttggcattgataaaagattatcttagttccctgtagttatttataaacttttccttctatttgtgtttttcattgtataatgatgcatacaatccactgaaaagcacatacccatgcgtgaatatctcatcctgcttcctcttgcacaatgggaactatatcgtgtgtataattttggagaaaatttgattccaaaaaaaaataaagatatgttaatttactctttataaacttttccttctatttttgtttttcattgtataataacgcatgcaataatgatgcatacaatccccatgtgtgcacatacccttccactaccttctgctcaatggtaactatgttgtgtgggtaatttgtgataaatataattttggagaaaatttccttcccaaaaaaaatgaagatatgttaatttactcaaaaa

SEQ ID NO: 8043 - DNA, 447 bp, Glycine max
  Clone ID: PAT_MRT3847_107273C.1
gtcaagcacagtcactgccacgaccaatgaagcaacctccaacgcaacctcatcaccagccaccactacacatgctgaatctaacagccctctgggaacaatggtgtcatctccatccggggtgttgcagaaaacccttatttcattgtctgatagcagtaacaatagcagccctacggttgcatcatcaagggccaattctgagatggccttcctcaggtttcaataaaattaatgtaaattaattactagcattttctgctttagttcaacatttcaaatgggatgatactgttacttttgtgtaatcttttgatttagctaactgtgctgtccatttggatagttataggcccctatggcctattgttgaggacggtatgttattatactaaaaaacctctggtgaagtgaacaacctgtgttttctgtttatgtaatgaaaaa

SEQ ID NO: 8044 - DNA, 1995 bp, Glycine max
  Clone ID: PAT_MRT3847_107274C.1
ggctcgagcggctcgagctcgagccgcttcaatttcatctttcttcacccgaaaatggaaaaggagcgacccgcatcatggagacccgacccgtttcacgcacggccgccgccgcgcgaccccatggagttcctgtcccggtcatggagcgcctccgccctcgaagtttccaaggcactgtcgtctcaacagcttccaccttcatccaacaacaacgttgtttgttatgttaataattctaatgcgtctataatactcgaagacatagctggtgaagtggaagagtctgctgcaactgtttctggcaaccctttctccttcgcatcctctgaaacctctcagatgatcatggaccgcatctttacttttgagtttggtcagcaggaggtatcaccacgcacctcaggaagactctctcacagcagtggccctcttaatggctccctaacagatagccctccggtttctccttctgaaattgacgatttcaagtataaccgttccaacaacaaccacaacactgtcaacatgatcaccggcttgaatggtcaatactggggtgccggcggcgcggcgacgaccgccggtggtggcaagacggtggggaggtggctgaaggacaggaaggagaattagaaggaggaaactagggcccacaatgctcagctccacgtagcggtttcggttgccggggtcgcattgtagatggccgccatcgccgccgccacggctgcctcgccatgctccgtcaagcactttacttggcggaaaccgacatggcggtggcgtcagcagcgacgctggtggcggcccagtgtgtggaggctgccgaggccatgggggccgagcgcgaccacctggcctcggtggtcagctccgccgtgaatgtgaggtccgccggtgacatcacgacgttgacggcagctgcggccacagctttacgtggggctgccacgttgaaagcaagggtccttaaggaggtttggaacatagcagctgtgattcctgtggagaagaatttgggcagtggcagtggtggcggcgataatggtaatggtagcaatggtagctctaatagtagcttcagtggtgaaattgtaccagaagaaaatttcttggggatttgtagcagagaattgctagccagaggttgtgaacttctcaagcgcacacgcactggtgaactgcattggaaaattgtatctgtttacataaacaggatgaatcaggttatggtgaagatgaagagcaggcacgttgctgggaccatcacaaaaaagaaaaagaatgtggtgcttggagtgatcaaagatatgcctgcttggcctggacgccacttgcttgaaggtggtgagaaccgtcgctactttggtttgaaaacagtgatgcgtggtgttgtggaatttgagtgcagaaatcaaagagagtatgatgtgtggactcaaggtgtttcaaggcttctatctattgctgcagaaaagaacaacaaaaacagaatatgagggagaggaaattttggcaaggggggagtaggaggatcaatcaatgtggtattagtaaagcattatacttgatgttttgtacattgtaaaaaggttaaaaaactaaaggcaaagttaatgccaaatggggtcatcacactttactcttggggatctggatgatttttttttttaataggaaagctaaatatttgaactgaagtgagcccaatgtgaagcaattggctttttgttcctccattgttctggaaagaaaatgggtatgggggtatcttggacttggggggagggttagtcaaaaagaagaggaaagaatcatcatattggaggggaagtataatgtttaaggacaagtatacccttgtttgtacatttgggtttggactttaaaaaaaagtggtcaaaagtctagattttcatgtgattattatttacaataaaaaatttctgggcgtagtctcttggattggatctatggaaattctttccaact

SEQ ID NO: 8045 - DNA, 331 bp, Glycine max
  unsure (1)..(331): unsure at all n locations
  Clone ID: PAT_MRT3847_107275C.1
gcctctgctctcaaagaagatcgtgaagaagagggtaaagaagttcaagaagcctcagagtgacaggaaaatttccgtcaagactaactggctcagaccaaatggtatcaattctcatgttaggaaaaagttcaaaggatgcactttgataccaaacattaattatggttcagacaataatacccaccactatctccctaatgatttcaagaaatttattattcacaatataaaggatttagaactactcataatacacaacaagacttactatnctaagattacccacaatatatccacaagaaagagaaaagatgtagtcgatagagcc

SEQ ID NO: 8046 - DNA, 382 bp, Glycine max
  Clone ID: PAT_MRT3847_107276C.1
tttttatctttttttttttttttctcttttgaaagcagcaccacacaggggttccgctatatgtgatgaaagtaaaggaaaattacaagagtggcttcatgcatgtgacttttctattttattgcatttgaataaactgatgtgggaccccaggaccctgatttctctctctttctctgtcaggctgaagctacacttttcacataaatttttgagcgacaaaacatgcacacccactatagctatgcttatggtttcgctggcccatgtgaactggagttctttatggctaaataacgatctctgatcccaaatgatggcggccggaatgcgacccacagctgcaaagatctggttttaagctcccccattatcagaaagt

SEQ ID NO: 8047 - DNA, 308 bp, Glycine max
  Clone ID: PAT_MRT3847_107277C.1
tttatggtggagaggagaaacgtgttgccaaaaccacttgtaggtagggctggacgttacactggagagaagacatagaaacctctaaggtcaatgtgagcgatttcatggtgatgtggagcggcccttgcatattacgggcgcgcggtgcgacgagatggccaaaaaattaagcaacgctgagtgggtgaacatcggggtaaacgaattacctgacggggctacggattttaagggggaggctatacgcgcgcttgcgttgagggagaaaggaaagagatttgatgggggtgggggctccgggaagg

SEQ ID NO: 8048 - DNA, 260 bp, Glycine max
  Clone ID: PAT_MRT3847_107278C.1
aaaaccttcatactccatttgtgacccctgtagctgaaacatgtttgtgttataaatttttagaatgagaaaggtctaatagtatagaaataaggcagacaatatactgtgagtctgtgacagaagacaaaagagagaagaaagagggtaacatgtattgtgatagaagaaaaacatacgataatgaggaaatgcttagaaaataatgaagaacgatatggcctcacttgaggcatgtgtgctgtgacaaacaggttgag

SEQ ID NO: 8049 - DNA, 343 bp, Glycine max
  Clone ID: PAT_MRT3847_107279C.1
accaaattctagtcgataaacgggtttgggtttaggggatactacacccacctggggcgagggggagtgatcataggcgctatcgagagcacaaattcatgcactcaccaagcgagccaaatttagtcaaaggggtactaattcctaatattatcaaccattctacttcaaaagcgtaaatagcattatccaacaagacccgaaggcagtatgatagcacccgtggtaacgatacccacagcatgcgtgactaatgatatcctactcaatactgtggctatcaacgagggaggtcttattctgacacactacagatcaaaggccatagtgatactaatggtta

SEQ ID NO: 8050 - DNA, 161 bp, Glycine max
  Clone ID: PAT_MRT3847_10727C.1
caatctcatttttatcctacaagtagtgtctaaacttaacatgtacttcttctacgagactttcaacattccaaaacatatttttatatactacaaaaatactctcttatactctcttaacttataggctcttaattctcctttaatttctaatccctttt

SEQ ID NO: 8051 - DNA, 939 bp, Glycine max
  unsure (1)..(939): unsure at all n locations
  Clone ID: PAT_MRT3847_107280C.1
gaatgcactaagagcactcttgaacatttttttccccagaaaagatctcattacagtggtaacaacagtacaagttcaaggatttcatgaaattatatttggcccggttacaatatacacagcttggggtgttagacgcaacaaacacaacagtaaacggaaaccttaaccacgccgccgaacacttttcactcttcgtggatgagtatagatctttgtatctctattttcaagattttacaaaaatgattaaatttagacgcaacaaacacaacagtaaacggaaaccttaaccacgccgccgaacacttttcactcttcgtggatgagtatagatctttgtatctctatttccaagattttacaaaaatgattagatttagagggcaaaaagtcaaaaacccatgcatggacaactgaaccagagatggatctttatgaaagattgatggccatctcttgaagaagagctttcttctgagatgcattaataatgcccttgcactccgcatctagtaatacttctgtcataattgcagatgctcgtcctttaggctcatcttcagaagtcctcctcgacatgaaagcctgcccacgatgtgttatttccaagtatcctggttgtatgataaacggttccccatcaatttgaactgggaaaggactggaacagtgtatcttgatggctttaccttgagcaagccttcttgcttgtgaaagtccaacctgaagttttcctaggtgccatgcaccacatacgcataccacctccagcattttatcatgcatggattgcagacnnaaatcatcatcatgctcataaccattttgccaaagatctactccacccatatagctcccaatattgagcacaattaagccctcnnnntccttnnnaatctcaatnnctctcccgtcaacttcaagccacacttgcca

SEQ ID NO: 8052 - DNA, 329 bp, Glycine max
  Clone ID: PAT_MRT3847_107281C.1
tttcgattacgcgtgggcgggatgagagtaatatacatattaccggcttatttgacgacgggagatacaaatgtctggactaaacacgataaaaatcttgctttgacagaacacgacaagatggaagagagtagaaatagaggcattcctgctgatgtctcgctaagggagctcatgaatttgaaaaacatgatgaacatgaaagccttaaggatcagactcctgctgatgacaagacgtattctactaatgtaaaacaagattgcgaaaattatgaaccttagacaaagagctgttggagaactgaaactactcactgatgggaagaa

SEQ ID NO: 8053 - DNA, 140 bp, Glycine max
  unsure (1)..(140): unsure at all n locations
  Clone ID: PAT_MRT3847_107282C.1
gacaaacatagttaccagcagtagaggcgtggagtcctgtgnnacnagggcaaaatgcgagnnnnacnnacnagctaagaagcaaaaggagagcaccgcctttcactgcgcatgcagagaaaaacctaaaggggcggaag

SEQ ID NO: 8054 - DNA, 457 bp, Glycine max
  Clone ID: PAT_MRT3847_107283C.1
ttttttttttttttttttttttttttttttttttttttttttttttttttttgttttttttttttttttttgagggggggcaccccccaaagggggccccaaaaaagagccctaacccattttttttttgccccacaaagggggggagcaccctttttgagcattttccgccccatttacaaaaaaggttttttttacaggggttctacaggggttaataacatagttttaccatgcctaaaaaagctaaaaaggttgtttaggcccaaccccccctttggctaaaagggcccaccccccaaaacaaggtccttcttaagcaaatttttttgaaaaagaaaggctgattttaatcaaaaaaagaggccgattttaatttttgttcctaaaagggggcattttctcctttaaagggcgccctccccgggtggaaagcccggggtttttttttaagggg

SEQ ID NO: 8055 - DNA, 192 bp, Glycine max
  Clone ID: PAT_MRT3847_107284C.1
attggaacaatgctgaagaagctcatacctaccagtaacaatttcaagctcgccgataaaccttacatgacaagccttggtcatacaaaaactaatctcactaaaggatgggtgcccatgccagggcccctaaagcacactctgtttcttaatgcagaagaatgttctgggcaaacgggtggacaaccccct

SEQ ID NO: 8056 - DNA, 516 bp, Glycine max
  Clone ID: PAT_MRT3847_107285C.1
ggtaaacatcacatctctggaagttttaatactagctgcattggatgagtgctaattggttagtctgtgttttggtttcacaataggaagcatcaaaataatacgtaatactaattatatctctgaaagctttaatactagctgcattgaatgagtgctaattggttagtgtgtgtttggtttcacaatagtaaatgttaagagttgattttgcctcctgtcaaacatataagattgattttgccttaattttgatctgattagaagagataaaagtagattttcattaggttgaaaatttacaagttttacataaaaaaatttcgagaataaaaacatctaaaccctctagtgtcatttcaatttttcaaaattaattttgtgaaatcaattttggaaactctcacctaaatgcaacgattcttcaaccagttgctagtttagtgatttgtttatggtctactttaaattggcggcaggaagagtttctgcaaggatcttgagcttgaacgttct

SEQ ID NO: 8057 - DNA, 1267 bp, Glycine max
  unsure (1)..(1267): unsure at all n locations
  Clone ID: PAT_MRT3847_107286C.1
ctactattgaacatgactgcagtaatgatgaatttacagctggtgctgaggatcaggtagaacacaactctactattgaaaatgactgcagcaatgatgaatttacagctggtgctgaggatcaggtagaacccagctctactattgaacatgactgctgtaatgatgaatatagtacaactggtgctgaggatcaggtagagctcagctctactattgaacatggcccaaatcctgatggatgtctggttcgtcactcagatgatccacctgaatatgaggagaagcaatcatttgcttctgtaaacattgatgagaagagacatgccaatgtggctactgatgaactgacttcttgggatgaatgtgatggtagttcaaagctgcattattctgaaaggctattatcaacaagaaaggcgatttcaccatcttcagaggaaaggctctgtaaagctgtggagtcggttaatttgaatcataaaaacaatttgaaatgcaaggaaaaactatacttttctgagaagactgataagatgaatagtactgctgaagggcttgatgatatcacaggagctcgactaactgatatctttaacaaaattagtgttattcctaggagtaaaagagtttcccaacctagaggcatttccaagaatgctcattcttctcgccaagcaacccgcatagggtgcaactctgtacagagttgctcaaagagtgcaattgcatttacacagcagcagatgcatgatgcagaatgccttgctatgagactcacgaaggaattgaagtcaatgaaggacattgtggatgatatgttacgatctgaattctgtctaaatacgtctttgagacataaagtaaatgaggcaagaatggctgtcaagaatgccacaagagctgaagaagctacaaaacgatgcctggccttcatgtcaagggattgcagccgtttctgtaaaataatgaaatttgctgatgatagtccatctcctcaaaaacctcctccagatgtagtgcgtaaagagaggaaaaaaatagccttcgctgatgaagcaggtggaaagttgttccaggttaagttctatgaggatgacgcagtatctttgtccaaatctaattgaaagagaaagaatgttgttctaatatgccattttctgtacaaattttcagtgccctaccattcattgtattagttctttttctagaaatgccttatattttaactgatgggggnnnttccttcctatgtcagaagttgatt

SEQ ID NO: 8058 - DNA, 712 bp, Glycine max
  unsure (1)..(712): unsure at all n locations
  Clone ID: PAT_MRT3847_107287C.1
ggctcgagattgtctcttccttcgttctcatctccattgctccagctcctccactgcaagtgtcaagagagagagtgtgtgtgtgtgagtgaatttcgaaaccccaacctctctttctctctcttccaccaagtgacacagtcggtgggcttatacatacatacatacagggaccccaacgggtctttcccttttagttttatctgcttcgcctcgtgactccctttctctctgttactgaatttaacactgctcagctttcatacacttcaatcccattttattggccacctttcccttattcacagtactactacttccttattcaacagacaccaattccagtttctcttttcaggtttcggaatcaatcaatgccgtgtttttagatacctgcctgctttagctaccctacgaacaaccttttcacataattggtaatagtcataaaatagcaagtcccagatttttattttacacgattctcctctggagcgttctatttcttgcttctactctctgtctattatattcccaaccctcttggccttttcttcatttccccattttttatttataaaaaaggcaataacttttgttgcttgtactttctgggtttagggttttgcacccnctttaacaaaaacacagaagtgacaagcctatgttcaagttcaacttcatgcctctccaattctgaacaatctaaatt

SEQ ID NO: 8059 - DNA, 513 bp, Glycine max
  Clone ID: PAT_MRT3847_107288C.1
ggctcgagattataggtggcagttaggtactcacaagctacaactgctaatcactcactgaaatgcttttactggtacatggtcaatatcaagtacttaaatagtgaatctagtgacagtccccctaattatatatggagataccttatatcaagctttattaggttgcaacttctatcttcatttgctactggatccttttgttatactgtacaacttaattcgctatgtcataattatagcgccaattcttgttctctgatgatgctcttaaagaaatgcctagcatgatgggtgccacctattgggagttcgatagtgattcttgtcatatcaaaatgctgggatcaacaccagagccacctaaaggatcttaaagcagcattgattgtgattgctcttttgcaaataacacctgccatgtaataaggatgtcaatatcactgtatcttatcctgaatgctttgaactttgaagtagtttatgctacggtatgcattcggatatagctag

SEQ ID NO: 8060 - DNA, 452 bp, Glycine max
  Clone ID: PAT_MRT3847_107289C.1
tttttgttttttttagaatacagtacaagcctttaaaatgttctactatttggggttgtttgatgtagtaaatacatagaggtaacgttggtgttacagaaatgaacgagggaaccacgggggccctgtatgttgacagcaggggcaagggagagctgctcagagggggcatacaaacagaagcggaccggcctgcgcactctagatggggggggcggacactcatgggggggccccgcagatattgctggggggactagcgctactgcagacatggggggaaataggagggggcccgcgcccgtgggcaatcggctaataggttctgccgggactgggtggggggatgacatcaacaggggcaaaagcccggggggggggggggggtgtccagtgtagagaggggatccatgaggccggggatggggtgcgggaggcgccaggagggtgat

SEQ ID NO: 8061 - DNA, 162 bp, Glycine max
  unsure (1)..(162): unsure at all n locations
  Clone ID: PAT_MRT3847_10728C.1
acaaagtttcagtttttggtgtnccattnntnttcctcgatcttnatnttaaacataacttgaaatncttccattccctnaaatnttaggtcaagagctagntnccgacacngacaaagcaatggcaaaagaccgagttagagcgactgttganngcaagac

SEQ ID NO: 8062 - DNA, 418 bp, Glycine max
  Clone ID: PAT_MRT3847_107290C.1
atatgattactctttattttaattttcttagcttaatggtccatagtccattcatacgcaccaggtggacataataaaatatcatactaatttattggctctttacccacacaaaaagaggaatactattaataataaacccggttacatagggtgctaatacgcaaccaaaacattgggggggaagagagatgaaagcatatatatttatttttttcaaaaaaaaacaaaaaggtgttcaaaggaaataaacaggtttttttgtgttccttttgccgggcccagacttatgataatgcaacacaaaatcatgaaccaaaagctttctctaggttatgtgggggcatccttataaaggcacccctgaattggattcttgtttttcccgaaggcttcccccacccttgaaaaaaaggaa

SEQ ID NO: 8063 - DNA, 665 bp, Glycine max
  Clone ID: PAT_MRT3847_107291C.1
aaataaaatttttgagccaacaaggattgcaaatccaaggaaggacagtcctggatctgtcaaggccaatggatttaaaacaaggcccgtgtcaaagcttaacatacacagtaaagaagaaaacggcgggtcatcaaatcacagtagtaaacaaggaaagctgagttaaagttggattccatctgagaatccttttgtagcgattcaaggatgttgaacttcattacaatagttgtactattaggttgcatggtatatactgtagttgctgctggaagaagctggaaagcaaccacagcaccacacaaagttaacatgaatagagtaacattgggggcggggggctataggcagttaagttataaagccccctacggtgcagtggatattccaagaccaagaggtgaagctaccttgagctgcagtctgttacattttcttttggtagccgtggcctgttgcatatttcccccctcgattataatgattgtgtatagcttgtgcaatttgtttgttcttactccttttcaacattgcatttttatcggctcaatgtgctatgtctccacatgaagagcagaaatggatatatataagattgccgggttaaaatgtacccaaaaaaaaaaaaaaaaaaaaaaaaaaaaagcggccgctctagagga

SEQ ID NO: 8064 - DNA, 255 bp, Glycine max
  Clone ID: PAT_MRT3847_107292C.1
aagacctccttaccagataacatttacaataacaccgcccgcattttttaaaaaatacctcatcctttcaacatccctacaacttcaattttacttacacatcacttcaacaactcatccatcgttattaaatacataaaggaacacatattcattcattttaacatctacgaaacatcaatactccttacctttcataaactacatccccccacccacatctatcattatctaaccttcttcttacccaccaat

SEQ ID NO: 8065 - DNA, 1265 bp, Glycine max
  Clone ID: PAT_MRT3847_107293C.1
cccacgcgtccgctccgtgataagattatttggacatcagtataggaacatggcttcttccaacaaaatgaagaccatcaagtcaacgttcctcgttttgtgcctcttagcctcgttcctctgtccaatcaaggctcacggaggaagttctcatgatggtgtatctgaaagcgaagatttgcattctcggggtctgatcgtggtgaaaatatggtgtttgatcatcttccttgtgagcactttcgctggcggggtttctccttacttctaccgttggaacgagacttttcttcttttggggacacagttcgctggtggggttttcttaggaacctctctgatgcatttcttgagtgattctgctgagaccttcggagaccttacttcaaaatcttacccttttgcttatatgctggcttcatctggataccttctcaccatgcttggtgactgtgttatcactattgttaccaggaatagcaacagggaagccaaagtggtggaactggaaggagggacaacgccccaagagcatgacctagccagagatcattgcgcagtggcggagacaacaaaccctgtattattgaagacttcttctttgggagacaccattctactcatccttgcactgtgtttccattcagtttttgagggcattgcagttggagttgcaggtactaaggcggacgcatggaggaacttgtggacaatatccttgcacaagatatttgctgctattgcaatgggaatagctttgctaaggatgttacctaagagaccctttgtaacaacagcagcatattctttggcctttgctgtctcaagccccattggtgtggggattggcattgccatagatgccacaacacaaggaagcaccgcagattggatgtttgctataacaatgggtattgcttgtggggtcttcatctatgttgccatcaatcatttaatttccaaaggcttcaaaccacagaggacaatgcgttacgacactcccttgtttaggtttgtcgccgtgctttctggtgttgctgttatagctgtagtcatgatctgggactgatcatcatgtttcaattcctgtttttctttgttcattaataattgttctacgaaattgtgcgtgtgtgataattatgatgaatgtaccattatatttcgctacaatattaaacgtttgtttactattttgaatgaaaatttatagtcattgttccttctatcaggtgaaactaattgttcaggttccttcttcaatt

SEQ ID NO: 8066 - DNA, 378 bp, Glycine max
  unsure (1)..(378): unsure at all n locations
  Clone ID: PAT_MRT3847_107294C.1
tgaaaatgctgcttgaanctgagacaagtggtgcacacaatcattggcaatatcagcggatattggctttgatnagaactgcaacaggtcattgcnttgntgccaaagaatatggccgnctngatgntctggtcancantgcagcttancaacgtttgacaaactctgntnaagaaatcacacgncagcantttnaganagtcttcggaaccaacatnttntcttagttactnttggtcnatcatgcttatgaagcacatgaaagantggagctgcgtcataaactctacttgagttaatgcatacaatgggaatccagaatcgtttgactacactggtttccaaggagccaattgtgncttcaccagaggtcttttt

SEQ ID NO: 8067 - DNA, 302 bp, Glycine max
  Clone ID: PAT_MRT3847_107295C.1
tcggttacacgtgctcaaaatcggacccaagcctcttggttcatagatatttacaaggtaccaggagctcaaggagcgatatggcatgaatatttcagctggtggtttgagcgataatgacactactttacatcttgcagtttatactttaccatttggtggaggtggtgaaagcgcaatcggtgcataccattggaaattcttatttgaagctttcagccactaaagaactagtctctatcgccaatttaatggtgatgctccagttaggtacctaccattcacaattgctgacgtttata

SEQ ID NO: 8068 - DNA, 404 bp, Glycine max
  Clone ID: PAT_MRT3847_107296C.1
ccgatccttatttttcattacattttcatagaagaataacaaggtatatggagatgtacatgtaatagcattccatttctgaccatgcggatgccccaaatcaacccatgaaaaaagcaaaatgggttcaacataaaggacaagccaggaagccaaacgaccggattgaccatattggctaacttttagggggctacatatctatctacatcaggaaagctccgcatctcaagccacatgcagtcttgctggatgaatgaggtttactgtgaaatgggggattgttacaatcgagacatcatgtacacgggcaaacattactttgagccaacacattaacgctttaactagatcggaagggaagctagcatctccaactgagtccatctggaaagtcttccgaa

SEQ ID NO: 8069 - DNA, 325 bp, Glycine max
  Clone ID: PAT_MRT3847_107297C.1
cttgttgtttttttttttttttttttattttttttttcgttttattttttttgttctttttttgttttttttttttttttgtagttcttcaaaaacacaagacggtaaaaagtttttttccccagggaccttccaacttgtttaacacgccaaaggacccacgaacatctgcaaacgcaaaagggggtgttggttgaagggcatgagaccaaaagaaaattcccgttcttggggacatcccgggatgacccagggtaaaaaggagtttttgtggtgaaaccaccgcccgtggggaccaaagattttaaacactgggggggatgtt

SEQ ID NO: 8070 - DNA, 165 bp, Glycine max
  Clone ID: PAT_MRT3847_107298C.1
agcaaacattagtctgatacactatggtaactattattccgacataaccgatttacaaccgaatgaaaggaacagatttgttgtaatccaagccataaactatgaccatatacgaaaagcacacttatgcctaatacactaagtggatggtgagaaatatctatg

SEQ ID NO: 8071 - DNA, 1302 bp, Glycine max
  Clone ID: PAT_MRT3847_107299C.1
cccacgcggatccttttccgatgtacggaaccgagaatgaccgagatgattcggaacgaacggcgggagttcgatccttttccgatgtacggaaccgagaataaccgagatgattcggaacgaacggcgttcagaagagcagagaagaagtacaagctctactacgactacaatgcttcttccaagaacaaaaagaaaaaacaacctaaacccgtggacttagcggaggtccttgactttagatctattctagaatgctatcaccaaaacgctgtgcttccttcgggtgttatcgttcttcacgacaagttcacttctccggtttttgctttacaaaatcgcccaggcttttattttattcctggggcattaagcatagagaaacaatgtagtttgataagggagagtttgactgattttccgcagccacctaacagaacaaatcacaatgccttgtatggtcctattcaggacctgttcgttgcagctaaagaagggaaacttttggttgaagacaactctccaattacttcttctgaaacttatgctgatattgatcatagagatgataaggaatggaagtttactactgaaaaggacatgtcgttgagaaagtgcagaacagtttctgcttctgtgttacttagaaagttgcgatggagcacccttggcctacaatttgattggtccaagcggaattatgatgtatctctcccacataacaaaatccctgaagcattatgtgagctttccaaacaattggcaaaacctgctttgcctggtggtgttgagttcagacctgatgctgcaatagtgaattacttcggcctaggggacacattgggtggccaccttgatgacatggaagcagattggagcaagcctattgttagtctaagtctgggctgcaaagctatatttcttttgggaggaaaatccagagaggatactcccttggcaatgttccttcgaagcggtgatgctgtacttatggctggagatgcaagggaatgctttcatggggttcctcggatcttcacagataaagaaaatgctgaaataggccatcttgagacacggctgacgcatgaagatgatatttgtttcttaaaatacattcaaacatctagaatcaacatcaatatcagacaagttttttgagtagtatgttcttttctttcgaagtgaaatttgttttattagctcaaggaacaaaaaaatgatgtatgatttctatttaacgtgattattgctttatatgacaagtgagtcccaacaaacctcaggctcacattcctctcc

SEQ ID NO: 8072 - DNA, 351 bp, Glycine max
  unsure (1)..(351): unsure at all n locations
  Clone ID: PAT_MRT3847_10729C.1
agctcaaattcgctgcaagttatgtgcaaaagtaaatgatgaagaaagtgaaagatgcaatcttcaaagatctcttgaagttaataaaggagcaggtaattttcatgatagaactgggaaaanctttcttcattcttctatatttctagctgatatacttactttacagaataatcattataatattatccatcggatcaacaaattaagttttggtcaccatttcccttgattaataaatcctcttgatgatgtaaagtgtgttcaaagacctactcatttcatataccattatttcataataattgtccctacaatatacacatacattaaaagtcttgttatccattc

SEQ ID NO: 8073 - DNA, 712 bp, Glycine max
  Clone ID: PAT_MRT3847_1072C.1
gttcctcaacgttcacttttatagacaaaaactgatccaacaagggtacaaaagccccagaatttatagaattaaagaaaaaatacacatatgaacaacagtacaacaatattctgtccataaagaaaagtacaacaataatgaacaacaaaatccgcagttaagtcccctagaaccccacaactctgaagggaatttaatgcaaatggtgagacatcatctgttcaaagcttagcctcagaaaacttgtgtttaaggctcctctataagcaaaaaaattgtgagccccttttcctcctggctcttctctcataaaaagaaaatgtcaatatacatacagacttggggggttgacatggcattatggtgcaatgttgaacagttagtgcccaaggaaggctaaatcagttagagatttttgaagagtctatcccattagcagactcttctccacttgacaaagttgaagggctcccttggcttcgattctcctcgttgccagcagtgcgagattttccgggtctcagtctaatattggcacccatggggaaaggctccggatcaccagcatttgggccatctgtatggaagagaataggacggcaacgtttgtcttcattcatcaggcttgagttctggaaatgagcaataagagaaaccttttccttgaattcgggcataggcaagtgaggctactttttcactattaaac

SEQ ID NO: 8074 - DNA, 108 bp, Glycine max
  Clone ID: PAT_MRT3847_107300C.1
tagtgaacttaaaacttgatcctgccctcgtaagctcgatcgtcgagtggaagaccagatctgtgtgtccatagcttgagacaatgagcagctctaatacgtagtgtg

SEQ ID NO: 8075 - DNA, 331 bp, Glycine max
  Clone ID: PAT_MRT3847_107301C.1
cttgagttgatgtaatatcaattagacttagagctaagcctataattgtcctaacgtaccattggacaacaacaatgacattttggaaattcagggaccagatgaggcttgaatcttgcttggccaatctgcctctgaatgattattgcatttggagcaacagctccagctgctagaggcctcatcaaaggaggaactcttatgtcactggcagagatttctacaacaacaacatcatatcaaaggcttttgttgatgatttcaatgatgggtggaagattatcaattccaatggaccccttttttctatacctcaaaaaaaaacaacaac

SEQ ID NO: 8076 - DNA, 194 bp, Glycine max
  Clone ID: PAT_MRT3847_107302C.1
ctcaacaacttcaccttcttcctcctcgatcatggctcaattcaagggcaagtaccatgaagctctgatggtcaacatctcatacatattgacgcatgctgcgggcgccacattcgataatgaccggcatggccaacattatagggtgtggctagcatcaacgtatagagcatgcccttctgctggcgcaatgc

SEQ ID NO: 8077 - DNA, 299 bp, Glycine max
  Clone ID: PAT_MRT3847_107303C.1
tcgttttctcaaagagcctctgcctttgatggtgctcttcctcatctacatttcaccttctctctcctctccaacgtgatcaccccacaagcaaggaccttcgtctggctccaaaagccgaacaactcataagagggctgcacctgtccccggaagtgcggaggttctcttggagccacaaggaccctttgtgcgcgctttggagttcctctgctccgaacggcgccggtgccacatttgaaacggcgttggcggctcgtgctctcaggaaacaaccagctcaacttgatcgcacacgc

SEQ ID NO: 8078 - DNA, 530 bp, Glycine max
  Clone ID: PAT_MRT3847_107304C.1
gaaaaggaactaatctggatcccattttttttttccttaagaaaatcgttgggataaaaacatttttaagctaaaaattgctagcaggggggagccaaaaagggctgggttctaattttcccaaaaaggggacttaaaaaaaaaacttaaatccttgggaggcttaaggggtacaacttgccccctcctttccattttaaaaggacattttttccctggagggggatttttttgggttcactagcaattccatgccacaaaacggggtggggggtaactcctttaataccaacttgggtgcatttttcccacaaatttttttttgcccttgggggcaagggaacaatcataggggggagtaccacttttaaacttccgaatcctggggggaccctcaaagccctttaaatcaggggtgggaagatctaaaaaaaggacttgaataaaacatcctgggggtccaatgacagaaaggcattcaaaccctggagcgaccgggggtacaacccacccctagtttttgaagcaat

SEQ ID NO: 8079 - DNA, 136 bp, Glycine max
  Clone ID: PAT_MRT3847_107305C.1
ttcaggaggaacctatcctggccaacccggtaatggggttccagaattggttttgccccatcccaaaggagcccgcccatttggaaaggaagccctctctcggattggatgggcgccaaaagccgatgtgccctcc

SEQ ID NO: 8080 - DNA, 257 bp, Glycine max
  Clone ID: PAT_MRT3847_107306C.1
ccggttcttaaaaagaccaataaggggttcacttttaaccggaagggagggtccccccccgaaaaattccccggccggttccccgccggagggtccttgggccaaagaaacttcggttgggcccagttttcaccagttgggctggcttataatcctactccttttgcttatgtggttttaaaaatccaaaaaagggcggccaagttggtcaaggctgcctttaatgaaatggaggtcttaccatccttttctgaggg

SEQ ID NO: 8081 - DNA, 357 bp, Glycine max
  Clone ID: PAT_MRT3847_107307C.1
tgccgccctttttttttttttttttttctttttttttttttttttttttttttattctttttttttatttttttttttttttttttttatagggaacctcaaaagcgacttattccctttaagccacaggttaacaaacaaatgggacccattcaagggtttgaaaagcgaaaagcccccctgggcaatgccaccaaaatacccgttcccgtcggaaaaggaaaaccaaaaacggtgccccctttgaaggttcaaaacctaaattgaccccccctttcaaccccaacccaaatttctgcccaatgccagccccaacaagggagctatggagatgggacccacattccttgggggcca

SEQ ID NO: 8082 - DNA, 206 bp, Glycine max
  Clone ID: PAT_MRT3847_107308C.1
tacaatcgttcgggaacgcgtcagatacattttagatctcttcctacaatggcaacctactggctcctgatgctccactcgattacaataaatagccgtacactgactgcctcctagaccatgatcctacgtctgatgtaccattttgacagcaccttaatcgtcgactcctcgctcacaaatcgccctataggccgcatgtttaa

SEQ ID NO: 8083 - DNA, 135 bp, Glycine max
  Clone ID: PAT_MRT3847_107309C.1
gtaagctcggattccgctttggcttgaatggctccctggtaaaaaagaaatcatccaacatgcttatgccagcaaatagaatagataaacagggagaattaacaaaaaaccttgcctggcttgtaggatctcgat

SEQ ID NO: 8084 - DNA, 255 bp, Glycine max
  Clone ID: PAT_MRT3847_10730C.1
ctggtcttacctaatgatgataatgggaggacacgattatcttaggcggagggttccaaaactactctccgacacatgtggggtgattacaattctttatcattggattatagaaaattaattatatgtgttacggctcaagctgaattgctacatgcactgtaagacatgggggattagtgcagacaataccctggctggacacattgcaggcttcacactcatctgcgcatgcaaattttactgggttaatgt

SEQ ID NO: 8085 - DNA, 458 bp, Glycine max
  unsure (1)..(458): unsure at all n locations
  Clone ID: PAT_MRT3847_107310C.1
ctgtcttntnnncttttcttttttttttttttttttccccgcnntcttaaaaaagccaggcgggggttttattcaatggagaaagggaaccatataaatatatctatatatagatagatagatagatatagcttttcttacaacccaattgaaggccgtactgagatagttcttgacaacattttcattcaatatttgcaacactttggggttgggagggcccacccatcttgatgtcttgaaccggctcacagcagctcctagggcaagggaatgcccaagaacctccgggaatggtcctctccgaacaacccggagttcgggggcccctatgccgttgactttgcgtgagcctgggtagccagcatcaacaagagacttggccaaacaggtggagcatccaccaagcacctcttgacttgcttcaccacttatttcccaaaagaatacatagggcc

SEQ ID NO: 8086 - DNA, 2085 bp, Glycine max
  Clone ID: PAT_MRT3847_107311C.1
aaattttccttttttttttttttttttttttttttttttttttttttttttttttttttttttttttttttttttttttttggggccaattaatagagtaaattggaattgagaggtttgcttttaaggcatcaatcacttgggtacataaatggcatgaacaatgagtcgaagcaatggcagaagaataatattaacgccatcaccacttgtaacagtgcactcagtccctctgcagcagcatggaaatcagacatagcccttgctcttcagactctccactgcatccttgatgatttggtctacaggagtgaactctagacctaaatcaatcagctttgttgatgcatcctttgtacttgccctcaacaaccctggctgggtatcctttggcaacttgaccacatcgtattcagggtataactcagaaaccttgtccacaagatcactaaagtgacgaatagattccacacacaagtgccttcctgctgctttcttgttctcaagtgccaaaatatgtgccaatgctatgtctttgaagtgagccattcccataaagaagtcctcgtacgtctctttgccccctttgagaacactaacaagcatttccatgcttgaattgattcttggtggaagcagagggcccaaagctgtaccagggtttatcatgacaacatcaaaacctgtctcctttgcaaattcccaacccgctttctctgctagagtctttgcaatgggatagtacaaccccttctgtttgcagtattcaaggtctgtccaacactcttctgccttaatcttatcagctggccagttagggcttggcataatggatgagatcgacgaagtcgccaccacgcgctccacccccgcttccttcgccgccttcaacacattaactgttccttttatcgccggctccagtatctgcttctgtatttcctctcaccctctcagcattaattaatgtaagcaacaaaatctttatacactcattttcatttggaccatacatgatgtagtagtgaaagcacaagagatgtaagagaagtaaatttcaattgtatagataaatggttaaaaataaatttaattaaaatacttttaaccataatatataattgtatatgattaacataagattaaccttttacttctcaggctgtcattagatatatattcttttatttataggtttaattactctctttatatcagtacaatttttatattttaatttttacattcaaaaactactcaatttgattgttatatataaatattttatttcactttagtcgttgaaactaaaataaactaaaactaaataaaaaatttattttttgtgtaataagaaaatatttggagtttcttatttgatacccacgaatatctctcattggatcaatacattttgaagtaaagtagtagagaatataattaatcaaacgtcaaacattgattaagggatgcaaatgttaaattacttgtgttaataagttgcgtggattaaaaaaacgtgcatgggtaaagattaaaatcagtcatgtttaagtgaaaggattaagagataaagattctgtggatttatgaagtacattagtaattaagccatttatgtaaatattggagtgtgttaagtgattttaaatatttttaacctcgggatcttcgacttgaccaatgatgttaggacatgcaaggtggattacgccggaacaaccctttatggcagcggcaatggagtcgatgtcaagaagatccatttcaaaaaaatggagatgactctttgctccttccatttcctccaaatgtttcgtctcattttcatccttgatatcttggacggtggcatggacggtgtaaccacgctggaggaggagtaggaccacccatgatccgatggcgccgctggctccggtgacacaaaccaccttcgacatagggttgctttgttagttcagtgatgctcttcttttaacttgtttagtgtgatgaaggaagacacaatcctactatataaagaagctcgtgcagggaataaattggaaagacttcagagaaatccatgtatttggagataat

SEQ ID NO: 8087 - DNA, 1192 bp, Glycine max
  Clone ID: PAT_MRT3847_107312C.1
cccactcgtccggtccgacacttctctggcaggtgagtttggtatatgtttggatcatgtcatctttatgattattttattactatttttagtaaaatcaagtgcctttcttttatatttcttgtttagactgataaagcacttgaaagcctatcatatatctccctttttctaaagaggaaacgaacttcatgcctttattatactatgaattttattaggatgcaccaatagcgtagttttttttcactcattcaatcattgacatatccgataaaattgttgacttttgtaataattacaaaaaagtcatattttggactatttctaactagttcacaacgcaaaaaattttacactcaagttgtagcaaaattaaactcttattatatttcagatttgtattttatctttttcaaatataagcttatttggtcaaaatccagaagcaattacttcctatacatttgctctacattatgttgtttgaagaagccttttggattttctatgaataaagggccttgttttaatgagctgacactcggtatggtatcattaaacttcagttcacattagcctgcatcaagatgggaaggaatttggtggcacaaaacggtgtcgattcaaaagaaaagagtctttcagcgtagagatggcgcatattttactaccccccacggaaggtttattgggaagcaatcacggttgatgcagacatggaccattgctggtttcgtgacctcaaagatgcttctagagaatccagaaaaggcatccttgttgttttgggaggaggattttgaacttcttcagaactgtgtctgcaagctaagcaaaagtggtagaaggaagtgttcccgttttgctgcaaggtctcagtttattgtttaatagggaggaacagagagtcattgtttgaactctgtagtagtgtaggtgaactaatttattacaataataactgattgatgccacttttcagaattaatctgttaactgttcctgttatttggtgacaacggctaactgtgcaacatagttctgttgcatcatttatttatgcggggtaaacttcacggatatctatgtcctgggagatttcaccttgtactgtatgtgctatgttgcttcactgtgtatcagatttgaacagtactcacattaattctacattattttaaaaataatt

SEQ ID NO: 8088 - DNA, 144 bp, Glycine max
  Clone ID: PAT_MRT3847_107313C.1
ggctcgagcttaaattcttttttctaatgtctaattaacatcaataatttattatctgttaccggggacggaacaaggtctgagaccagcttcaatatcaaatacgccgaagaagtcatagttcacattacacactacggtcct

SEQ ID NO: 8089 - DNA, 283 bp, Glycine max
  Clone ID: PAT_MRT3847_107314C.1
tgcatgcctagtagcgggcatgtcatcaagctttgccgtttatttccgactgcccgggaatctggggactcgtacattaaatgtaaaatttaaagaattatattacaaaatctattaacccttattatggtggataatgttggtttggctatggatttctattttatattattatttttatagaaaaactaaatttgatattatacattatagtcggatttagtaaatatttcacagattgggactgcggcgggctacctgtcaggggttatctatctgagaa

SEQ ID NO: 8090 - DNA, 288 bp, Glycine max
  Clone ID: PAT_MRT3847_107315C.1
tctaacacagattttggtccgaccttcgtaacaaacactgtctgagatgaattttggacatacaaactggatctaagacctaatcagccatgtcctctacaactccaccatggaatgggaacgaagatccagttggagcggatggtcaagaatggaccttgttatcgaaggagggtctctaccactgccagatagctaccctttgtagctgcccaagagggactgagacggttcctgctcacgttaggctcctcatgaagacagtgaagccattgtattcccacgagc

SEQ ID NO: 8091 - DNA, 520 bp, Glycine max
  unsure (1)..(520): unsure at all n locations
  Clone ID: PAT_MRT3847_107316C.1
gtgcacctcgtgtgnagtacctcctctttggggggggggggggggggggattgaggtaaagtcgtagaagtattaggctaatggagggaggatacgataatgataacaacactgagcctaaaggaaaacaaataataaaagatcgggggaaataaaaaacttggttactagttaggaatgtccataacgtgttaaaatgacacagcgtatcgggaatgggaaagtcaaagtggttaagcgctttacaaatgggagtggataggcagtggtggctaacctttgttatgcgtaggtgaccaatgaatgcctaaaaagggtaaggaaataatgcggtgttatgggtagtactgaagcagtagtggagggaaaaatgtcctggctgtcccaaaagatgttcgtaaggtagttgggcgtatttacataaaagttgtataggggttcagcgtcaatgtgtcacttcaaggttcactggatcgatctcgctagctcatcgtagactgtggtgagacgcgtattgaaa

SEQ ID NO: 8092 - DNA, 315 bp, Glycine max
  Clone ID: PAT_MRT3847_107317C.1
ctcttctactttgagtcttcttgatccttcttatgctccttgaactcaaacatgtctgatgacgcgggtctactataattctggccaagatcatttgggatgacgtgtatgattgcacttgctgaaaagggtatcacatatgagttcaaagatataggacttgatgaacaagagtcctcttctcctacaaatgaacccggtacacaacaagatttacaatctcatccacaatggcaaacccattagagaatccctcattgctgctctttacatcgatgaagttctgaattgactgatatgtcttgttgccttttg

SEQ ID NO: 8093 - DNA, 246 bp, Glycine max
  Clone ID: PAT_MRT3847_107318C.1
gtaccgggcacgaattcacgggtcaatacaggcgtcagtaaggctagcaaaaggggacatgccggtgttgcaactaatacttcatgtatatgcatcgtcaggcccttactagatgccaatggtcatgatctaattttaagtgattcttctgatgaccagattgacagttagatgaagccaattcacgttttaaatcgtcccaataccgagttcaattcgtcacaagttgaatgttatcactcaatg

SEQ ID NO: 8094 - DNA, 255 bp, Glycine max
  Clone ID: PAT_MRT3847_107319C.1
tacgagatgacgcaggtttagttcggattgttcgattgcgatggctatgaagatgcttatcgatggtgaagctgaattggctcaaggtggtggagaacaagtgtcgaattttgactttgacttgttcattattagggctggaagtcgtggcgtccgtgtcgctagatcgtcatccacttttggagctaaagttgggacgtgtgagcttccatttcatgcaattaggtcagagcaactggtagagtcggtggaacg

SEQ ID NO: 8095 - DNA, 291 bp, Glycine max
  unsure (1)..(291): unsure at all n locations
  Clone ID: PAT_MRT3847_10731C.1
caaaagagaggaacagaacagaactgggagaagcnagtgcaanantcnatcaacttnggntaanatcngccngnnctncnatccctttntttcccgtaggcaaaaaanatggttgnnctaacgaaagcagcacgtgggaaagtttaaatttantngagaaatatctcctcaggtttagagcattggaaaagatttcattgataattgagccaaacacnatgagtgncccacctcatccatgatggtggccnacnccaacgaagaagttttnccttganggagtctgacatc

SEQ ID NO: 8096 - DNA, 850 bp, Glycine max
  unsure (1)..(850): unsure at all n locations
  Clone ID: PAT_MRT3847_107320C.1
aggacccatttaacccattcaaccattaccaacaacaacagcatgggcctcaaaaagtgccggcaccactcattccaacgccgcaacctgctccgnctcatcctcggcgccatcgcggccttcgtcgtcctcatcctcctcgtcatcttcctcatctgggtcatcctccgccccacaaagccccacgtccggctccacgtctacgcctcctacctctccactcccacacccaacaccctcaccctcaccatgcaggtcaccctctcctcccacaaccccaacgcgcgcatcggcgtctactaccacgcgctccgcgtctacgcctcctaccggagccagcagatctccctcgccaccgcgctccccgacacctaccagggccaccgcgacttcgccgtctggtcgccgtttctcttcggcaatgtcgtccccgtctcgccgtttgtgctgacctcgctgcagcaggaccagagcgccgccggcgccgtagtggtcaacgttaaggtcaacgggagggtcaagtggaaggtcgggtcttgggtctctgggaggtaccatatctacgtgaactgtcccgcgtatattagcttcgccggagatcggagcaatgtcgccggagtcgtggcttctccggtgaagtttcgcctcttgcagagttgcagtgttgatgtgtagaagtgatcaggtttttgttctgccgctgcttcaagcatcttgttcgctagtgcgtgtcttgtctttttttttttttttctcttctcgttgctctgtatttaaattttttttaggagtgattacttggataaagtcaacttaaagttttatttatatgaaatagctattccacgtg

SEQ ID NO: 8097 - DNA, 2258 bp, Glycine max
  Clone ID: PAT_MRT3847_107321C.1
cctggcgtccgcttggccttgccttcaggcttgtgggggacaaggacaactcctctattccacccacaccgatgtctccttccaattcccccgtcgccgccgaaacgctattttccggcacggtgttcctgattctcctccacctctctctcttccttactcccacactttctcttgacttcctattcaactccttcgccggcgtcaccaacctcactctcatcaaagatgcccgcgtcgacgcctccgtcatccgcatgaacaacgactccaaccaatactcctacggccgcgccttctaccccgtcaaaattcccatgctcaaaacaaacacctccaataactcctcttccatttcttccttctccacttcctttgtcttctccatcttgccgcagatctctaccagccccggcttcggcctcgccttcgtcctctccaacaccaccgaccctcccggcgccatcgccagccagtacttcggcctattcaccaacgcaacctccccttccgttttccccctcgtcgccgtcgaattcgataccggccgcaaccccgagttcaacgacatcgacgacaaccacatcggaatcgacctcaacaacatcgagtccataaacgccaccactgccggctacttcaactcctccggcgccttcgtgccggtgcgcatgcgcaccggccagaacatccacgcctggatcgacttcgacggcgagaatctcgagttcaacgtaaccgtcgcgccaatcggcgtttcgcgccctacgaaacctactcttcggtatcagaatcccgccatagctgactacgtgtccagtaacatgtacgtagggttttccgcttcgaaaacgaactggatcgaggcgcagagagttctcgcatggagcttcagcgattcaggacctgcaagggagctcaacacaacgaatttaccagtttttgaactagaatcgtcttcttcctcgctttctaacggcgcaatagcgggcatcgtcatcggttcttttatttttgttcttatatgcgcttctggtttttacttatggtggcgaatgaacaaagcgaacgaggaagaagacgagatcgaagactgggagctagagtactggccgcacagattttcctacgaggaactaagttacgcgacaggggaatttcggaaggagatgctgttaggttcgggagggttcgggagagtgtacaaaggaacattgcctaacaacacggaaattgcggtgaagtgcgtgaaccacgattcaaagcaagggttgcgtgaattcatggcggagatttcaagcatggggaggcttcagcacaagaacttggttcaaatgagaggatggtgcagaaaggggaacgagcttttgctggtttatgattacatgccaaacgggagtctcaacaagtgggttttcgataagtccgacaaggttttagggtgggagcaacgccgtcgtatacttgtcgacgtggcagaggggcttaactaccttcaccacggttgggaccaggttgttattcatagagatattaaatcgagcaacattctgttggacgccgacatgagagggagattaggggactttggtctggccaagctttacacgcacggggaggttcccaacaccacgcgtgtggtggggacgttgggctacttggcgccggagctggccacggtggcggcccccacttcggcgaccgacgtctacagcttcggggtggtgctgctggaggtggcgtgcggtaggcggccgatagagacgtcggtggcagaggaggaggtggtgctcattgattgggtcagggagctgtacgcgaaggggtgcgcgcgtgaggctgcggatttgaggattagaggggagtacgatgagggagatgtggagatggtgttgaagctagggttggcttgttgccaccctgatcctcagaggagacccaccatgaaggaggtcgttgcgcttctcttgggagaggacccgccggaggcacccggaaaagtcttgtccgatttggttcgcggtggcgaggattccgacgaggccgcgcctttgcaaccctcccctcctcctgtttgagtttttttttttttgcacgagtttgagatttttttcactgtacatattagacttattttttttttttcctcgttgtgaatggattttgctagattgcggtttgatttgatgtgtatttgtttgttttgctttttattattggatttcttatagtttcaatcaaaaaccatcttgactctc

SEQ ID NO: 8098 - DNA, 720 bp, Glycine max
  Clone ID: PAT_MRT3847_107322C.1
ttcccgaactctgcttcactcacactagggttttgcttcttcgctgctgtgattccgtcggaagaaaatgggaaccggttcgaccttggccgggaaagaagttccaatcgtcggaagcgacgccgttcgctggatcgatctctccgttccatcttcgtccaacattgccgccgtcgacggcgtcgccgcccttcccaccaccgacgaccgcgcctcctgcttcgtcatcggagatcctcctacttatctaatctggagaattcacaaagctcaacctcagtctctcgagttgctcgaactcgccgcttcgaaagagtttccacgcgtgggactcagattcacgttccccgacgcgctctgccccttcgctttcatcggcaaaaatgagatttctggtgcttctagattcccttacttgctttacgtgttgactgtgtctggcgtggcttacctattgaaaattcgaaatgtttctgcgtatacgtccgtttctgttttccccgtggatgaacttttggaggttaatgtgcgtgattacattcccaatcacgccacggcgataaccaccgtgatggcaaccgttggaggtcttgttgttggcacgagtgatggttctgttttctgtttccagctgggtgtagttgaccctagtgctcccggtttcatgcatgagctgagagatgaagccggaatcagtcgcttgtggggtttaatatcacg

SEQ ID NO: 8099 - DNA, 350 bp, Glycine max
  Clone ID: PAT_MRT3847_107323C.1
ggcgctgggcttgtttattcattgaaaccattcaaggttcccttgtggtacctggttagaaacagatggggcataaaagccataaaccgttagtaaagataggggaccgtgaatgatatgaaaagtatcttgggcttgagctttgcccacttaaactatgacatagctctactgagtctactgccgaatgttatgacacatccccacttgctgatgcctatatcggttctcacatatttaccttttgattgcaaggattctttggaagcagtgtactgtcttttagagcgagggcgggtgaagaagatccattgtataaaccactgtcttgcttctgtcgcgaagactct

SEQ ID NO: 8100 - DNA, 280 bp, Glycine max
  unsure (1)..(280): unsure at all n locations
  Clone ID: PAT_MRT3847_107324C.1
gtgatagtaaatacaagaataataatatcatacaacttctgaaacaagatgaaaggcaattatcatttatcaacanaatactatctcaaaactaagctctataccagtactcatgtacaacgtcatcctactccattacaaagctatatagtctttctcatcccttgaattacacttatgcttcgatcaattcccgaatagggattctatctatcttaattgaagaaatatcagtgaattctgacaatatagctctgaattcatctccaccagggtctcc

SEQ ID NO: 8101 - DNA, 491 bp, Glycine max
  Clone ID: PAT_MRT3847_107325C.1
ctgtcttttaattttgtaatgaaatcgcactcctttcaattaaagcatccttttttaattttatcttcagtgatttaccctcagctattatggtggtgctttattctctcgggtggaaagatgctaaaattatattcaattgattgaattaatttataacttactcgagaggttctaaaaagttttgcccaatctatcagggcaatatagcttatatagagacaatagtcccgcacaattatgccgaccaattcagggaggaatttgttaaggattgcagtgaagagaaaggaagtgtttacgtgtcatggcgtgggacgagcctttaactaactgtgttcattccatttagctcagccctggatcacaagttgcggttcttgttcaaacttacatcagtctttgtcggcatcagttacattttcctttggcacaaaccgcctcactttattactgtattgtatgcaattccaagtgtgtatattgtataa

SEQ ID NO: 8102 - DNA, 561 bp, Glycine max
  unsure (1)..(561): unsure at all n locations
  Clone ID: PAT_MRT3847_107326C.1
gacattactaacggaggtctttatagatttaataaattaataaccagttaactatatatagtgtaacaaaattcttttacttatatatctttagtttgaaggttataattctactccgtttctatttcttttctccaggaattctatggtgggaagaaagacttggccaagtttaagagtgacgttgaatcatttatatgttcagtgatgccagcaagtagctctctacagattaaaacaactcctggtatatatgtatacattattaactaaaaatttaattattttttattatatattaatattaactagagattcatgcatggtattattggtggaaaatataaatatttttttattgataaataaatattaattgttagttttatttattttttaataaaaaagatcatgattttttttcttaatcatccaaccaattaaactataaggcaactaattaattttgtttcatattcaattaatattgtggctgacggatcactcangtgggcttctatttactagagacagcagtaatttgcaatatgccacgagctc

SEQ ID NO: 8103 - DNA, 343 bp, Glycine max
  Clone ID: PAT_MRT3847_107327C.1
tcgagagcgagtcatctgtttcatgcatatccatgtttcaatctctttttattgtaaaaaagcttcaataacaattttttttgtaaacattagcaatgaatagcgtcatataaacttctatctacactttcactccctcctcattatcacacccactattcatctcatttggaacagcatcatgaaaattatagaaatttgacaatggctaatctcatttactttaatctagaaactaaacctgatatcatataaaatcttatcaatgtcattacatctttcttaactaacatccatagtttttatatcttctttcactctataacttaatttcatttaccat

SEQ ID NO: 8104 - DNA, 387 bp, Glycine max
  Clone ID: PAT_MRT3847_107328C.1
cctatgtcagatttaaaaagtcttattttgagttgttttttggctttagttccacaatgttttaacagtttgacaatgatttccaacaggaaagactgattgttctgtctgtcactctagcactggtgtattttgtagagcctgtctcaagattcgatatggtgaatgtgagaaaaaatagttcagccaacgataaggggcatctaaacaaggcaaacaaattaaaattgcattaagaaaaatccttggtttcacattaactttggttgtacagtaagggtattcatgacttagcttttgttaacttatattgagtccacccctggccaatctttacagcttgggtttatatatgcttgatatatagtagtataatatatgtaattg

SEQ ID NO: 8105 - DNA, 492 bp, Glycine max
  unsure (1)..(492): unsure at all n locations
  Clone ID: PAT_MRT3847_107329C.1
cttgaatgtgattacaaattcatttcatttcttgctaatttttgttgacttttctcattggctggctggatgtcttactgagttttgagagaatatttatccaagaggccatccctgatgccatacttccattgtctgattaggatactggatggatgggtacgggtattataataaccaccccatggatactcatttatttgtctattaaatattacatatatattatgattttttgttatttcataatgattttttactggataagcacatggatacccatttcctgtctggatacctgttaatgtaaatggggatggatacagtggcaacactacccaccccattgacataccttggatacatgatacgataatatcagaatttgaaatgcgtttttccgtccctgcattagatgctataatggctgtcattntacactcaactgattntgtatttatttgattgctttttcaataaaaagaatttata

SEQ ID NO: 8106 - DNA, 876 bp, Glycine max
  unsure (1)..(876): unsure at all n locations
  Clone ID: PAT_MRT3847_10732C.1
gttccaatggaaaggcaaaggcataagtaagaatggaagctggtagtaaccgaaagactgagtggtgatctcgcagaaagcctttttccgatcgcaccaacacttgttctccctcccttgttcccctcaaacctcacaaaaccataaccaacccttcttcttccgcacccgctaaatgcaacaccgctgctactatcaccaccaccaccaccaccaccaccaatctccataattccccaaaccctccctctccctctccctctcccctcgagattgttgatgttgaagcctctgagcctattacagtcgtgtacagtcgaagacgttcttcaaataaaagaaagagggataaagggaaggcagtggctgttcctttcactaccacgcccaatttcaagatctctcatacttgtgagaaagatgatgagtttgaaggtgcaaacctacccaaggccaaggcaatgacagttcctcgtacgaagaaacagcgtgctttgtcatctgaaaaagatgagttcaaggatcaccagctgcaagaatttatacaaaaacagaaagcttactttaaagagattgatgaatttgaactggaggttgaatctggtgatgagttggattaggtggaagagatgtaatataactgtaaatagcagcttgaaatttctgtttttgtaggctgtatagttgagatatcgtaattttcatgagatgaagtaactaccccccagccatctctctgaccaaatatattgtaatagtctagtgggaacaatcgaagttaaaattgttgtgcctaacactgtaacacattaattgtccttagaattttttctcttatttctcttgtaaatttcttctcaaagttataattcnttt

SEQ ID NO: 8107 - DNA, 239 bp, Glycine max
  unsure (1)..(239): unsure at all n locations
  Clone ID: PAT_MRT3847_107330C.1
accatatggcggnngctgaagccatgtgtcctcgttggtcggctcttcttctttaactgaacgccttgtgtatctcaagagcaaaggttgtcaccattgatgtacgtgcagacaaactgtctcatacaaaccggctacatttatcttgatgttaggacggttgaggagatcaagaaagggcatgtattttcaaataatgtccttaacatttcatacatgttggatacactcaatggcaa

SEQ ID NO: 8108 - DNA, 286 bp, Glycine max
  Clone ID: PAT_MRT3847_107331C.1
tacggctgcgagaagacgacagaagggcacacctaacctaataagataaagagataaaaatagaaagataaaaatgaatataaaaggcggtataaagtgatagaaagatagagatgatcaaatgatgaatgctaatgtgatgtttggagtgattgatgattgtttctgtatcattattcaaaacaaaaacataaaacttaggatgtaaaaatcatgaacatgaacaactctaggtgttatgttacagcaaattatcaatggtgttctccaaagccggaagtcacag

SEQ ID NO: 8109 - DNA, 247 bp, Glycine max
  Clone ID: PAT_MRT3847_107332C.1
ttttttttacaaaaaccaactcattatcattgcagttcattggtcacctctgggccattggttattcttacaagccaacaaatccaaccggttcccaactgatcacacatgggtttaccaacttctaaggaaaagtttttaatttttatatttacacgcccagtgactttggtttttactgaaaaggaaatctctttttttttctttgtgcaaggggtccttggatcaactaccatggtcccttaag

SEQ ID NO: 8110 - DNA, 573 bp, Glycine max
  Clone ID: PAT_MRT3847_107333C.1
ggatatattaaaaactcgtaacaactaaaaaatttacaatatagacaacacaattgcatgccaaatttaaaaaaaaaaaaaaagaaattcttaacttgtctcctacgtacccaataactagccaaattggataaacaacgccccataagaagagggcgccaagaaaatagcaaaccaaatacagtaagagaaataggcaagagacaaataagtgactataatcttcttcgacaaaactataaagtggacccaacaagccaagaccattcaactttagccccttcttgagtagagcggcttctgtctgtctagcatcaatctccaagacagagtacttccaaatgctgtttagcaacacaccaaagaaattatttggtcctccacacaaggattttgtatcgcttccctccacggggttggtacgcaaaatcaagctgggggatgattctgtgaagcatctcatcaacgtgtttggaataccacaacctccatcttctgaggtgaaaaatctcatctggaatctgcccctcaaatccagcattagacaagttcaaataacgtaaattattcagc

SEQ ID NO: 8111 - DNA, 1089 bp, Glycine max
  Clone ID: PAT_MRT3847_107334C.1
atgtgggtgcgaggggtaaatttttttgaaacactattagaggctagcaaagaacaaaatcagaggttttccatcagctctgataaatctgccatatactcagtcggtattaggcctcatgagctttctcatattcagcagcttactggatttagcttgggtgactttcctttcagatacttggatgtttcccttttatcatctagattaaatgtatgtcattatgctcccttgctttccaagattactggtctgattcagggatggagcaaaaagtctttatcttatgcagtttgttctccgaaaaaagaagggggtttaggcttttttaatctcaaggactggaaccttgcgcttctttcccgtatcctgtgggactttcattataagaaagattctctatgggttcggtgggttcaccattactatttcagagggagcgatgtgtggaattacaatacttcttcatcagattcagttttgataaagaaaatcattcaaataagagactttattatctctaaagagctaagtacggaagatgccaaaaagaggattcaatcttggagcaccaatgaacaattgcttgttggcaaagtctatgaatacattagaggtgtcaagcctactgttagttggtgttctgttatatggaacccagcaattccccctaagatgtctttcattttgtggtttgttaaaaggaatcagctgcttactcttgacaaagttgcttttttgaacaagagttccctctgccctttatgttcaaatgagtatgagtcaaatgctcatttgttcttttcttgcaggaaatctctccaagttttggctcacattcgtgatttggctcctttccgcaagcgtttcatttctttacagcggattactgactctttaattagggacatatccacatcaggtgttcaaggaaaatttcgttatctgactatagcaattacagtgtactgcatttggctgtctaggaacaagctgatttttgaagattatcaatttcctgtaatagaagttattagcaagattaagtttcttatgtatagacaagcgcacctgttgcatttgttttag

SEQ ID NO: 8112 - DNA, 263 bp, Glycine max
  Clone ID: PAT_MRT3847_107335C.1
cggcggccgcccttttttttgttttttttttttgttttttccgggaacaccccatctaatgaaattgctagaagccccttgcaagtgctccaaagaacctgatcatcatcttatcattaaaccttaccagaatttttaacatttattggtaaattacaatgcgattttgggcttgctacctaatgagcatggtccaaacctttggcatgtgccacggatggatttaactcatctggatcaaccgaattggagagagagccctg

SEQ ID NO: 8113 - DNA, 1250 bp, Glycine max
  unsure (1)..(1250): unsure at all n locations
  Clone ID: PAT_MRT3847_107336C.1
atggaatgtgtttcttccacttcctttagtgtggcagtcaatgaatccatttatgatcacttcaaaggacagcggggtcttagacaagggaatcatctctccccttatctgtttgtgctctgtttggagtacttttccagatatatgagcaacctcaaggatgatgccaattttaaatttcatcccaactgtgcaggtattcagctatctcatttggcttttgcaaatgatattatgcttctatctagaggagatatcccttctgtgtcaactatgtttgccaagcttcagcacttctgtagggtttcagggctttccatcagctctgataaatctgccatatattcagccggtattaggcctcatgagctttctcatattcagcaacttactggatttagcttgggtgacttcccttttagatacttgggtgttccccttttatcatctagattaaatgtatgtcattatgttcccttgctttccaagattactagcctgattcagggatggagcaagaagtctttatcttatgcaggtaagttagagttgatcagagcagttattcaaggaattgtgaagttttggatgaggattttttctttgccgcaatctgttctggaccagatcaaaacttcgtgccgtaattttctgtggggcaaagcggatattggcaaaaacaagtccttggttgcttgggaacggtgtgtggaattacaatacttcttcatcagattcagttttgataaagaaaatcattcaaataagggactttattatctcgaaggagctaagtacggaagagaccaaaaagaggattcaatcttggagcaccaatgagaattgctgaggaataccaaagaagaaacagcattcctctggaccgcgcaatagccagtgacacttctggagactatcagagcattctccttgcactggttggacatgaggattaagttttctttcttaatctgttcagttgtcatgggattgcttgttaggctatttgcttttcctcttatcatgaatgtgatattgctatggatctctggacagaggaattcagtggcttgctgttaacgctgcttatgaggggtataaattatcatgctgtttcagaataatatgttttgaatgtcgaaaattcaagacatagcacttcacatctttattaaggatcaattatatgttttagaataataaaatatttgctgcgtcttttactactgttaaaaaaaagnnnnnnnaaa

SEQ ID NO: 8114 - DNA, 231 bp, Glycine max
  Clone ID: PAT_MRT3847_107337C.1
cccgagcctagtcgcttcgacggggtcacaaacaatcacttcgtgattagtcatcctttcattgagtccagcatacctcctcattgcaaaagcctccataactcaagctctaagtcgcctcaaaccaactttggcaacttacatcacttacagcttgtaccatgacaggccttttctgctcacctatatctacaactacatcttcattcactcagccaatgcatcctgctt

SEQ ID NO: 8115 - DNA, 2484 bp, Glycine max
  Clone ID: PAT_MRT3847_107338C.1
cggacgcgtgggtttttttttttttttttttttttttttttttttttttttttttttttaaaaaacaagggcgggaaccttgggcttttttcccggatcatgggagactttcattggaagaaagattctttatgggttcggggggttcaccattactatttcagaggctcctttccctctctaataagggttcctctttccttctctagcacaatttacaatctcaatggctggaatttgctgtggtgttgttggagaaggtgacactccggctccactcgagcccactcctcgcccctccaggcgccggagtttggacatcttacctttaaaatatatcgccgacatgcccatgccgccgccggaggctttacggaagcgtcccaagctcaacctcagggactgcgataacgcaattgaaaattgcgacgaatccactggacacaaggtgacgaagaaggaatccaaagtagactacgacgacgacgtcgtttcggaaactaagaacgtaactgtttcggaagttgaagaagaatctcccaagttcggcgtgacgtccgtttgcggcaggagaagagacatggaagattccgtctcggtgcggccttgcttcacccaaggcttccactacttcggcgtcttcgacggtcacggttgctctcatgttgcgactatgtgtaaggagcggctacacgagatcgtgaatgaagaaattgaaagcgcgcgcgagaatttggagtggaaactgacgatggagaacggattcgctcgcatggacgacgaggttcatcgccggagccagagcaaccagaccttcacctgcaggtgtgagctccagactcctcactgcgacgccgtcggatccaccgccgtcgtcgccgtcgtcacgccggacaaaatcgtcgtctctaactgcggcgactcccgcgccgtcctctgccgcaacggcgtcgccatccctctctcctccgatcacaagccggatcgacccgacgaattactccgagtccaatccaagggagggcgcgtgatttactgggacggtccgagagtgcttggtgtgttagcaatgtctcgagccataggtgacaattatctgaagccgtacgtgatttcagaaccggaggtgatggtgacggagcggacggaggaggacgagtgtttgatactggcgagtgatgggttgtgggatgtggtatcgaatgagaccgcatgtggggtggtgaggatgtgcctcaaggcgcagaagccgccggggtctccggggagtgacgtggcggctgacggttccgaccgtgcttgctccgatgcgtcgattctgttgaccaagttggcgctggcaaggcatagttcggataatgtgagcgtggtggtggttgatttgaggagggatcaacgacaatcatcaaactacaacgacgacttcgttaaggacgggaagaccaaatcagagggaggaggggcgtggttttccatcagctctgataaatctgccatatactcagtcggtattaggcctcatgagctttctcatattcagcagcttactggatttagcttgggtgactttcctttcagatacttggatgtttcccttttatcatctagattaaatgtatgtcattatgctcccttgctttccaagattactggtctgattcagggatggagcaaaaagtctttatcttatgcagcggatatcggcaaaaacaagcccttggttgcttggttagtagtttgttctccgaaaaaagaagggggtttaggctttttaatctcaaggactggaaccttgcgcttctttcccgtatcctgtgggactttcattataagaaagattctctatgggttcggtgggttcaccattactatttcagagggagcgatgtgtggaattacaatacttcttcatcagattcagttttgataaagaaaatcattcaaataagagactttattatctctaaagagctaagtacggaagatgccaaaaagaggattcaatcttggagcaccaatgaacaattgcttgttggcaaagtctatgaatacattagaggtgtcaagcctactgttagttggtgttctgttatatggaacccagcaattccccctaagatgtctttcattttgtggtttgttaaaaggaatcagctgcttactcttgacaaagttgcttttttgaacaagagttccctctgccctttatgttcaaatgagtatgagtcaaatgctcatttgttcttttcttgcaggaaatctctccaagttttggctcacattcgtgatttggctcctttccgcaagcgtttcatttctttacagcggattactgactctttaattagggacatatccacatcagggctattttctgctgcacagattttggcctcttggacatcatcagcttcacttgttttccattctttgctgatgcggatgctttcctttcagctcaaagtgttggatttggcgttttga

SEQ ID NO: 8116 - DNA, 445 bp, Glycine max
  Clone ID: PAT_MRT3847_107339C.1
gcttcaatcaaaactggttgggcccaaaattaactatcctcttaatattaactatatatcaacaaataatgtttttatagttatttaaaaatcatattttaatatatatttcattagaaaaaagaagaaaaaaaactaaaatcataatttaacatactatttcagttttcaaaagaagaaaaatgttttaagcaaataaaaagcaaaatcgtatttagataaatgatttctttattatgaaattgtataccaaagtataatttatctatttttgtaatttaaaaaaataccgtttatgatcatttttttaaaatttatttattttcctaattaatccgaagtctgaacaacgtcaccgtatggttagaatgattttgcctcattagggatttaccaaaatataacttatcctttttttcattttcatacaataaataaaatataa

SEQ ID NO: 8117 - DNA, 158 bp, Glycine max
  Clone ID: PAT_MRT3847_10733C.1
gtccgcattcaatcgcatcatatccatatcaattacattacatagttaagggttgtttctttgcaaaactcataagctccatctgatgaaaaacaacgaattactgtatgttgacatgactttgccttattatcgtcaccactttggaaattcaactt

SEQ ID NO: 8118 - DNA, 1321 bp, Glycine max
  Clone ID: PAT_MRT3847_107340C.1
atgcttaagtccattgacttcctagcccagttctgtacttggatcatggaatgtgtttcttccacttcctttagtgtggcagtcaatgaatccatttatgatcacttcaaaggacagcggggtcttagacaagggaatcatctctccccttatctgtttgtgctctgtttggagtacttttccagatatatgagcaacctcaaggatgatgccaattttaaatttcatcccaactgtgcaggtattcagctatctcatttggcttttgcaaatgatattatgcttctatctagaggagatatcccttctgtgtcaactatgtttgccaagcttcagcacttctgtagggtttcagggctttccatcagctctgataaatctgccatatattcagccggtattaggcctcatgagctttctcatattcagcaacttactggatttagcttgggtgacttcccttttagatacttgggtgttccccttttatcatctagattaaatgtatgtcattatgttcccttgctttccaagattactagcctgattcagggatggagcaagaagtctttatcttatgcagggaacggtgtgtggaattacaatacttcttcatcagattcagttttgataaagaaaatcattcaaataagggactttattatctcgaaggagctaagtacggaagagaccaaaaagaggattcaatcttggagcaccaatgaacaattgcttgttggcaaagtctatgaatacattagaggtgtcaagcctactgttagttggtgttctgttatatggaacccagcaatcccccataaaatgtctttcattctgtggcttgctaaaaggaaccggctgcttactcttgacaaagctgtttttttgaacaagggttccctctgccctctatgttcaaatgaggctgagtcaaatgctcatttgttcttttcttgcaggaaatctctccaagtttgggctcacattcgtgatttggctcctttgcgcaggcgtttcacttctttgcaacgcattactgactctttaattaggggcagatccacatcaggtgttcaaggaaaattacgttgtttggctataacaattacaatctactgcatttggctgtctaggaacaagctgatttttgaagattatcaattttctgtaatagaggttattagcaagattaagtttcttatgtatagacaagcacacctgttgcatttgttttagcatcttggtataggtcttcttgtattagggagacttttgattttctttaactgcggggtatgctttgtttattaaaaaaaaaaaa

SEQ ID NO: 8119 - DNA, 1181 bp, Glycine max
  Clone ID: PAT_MRT3847_107341C.1
atcagcaaaagtatcatatatattatagaaaagtgccaggggtactaagaatacaggagtatgactatgtgggatgatggtcccactgttagattccagactagatatattgttacatttggtcaatagctacccatctatcctagttacagaaagctgctgaaaggttgctggactagtaattgtaatgctcggtaaatcctttctccaattctctgaaccatgaccagaccaggaacactgcatcctccatcattctgctaccattaaatggttcgtttcagaaaatagtccgatttctgtgctgccaaattgtgaaggttaatgcaacccaccagcatttccatctgttgtactatttcaatccgagtaggccaaaagagtgttgcaagaagtgatgccttgggttggctgaaaatgctcccgatgtgttaatccatgatagggattcccaccacacgggttgtgtttttgtacagctaaagaacagatgtgaagcttcttcctcatagtttctgcagaaaaggcacaatgtgccatttagctgtacttgtctccttctcaaattatttttagttggcaatctgtccttgactagcctctaggcaaaaatggctgcttttgctgggatttttagcttccatatctcctcaaatgcaggatcagtatttgcctttgctgcttcatgttgcatcaaatggtatgcactccttgtagagtagtgtccattaggttccgatttccatacccagcaatctgctaggtgtcgatgaatggggaaccgtgatgtgtcttccaaaaagccaatagttgtgtccacttcattgtcgaacaaaggccttctccattgaaatttccactcccatgttgtttctgtatgacttcccacttgttgaatgagctgttgttgttgacaagatatttggtacatccttggatatttcctcattaatgtctccccttctccaaccaatttgtcctcccaaaatctaaatttgtccccacatcccaccttccatactatttcattttggagtactctattcagctatgttcgtgtgtcacctccattagatcctaccaccatattgattcattgttggctcgtttgccttcagctaatgctcgccacccaccatatttcgactccaatattctagcccacaattctgaattttgct

SEQ ID NO: 8120 - DNA, 942 bp, Glycine max
  Clone ID: PAT_MRT3847_107342C.1
atggaatgtgtttcttccacttcctttagtgtggcagtcaatgaatccatttatgatcacttcaaaggacagcggggtcttagacaagggaatcatctctccccttatctgtttgtgctctgtttggagtacttttccagatatatgagcaacctcaaggatgatgccaattttaaattgcatcccaactgtgcaggtattcagctatctcatttggcttttgcaaatgatattatgcttctatctagaggagatatcccttctgtgtcacctatgtttgccaagcttcagcacttctgtagggtttcagggctttccatcagctctgataaatctgccatatattcagccggtattaggcctcatgagctttctcatattcagcaacttactggatttagcttgggtgacttcccttttagatacttgggtgttccccttttatcatctagattaaatgtatgtcattatgttcccttgctttccaagattactagcctgattcagggatggagcaagaagtctttatcttatgcaggtaagttagagttgatcagagcagttattcaaggaattgtgaagttttggatgaggattttttctttgccgcaatctgttctggaccagatcaaaacttcgtgccgtaattttctgtggggcaaagcggatattggcaaaaacaagtccttggttgcttggtcagtagtttgttctccgaaaaaagaagggggtttacgtctttttaaatctcaaggactgaaaccttgtgtttctttcccgtatcctgtgggactttcattggaacggtgtgtggaattacaatacttcttcatcagattcagttttgataaagaaaatcattcaaataagggactttattatctcgaaggagctaagtacggaagagaccaaaaagaggattcaatcttggagcaccaatga

SEQ ID NO: 8121 - DNA, 377 bp, Glycine max
  Clone ID: PAT_MRT3847_107343C.1
cgaagaccgtacgcacgttcattgaactaacgcccgaatacatgtgaatcgaataacattcatcatcatggatacagattgcatctaatggcaaaagcactgggaagtctattcacgattgcatgctcccatggctggaactgggacacatataccctgacttacgacgccgccagattcttgctcaaaacgaccactttcgaaccttcataaaaagggccaaaaacattcgaccgtgtgcccaaatgcccgaaccacttagaatcattcataaaaatcgtgaagcttcccttgccaaaaatagatcatcttccataaggggctttatgcgcaatggaacttccgtccaaaagaaactgggtcctaaagaaagctta

SEQ ID NO: 8122 - DNA, 426 bp, Glycine max
  Clone ID: PAT_MRT3847_107344C.1
atccggaaagctggtgcgccggcgggtcccgtgccggactcgccgcggcgtcccacgcgtacccttgcctccgttttcacacccattctatctgaagcattgcacacgtggacattaggcgtctgctggaggctgtaaaactagcagactaccatccaagccagaatctgagatcctcatgcctttgtctacaccacggctttctgcggagacgccaccactatcggtgaatatgacgcccactgctgtgcgcaaatcaccacgaccctatgcctacgcacctgggaagcaactcaccagagctgcaaaggggtacgagttacagaatccattgattcttgctcaacacgacctcaagagagcaaaagatcgtcttatgcaggctgacaatgagaagctaaaagcagtctgtgacttgactgaagc

SEQ ID NO: 8123 - DNA, 881 bp, Glycine max
  Clone ID: PAT_MRT3847_107345C.1
atatgcagcaatattttattttttttacacaaatacggggttagatacttgggtgttccccttttatcatctagattaaatgtatgttactatgctcccttgctttccaagattactgacctgattcaaggatggattatcttatgcaggtaagctagagttgatcagagcagttattcaagaaattgtgaatttctggatggggatttttcctttgcctcaatctgttctagatcggatcaacgcttcgtgccgtaattttttgtggggcaaaacggatattgacaaaaataagtccttggttgcatggtcagtagtttgttctccgaaaaaagaagggggtttaggtctttttaatctcaaggactgaaaccttgcgcttctttcccgtatcctgtggaactttcattgtaagaaaaattctttatgggttcggtgagttcaccattactatttcagagggagcgatatgtggaattacaatacttcttcatcagattcagttttcataaaaaaaatcattcaaataagggattttattatctccaaagagctaagtacggaagaggccaaaaagaggattcaatcttggagcaccaatgaacaattgcttgttggcaaagtctatgaatacattagaggtgtcaagtctactgttagttggtgttctgttatatggaacccaacaatcccccctaagatgtctttcattttgtggcttgctaaaaggaaccggctgcttactcttgacaaagttgcttttttgaataagggttccctctgccctttatgttcaaatgaggttgagtcaaatgctcatttgttctcttcttgcaggaaatctctccaagtttaggctcacatttgtgatttggctcctt

SEQ ID NO: 8124 - DNA, 207 bp, Glycine max
  Clone ID: PAT_MRT3847_107346C.1
cggctcgagtgctgtaacttgttccatagcagcgatcggaatcgatcttatcgctgggggtaagaggcacagaggaatagaaccgtagcactatcgactgacatcgacctcaaagtacttgtgaagctctatgcggtcattgttcgcaggactggcagcaatttcaatgctgttataatcaagcgcttgttcatgagcaacgttaac

SEQ ID NO: 8125 - DNA, 556 bp, Glycine max
  Clone ID: PAT_MRT3847_107347C.1
cgacgatggccaagaacgcgctgctcaacctgtacctgctggccttcaacggcgcctcgtgcgccggctgggcctacgtgctgtacctgaccgtaaccacggtgctgcaggcgcatgaggctggccaggactggagtcaggtggcccagagcacgtgggacgtggtgtcgctgcccctcaaggtggtgcagaccatggccgtgatggagatcgtgcacgccgccgtgggcttcgtgcgctcgccgctgggctccacgctcatgcaggtgagctcgcgcctatggctcgtgtgggccatcaacgtgctgtgccccgtgtcgcgctaccagttcggcttcccgctcatggtggccagctgggggctcgtggaggtgccgcgctactcgttctacgcgctcaacctgtacaatgcggtgcccggcttcctcttcttcctgcgctaccacctcttcatggtgctctacccgtcgggcgttctcggcgaggtgttgtgcatggtgagcagcctgagcttcctgtccacgggcgcgtacgccatccagctgcccaacacgca

SEQ ID NO: 8126 - DNA, 372 bp, Glycine max
  Clone ID: PAT_MRT3847_107348C.1
gatcaaatgacatcaaaaataaaactggctacatcatgtccttaacggaaaatgcctccatattcaccaatgacaatatgactgcatacccgtatctattcgccttctaatgttcggcataagcgagagccacgctcagtaacttcagtttgatacattacaaagaaaaaacaaagaaacccctttcttccccctgaatcatatcaccattggaagccccctttgagcactgtaaaacatctacaagatcctggcccttagctcggctggattgggaccgatgggtccgtagcttacgtactggcccaacactgcgataagcgctgactaaatgtccctaaaggaagacacccccagaaggatcatctccct

SEQ ID NO: 8127 - DNA, 214 bp, Glycine max
  Clone ID: PAT_MRT3847_107349C.1
ggggggaaaacaggagaagggtccccgtctttttttttaaataaaagttgaaatatactggaatttttttaacagcaattttgtcccaacaaccccttcaaattttaacttgagaaacaaactttttgaaatgggttacccagcccttttttggtaagggactttttgatgtactgggaaacccatttgaaacccttcccattggacccgtggg

SEQ ID NO: 8128 - DNA, 268 bp, Glycine max
  unsure (1)..(268): unsure at all n locations
  Clone ID: PAT_MRT3847_10734C.1
aagcatgttgcaattntntnnttttatctttttgtggaattgggagttaaatagtgaaactagatcaaatatttcatctgggtgttgctcacttcttcttcttctattgtgattncngatgtttttccatagggatgttgcaattttgtagctttttatgaaattaggagtgaattaattcatctgctattgtgattnctaatgtttttttcattagggtatgcaaaattttgagttttnatncttcngaaattaggngtgaaacagt

SEQ ID NO: 8129 - DNA, 410 bp, Glycine max
  Clone ID: PAT_MRT3847_107350C.1
agcccggagcctgtagagcggacagccgtcgctctcgatcttgagcttttatttattgaggcaaccatggccctctggacatcatgcgtgaaccgcaccaaaacacagaagaagcagaatgaggacatgatcatatgcaccaatgataaagagagcacataatgtagatgacccaaaaagcactggtaccaaaagcacacaccgactaacaggtataaaatgaaccgaaaccaacactgaaaacacgaaaacccgaccacgattgtgataaaacggctagaacacttggaactgtgaaacggacgaaccccaaccaaatttttagggctagccatgccagggatccaaaacaaacgctgcgctagaggagctgccgagaatgtccatgacacaatgcttagtctgccaaa

SEQ ID NO: 8130 - DNA, 563 bp, Glycine max
  Clone ID: PAT_MRT3847_107351C.1
aattacacttttagcaaaaacaccgacccccgggtcattaaacaggacacctgcaccttgctctacttgctctatattctacacttatcatgtcaaactactttcccactggataaggacaacagcccatcttttgcaaaaaatactgggtcccaccattttgggtttaataaccctatacaattaaaacctcaattcttgacttttaactttccctccatatcagtcctcccatttgaatcttcggttaaattgtacggctaacaagaaaatcccaaagtatttggggctgaacaccggggttctgaaatagcgcacaccctttactgatgtttccaaccgccccttggccccgaagccgacaagggctcatttaaaatccattccaattccttaaaactttgggaactcttggtccaaaacattgtggggtaagggggggaactgggaggatttactagacacgcctaccaatgtctctgggaaacttcccttggggaaggtggaaaaggatttgatcccatgcccatatgcccctattgcatggacattgcatgattgga

SEQ ID NO: 8131 - DNA, 607 bp, Glycine max
  Clone ID: PAT_MRT3847_107352C.1
attcccaaaaaatgtttgttgccgataaatgctcccttaaagcgtggttgaaaactcagcatccatgctgggggactcatccattccagcaatgactttgttacttggagcaaatcttctgaatgggttaaaacggtcaggaatgaagttttcacttcttgtggggatcattgtgattagatacattgccttaccaattttaggcgtggtcattgtaaaaggtgcaatccattttggcattatccaccacgatccgttataccagtttgttttaatgcttcaatacgcccttccacctgcaacaagcataagtacaattactcaattatttggagccaggcaccccgcgtccgcgattgttatgctagcaacttatgtctgtgcctcattttctcttacactatggtccacattattcatgtggcttgtcctataaatgtattcattttctttacctcaggatgtcttactgttaaagaacagcatgttatgggttacagattattctagtcaaattagcgttattgcaaggtagaataaattcctgcttcagtttgtagcaaaatacttcagtcatctgcaatataatcgttcctgacgttcctcc

SEQ ID NO: 8132 - DNA, 403 bp, Glycine max
  unsure (1)..(403): unsure at all n locations
  Clone ID: PAT_MRT3847_107353C.1
acgagaaaatatgtgctcttgttgtagaaataaaattttgaatgacaaacgggtactcttgacttgaacccaaggatgcactgtatatataatttaaggcaacttgattgacagcgtcttgttctgccttctcatatttgtggtaatctctgttttgtgaacgttttaaggtagggccagtaccattaagaacataacatgattatggttaaagtggtttctttttcagttgaagtagtttgtttctggaatcctgtcaagaataaaaaaaaaaaaaaggaatcaaggacttatgtggaattgtgggtaaaatcacaagagtaggagaggatgaaaacatttcatatgcgtaacaccataataaaatgcaattttgtttgaaatagaattttgaagtgacagn

SEQ ID NO: 8133 - DNA, 804 bp, Glycine max
  Clone ID: PAT_MRT3847_107354C.1
tgcatgacctgcagtgaagaagatacaatttattgtagttaaaacaatatttcgcttaaaataaagttttttgaaaatttgatcaccaaaagatttggaaatccaatcgttaattaatatacaaatcaattaataccacacatacatttttatgctgagataccatataggcatctggtaacgtgaatgggttgccttttgtagccccagtggactctcctccaaaccagtttggaatctgcatgacaacaatacagacagagaaaaagcatatatgaatgttaaagataccatctactggcgcatacacatgtgtgcacacatatatccactattttactttccttacaagtcaatgttaaagaaacattcataccacaaaatcagtgaactgatcagggtccacccgtgtagcagactcagcttgaacatcagagacacctgctggatgagataatgaatcatggggatcaaccatgcccaatgctagaggctcatcccatcggttaactgtgggcacaattccaacttcattcatatgcttttccaattgggagtaaaatgtattatagggagccacctgttgacattatgaggaaagagttttcaaaccatgaatccagctgagaagagtgacatttgtaaaaagaaaaatatacatacattgtaagaactaagaagttagtatcactagaaccaaaaatgtgatcacaaaaattaagatgccacagaccaattttttccttctaaaaaacaaatactatatttgtagtgatctaaaagatggttaagtaatctgttact

SEQ ID NO: 8134 - DNA, 270 bp, Glycine max
  unsure (1)..(270): unsure at all n locations
  Clone ID: PAT_MRT3847_107355C.1
tagtttttgaactattttttcaaataaaanatatttaaatgaaattcaatttggttaatccaactggttttgtagaaataatttgattaaccaaattggttttataaaatagtgcattcattttttcttgaactaattcgaaaaaaaaatcaattcgatttatgttgagttataatcccaattcaatttgaaccggtagttgcaagctgccagtgaagtcttggagggctgtatctgaactatgaatccataatcctggaagtccaaccc

SEQ ID NO: 8135 - DNA, 424 bp, Glycine max
  Clone ID: PAT_MRT3847_107356C.1
caaaaaaaaatctttaccaacttttccggaaaacaaaattaagggggcaaaaggcccctaatcacacattatatactcgttttcattgacccaattccctgcctttgggagtgtttttttcaaaattgaaacaatgtcacttgttttgcatacccgtttagccatttgccaaatacacaagggggctgattagggctactagttataatacaaaaccctaatataagggcaaagtcgggggggaattcaacttttatgattggggaaaaatgaattaaataaaaggtccttgaaaaccccaaaacctgaaaatcgtgttcaaaaaatttgcccattacaattttttgcagcaaatatacagcgggacttaccggtcttgttgtccctcaaaacatagagggaaaacctaagattctgttgttta

SEQ ID NO: 8136 - DNA, 390 bp, Glycine max
  Clone ID: PAT_MRT3847_107357C.1
aaccactggccaattttgtaactaccatttactggaccatgaattcaacatgcaggttctggcctttggccattccagccttagggggcattttttcaattaattttgagagagggagttttaagggaaaaccttaaaagttcttgatttgggtattcaatcctaacttggttgtttggttaaagaaaacccattctgaaccacccaaccagaattaatgggtaaaagggaccttttttaattttcattcctctaactttggcttgggggggcataactttttctaaaaatatcatcaaatcaagattgctggctttctagggaaaaaaaccaaaccattgttattgttaaacaaaaagcagttgataagcatctcagcagggggcacta

SEQ ID NO: 8137 - DNA, 232 bp, Glycine max
  Clone ID: PAT_MRT3847_107358C.1
gcaaggcagggggcgctgggatctggctgtgcaggaaagggcagcccggagccagtgcacctacagcaaccccgagggcaccgtggtgctcgcctgtgaccaggcccagtgtcgctggctgaacgtccagctctctccttggcagggctccctgggactgcagtacaatgctagtcaggagtgggacctgaggtcgagctgcggttctctgcggctcaaccgtgtctatcga

SEQ ID NO: 8138 - DNA, 277 bp, Glycine max
  Clone ID: PAT_MRT3847_107359C.1
cgatgttgtggctctcctgactatgctagaggtggaggcattacgaggccatctttttctcttgcccatcatgttggccaatgttgataatctgacgatggctatggcacaacaactatttgacggtatatatatgatgatgacgggtacaacaagaagaacaaactgagagaaccccagatgtcaatgacggtgcctcgttgagacattttagatagcttgctctattgctacaagggtgggcgccacgggtgatcttcttcaactggtaaacaca

SEQ ID NO: 8139 - DNA, 441 bp, Glycine max
  Clone ID: PAT_MRT3847_10735C.1
ataaaaaatagaccttcgtttggggaaaaaaatagcggccaaaacccaaacggggataaaaagttccctcaggggggcccccccatgggggaaaagataacacccctttgtaccccaagatgaaccccaggttatccaagatgaagccccagtgacctggaaagccgaattcccagggccaaagggtgacaggcccccttagggcgccgatgaaagcaccccctttcaggaaaaaaccccagagggcttgccgggggggaagcacctgggatccgagaaggaaaaagcggggcggcaaaccgggggggccaacaaggggtaagggggttagagatgtccaaaagggggttggccccggaaacacaatttgtggctcccaccgcgggggggttacacccgcaggggggaaaagtggcccctcccagggataggggggggggg

SEQ ID NO: 8140 - DNA, 232 bp, Glycine max
  Clone ID: PAT_MRT3847_107360C.1
attgactcttctggtcgggaactagttttactctcaacctcactctttcgggctccatgaacggaagaacactcgtagaaaaccgtcatgcccaaaccgaaacaacacccaccaccagtggcgggggtattgaacatacgactttggagcatgcatttcccaccctgccccatgtagcgcacaatgcaagcctttgcaaagggaaggaacttaaaacaacttggtcaaaaac

SEQ ID NO: 8141 - DNA, 299 bp, Glycine max
  Clone ID: PAT_MRT3847_107361C.1
tgctagagcttgaacagagtggggtatagatctcgagctgaaaccataaagttgttgataattgacatgtagcatctgaagaaagaacatgattgaatgcaattgtggatgctatttcatcgaagagtttatctcgtataattaattttgacaatgagaagaaaccccattacaatcttttaccataatttcaggatactgtttaatcaccctattaaatatcgccaactagttcatcaaatattttatatgcaaaagggactacttagattgctgcacatgcagcacaatcaatacta

SEQ ID NO: 8142 - DNA, 619 bp, Glycine max
  unsure (1)..(619): unsure at all n locations
  Clone ID: PAT_MRT3847_107362C.1
ctgggcaaccggcgacgctaccttatcgcgttacattttctttccgttctgtttcttattaacgtcttaggtttgggttcatcacacatacatacatatatatatacatacatatatatatacatacatacatatatatatgtattatttttccttattatatttttgtgtgatgaattttagctatggatcgtataagatcacggtgatgactccataaaattcaagctcaacagaccggaatgcagagctttctctctttgtggagattgccatgcgtgtcgattaccccgctgaactgagtgatctcttccatttttagttttcttatttctttgattattactcgcttcgttgaaatgtttgtttttctgttgtttttttttcaatgttgcaattgttagtatgttttgtgtgtggggaaagagtcatcgcaatgaggatacaaaagctccctcttctgatttagagttgaggaaaattgctggcagaatcgaaccataaaatcttagtcatcactgagtgatctctttcccccttaaattttgcctttttctcttatactgatcatcattgtacctatttttttttctcttaatctaattcggnttatgaatta

SEQ ID NO: 8143 - DNA, 268 bp, Glycine max
  Clone ID: PAT_MRT3847_107363C.1
cttaattattaacacttccttagttcaatatggggaagccctggactctctctctttcttccttacgcttgctactcttgtcgagtgcatgctatgctattagctacagcaagctcaacgagtgccaactcaacaacctcaacgcgttggaacccgaccacctggttaagtccgaatggggattgattcaaacatggtactgtcaacaccctgagctgaaatgctccgatcggactgtttccaaacttacccttaaccgaaatggcct

SEQ ID NO: 8144 - DNA, 1927 bp, Glycine max
  Clone ID: PAT_MRT3847_107364C.1
cccgcgtccgcccccacaagcaaagtttccttttttagtttatataccgtgtgtgaacgctttttcccttacctttccctctcaactagattattcttttcttttatccttatttcattggctttgattttcaatataactagaacaattttttttaatttaattttcttttattaactgaaaagttgagagaagctatcccaaaacccagtcaccttcttatatttgttcacaaagttgaatttggtattaacttagctataaggaagggattgcattgattcaccctccaagttggactttaaggtgctttagctttgagttctctcttgtactacataattgaggcttagctttttcccatgatggattctgcatttttcctttttgggtgcttttgaagcctacgttattgatgggacttgtttttactaaatgggcatgtgcattcttactatgctgttgtctcatcacttctggggggttgcatggaggttctaaagtgagaggagtgaacttaggagggtggctggtcatcgaaggttggatcaagccttcactttttgatggcattgccaatggagacatgcttgatgggacagaagtgcaatttaagtcagtgacattgcacaagtatgtatccgctgagaatgggggaggaatgaatgtgacagttgacagggatgtcccatcttcatgggaaaccttcaggttatggagagcatctgaatcagaatttcaatttcgtacctccgaaggccaatttcttacatgtgatggtgggggctgctctgtctctgcaacagcaaaatctccttcgacatcagagacatatggaattgagcggaatggaaaaaataggattcacctcaagataaagggaggggcatatcttcaggctacaaccaatggtcagcttacagcagactacccaggtgcaccaggatgggatgataatgctgccacgtttgaaatgacaattgtatctaataaattgcatggagattaccagctagcaaacgcatatgggcatggtcgggcaaaagacattctcaggagacatagaaatagctttatcaccatagaagatttcaaatttctatataaacatggaataaatactgtgaggataccagttgggtggtggattgcttatgatcctgatcctccgagtccatttattggaggaagtcttgaagctctagataatgcattttcatgggcacaggaatatgatattaaatgcataattgaccttcatgctgctcctggttcccaaaatgggatggagcatagtgcaagcagagatggatttacaggctggccaacttctcctgattatatttccgactcattatatgttattgaatttttagtttctagatatgcaagaaatcctgctttgctgggaattgagctattgaatgaaccatctgctgccacagtttcattagatgttttaatttcatattacaagcaaggctaccaaattgttcgaaaatattcatcatcagcttatgtgataatctgccagagaattggtgttgccgatcctatggaactttatcaagccaacataggatctcacaacttagttttggatttgcatttctacaatctcttcgacacatttttcaataatatgagtgctatggataatattcaatacatatacaaaagccgggaaggagaatgggtgaatgagtggaatgtaacaaacggatcccaaaaagattatcaagactttgcaagagcacagctagacgtctataatgcagcttcctttggatggtgctattggacactaaaaaatgatgagaagcactgggattttgaatggagcattaggaacaactatcttcaattaggtaaattgtatacatttggaggcaaactggcactgcctctattgcatgtacatttgtga

SEQ ID NO: 8145 - DNA, 134 bp, Glycine max
  Clone ID: PAT_MRT3847_107365C.1
acgcctacgggatttttttattttgttttcccagagagcacacgcatgcaattagttaatcaattcggaaacagactctttcactgggcatcggaggtcacttacgttcatgcttactccagcatgtcggacac

SEQ ID NO: 8146 - DNA, 2181 bp, Glycine max
  Clone ID: PAT_MRT3847_107366C.1
ctttttcccatgattgattctgcatttttcctttttgggtgcttttgaagcctacgttattgatgggacttgtttttactaaatgggcatgtgcattcttactatgctgttgtctcatcacttctggggtatattcagtggaggggttgcatggaggttctaaagtgagaggagtgaacttaggagggtggctggtcatcgaaggttggatcaagccttcactttttgatggcattgccaatggagacatgcttgatgggacagaagtgcaatttaagtcagtgacattgcacaagtatgtatccgctgagaatgggggaggaatgaatgtgacagttgacagggatgtcccatcttcatgggaaaccttcaggttatggagagcatctgaatcagaatttcaatttcgtacctccgaaggccaatttcttacatgtgatggtgggggctgctctgtctctgcaacagcaaaatctccttcgacatcagagacatatggaattgagcggaatggaaaaaataggattcacctcaagataaagggaggggcatatcttcaggctacaaccaatggtcagcttacagcagactacccaggtgcaccaggatgggatgataatgctgccacgtttgaaatgacaattgtatctaataaattgcatggagattaccagctagcaaacgcatatgggcatggtcgggcaaaagacattctcaggagacatagaaatagctttatcaccatagaagatttcaaatttctatataaacatggaataaatactgtgaggataccagttgggtggtggattgcttatgatcctgatcctccgagtccatttattggaggaagtcttgaagctctagataatgcattttcatgggcacaggaatatgatattaaatgcataattgaccttcatgctgctcctggttcccaaaatgggatggagcatagtgcaagcagagatggatttacaggctggccaacttctcctgattatatttccgactcattatatgttattgaatttttagtttctagatatgcaagaaatcctgctttgctgggaattgagctattgaatgaaccatctgctgccacagtttcattagatgttttaatttcatattacaagcaaggctaccaaattgttcgaaaatattcatcatcagcttatgtgataatctgccagagaattggtgttgccgatcctatggaactttatcaagccaacataggatctcacaacttagttttggatttgcatttctacaatctcttcgacacatttttcaataatatgagtgctatggataatattcaatacatatacaaaagccgggaaggtcaactgcaggccttaaacaattcaaatggcccacttattttagttggagaatgggtgaatgagtggaatgtaacaaacggatcccaaaaagattatcaagactttgcaagagcacagctagacgtctataatgcagcttcctttggatggtgctattggacactaaaaaatgatgagaagcactgggattttgaatggagcattaggaacaactatcttcaattaggtaactcacccagcaaacggagcttgaacattctaggattgttaggattagcatgcacctggttttgtctacttccatttttgtgacagcttttaccaggactggaagcatattttatgcagccatttcttgatttctttttattttgtcatcctgttcatgttgttggaaattgcagaatgcaataatttgaaatatacagaatttctgcgcaatgcctattccatacctctatgcgaaatctataggtaaattgcgagcataattgagcaaattcctgtctatatgtcttattaatataagaataagaaaaggaagattaaatttgtctataccgtaaaaggaagcctatcacggtggatgaaatgaggaggcaaaccaaaacttccttggcttgggtgtatagttaaacgccatacataacagtaatattatttataccggtcaatgttttattaaaaaaaaagctgtgaccgctttgattttttaaattattttattggcatgccttataaggctagaggttttacttagttttttggcagtctatggaaacttgtgggaatgattaagttcaattggtctgaaatgtcgtttttaagc

SEQ ID NO: 8147 - DNA, 967 bp, Glycine max
  unsure (1)..(967): unsure at all n locations
  Clone ID: PAT_MRT3847_107367C.1
ggtccggaataacccggtcgacccacgcgtccgaattagttgcgttcctcgtatcatattctgggtttatggttaatacgaaaagcacctctgaaactttcaggggaattaaatagccataaagtatgaacaaagaaagatagaaattaagaggccccaaaagctgcacacattgcccttcttgtccaggaatttgagatctaacattaacaacaactatctaagcactagcaagctagttagcaaggcaataatgaagttcttgttccagtgcccctgctgctcttgcttttgcttcatgaagccaaagcaagggaaggcaaaggtcaaggaagtcaaagaaaccaaggtggaagaaaaaaaggttgaagagaagattgaagaaaagaaagattgaccatgtaactccatttcaagctctctttggttattattagtatttttttttttgcttttttcttctcaccgatattatataagcatgcacaacaaatttgtgcttctttgttcctataattaccactgccatgatgcattcctactactgttagtttgaaaatgtacaatgcctttgcaagtaacttcttaaaaatggaaaataaattgtcatttcagctcttgcttattctggtttgagtggggcactggaaacactgcggacaaggatttggtgcaaaggaataccaaatgctgggaatttacctacaaggctcttgcatcatatctcttattttttcaatcattatatccattatttggttctatacagagcccatcctagtgttacttcatcaatctcccgacattgcaagaacagctgcactctatatgaagtttcttatcccgngagtgtttgcatatagcttcttgcanaatatctcgaggtttctccagacacaatctgtggtaatgccattggttgcactctcagctcttncactgntgatccatatnggtattgcatatg

SEQ ID NO: 8148 - DNA, 668 bp, Glycine max
  Clone ID: PAT_MRT3847_107368C.1
gttcctcgtatcatattctgggtttatggttaatacaaaaagcacctctgaaactttcagcagcatttatctgtcataaagtaacttttggctcatagttttgtataataaagtcgtttggcagtatatatatagcgatcagcaatcattcaagtgcttcctcatcagatatatgcagataacgtagagcagatgaaagaggagatagagaagatggtggcaagtaacagctcagatgatagcataggaacacctctagatataagtggaatccaatggacactgctggctaaagaaatagcggaagagatcaaaacaagggaattaaatagcacaaattattgaacaaagaaagctagaaattaagaggtcccaaaagctgcacacattgcccttcttgtccaggaatttgagatctaacattaacaacaactatctaagcactagcaagctagttagcaaggcaataatgaagttcttgttccagtgcccctgctgctcttgcttttgcttcatgaagccaaagcaagggaaggcaaaggtcaaggaagtcaaagaaaccaaagttgaaaaaaaaaaaggtgaagacaagaatgaagaaaaaaaaattaacatgtaactccatttcaggccccctttgggtatactaatatttttttttgcttttt

SEQ ID NO: 8149 - DNA, 205 bp, Glycine max
  unsure (1)..(205): unsure at all n locations
  Clone ID: PAT_MRT3847_107369C.1
ctcggcgttcgtgactcagccgccccatcccgagtcgctaaggggctgcggggaggccgcagcacctttctggaagacttggcttccgctctgacgcagggccgaggtgggcagtccaggccgagangcggcggccctgaaggtgagtgaggccctcggcagctgcagccggggtgtctggtacccccccggcgtggtttaacca

SEQ ID NO: 8150 - DNA, 219 bp, Glycine max
  Clone ID: PAT_MRT3847_10736C.1
gactaattctagatcgtcagcgtattactattctgaggggaaatcatgaaagtacgcagattactcaagtttatgggttgtatgatggatgcctgcggaagtattgtagtgctaatgtttggaagagctttaccgatttggttgactatttccgttgacagcgttggttgaatctgagataatttgtcatcatggtgggttgtcgccatctattgaaaa

SEQ ID NO: 8151 - DNA, 292 bp, Glycine max
  Clone ID: PAT_MRT3847_107370C.1
agtttttaacattaatgcgtccaacgtgctcaaccagaaagtaaaaaatgggcatcctcttgcccttttccccttattaaataacacaacttaaaaacagggggggagtgtgggcacagacatgggggggggttcatctcacagtggggaacattaaaatgggggggaggggtaacctgagacattttcatacccaaaaaatgggaaattttggtgggttggattgccaagaggtcctaaattattaaatttagcaattacaaaaaaaaagggggtaaaatggggggggggg

SEQ ID NO: 8152 - DNA, 184 bp, Glycine max
  Clone ID: PAT_MRT3847_107371C.1
catacactttcgaacacccactcaaaaatacaggggccttattaattgcatatcgttacctcttataaaatccgaagagattattacacaatccaaagtctaatctcccaaagatactaccctccaaattgctgaacatgcttattggttattaactcccctattatccaaaaagtatacccac

SEQ ID NO: 8153 - DNA, 429 bp, Glycine max
  Clone ID: PAT_MRT3847_107372C.1
gaaagatagatagaaattaagaggccccaaaagctgcacacattgcccttcctgtccaggaatttgagatctagcaactaacaaggcaataatgaagttcttgttccagtgcccttgctgctcttgcttttgcttcatgaagccaaagcaagggaaggcaaaggtcaaggaagtcaaagaaaccaaggtggaagaaaaaaaggttgaagaaaagaaagactgaccatgtaactccatttcaagctttctttggttattattagtattatataagcatgcacaacaaatttgtgtctacttaatttgtgcttctttgttcctttaattaccactgctatgatgccttcctactacaattagtttgaaaatgtacaatgcgtttgcaagtaacttcttaaaaatggaaaataaaaaataaattgtcatttc

SEQ ID NO: 8154 - DNA, 255 bp, Glycine max
  Clone ID: PAT_MRT3847_107373C.1
ccacgttcaagctcttcttgtgcagcttgcaagttcttgaagagaaggtgcatacccaattgcatatttgcaccttactttcgctctgacgagtgcaagaaattcgccaaggtgcacaaggtgttcggggcaagcaatgtgagcaagatcctcgttgaggttcctgaggaacagagagaggatacggtgaattcgcttgcttatgaggcggaagcacggcttcgggacccggtttatggatgcattggtgccata

SEQ ID NO: 8155 - DNA, 323 bp, Glycine max
  Clone ID: PAT_MRT3847_107374C.1
ttttaaaataacacacacttcacacatcataacgacagttccactatgtgtggttattttcaaaggcgcatagcatgctcaacaagagggtcctgcctaatttcctttattgggttaatcaaaccaacacgcgaaatacaccacaaagttcagatcatgcacaggattccgcactttcggaagaactggtattaacctgtggcccataaaaagctgtcataacaccattggcggcggctacaaaatcctgggagatttccaataaaatatcaaaaactgtctactgagggggggtgtcaaaaatgaaactcaaatgccatgaa

SEQ ID NO: 8156 - DNA, 416 bp, Glycine max
  Clone ID: PAT_MRT3847_107375C.1
aattcggcgcgagcgaaaagcagctttaagggtatgtctatctatgtaaaattgtctgcttttaaaaacctgatattgatggaaaagacattttgatgaactgtatgccctattatcctttgatatcatctctcttgatttttgctactacaactgtggtctccattggtctcatattcttcaattattaatagttatgagaagtgctatcaatacactatttgacaaactattttaaacactctaatattgctttataatttattgaaaactacaaaattgagtgagactcattaaataagttgtgggtccaacaaagtattgtgatcttcaataatttactaccattagtaaagagaatgttcagtagagtgtgttgcatttatctaataggtatattactacttatctaaata

SEQ ID NO: 8157 - DNA, 277 bp, Glycine max
  Clone ID: PAT_MRT3847_107376C.1
cgttgacagctttttagaatggtgttgcgtcaagagtatgagaggaatatagtgtagtgtgcaaccttaaaaaaaaaaaaaaaaaaaaaaaaaaaaaaaaaaaaaaaaaaaaaaaaaaaaaaaaaaaaaaaaaaaaaaaaaaaaaaaaaaaaaaaaaaaaaaaaaaaaaaaaaaaaaggggggcccccaaaaaaaaaccttgtaaacccgaaaataaattccaaaccggaacttgaaggcttacaaatttcccattaaggaaacttaataaaacctg

SEQ ID NO: 8158 - DNA, 242 bp, Glycine max
  unsure (1)..(242): unsure at all n locations
  Clone ID: PAT_MRT3847_107377C.1
aaaaaaaaaacgacgccgccgcacgcctgctacaaaatacaaaaaacaacaaaattttacttcttcaaaaaaacaacaaaatcctctcaacgcttctctcaaccttcctcaanntacacaaaaaacncctatcaagtcccttctttttcataaatttaaaacattttacctaccaattaatatattataccatcattattatccctttaccatttcatccacacaaatattataccccttac

SEQ ID NO: 8159 - DNA, 304 bp, Glycine max
  Clone ID: PAT_MRT3847_107378C.1
aagctggccgcctcgcttgaccggaccggaatggactgtccgacccacgccacccgcctttttttcttggaatagaccaagctgtaagaactctgactgatgttgggtgtccttcttagcctgctatcgttcatgattgtatagtgtccacaatgccaggcgatagtaccatagatgttacattgtcaaccacaaactatatttgtgcatagggtcacgtcaacggtgttaaacactaacatagtttgggctcccatgctgatgctatctaacgaagacttgtttgggatcaattggcaccata

SEQ ID NO: 8160 - DNA, 295 bp, Glycine max
  Clone ID: PAT_MRT3847_107379C.1
cagggatcccaattcacttttaaatttatactcaaaaacatagttccaaatttggccctcgattttcctactctcaaatatcctttgacaaggttgaacaaaagatgactctaacattctcaaactctgaaattaccaaactgtttgtgttgtctaccaaatttgtgaattctagtttgaaacaaccagtatgcgatgtgaatcttgcatgcaatctatttgtccaaaattgtaatgacggaatctgatcggaatattcagctggtcgaagcgtctgcccactgattgttccaag

SEQ ID NO: 8161 - DNA, 483 bp, Glycine max
  Clone ID: PAT_MRT3847_10737C.1
gtggttcccttttttttttttttttttggttcaactctttttaaaatttatattctttttactaggttaaacggccaaaaacactaagcgtttattattaattttttaaccaacccagggggcttattaccaggcaaaaccttgccattttccccccacggggtgaaccccgggaaaaaaacaaagcccaaaacctcccctttaataaaaactttctaacccaaagcttttttaaaccattttttgtttgggcctctgggaccgcccttaaaaagggaccccctaatttttttttgcccctatggaacccagttaacatacctttttgaaccgaagcctctttcgcaaaaggagaggctgtgtttttccctaaattttccttcccccatagccccaaccatggcccccccccccaagacccccctggcccaaatttttcttgcaaaaagcccataaaaatcctggttccctttggggataaag

SEQ ID NO: 8162 - DNA, 242 bp, Glycine max
  unsure (1)..(242): unsure at all n locations
  Clone ID: PAT_MRT3847_107380C.1
aaaaacagncacacgaanaaaccgaaaagncaccattttgttggggaacacatacaataaacattgaacaatcagaaacanaattagcccacccctccccagggggttggggnnacaccaacaccaatttttacntaacgncaccccaggagggggggccgggggggaacattatttttaaaagcccgcccaagcacccaccgnggctcgcagagntagcaaactgaaagtgaatgttggcc

SEQ ID NO: 8163 - DNA, 383 bp, Glycine max
  Clone ID: PAT_MRT3847_107381C.1
actcagtgtaaaattactttggaattctcaactaaaattcaaacaatgcactaggttggtagaaatgagaaacaaatgctaccgtcacctctctacaaatgagaaacaagtaaatacaggagaattctcataaaaaatgaaaacgcaaaaatgctgaaagaatgaacctacaaatctggaaaaaccagagagcattggcaatcataatcatgcgcgagcataaactggaagcaaataggaaacattacttctgctataaaactatacacctcttcgatactcaagttgctttgtgtttgccagtaaaatttctcgaatatagtttgctattgctttgcagccttcaattgccagttgcataacattttccaaaatgtcaattg

SEQ ID NO: 8164 - DNA, 462 bp, Glycine max
  Clone ID: PAT_MRT3847_107382C.1
ctcggttcacttcacttctctgtctttaaaatttcacatttttcacttatgtgtgtaattccaggattattcatgtatgtggggaatttctttttgccccttttgtttttgtgtttgctagagctcaagtagggttggattttccaaggaattttggttatttcaaatgggtcgtgtgtgattttgtaatttgagttcagaaaatggcaatttgttactgtttgttgagatttcgaaatattgggattcaatatgggtcttatgtaatttttttttatctcttgttgaagggtaggttcaatttggctggttgcatattgaaaattgttagaaatgcacttgtcttcagtcatgtgaaaagagagactgggagagcagaagttgttaagaaaaatcttacaatgaatgatatctctaaaaaattgatatttaactgggccacatggcactgtgtaatccatg

SEQ ID NO: 8165 - DNA, 222 bp, Glycine max
  Clone ID: PAT_MRT3847_107383C.1
aggaaaggaaaataattcattcaaaattgaacgggacaattaccatttaaaggtgccaaaagttttccacgggggaaaagccaaaaacccttcggggcaacccattatttcacaaaatggttatacaagggctgttaaaaaaaaaattgctttaaaaaaaaccgggaactgggccctttatatgaaacggggggattacaaccttgggaataaatttcaagg

SEQ ID NO: 8166 - DNA, 279 bp, Glycine max
  unsure (1)..(279): unsure at all n locations
  Clone ID: PAT_MRT3847_107384C.1
cnaagtttcctctacaanagcacaatntgtnantggcaanaccttcaaatatgntataattggtgntggtncacatncttcagaagantttcctgaaaaggnagatcaagaanaacccaaaaagantgntgccagattgagacaaagaatagatcctcaatacaatgaggttcaggctcagatggnaanaaattngtntaaattgtctcttgatgatgttgnaactcctanaggttccatgttgganctaaaattnctcnatctaaaatncttcccaag

SEQ ID NO: 8167 - DNA, 400 bp, Glycine max
  Clone ID: PAT_MRT3847_107385C.1
aaagaggaaaacggcccaatatgaaaaatttataaaaaacatttcaaacttacctttttttttttgcccctaaaacattgaaaatgccaaaaatgttccccccaaggtccctcccaacttctaacacttggattagcacaacaaccttcacaaacaaaaatatttacttgccaagtttgctttgcctccaattcaaaactggaaaaaaggccccctttgaataccatccttggtagcatttccaaaaacagccttgttcaagtacttgacagccaattggacccttttgacatttttttgtttttggacaaacttgttcccctacagaaagagcttttccaaagttatcttgggctgctcaaaggtgggagggccatttttggaattcacaagctttttc

SEQ ID NO: 8168 - DNA, 249 bp, Glycine max
  Clone ID: PAT_MRT3847_107386C.1
cccaaacgtacaactagcatgtcattttatgatcccagtactcatcatagaggggactaattacattgtacaaataatcgcagaagacaacaccatatctctccatcaaacttacattactgggtaataacaaacatattgtaaacatgcaaaattaccatgcattgccaacacaaaatgacacatacttaaagtataatgatcaaaattatacatccaccaaagtcaaattcaagctctataacaaat

SEQ ID NO: 8169 - DNA, 246 bp, Glycine max
  Clone ID: PAT_MRT3847_107387C.1
tgaaattctaaaaatgactgggagatacttaataattcaatcatggaaatctatggattgggcaaattaatcggagggggcgtatggtttcaaaaaaatggtgtactaactcccatttcttattcattatccggattaaccgatcaactagctgtgctatcgaacatatgcttctggtactcaaaaatctcgcggaataaatctgcctctacttatatttgcaccctattcctactactctttggg

SEQ ID NO: 8170 - DNA, 199 bp, Glycine max
  unsure (1)..(199): unsure at all n locations
  Clone ID: PAT_MRT3847_107388C.1
ttntttnnnnnnngttttattttttttttttttnattttttttttgggaagggagaaatttttgggaccgaaaatttccattaaccgattttaaaggctaaacccccttttacccgtccttaaacccaattggaagtttacagccttcaacggttcctgactttaccggcttacactttaatgtaaaaaaataaatagg

SEQ ID NO: 8171 - DNA, 430 bp, Glycine max
  Clone ID: PAT_MRT3847_107389C.1
gaatatgtattagtatttgggataatgtatttgtgttgtgattagtattttgattgtgtgtgatctctttcactaaacatgtaatggttgggtttgtaacaatgaactattgagtattgactctttttttgatagataattttggaaagcagttgactttttcttgaaatgtaaacatttttcttcttgatgattttttatatattggaaatatgtctattctttcagcttccacctgagcattttgccctcatgttttctgattatttgatagtttatggagaaaaatacttatcttccctccaaatcatattctaaaattctctagaatacttgttaatgggctgtcactccagatccaagtggcccaaattcccatcttatatgctttttaatggaccctactgaaaaatcttttaattttctgaac

SEQ ID NO: 8172 - DNA, 312 bp, Glycine max
  unsure (1)..(312): unsure at all n locations
  Clone ID: PAT_MRT3847_10738C.1
tctgtctcgtacatacacgcggccgagctcgcggccgagtctaatcagacgagcccggtcaatgcgctgaagactactttgactgctcccctgtgagggaggatgcccaatagggaggtgacattatccggataccagagatcagatgtgaccgttccagtgactacaagaaactgatttggaggaaacttccaaaggatgacaactgtaactgcctagagacaaaattgctaaaggctagagtacaactggctagtgantggttggcacaaaacatcacggcaactacactgttggtgtctggattgcaaa

SEQ ID NO: 8173 - DNA, 1197 bp, Glycine max
  Clone ID: PAT_MRT3847_107390C.1
ctgaagcaaatgcttccatggctatgaatattcgcagtgtattcggttcactgaaaaggttcactccgcttcactcctcaaattgggtttcgcacaagccttgactcacctcctgcaagatgtcaaccgagacaacgaacctgttcacattgttgctgctcccggtgtctccaattctgatttctggtgtggctgttgaatcctctttattcactccggagttcggcaacagtgttgaatgctctttattcaagcagtggttgcataacttgcaaactgagaatggggttctagctgatggtaccttggctctgagacaagttctaattcagggagtagacatgtttggaaagcgcattgggtttctcaagttcaaagctgacatttttgacaaggaaacagggaaaatggttccaggtattgtgtttgcaagaggaccagctgtggctgtgttgatgctcctggaatcagagggtgagacttatgctgttcttactgaacaggcaagggttcctgttggaagaattattttggaattgcctgctggaatgttggatgatgacaaaggtgattttgttggtactgcagttcgtgaggttgaagaagagattggtatgaagttaaatgtaggagacatggttgacctcactgctttccttgactctgcaactggatgcaaagttttcccttccgggggaggatgtgatgaagaaatcagtatttttctgtacagagggcgtgttgataaagagataatatcacaactacaaggtaaagagacaggtcttcgtgaacatggggagctaattaaggtgcgtgtagtaccatacaagaaaactttggcacacaactgcagattgcaaagttctggtggctgttgcactgttagaaatggctatgaaagaagggctattgcctgctttgtctacatagtagccttttttatgattctcaaagagaagggctattccaaatttagtagccttcatacaaacctcaagagagtattagaaattaaaaatttgttgaaatttgatttttttgagtctatctttttatccgtgttgcatgctctgcctaacaacaaaagacttaaattgttattgatacgttttgcattcgttggaaatatctcttgccaagagattcttagttgcatccttgtaagctaatgagcatgtttattattgtctttca

SEQ ID NO: 8174 - DNA, 320 bp, Glycine max
  unsure (1)..(320): unsure at all n locations
  Clone ID: PAT_MRT3847_107391C.1
acccatcacatatcacaaacgccatctttaacattctacatccccaacaaaccccctntaaaaaactttccccctctttctccccctctttaactcatctccaaccaaacaaaattcaattttcccctacaccaacccctttaaataaaattgtctttcccaccccctaacacaaaaaacaataaaactcactcttatactacccccccccaaaaaaactcatatctcccaccaaatcctattcattccaaacacaaatactctcatttccaaactttctaatctcttcaaaaacaaacttctatttcctccctccaaat

SEQ ID NO: 8175 - DNA, 749 bp, Glycine max
  Clone ID: PAT_MRT3847_107392C.1
aattcggctcgtgactgaccacacacccttcttcatctctctttgatacccttttgttctttttggtgctttaatttgcactagcaagggggttggttttatttctgtttgcttgcaacaatggctgtggctaataagttactttctgttttgatcattgccctcattgccatttccatgcttcaaacagtggttatggcatctcatggacatggaggccaccactacaatgacaagaaaaaatatggacctggcagtctcaaaagcttccaatgcccatcacaatgctcaaggaggtgtggcaagacccagtaccacaagccctgcatgtttttctgtcagaagtgttgtaggaagtgcctatgtgtgccaccggggtattatgggaacaaagcagtgtgcccttgctacaacaactggaagaccaaggaaggaggacccaaatgcccttaataaccttatgctatgttcttcatcaaattaacaaagatataatatagctttaatttattatatccatatcatataattttcttggtcctttctatgtcttaattaaccaaaaaatgtatgtccattttggtcttagtaatactttgttgtattgaagatgccttttggagatagtgtgtgtgtgggctcctctgcatcataccactccttattatggcattgttggcttttaaatgaagtgtgtctaatactgttgctgtcatctatggattttttttcttttttcttttttaaaa

SEQ ID NO: 8176 - DNA, 457 bp, Glycine max
  Clone ID: PAT_MRT3847_107393C.1
caaaatccactgcctggggaacggttatatttttaaacatgctaatccgtacacatctaatgtctcaaccaattgtataacctttcaaactccattcacttctcgaatcttgcaacacaattttatggatacaggcaaacacataagtcagagtcttaattccttctcgttgcaaacgcaattgacactgtttttgggatctcaattgttatttaagcttccaatggtttctccataacttttcttttcgtagatacttcatcatcactggtaacaggtgctttggttgggacatcaggaaggtccaacttttctttaattcctacattaactgacggaggaacttacagaagatcttggactgtaagcttggatttcccaatcctcaaattctgctaaaatcttcttctcgtcttttgctgaataacttctcccccattatttcattaatttcatc

SEQ ID NO: 8177 - DNA, 393 bp, Glycine max
  Clone ID: PAT_MRT3847_107394C.1
aaaaagaagccccccccttgaaaagaaaaaaattgccccccccgggaggggaaaaaaaagggccgacacaaaatacttgccccttccaaattcccccccatacccccaaaaaaaaatgcaaaagttggcctaaaaaaggaaaattggggggggactttggagtctttttgggttggcaccccaagggaatggaaagttccctggggtgggcccaggccctgctggagggccttttgggaccggggagggcaaaaaaggccctggtctttgtgaagggcccggttttttggacccggacaatgtccccccctttaaattggttataggggccgggggcctggtacttttttttttttctcaccccccttttgcactttgggggaggggccagcc

SEQ ID NO: 8178 - DNA, 230 bp, Glycine max
  Clone ID: PAT_MRT3847_107395C.1
acgagggaaaacaaagcaagcagtgggagctgcttgcagcactcattgtgatgtgcaagtagtttttggaggggttataggctggccgtgagttgacgctgcttactttgcagaactctcatgggcgggcctcccaaacccaaaagacaacaataattttagtccaaaatgacattttttaagctgctttaaaactaaaacaaaaaaaaaaaaaaaaaaaaaaaaaaaaa

SEQ ID NO: 8179 - DNA, 621 bp, Glycine max
  Clone ID: PAT_MRT3847_107396C.1
cttcgaaaaattaatattcattcgctaatccaattccggaataaccaaccaacacattcaacatgaactccattatttagtatttcccgagcagcactaaatccaaccctatttctttatcgttatgtacttacaatcatcttaaataacgaccttcatcatgtcccaaataagaaacaaaaaaaagaaaaagattactagggcatgaccatcattactagttcattttaatccatcttccaagtgtttttgaatttgtgcagcatccctttggtagagattaacttttaatccatgcttcatgtacatggttaaggcaagctttggctccacagggtggttctccaccaccttcacatggtagcggtagacgatgctggccgcagcatatttcatctgatagtatgcaaaatctttgcctaagcacaagcgtggtccaccattgaaggcagtgaatttgtatgcagactcactcatgaaccttccatctcttaaccatctttctggcttgaactccttgcagtccttcccccatatgccttccattcttcccattgcatagattgcataaatcactttcgtccctttcttcagcaccgttccatttgggaatgtatcatc

SEQ ID NO: 8180 - DNA, 132 bp, Glycine max
  Clone ID: PAT_MRT3847_107397C.1
cggctcgagtaactagtcgaggtccgacagttacagacccggatactgaggaacaaggcgaagtattttatgttccaagggatgagaatttagggcacttgaagtctaaggatgctctttggattggaacag

SEQ ID NO: 8181 - DNA, 313 bp, Glycine max
  Clone ID: PAT_MRT3847_107398C.1
atcaaccatgctggatccgcatcttcactcatagacagtggctgtggatctgcccctacagtgcgcactaacactaattggtgcagatcacgtgatgcactgtgacctgagtacataccatctctcacacacaaaagttttcatcatacgaatttgtagcagagatgtacaagactgggcgtcaagagtagtgatgtttacagattaaatgagatgtgctgagtgtacgcttcacatcacgtaaatatgtccatcaatgtgcattggatctgccgacgtctcttcgtgacatgctgtgtgcgtatccacctcc

SEQ ID NO: 8182 - DNA, 269 bp, Glycine max
  unsure (1)..(269): unsure at all n locations
  Clone ID: PAT_MRT3847_107399C.1
atttgtttgacttttaaatagataggtaaacagaaataaaaaatactcatacagaaaaaaggaaagaatattataatcgtaagatttccaaaactaaatttttctctcattctaatttttctctcctttccgttaccagagttaattaatagcacaaagcgtgantnaatacccccaactccactcttttgaataagcataagcattttccactgtgcctatgatcgggagcaatttagtcttggaaaatgcnntgcctattcatcagg

SEQ ID NO: 8183 - DNA, 281 bp, Glycine max
  Clone ID: PAT_MRT3847_10739C.1
ggaccccactctcgctgtatcgctatcagtctggggatatatatctcttgacctgccattctaaagtactcaatcttacatacacgtcatgcaagctactatcatctctatagacacacctaaattcaatccactggcgcgcatacatacacctctcgaactgagaaaaccctgacgccacccaacttaattcgccttgcatgaaacccaccttaatccagcataacactagataggaaatatgaccataccggatcgggctttccaacatttgggcgacc

SEQ ID NO: 8184 - DNA, 1665 bp, Glycine max
  Clone ID: PAT_MRT3847_1073C.1
tacggctgcgagaagacgacagaaggggggatacgcccacatcatggactttatcatatgtggaacagctccaatttgcaacagcaaacttcatcaagtaccatgctttggcagaaatcaccatcatttgttaatgatgcttcttctccgggccttccacagatgtcaagctttgctagaacaccgcctcatatgctgagaacaccacatatgatggaccatcatgttggatcagcaccagttgttacagcctcaccatgggaaaggaaaaattcttacttgggagggtcccctgaggcttctggttttcgcttgggttctctaggaagtggaggttttcatggttcctggcaaatgcatccactggattttccttctcataacatgttttctcatgttggtgggaatggcaccgaactaacatccaatgctggacagaactctcctaagcagttatctcatgttttccctgtgagacatcctatgtcttcaatgtcaaaatttgatgcttccaatgaacgtatgagaaacctttatcaccgtagaaatgaagcaaacaccaacaatgttgataaaaaactgtatgagcttgatttaggtcgcatattgcgtggggaagacagccgaactacacttatgataaaaaatattcccaacaagtatacttcaaagatgcttcttgctgcaatagacgagcaataataaatgtaatgttggctatgcattcataaacatgattgatcctggtcaaattattcctttccatcaggcttttgatgggaaaaaatgggagaagtttaatagtgaaaaagtagcctcacttgcctatgcccgaattcaaggaaaaggttctcttattgctcatttccagaactcaagcctgatgaatgaagacaaacgttgccgtcctattctcttccatacagatggcccaaatgctggtgatccggagcctttccccatgggtgccaatattagactgagacctggaaaatctcgcactgctggcaacgaggagaatcgaagccaagggagcccttcaactttgtcaagtggagaagagtctgctaatgggatagactcttcaaaaatctctaactgatttagccttgcttgggcactaactgttcaacattgcaccataatgccatgtcaaccccccaagtctgtatgtatattgacattttctttttatgagagaagagccaggaggaaaaggggctcacaatttttttgcttatagaggagccttaaacacaagttttctgaggctaaggtacataaccagaatgaagtcactgattgtagtaacttttctttatttcctaaatttttgattgtagtcctgctacctacttctcacaagtttagagaatggattaactgaagctcaaaatttttgttagctttgaacagatgatgatgtcaccatttgcattaagttcccttcagagttgtggggttcaaggggacttaactgcggattttgttgttcattattgttgtactacttttttttgttggacaaaatattgttgtactgttgtttatatgtatttttttattttattttataaattctggggcgtttgtgcccttctgggatcagttttttttctataaaagggaaagttgagaacaaaaaaaaaaaaaaaagaacgctat

SEQ ID NO: 8185 - DNA, 463 bp, Glycine max
  Clone ID: PAT_MRT3847_107400C.1
gggaaaaataaacttggccttttccgaaaccttggtttcgggccccctaccaggtaccagggaaaaaccaaattggcaaaaagggaaaaaacacctggatggcggggaaaggcgaaaaaaaaaggggcccaatttaacccaaccacaagaaaaaggggggtgcgggggccccccctcaaaaaaagaaaaagtttggccccatccctaaaaagggcccccccgacaggacaagggggaaaggccctgggaaggccgaaaaacccccccattcagggaaccgggccaagggaagggggggggggccaccccccaaaacaaggggggggcctcccccgggaggttacaggccggacaacatccaggaaagggcctcccaaaaaacccacagggttgaacccggggattccaaggccatgaaacaacaggagggccttctttttagaaaggccggggaaatccaacc

SEQ ID NO: 8186 - DNA, 366 bp, Glycine max
  unsure (1)..(366): unsure at all n locations
  Clone ID: PAT_MRT3847_107401C.1
ctggncnnaggnanacaaacgaancgaagatttctatttgtttaaaacacgaagacacccaacagggcaagaggtaagaataagaaacgcgaaaaaccaaanccgctatgagacgcacactaaagacaaattcggttatagacgaatgaataaaaatactcggcaaacaatggaaagttggccaccacgccggacagatgaaatggaatgcccggccagatggctgagcagaacaaaggagcattatcgcctgtcctttgggtcggatccaaaagagaacttgcgaaaggagcatagccttgtatagaccgtttgttgttcccgaatggagtgacgctgcaaaacatctagcttggggcgaggaaa

SEQ ID NO: 8187 - DNA, 437 bp, Glycine max
  Clone ID: PAT_MRT3847_107402C.1
agcgcgcccggttggcctaccaaattttctaccgggaccgggaggcgacccagctttccttatagcgagacctgttagctgtcggcatttcctttgcgatagctgtttcatggctggacgaactcgggggcaaacaatgtaaacactgtgaaacctaatgggttaactagctcacactggttgccctcaggagagagctagcttaccagactggagacctgatgagtgaccggcattaattaaggggacaaggcgcgccggccggcttaatgaatagagaaccccacggggggaggccgttagagaattgacccccccgcggggtgagtgttcttccacttagggccccgagagagttttgccttgcaccgcatgctcgtttaacagatgaagccagaagtcccgcctggtcttggcaaaccgggcgaaaaaacatc

SEQ ID NO: 8188 - DNA, 211 bp, Glycine max
  unsure (1)..(211): unsure at all n locations
  Clone ID: PAT_MRT3847_107403C.1
atgaagttatttttcattatctcaaccttacaatttaatacaaattatgattnacgattcaaaaattggnttnccaantcatnatnngaatctcaattncnngntnatntancacganatggtatanagaatgtcaggtngntgtcaactggttgagaannancaatncaatcntggagaagcagcacantcanccgtgctaggttgtctc

SEQ ID NO: 8189 - DNA, 872 bp, Glycine max
  Clone ID: PAT_MRT3847_107404C.1
cacaaagcccatataaatggctggcccatcggctactgatttgcaaaggactcgtgagttagagaagtttctcgctgcttcggggctttacgagagcaaggatgaagctgccaagagggaagaggttcttcaccggcttggagagatagttaaaagttgggtgaagcaactgacccgccttaggggatacactggtcaaatggtggaggatgcaaatgctatcattttgacttttggttcttatcggcttggtgttcatggtcctggggctgacttggacactttatgcattgggccgtcctatgtaacccgagaggaggattttttctacacattgcatgatatcttagctaacgtggaggaagtcacagaattgcaaccaattccggatgctcatgtcccagttatgaaattcaagtttgatggaatatcaattgacctcctctatgccagtatttctagattcggttcctacctgaagtaagaaatcattggtcttttatctacttattccctgaataaaacgaaatcttctaaatgaaaggggcaagcttccttttatataatcagtgcctttttgtttatcttttgtcaatgaaaatttttaaaatgggcttttaatcgttcactttgtttttttgatgaatcctggcaggttttcctgtttctgtttgtctgtgcttgttgttgttttcccccctttgtgtcccctcctgcctggcgctccggcccgcctcatgcacgtttttgtgtcatattttggaactttgtttctttttgaatttatgaacaggacttggatatatctgatgtctctgttctacacaatgttgatgagcctaccgtgcgaagtttgaatggctgtagggttg

SEQ ID NO: 8190 - DNA, 152 bp, Glycine max
  Clone ID: PAT_MRT3847_107405C.1
aaaccatacagcgcattgtcagtatgaagataaagaccaactactacaggccctggtacacagcacggggagcacgacaccacaccgagcgcaagtgcatcttcccactcggcattgtgttcctgctctggatctttctgctgttgctgacc

SEQ ID NO: 8191 - DNA, 478 bp, Glycine max
  Clone ID: PAT_MRT3847_107406C.1
gaaaatcaggaaatactttcccattcatgctagatattctgagctaatattctaatgttggtatcaggactctggattcccctgcttcaaaggtggtccacggacaatacagaaccttagaaagcgcttccatctcaatttaacagaagaggtttcaatactaatattagttactctcttaactgtaattttttttgcctgtttgctacatttttttctttcttggcagcaatgtgtatctttggtgctttccctcattagcagtagcctggatgcatggcggacacggcagtatgattattaccagagggttttgaatgggatattatgaaatagtttgtcaatggtgatcgtttgcttgttcccttttgactaagcttgcacggtgattgttcatcaattagtattttgcctttacaagtcatttgaagatggttggttcactgtgtgttatggctttggagtttttgtgagaagt

SEQ ID NO: 8192 - DNA, 504 bp, Glycine max
  Clone ID: PAT_MRT3847_107407C.1
tacatgtgtagcagtaccacctacttgggggggggggggggggggacccatagaaccaagaatggtagggagcgggaaggaagcgggcaaagatgataaatatatcagctggaggaatagtatacgtgggagagctatacgcttagtcatatgtgatagacgatagatataaaaaacaatacatgacttttacacttgaatttaatatataaaaaggccttagggcgctaagggcacctttggcaattagcgcgcgggagactgggcaacggcctaaatttaccctggggctaggaataagctggccctagctactgccgccgtcactaggtgtaggcaccaagccggttattggaggcctagtaaattaaatgcccgatttgggaattggttttactatcgggacactgctgacgcgacttaggtttgtatcacgttatggccaactacagctaagcgccccgattataagcctaggtggtaatgtgctaactttaccgggta

SEQ ID NO: 8193 - DNA, 516 bp, Glycine max
  Clone ID: PAT_MRT3847_107408C.1
ataacaagcctaacaacactcgaaaataatgagttgcattaatgtagaagccaaactgaaaatgtaatcatccaagaacaatttgcacctatctagaagcctatatatgtaatcatataaataaaagttcgcaatttgcacagctcctcagaaacaccatcaattcttgtagcttttcaagcttgcccagcagtcccaaagattcaaggaataagtaatgctgatgctgtaaattgtggattatggattgtcaaggtatgtaaagttcttgaattcagcaatatatttcacaaatagcagcttgcagaccttgtctttataattcagaacagtgcactttcttagctatgaagaaatgcattcaggaccatactctgtataataccaaacctcgcgagaatacctttcaacaggaaaaaattaggcacaaaagtttgaagcgtggggcaatgcttgagcatttccaacatcaaatgccagttcataaatctcccaaagatgagctccaaatgaata

SEQ ID NO: 8194 - DNA, 746 bp, Glycine max
  Clone ID: PAT_MRT3847_107409C.1
cagaaatgacagtttaaagccccgggcggctgagatccagagctcctgtccaagcaggaaagaagatctgaagacgaagaccaataatggatctcaagtcaggttgtgctttagaggcaggttttgagacacatacccaagaaagagggtgttatgagaccaggcgcttcaagacattgggaaaataaaagcttttccgcccgaggcaaaaacaaaagaaattttcaaaggaggttcaaaaacaattacaataatcctccaacaacaaaaactatttaattattatacaagaaaagcacaataataattaccaataaaattcccagcctggaagtccccaagagtaccatataattaatacttctcataacgacaagaccccaagccccagcactaattcacaaaaaccaaaggaaagctaaccatgaaaaagcttctcaaataacgtacaaagggtttattagctacaaggtgttttgctttggcatccaaaaggttcaagacagtcccaagacccaagacccgctttacaaaaactaaaccaaaataaatcaaaagggactctccaagttaccagttaccagttagttcccgcccctccgaagtcccaagacccatttccaagaccccaagatggcatggttaagttgttaccaatcccttctttgaagaaagtaagaatcacaaaaaccaaaacccaacaaaaaagttgtcccaagaccccaagacagtcccagatatctcct

SEQ ID NO: 8195 - DNA, 1489 bp, Glycine max
  Clone ID: PAT_MRT3847_10740C.1
tacggctgcgagaagacgacagaaggggacgccttctcagactcagaaaagagaagaaacaaaacaaaaaagagcagagagagagaggaaccatcaccaaccctaatttcttagctaaaccctattcgtttagcatttcctctcttttctcccactcgtaaatcctctcccaaacttttcagatccaaataaatcatggttttctgggtttttggctacggttcactggtgtggaaccctggattcgattacaatgagaagattataggtttcattaaggactacagacgcgtgtttgatttagcgtgcattgatcaccggggaacacctgaaaacccagcaagaacttgcacgttggaggagaaggaaggggctatttgctggggagctgcttattgtgttcgaggaggccctgaaaaggaaaaactggctatgcagtatttggagcgacgggaatgtgaatatgacagaaagactcttgtaaacttcttcaaggaaggagattcactgcaccctactttaactgatgtaatagtattcacatctactccagacaaagtgaacaacaaatactacctgggacctgctccacttgaagacatggctaggcaaatagcaactgcatatggcccttgcggaaacaacagggattacattttccttctagaaaaggccatgtatgatattggccatgaggatgacttagtgatagagcttgccaatgaagtgaggaaagtacttggaatgggaaatgtagtaccaaaggagaagaaactggttggagcagcacaacttccacaccctcctcatgtaacaatccctacccttcaactgcacccactgccagaacctattgcaatggatatatagctgaggggggagatgaccaaaaactgacgctgagttcggctactaaactgatttcctgctaaccctcattcaaatttaaataacatcacatatctattcctcttcgcctacttttagcggctttccagccattcccttgagatattgcttaaattcagtgaggcgcaatattttgaattggaatgttcgcggatattttacttttgcagactgcagtgttattattgaaaaagtttcattttttttatttatttcgtttacggcgatcttacacagttttttttatatcagttctgcattcaatcttaccgagttaatagctagctagtacttcgaaatgaataatacttctgttttgaggaaacgctgagttaggctactaaactgatttcctgctaaccctcattcaaatttaaataacatcacatatctattcctcttcgcctacttttagcggctttccagccattcccttgagatattgcttaaattcagtgaggcgcaatattttgaattggaatgttcgcggatattttacttctgcagactgcagtgttattattgaaaaagtttcattttttttatttaatttcgtttacgggcgatcttacacaagttt

SEQ ID NO: 8196 - DNA, 205 bp, Glycine max
  Clone ID: PAT_MRT3847_107410C.1
gatgctctatcggagacctgaatctctcggattatgtgggtaattcccttgcgaacaagggatttcagatacgattccaatcataatccatctacccatgtatgatagtttagaaggtagatgtatgacttgaaagtgactcatgtaacatgagactatggccacgtgaatatgacctttttcaccaatggatatgcatttatga

SEQ ID NO: 8197 - DNA, 394 bp, Glycine max
  Clone ID: PAT_MRT3847_107411C.1
attaatattcatgtgttcgattgaacattggtgcgtgtttgggaaacatatatgtgtgtgtgtgtgtgtatttgtgaaattcaaatttaccatgtttttcataagcaaaataatggagttttcataaaagaaaaaaaacgaattaattttccagttattagagtggtgatattgtatcgacgagacgggtcggtacattcttgtgtttgtgtgtgtgtgtgtgtttgtgtgggtcttacaaacactgtcgtagttgagatttttcgcttttcaaacactatggtctttacaaaaaactgtcgttgtccaaaccttcattttctcgctcccttctcattgtctcacttcctcccaattaaaccctcttcctggaaaacccttattcacacccaaa

SEQ ID NO: 8198 - DNA, 323 bp, Glycine max
  unsure (1)..(323): unsure at all n locations
  Clone ID: PAT_MRT3847_107412C.1
ttaattaattttnccttgggaaaaaaacctnnaaagaacaagggattatggaaaaaaatattgagcgccccaaaaaaaaagtctttgggagggcctttttgggaccccttgggggggtccccccggcgggcagggggggccctccttttggggccatgggggggcccggctttcaaaccaaaaaggagcccttcccttttgcctgggagtttctttgggcttttttgggccccccacggccagccccaacggaggggagggggttaaacaaagaaaagaattgtccccgtttgagaccccccccggggcctccacccaatcct

SEQ ID NO: 8199 - DNA, 273 bp, Glycine max
  Clone ID: PAT_MRT3847_107413C.1
agctgactacgcgattttcgttttttttttaaaaaaatgtagcagaaactttgactattttaaatagtaagacacccaggcttttacgaccgaattttgtttttcactcactggcataaagcacatgaatattcggggccagtgcagatcgaaattcctgaaactggacaactaaaggagtgtttttagacaggaccaaacgtctgaataaatttccttgggaacaaatcccaacatgggggcgtaggtgaataataaactggtattatgggg

SEQ ID NO: 8200 - DNA, 366 bp, Glycine max
  Clone ID: PAT_MRT3847_107414C.1
ggaagcttttcaggtcatgaatgctcagaagatgctgaagacagcaatgaggaccctgtagagaaggaattcgaagattttctttattccagtggggtgaatcctaatgtgtatgtcctttcatctggaagatgggatgtaaatcaagaagctcaatcaagctcaagaccaccaacaattgatcaagagtttgaggagtacttttctatgcttatgctctaggacagtttaccgataaaggagcatgcatagttgtatatataatgctgaaaacggctgttgtatgtattgtacgaagatttagtagtattctgatgactttataacatcttcagtaggtgtaatatgatatttcttcttatggcc

SEQ ID NO: 8201 - DNA, 236 bp, Glycine max
  unsure (1)..(236): unsure at all n locations
  Clone ID: PAT_MRT3847_107415C.1
tgagcctgagcctcaaccacaacaacagaactcacttttcaccaacccctccatgtcctactcatcatcttccgcaaactatgggatatgttccaatgaactgtcaccaacttggtccaaagtttcttcccttcccaaaccctccaatgccaaagcaacagctcagtggattgcncttttccaacaacactgctttctggaattcttcagccgaagcacttaatgacataaganca

SEQ ID NO: 8202 - DNA, 1054 bp, Glycine max
  Clone ID: PAT_MRT3847_107416C.1
ttcccaaaaggaacttcttttaagaggttcttcatctctctctctctttctctcaggctcagctctaaaaacctgtctttattattctgttttcttgattgttttgtttcttttatcagtctttggttttccagatccagatggaggaaagcaggaacaacccttctcaagttgacagcttccaggtggatgaaatgcacaatcttagcattgttgaatggaaaaagaaaagaaaattacagagtgatcagttggatttgcttagacctaaacatagatgctgggttggaagtttctcctctgcacatgcttcagtgtttgatgagaatccagttttagagagcatgcataaccacacagttgaaagctcggaacctgaatctgccaaagacagcaatagtcttatggaagactgtgatactgccatttctgtaaatgaagaatccaaacatgaggcagattgcggaaattcatacttatatgtaaatagggtaagctatatcgatgaggaagcttttgttgatagcgaatgcattccaccttatgatgatgccaatgcacaagctttgatcaatcatgaggaacaccttcaggggttaggaagcttttcaggtcatgaatgctcagaagatgctaaagacagcaatgagtaccctgtcgagaaggaattcgaagattttctttactccagtggggcgaattctaatgtgtatgtcctttcatctggaagatggaatgtaaatcaagaagctcaatcaagctcaagaccaccaacaattgatcaagagtttgaggagtacttttctatgcttatgctctaggatagttaacctataaaggagtatgtataatggtatatgtaatgctgaaaacggctgttatatgtattgtacgaagatttagtagtattctgatgactttataacatcttcttcggtaagtgtaatatgacatttcttcttatggcctttcttctctttatctctcactcttcaattcctaatgcattacattcttcagtgatgccgcagttctgaaattaaaaaaaaaaaaa

SEQ ID NO: 8203 - DNA, 595 bp, Glycine max
  Clone ID: PAT_MRT3847_107417C.1
ttttttttttttttttttttttttttttttttttttttttttttttttttttttttttttttttttttttttttttttttttttggtttttggggggctaaaccccttgaaaggggaaaaaaaaaaaaaaaaaaggaagggagggtaaaaattttaaaaccggaaaaacccaaaaaagggtaatttggaacaccctaggggcaaaaaaggccaaaaaaaaattttaaaaaacggggaatttccaggggggtccccggggaaaaattttggggggaaaagtaaaaacccccaatgcccaaaggttaaattgggggaccccctgtgacccccggggaaaaaaagggcaaggttccaaaaggggggcttttgggagataaaaggggcaaaggggcccaagggaaacctaatggggaaaatcggggattctaagggtccttgaaagggccaaaaaaggggccaagaaggggaaaaaaaaaaaccaaggggcccaaggcccttggttggccaggaaaaagcccctttgggggcaagtggggggggggggaaaaccctggaaaaatttaaaaaaaaacccaagaagcttttttgggggggc

SEQ ID NO: 8204 - DNA, 574 bp, Glycine max
  Clone ID: PAT_MRT3847_107418C.1
tcctctagagcggccgcttttttttttttttttttttttttttttggccaacctaaacaagacaaatattcgactctttattcaataattataattatacagtcacaactctttatcttcttattaaaacaaccaacaacatgcattggaatttccacgtgctcaactacaacccactaaaacaattacgagagaaaacgtaaaacctatggcagaattgcagaagaaaactctttgagaagtaagaaagcactatgtcaagggaggcttttcaattcttgggagttccaagattttcctgagaatttatgcccatctctctacactttcaaattcttcactatcagaatttatgtccttaaatctcacgcttgccaactacattctttgaatcgcttttaaatttcaaaattcatgctcttgttcttaaatcgtttcaaccccttttttttcaatctctattttagctttcaatttctcttctccctgcatatccttcttagttatggattgggtcatatttggccatggggttagtcattcctcatataccaaaaacctgtccaacctgctc

SEQ ID NO: 8205 - DNA, 373 bp, Glycine max
  Clone ID: PAT_MRT3847_107419C.1
agagaatattgatggaggatttcatattttttttttttcttttatgattgggggggggaaaaaccggagaagggggcctatatttggttttgcccaacgtaaatggtaaattagcttactttacgtaaaataaattggatcatttaagttgaacacccatttttaaagggatttaaactggggggtattttggggctttgattaggccctgttgaggccttttttttgaagggttctccccacagggggttgggtttcccgatattgtttttttttttgacgggaatttttttgggaaaaaaaagaaggggtcatgggataaaaatagcctcctctcccatattgggttagtgataacaaccctttttttttc

SEQ ID NO: 8206 - DNA, 214 bp, Glycine max
  Clone ID: PAT_MRT3847_10741C.1
ttttcctatttttgtcttgaatccacaaactactgattgggtggaatctgtggctgggaaatctgactttacctcagtgaactttcctacttgcaaaaaaaacgctttatttgttaagggtaggatgctttgggaatgcaggcttctctctgatcttttccacccttaattgtctcacaatgttgaaacaacttgtaggagaacactcttattt

SEQ ID NO: 8207 - DNA, 158 bp, Glycine max
  Clone ID: PAT_MRT3847_107420C.1
cttgtgctgctcctgccaatgattaacttgccaaggggtatggtcctgacagaaggaacttcttgccttaaggtctcttggaccgatccgaaattccagaatacttgaccggaaaagttccttgagactattggtatgacccatttggtcttaaccag

SEQ ID NO: 8208 - DNA, 170 bp, Glycine max
  Clone ID: PAT_MRT3847_107421C.1
aaaaatgtaacacgatattatttacattacaggaaatagtgaaaaaattataataacactcctacaatgtaccgataaagccatcaacacatataaaacaagcagcggatactacaaagacacatgaaccaaacctgagtttaacacaccaacatgctttaaatagaccc

SEQ ID NO: 8209 - DNA, 166 bp, Glycine max
  Clone ID: PAT_MRT3847_107422C.1
ggttaactgtgagcagcagtactcatccaaaacgttacaaggaaccttcttgcaattcaaccaattgttctggagcaacaaccaacaattgcttaatttgcccgggggaatcaaggcaagggtgcaaaaaaaccacgtttggcttcatgtcaattattcccttcac

SEQ ID NO: 8210 - DNA, 414 bp, Glycine max
  Clone ID: PAT_MRT3847_107423C.1
tacggctgcgagaagacgacagaaggggtcataggataatgttatacatagtaaaattgataacttttgcatttaaatcatatttaagatgtttttttagttaattgataatgcatcaaagttaaattattgctatcattttgatcaatgagagatttagtggaaattatcctaattagtcatgaaattttatggagttatataaactcttcttgtttttttaatcatgacactaacttcccttatatgagaggttgatgtaacgttttcaaataattagtaaaattattaattgtataagaagatgtccatgtatattttttaaaaaattagggggaggggggatcagtgtaatttattgacttttttactcaaaattacattaatgaaaaaaatggattgccaagaacacat

SEQ ID NO: 8211 - DNA, 327 bp, Glycine max
  Clone ID: PAT_MRT3847_107424C.1
cacgcacgcgtgctgaagattggaattcagctcgagttaatgcccctttgataatttctgcttatgatggagtatagcaccagtcaagatcaggattgttttcatcaggccacaacgaatctgggaaggaaactaccacaaaatgcctgcactacaagctggactgtttcgaccaacctgagattgagagaggagcgaacggggctgccaatataaacaacaagtctttcaatgtttcgtgtgcactgcacaagcgtaaaggtgggcgcgaatgatgaaataccattgatattgctttgtagaagtcagaagccaccaagttctact

SEQ ID NO: 8212 - DNA, 165 bp, Glycine max
  Clone ID: PAT_MRT3847_107425C.1
ttgggaacaacaatctcaaaaactcgtatcattaatattttcgagcaaagatcacaatacagattaggaaagaacgaattgaaataaataaaaaaaatggataaatatgacttttcgttattgagtgttatacattaaactgattttatatgttgtgcaaaccaa

SEQ ID NO: 8213 - DNA, 494 bp, Glycine max
  Clone ID: PAT_MRT3847_107426C.1
gatgagtagctttacggaacagctgaaatgtccattatatatactgttttttacttttatcgaataagactaatctctaattggataagggataaaatatggaagaaagaaacagggaaggtacaaatggaggaaaaataaaagtgaaaaaaattgttacttagttaagtaataaaaactaaaaataggaggaaaaaggaaatggaaagagtaattgaatgagtagaaaagaataaaagagaaaacaagtaagttgtattaaagaaatttttaggataataatagtaagtagatgcagattgattgatcgatcattgaagaatgatatgtgttgtagggtcattgcctggaaagcaattgtttgtttttatttatgtgtcacgcgaattgtgcattgattacgtgattgttgtgtaacggatggcatagttccacaagttaattacgacatgtgatctcacgcatttaccttgggaatctttgcttcaattttt

SEQ ID NO: 8214 - DNA, 526 bp, Glycine max
  Clone ID: PAT_MRT3847_107427C.1
attcggctcgagtctcactaggaggtagtagaggtaacaccaatccccaagaggaaatccctcctccggataccttattctggtgtaacaagaatgatgacgtttcctcttaccaccgaggtagtagcggctttgagctatggaaccagcaacagcttcaacatcagcaacaacagctcatgggccatgaccctcctccgcagccgcgccctctctttcaccaagatctctactccgcgttgggcgttgggcccagcaggcccatctctgacgatcagtcgtcttcgagatccagtttccttcttggagcaagcggtggcggtagcgcacgaggagggattagctgtcaggactgcgggaaccaagctaagaaagactgccctcacatgcggtgcagaacttgctgcaagagccgcggcttcgattgccaaacccatgtcaagagcacttgggtccccgcttacgttgtggcgaacgactacaacaactttctgcgttgcaacaacaccaacaacaacaacaaacc

SEQ ID NO: 8215 - DNA, 274 bp, Glycine max
  Clone ID: PAT_MRT3847_107428C.1
cccacgcgttcgcgctggtgttcttgtctttttccttttgcattagtggtggaatttgatgtgtgtttttggctggtgaatgtgtttgcttgtagaatgtagatttgtttccatgctgctttagacatatgtttgttttgcagtgcatagattagttttagtttctgaaagttatcttttctttaaaaaggtgtggttataggctccatgtgttatggatgttggttgaattttaataattcttatgcatgtgctatatgtgttctattgttgt

SEQ ID NO: 8216 - DNA, 307 bp, Glycine max
  Clone ID: PAT_MRT3847_107429C.1
aaattaaaaaataaaaaaaaaaaaaaaaaaaaaaaaaaaaaaaaaaaaagggcggacaatataaggggcggcacgttttaggggatccagctttacatacccgtgcttgcaaatagatacccctaatataaggtcacctaaagtcaattcacaggccgttgatttacaaaaccttgactggaaaaaccttggggaaacccaagtaaatccccttgtaacacatcccccttttaccaactgggtcaataccgaaaaggcctgcaaagatggcccttcccaacattttcacagccagaatggctaatgg

SEQ ID NO: 8217 - DNA, 1782 bp, Glycine max
  Clone ID: PAT_MRT3847_10742C.1
aaaagagaagaaacaaaacaaaaaagagcagagagagagaggaaccatcaccaaccctaatttcttagctaaaccctattcgtttagcatttcctctcttttctcccactcgtaaatcctctcccaaacttttcagatccaaatgtaagaacccttttctatttcaggcattctcgtttttatgtcgatgattgttgattagcaaattaatttgtttctattccgcaataaaacgctctggtctctcagatatttgtccctgcagctcacgaccacgaatgtggcgttgatttaaagcttagacaattaattgaatcttttaatggttatttcaacttatacattcattttatgaatatatcactgatgctgcgtcccccccccccccccttcagaaatcatggttttctgggtttttggctacggttcactggtgtggaaccctggattcgattacaatgagaagattataggtttcattaaggactacagacgcgtgtttgatttagcgtgcattgatcaccggggaacacctgaaaacccagcaagaacttgcacgttggaggagaaggaaggggctatttgctggggagctgcttattgtgttcgaggaggccctgaaaaggaaaaactggctatgcagtatttggagcgacgggaatgtgaatatgacagaaagactcttgtaaacttcttcaaggaaggagattcactgcatcctactttaactgatgtaatagtattcacatctactccagacaaagtgaacaacaaatactacctgggacctgctccacttgaagacatggctaggcaaatagcaactgcatacggcccttgcggaaacaacagggattacattttccttctagaaaaggccatgcatgatattggccatgaggatgacttggtgatagagcttgccaatgaagtgaagaaagtacttggagtgggaaatgtagtaccaaaggagaagaaacaggttggagcagcacaacttccacaccctcctcatgtgccaatccctacccttcaactgctcccgctgccagaacctattgctttggatagctgacgcggaaactgacgctgagttcggcaactaaactgatttactgcggaccctactaaccctaattcaaattttaaataacatcacatatattcctcttcgcctagttttagcggcttcttcagccattcccttgagatattgcttaaattcagtgaggcgcaatattttgaattggaatgaatgttcgcagatgttccttaaagtgaggaaagtacttggaatgggaaatgtagtaccaaaggagaagaaactggttggagcagcacaacttccacaccctcctcatgtaacaatccctacccttcaactgcacccactgccagaacctattgcaatggatatatagctgaggggggagatgaccaaaaactgacgctgagttcggctactaaactgatttcctgctaaccctcattcaaatttaaataacatcacatatctattcctcttcgcctacttttagcggctttccagccattcccttgagatattgcttaaattcagtgaggcgcaatattttgaattggaatgttcgcggatattttacttctgcagactgcagtgttattattgaaaaagtttcattttttttatttatttcgtttacggcgatcttacacagttttttttatatcagttctgcattcaatcttaccgagttaatagctagctagtacttcgaaatgaataatacttctgttttgagc

SEQ ID NO: 8218 - DNA, 404 bp, Glycine max
  unsure (1)..(404): unsure at all n locations
  Clone ID: PAT_MRT3847_107430C.1
gcagtgagttggaattgataatctagagagtgactactgatcgccgacagcgagctttttccgtgtaatggcgacctccgtcgcagtcgccggcgctttgacggcgcacgatcgccgggttctgacggcggtgaacgccggagcctcgagcctgtcgttagccggttccagcttcattgtagtgtgctacctcctcttcaaggagctccgcaagttctccttcaagctcgtcttctacctcgctctctctgtatgcttcttttttctctctttccgtgttcctcttcttcagatctaaaacttgcgtttttactttttaacgttccttcgaattgactcattcgttagtttagtaacacttatcagtaatcacgattggcagaaacgatacggntaaacgcgct

SEQ ID NO: 8219 - DNA, 180 bp, Glycine max
  Clone ID: PAT_MRT3847_107431C.1
ctaagtttgagatgatcttacttagcatcttctctttgcacctaagacattgagaatgctaagagaagatgctaagtttgagaccatcttactatatttttcatattggaccgtcttcctctataattttgagttacagtgtccacttaacttgaatttggtgccttttccttttgtcct

SEQ ID NO: 8220 - DNA, 538 bp, Glycine max
  Clone ID: PAT_MRT3847_107432C.1
caaagaagtttaatctatctctgttcacagcagatttcttatcagacaataaggaaattagtgatagcaagaagttgctagcattaccttagtagatgttgtttgataattattctcttcaagaaagtttaagtcacaagtttagttatacataacttatttagttttaagtcctatattggagtcattgactatacaatcattctattggacactggccatgaccgaatatatctttctcttcatatacctttctctcgtaagtcataacacttgtaagtcgtcaaggcaattaaaagaagtttagcaattaaaagcttattatggacagtaataggcttatacgatatataataatagatttaggaaaacaaggaaatggaggaagaataattaacgattctttgcttaatttccaacttcttggttcattaacttcataatatttttaataaaaaaatttaatggattaattctagttaacatactaatgtcaatttagtaatcttggaaaaaaaatgaactcaaacttataaca

SEQ ID NO: 8221 - DNA, 127 bp, Glycine max
  Clone ID: PAT_MRT3847_107433C.1
gcacctcgcatgagaactgagttggtaccattagagaggctaccagattatctgttaaatagactgaagttggataaatagtcaggataaaagaccaagaggtattatgaaacagacacctctgctt

SEQ ID NO: 8222 - DNA, 316 bp, Glycine max
  Clone ID: PAT_MRT3847_107434C.1
ccgcgcgtccgaacacctccgagaacgtctccagaaggggacacttactagtagtaaggatggagtcctcaaagatctatgcttacctcttcctctgcatgatctttctctcttaccacactcccattctcggttgtggctactgagacaaaccccccaaaaagcacatgcctggtaaaacacctaagacacccaaaacacccgctgttaagccaccagtcaccatccctcccattaatgttcctaccgatgttcttccaccaatagtcaaaccccccagtattattccttccattcccattattaacccaaccac

SEQ ID NO: 8223 - DNA, 585 bp, Glycine max
  Clone ID: PAT_MRT3847_107435C.1
gacgaacattttacgttcttttaggattctaatattgttatccacttctcattttcaagactcgtataaattaatatttccatatatttgtaatttttttgataaattatttgtaagattttacacacaatgatagaaattggtctctttactagaaagaatagagaagaaacccccaatttacagaagagcacacactgcagaactttgagggtctgcacatcccaatgcccaaaggatccaatcctctcacaaattacatgataaaaccgtcacaacccctcttcctatttatacacagctattggtcggcttacataaacccacccttaatgggcataattagttgctggcccattccctttgtttctaacataacccctttatttctttgactaatttgtaactgaactaacaataacccccccaggccccaacattcacctaagtcttaaggggaacaacctatggcaggtgaaataaaggcccttttgggttctaggtgtttgaagcaagatttccaagcctaccaaaccattgcaacccaaaattaacttccaatcctctcaggtcaaacacaaattt

SEQ ID NO: 8224 - DNA, 268 bp, Glycine max
  Clone ID: PAT_MRT3847_107436C.1
aataccgggccgaccacgcgtccgctcacgcgtccgatcctacatgtcaagatgttcttgagcgaaagattgatatcaggtctaggatgctacctgagcaatgactagcacagctatgtacacaattcgaacatggtcatcaataatcactggctcctatggaatcagatggccccagaaacacgacctattccatcaaactaaatactgaacgctagatgccagataatcgaataactcaatcctgtacaccgaatctgcacaacaa

SEQ ID NO: 8225 - DNA, 501 bp, Glycine max
  Clone ID: PAT_MRT3847_107437C.1
ctcctcacccaccccaccccaaccaaaccatataacaaacgccatagtttcctttcttttctctactgttttctccaaattaatataacccattttccttgagatgaagcagctcatccgccgcctctcgcgcgtggctgactcctccaactacacgctcctccgttcggactcctcccaggcctgccaccaccgccgcccacgcgccgagtccttccgtctctccgccccatccaagatccgccgctcctccgcggcggtggttccggaggggcacgtcccgatctacgtcggcgacgagatggagcgcttcgtcgtgtgcgccgagctcctcaaccaccccgtcttcgtcaagctcctcaacgaatccgcgcaggaatacggctacgagcagaaaggagtcctccggctgccgtgccgcgtcttcgtcttcgagcgtgttctcgacgcgcttcgtctcggactcaacgcgcgtgacatcaccgagctcgtaaatttctc

SEQ ID NO: 8226 - DNA, 591 bp, Glycine max
  Clone ID: PAT_MRT3847_107438C.1
cccgcgtccgatctgcttttttacgcactatgacaacttagccggaatgctgattccactcgctctttccagtgcgacgcgtcttcttgtatctaactagcatccgctggtcgcttcgacccatagacgagaatcttacataaccccctgcaacactctaaggggaagtccaccacacgccatagcacgcggcgggtcagcagggacattgcctgattaccgagaatatgcctacgaacagacaacacatagtagcacataaaaatctcattgcgtggtgtgaggtgcacgtaaccaaagaagccgaggggaactgcatctcaaacatcaagctctgataatgctactgacactgataaaaagtctgaaaagagaatgactcatggagattccgctcgaaacccaaagtttgatgacaatactgaaactcttactgtgaatgaaatgatcacaataacacccgcatctgaaccgtggatgaatattcagcatgatgcattctacgctcaacacaatccgagtatgaaaaactttgaactttctgtttctagcacagtaaaggccagctatatctcatcacctggaagctga

SEQ ID NO: 8227 - DNA, 445 bp, Glycine max
  Clone ID: PAT_MRT3847_107439C.1
aaaaaggaaatggggggaaaaactcccccaattcgaagcttttccaaataaaatcccaatgttgcgacaacaaaaaaaaaagcggctttttttttccttttttttctttcctcttatggaaagcggaatgacaaaaataaatttacggcctttttttataaaagttaagggggacaaactccaaatggtaaaaaaaaagccggctccgccatttttttatccaactctttattcttaggttactaagcggagaggggcaccctctcaaccattttgcgggccttgagagcttagaacattttgagataggggcggttttcacgggggtcaatgtgtgacacatgctttcagaagccatatacaccggtgagagtgaaaaggcttttgaagtaaatctggcatgagttctcttttttacaacgctggggacccacctttggaattt

SEQ ID NO: 8228 - DNA, 334 bp, Glycine max
  Clone ID: PAT_MRT3847_10743C.1
caaaaaccttttttctctttctaaaattcttttttggaccccccttggttaactttttcccggcccccacggttttttttggttttttttcccacctttctatccccctaaagggggcccaacctttccccttacaaatttccaggggggatagggggacccttttcccacctaaaccttccctggaaggttaaacaccttttaggggccccccggggaaatttctggacaaacccatttgggaaccctttttcctccttatgggccgcgggggcccccccggaatttccggcccggcccctgggggggacccagttttccttatgggggggcc

SEQ ID NO: 8229 - DNA, 512 bp, Glycine max
  Clone ID: PAT_MRT3847_107440C.1
taaagttaaagcatgaaagactaagctagctagcactaagggatgctatcacaatgagaggtacaaactcaaccaaagatcaatccctcacccagaaacttcttccatgtacactccatgttttacttcctatacctctgctacctttagttctgctttccttttactttcaccctctttctcttactccatctccaccaactaagctctctctttccaccccttctccttctccttctccttctccttctccttccactccttttcctcatcctccttctccttctgcagaaaaggaaaaaacttatgagaccccatgtgactattttaatggcaaatgggtccgtgacaagagaggccctttgtacaatggctctacctgtgctacaatcaaagagagccagaattgcatcatcaatgggaggcatgactccacctaccttcgctggagatggaaaccaagtgaatgccatcttccaaggtttgaaccaaacacttttctccaactcata

SEQ ID NO: 8230 - DNA, 331 bp, Glycine max
  Clone ID: PAT_MRT3847_107441C.1
ggatagcatcgatcacaaaacggtggaggagaacggcataaacatgcttgtctcacataaatgagaaggagcagaggggttgatctagcgcggcttcccagaacttatgcactcatggcgaccccatattctactgtcgtggactacctcggttaccgtgctgtgacacctgatctccgtggctacggcgacacacaggccccatatactgtgaacatgctacacctattatcatctggtgggtgatatcatcgatcttatcgactctataattctatacaacgtgttccttgtggctcatgattgtggcgccatcatcattgtctatctt

SEQ ID NO: 8231 - DNA, 649 bp, Glycine max
  unsure (1)..(649): unsure at all n locations
  Clone ID: PAT_MRT3847_107442C.1
gggaatgaaccttaagatatttttacattccaaacactcaaacagggaggatcatttctgatcgagtatgttttctggtttctttcgtcatgctctcagtattctcttgctctttaacttgatcttggttttcttcggactagtatgacaagtaaagacaaatcacaactcacggtcatccaattccaagaatagagttttggttctgtgcttggtttcatcctcggaaggatttcccaaagcaaagtggtggtgccacgccacagtggtcaacttttgagtgcgtgtggtttggagatgtagttatagtatcaagctgacagaatggagtctgtgttgtccccgatagtggaacgaacgtttaattttgcggtggaccccattattcggcagttggcctacatcctccattgcaggcaaaatgttgatgaactcttgactagttttgagagtcttgaacttgaaaaagagtccatagantcgtcgatgtgaccaagctgagaataatttacaaaacattgaagccaaagtcaaagaatggtcaaggaaagtagatgagttcaagactgaactagagaagtttaggaacgatgaaggccacacaaagacaggggttggccaatggtttaatttttattttccttacttt

SEQ ID NO: 8232 - DNA, 431 bp, Glycine max
  Clone ID: PAT_MRT3847_107443C.1
ccattctttcgtttctaggttccccaggtataaggtgtcgcttcatactagttatatgacctttaatattgccaggattctgagtccgtagtatctcacactttaccgtcgtttgtgcctacccgatcgaagccgacattaagataccttatgttatcaagcaggatcacgtgtagctgcaaacacgtccggtccttagggcatggatgaaactctgacacaattgcatggatctcgatgtgtctgcatgctgcaccagacccgaaggaggaatgaatcggtcttctccaatctttaggaagcacagtgtccgcgctaggactatcgagactcgattcctgagtgcatgctgtctaccgaatggcgcttcatgaattgtatcttcagaaacgatgccctttagtttccctgtttggagctcaatttaaaag

SEQ ID NO: 8233 - DNA, 774 bp, Glycine max
  Clone ID: PAT_MRT3847_107444C.1
ggatcgagtatgttttctggtttctttcgtcatgctctcagtattctcttgctttttaacttgatcttggttttcttcggactagtagtacgccatccatatgcttaaatcatgtttagcttgccaacatatttcagctttcttcctaaatctgctctttttttctcacattcagtttattgcttacgatttggaatagtgacaagtaaagacaaatcacaactgagggtcatccaattccaagaatagaggggaagagatgtagtcctagtacaagaaaatcaagctgaaagaatggagtctgtgttgtcccagatagtggaacgaacgtttaattttgtggtggaccccattattcggcagttggcctacatcctccgttgcagtcaaaacgttgatgaactcttgactagttttaagagtcttgaacttgaaaaagagtccatagatcgtcgatgtgaccaggctgagaataatttagaaaacactgaagccaaagtcaaagaatggtcaaggaaagtagatgagttcaagactgaactagagaagtttaggaacgatgaaggccccccaaagacagggttgtccaatgttttatttttatttccttacttttggaaaaggcataggcttggcagaccagctaagaagatggcagagattgttaagaatctaatagatgagtcggccaagttcaatgatgtttcctacccagccaacgtaacatctaatgatttccctttgtttaaatgcggctacatgccgatttgcttc

SEQ ID NO: 8234 - DNA, 256 bp, Glycine max
  Clone ID: PAT_MRT3847_107445C.1
ctggtagaaagtactcgattgctggatttgtaatttggaacgctagtgtgagcgtaaagtccaatgctatgctcaacaccaataagggacctgttcgcgttacatttcctgacgctgaaggtcttcctggacgaccgtcgagtacaacctaccgtatttgcagataggtggcctgcattggggagatcgtacggttgacatcatgggcaacatggtgtttgacgacaagacgaaccatctgcaatgcgagctgcgc

SEQ ID NO: 8235 - DNA, 236 bp, Glycine max
  Clone ID: PAT_MRT3847_107446C.1
ctcacttcacacgttcattttcatttcacctttgttatttactgtggcccaaccaccccaacctaattaagcacccctttactactctttccatcaccttctctctttctatttcttccttttcttttcatcttagttcactctcaacgtacaaacaatataataataatacaaacacatatgggcaacttgtggaccttgatcatccagcttcattctattgctgggccggttgt

SEQ ID NO: 8236 - DNA, 271 bp, Glycine max
  Clone ID: PAT_MRT3847_107447C.1
ccggttcgagagaaaggacattgatagcatcatctcatgcatcactaggtcatttgacgaagtggaaagcatggctatctcaaggactagcggaaagagccgagaaatggatgatcttccggtttaagtcacagtgtcagctgggatccatccattcagcacttctaaatgcagacagccccatacacattgcagtacttagattgcagatagtatacaagagttttcgcacgagaagacagctagcagattgtgcaattcttgttgaaca

SEQ ID NO: 8237 - DNA, 223 bp, Glycine max
  unsure (1)..(223): unsure at all n locations
  Clone ID: PAT_MRT3847_107448C.1
aacgtccccattaaaaacacccatagcttcaactaaacaaaccacatcttaccctatacgacaaacacaacaactatggaccaccatacctnnggtnggtttgccacaaaccttgcgcgagagctgacctatttanncccaatgcccattaccttttgcttcaggtggaagcaaatccggtcatttacaagcttcattcttttattgtctagacttacnntct

SEQ ID NO: 8238 - DNA, 301 bp, Glycine max
  unsure (1)..(301): unsure at all n locations
  Clone ID: PAT_MRT3847_107449C.1
acgtcgcatgcacgcgtacgtaagctcggaattcggctcgagnacngncncacgttctcnncngnntntncncnaaggngcngnaanaacncgcncttnnnntcannnaggnaacctanagnggnanacnactncatcanntcttnnatcanaggnnnctcaaanaaatncnggatttcagncantnncntnagggcttnaggagnannctnncggatantgtgatgtgaangngagncggtcatcctattnggccanactgnggatgcnggtngnnctgtataattgtngtannattgga

SEQ ID NO: 8239 - DNA, 779 bp, Glycine max
  Clone ID: PAT_MRT3847_10744C.1
gttggaattgccagaggactttgcttccttcaccatgaatgttacccagctatacctcatggtgacttgaaacccagcaacattgtatttgatgaaaatatggaaccccatttggcagaatttgggttcaagcaagtattgaggtggagcaaaggctcatcaccaaccagaaataagtgggaaacagtcacaaaagaggaactgtgtatggatatctacaagtttggggagatgattctggaaattgtgactggcggaaggttgacaaatgcaggagccagcatacacagcaaaccatgggaggttcttttgagagaaatttataatgagaatgaagggacttctgcaagttcattgcatgagattaaactggttcttgaggttgcgatgctttgcacccaaagcaggtcatccgatcggccatcaatggaggatgttcttaagcttctgtcagggctaaagcatctagaagatggcagaacttcaaaagaaggataataaaattttcatttgcatcaccagattgaaaaccgttaaaacatatatagtaaatgcttagacaacaagtttgcacgtgtaattaaaggagtttgcagcttgtataatagatatttccattgtttcagtgtgccaaacaattctgtcgcagattctcccaagccacttcataaaatattttttatttgaaatggaattcatgattttcataatatttatgattgagtgtcgtcttaaacgtttcttctatctacaatggaattcatatgcctttacttttt

SEQ ID NO: 8240 - DNA, 946 bp, Glycine max
  Clone ID: PAT_MRT3847_107450C.1
tcccgaccccatcaaccttaataatttattctgtttgtggtctcactagctagaaacaacatcactacacacaaatggcacatactttatccactaatctggctcttaaccttcccacatcgaggtatgttcgtccctcgagaccaacccaggtgaagcccatgaaggtcatgatgggtgatgcaagagaaaagctagaacatgtccatgtgcctaaacacaacaagcaccaccagcccctccccaaaaacaaagttgctcctaccccacccgtagggttgtgggatcgatttcctacggcaaggacagtgcaagagatgatggagacgatggagagaatgatggaggacccttttgcatttagcacacttgagtggccttcatcaccccttccaagtgagggagtgggagggtatcgaagaaggggaagggcaccatgggaaattaaagagtgtgagagtgaatacaagatgaggtttgatatgcctgggatgaacaaggaggatgtgaaggtgtgggtggaggagaagatgcttgtggtcaaggctgagaaggcacaaaagaagaagcaagagaatgagattgtggaattacaacaagaaaagcagcaagaagaggaggaatggtctgctaagagttatggtaggtatagcagtaggattgctttgcctgataatgtgcagtttgagaatattaaggcagaggttaaggatggtatgctttacataaccatacccaaggctaccagctactccaacatccttgatatccaagttcaatgattcattttgttttgaggtcttttcttagtttttttgttttggattttccacatgtctcttcctttggagacaatcctgttagaggtatgatcagatattaaatataaacatcttttttaacaaaaaaaaaaaaaaaaaaaaaaaattaaaaaaactcgaactag

SEQ ID NO: 8241 - DNA, 263 bp, Glycine max
  Clone ID: PAT_MRT3847_107451C.1
tctctctctctttctgttttttttatttcttgttcttgaatatggcgctatttccccgccttgcgcgggcaggtcttttccttcaccagacttggtcggccgattatggggcaccgtctttaacctttcgaaactcggactagtccccatttactcgaatcccttattgtgtgtgaatgaatgtacgagatggatctaatgtaatattcgggatcgagttatgagctgataaaacgtagatccgagaccttgcgttatttctg

SEQ ID NO: 8242 - DNA, 402 bp, Glycine max
  Clone ID: PAT_MRT3847_107452C.1
accaaatacttggaatggataaattattaattggtcttaaagaggaattgggtactcatactggcatatgctaaaaaccaaaacctcggcatctttctgggattaaaaaaaaactataaacttcttacatggggcactacggtggtattggtaattccaccaattcagttgcgaagaggaggcttcagcttttttatggacttgccactttgactaaactggtgagctagttgaaaaaagagatcaacgaaagtgcgttatgtgtgaaactagagatattgcctttggcccggagctacctttaacactatatttctcttctagacctcttatgagggtctgaaactacataactgcgcaaaatccactatctactggaaaagcaaatgggctgtctgggag

SEQ ID NO: 8243 - DNA, 1927 bp, Glycine max
  Clone ID: PAT_MRT3847_107453C.1
actcttaacctgaaatgatgtgtttcaatagaatatctccatctgttcaatctatgcaaatataattcacaagagaatgttttgtcctagttcttatacacatgtgctagctaatttaattcattttcagtatttgtaagcaggaaagaatcatacaaaaaagaattaagagtccaattcccaagacaaaagaccagtcttatagcaagcggtaccaaaatctaagacttatctatggtatcattctagcataacacctgcagtaccaaacgagataagttatagaaccagcatagaaagccaatacttctattgattggcgcaagtttaactttaagggacacaaaaaaaataaaggctagcatgggtgtcacactatgcccctataagtcaaggtcactgtcattaaataatcttaagcaacctccaacttctctactgatacaaatcagcaatcaaacttttccctttctcccatagactgcttgggactttcaaattgcacaggtgtcacgtggatattctacagttgaaggattatcaccaatatcataatccaacctttcttgaaccaagtttatctccatgcagagtgactttccagcaatcaacttggaatacaaacacagaaacctttttgggaacaactcggaatttattatcttcagtaattatcccaaatgcttctgcagtttcacgaatcatgatgccacaaattccagtaaaatgggttattttacactccacaactaaaataaaagcaccatgtagatctgcaccaaggagacattgagccaattgatttttcccagtggatttaagaagcaacattatgtaatctttccacatttcgtgcattggcttgaaaatatcaaatttctggaactcttgaggaagatctaatgatccatccttcttatgccgtttcatagacatgtgtttcttagagcgttttgaatgaagttgcaaagccctagcttgagaaccagaggaaagcacccgtccttgtacataattatcaagaaggatccagttgtcaattttcatgtttctagatccttgcatgtacttatgtgctgcatctcccttctgaagaagctcatgcaatatgccatcaattgaacctcctctttcagcagaaaactcctcattagttgtgagcagatttccatttacaggcacagaaagttgggcatatgctggaccatctgcattgttgggtatagccgggcgtcccgtgtaacggaagttccctttcttggatgagactgatgatcaatgcatcaaatgtgggcaaggatcattagaagtagaatctgcaggaataggtagtttcccatcttcatttatagtctttttgtttttcttttctttttggagaacttcaactttagcaaaagctattcttctctccaaagcctccaatgtgcgtttccttgaatcttcagccatggacaccttgacgaggacggagaagcaagaaggcacaaatcaattaaaataaactgaaacagaaagcaacggtgctgccactgtcagctcccaatgctcagaaccaccgctgcgaccacctcttgccggcgagaggccgctattaactattgagcttcgatgtgatgccgctattaattttttctaattcaaccactcatactttcttataagggttagaaaaaacgggctcatccaagttcgttctttttgtaaaaataatacggtatacatttagattttcttaaaaaaataagtctacatcgttatgaattttaaaatactccgcgcttaattccattcctgtgcttttatgaaccttgcaatggagaaataagggttgttatatgcgagtggatcggagtgaagagggaatcatgagtgctaacttgttaagggggaggggattcgaagagagatagatcggacgcgtggg

SEQ ID NO: 8244 - DNA, 489 bp, Glycine max
  Clone ID: PAT_MRT3847_107454C.1
aaaaacaaaaagtctagcacagtatctagcatctacatagactaaaaaaagttacaaaaactaaaaatgaaatatttacagaagtaaaaaatatattgaaaccatagataagtggaaatgaagggttgaaaagcaacagataaaaaatcgttggcttttcctatcattgattgaagtagcccagagaatacagggcttttgaatgtcctcactgtgagcaaagcacaatgttccaaaggcggtgagctcttcttacaattttgctaatcttgcgggcaatgaaagaagggatcagcaatggaggatttgcgatggatggagtggagccacgtgtgaatatttcgggagcacttccccaacgaaatgaagatgcatcattattcttccgcagataaaaacttctactacccacatccgcaatgacttgtgatttatccaaactctggagactgaaataggagtgatgcaattggaatgaagaagccatat

SEQ ID NO: 8245 - DNA, 454 bp, Glycine max
  Clone ID: PAT_MRT3847_107455C.1
cccacgcgtccggctttcttctggttctcaaactagggctttgcaacttcattcaaaacgctctaagaaacacatgtctatgaaacggcataagaagtatggatcattagaacttcctcaagagttccagaagtaagttaaaaatacacttcttgagtatgttgatgtcgatctctattgatattgtgggtaatgtatactgttgtgaggaatcttttatttcagcttttgttcaagtttttttagtttcatgccatgtacaaataatgttttgtacagcatgttttattctagttggttatatttttctacaaagatgtttttttgtcccctaatagttgtttactctgattgcagattcgatattttcaagccaatgcatgaaatgtggaaagattatataatgctgcttcttaaatccactgggaaaaatcaattggctcaatgtctcctt

SEQ ID NO: 8246 - DNA, 773 bp, Glycine max
  Clone ID: PAT_MRT3847_107456C.1
atacaaataaataggatttcttatttcctttcatgcctcttatcagatgctttatttggagataaaggtcgaaaattacaaaattggaatagatatataatataaacctcaacaaactctacatagatgatatgattttacttcgtgcgtgataccatatataactccttaatttatatgtttcttgaggaaaaagaaaactttaaggctatgttttataagtggtaactggaattgtgaattcagcaattgggttggggttgaggattttcccagggggtagcattcttgccaatcttttgaagaactctaatcacttcttccgttgtgacattgcctgtaacgatcaccttgctcaactgcttgtccacgttatacgtctcaatatctgcaaggtcacgggtacaaaaattattcatggaaccgaaagaagttgtgcttccaaagcaagcaaagagatcatcataacaaaagttgtgacctttggaaattaatcagttaccttcaatcttcttgatagccttaagaattttcttgatacactcgtcacagtgtaaaccaaccttcacttccaccacctgatgacacacaacaagaaactttgatcagttttctgtcccatatacagctgaaaacaaaaggatcaaataatagctagtaagtttctcacatttgccattctaattgtctctctgagtggaaaattgatgcaaagttaatgtctctgatgttagaagtcttgagcaagtagaaagaaaaagggtagggtattt

SEQ ID NO: 8247 - DNA, 425 bp, Glycine max
  Clone ID: PAT_MRT3847_107457C.1
gaatgcctattacatgttacttacgcatgtgtgatcgttggcattggggttcagtgtggagcaacttgcaagaccaaacttgtttgtgctgcgctgcgctgttttgtttgtgcccacaacgcaccgtggttgatgtaaacgaggttttaacgttatcatatacatctatcatctcttctccttgcttatttctacatgattttagacctatctttcttctcttttaacctcactcaaccccaatattatattcacctccacaaacatttctattttcaccaccaccagcaacaccaacaccattaccagcatctcctattcatgcacctacacctgcttcctctcctccagtctctcctccctcaccttctcctagagtgacaccaaaccccatctctcctaacactccaccaggaccctcaccc

SEQ ID NO: 8248 - DNA, 296 bp, Glycine max
  unsure (1)..(296): unsure at all n locations
  Clone ID: PAT_MRT3847_107458C.1
tncntcnccccancgccancagcctcttcanccnnctcattcctgcaaccccncanccncagcagcgcgcttcatgcncttccttnagcgtttacacantactacctncgctncncagnncccctcacagcaagccctnancaagtnagcccttgcacnccccagctcaacccagttgcacacctcgcctagncttgccagcacccagtttagcgcattncccncccaccancaaccttaacaagaagccttacatnctatgcatgcacctccccctgcttacnagttattagcnt

SEQ ID NO: 8249 - DNA, 342 bp, Glycine max
  Clone ID: PAT_MRT3847_107459C.1
gaaatacatccaaaaacccttcgagctccttttaccattcaatcattatacaatccatgtatggcaattttatattgttatgactcaacaatttactaactccccaaacaaacttaatcatttcattaacatccttatattaagaaatactaaccagaatatattctacttcaattaagccattaatatacgtttttaggaaaaatacatatatgacttcctaaacttaaaaaaattattcataaagaaaactatacgcttcatacaattgaaatttctgaaacatacattgttctaacatataaaattatttttttgtcagtaaacaccaaatattataaa

SEQ ID NO: 8250 - DNA, 737 bp, Glycine max
  Clone ID: PAT_MRT3847_10745C.1
tctctccataactttaagccatgaccagattaggagaagtgcatcatccatcactttgcttgcattgaaggtttggttttcaaacaccaacttatttctatgttgccatatggtccgtgtaagggctatccaccaacacctctatcttgtagctttagtcccagcagtgtttccactgttgtgttgcagaaaatgttccctcaagtcttttgggaaagcacccgctgttttcacccatgacagtgactcccaccaaaaggggagggtcttgctgcagttgaagaataggtgtgctgcatcctcctccgagttgttgcacaatgggcacaacgaatcacttatctccacttgtctccttctcaaattcgccttcgttggtaatcgatcgttgatgagcctccatgtgaacaccgctgccttaggcggtatctttagtttccacaattgcccaaaaattccatcctcattgtccccccttattgcctcctgcagtagctcgtacgcagtttttgttgaatagtttccactcggatctgccttccaagtccatgagtctgcttcatgctgttgtattgttgacaatccgatttcctctagaaattctgcagccgttgtagcttcactatcaaataaatttctccttcaattgaagctccattcccaaccttcatctttgtgactcccatgaggctgatagtttgctgttgttgattggaaatttggtacagagtaggaaa

SEQ ID NO: 8251 - DNA, 448 bp, Glycine max
  Clone ID: PAT_MRT3847_107460C.1
caacccaaaaaaaaggggccatacaaaaggtttaaaccacccaagggcatttttaacaactttacgggccttatttggagggaaataatttccaaaaaaaaaaccaaaaaaaaaaattttcttatttgggtttggaagtaaaaaaggctcctatgacacctttgcaaaggtataaaaccttgggttttgaatttttgccttaacccaacatactttaaaaaacaccttaaaataaaaagctggctaccatttttgctataaatggcagccaaaaataccacatgctttatgcatatatgcagtggaaatttgagctgattctttttgaccttccaaagaaacccttcacatttggctactccccaaaagtttgaatatttgacatcacccaaattttgttggtggaacaattaaactcatttccaaaacagttaacagcgggatgatc

SEQ ID NO: 8252 - DNA, 596 bp, Glycine max
  unsure (1)..(596): unsure at all n locations
  Clone ID: PAT_MRT3847_107461C.1
gtacccaggtacctgtacacccactagactgtagtggcactacggctgaaagggatgccagcggagtaggcagacgctgccaactaacgtgacggtagcgtagaaagtgtacagagtgatgcacctacgacgcccgttataaagggtgctaagccaccgacagcgcaagaggcaggtacggatagtggtgctgtggcatctagtgttgtagcgttagcaagttgttaaatttatattgtttacgaagaaccaagctttcctgtactaacgaggcgcgcagtgcttctacctgcaatggtactgttgtgctgtatgctggctgtaacaaccgggcgttcagaagctagagccgtggcggctccaccgaagcaaaaaatgccgccgtaggctgttaaggtatgcgtactgggggcgtatgtagtgcctacaactacggtcaaatggcatggtagtgctaagccagcacggatctatgcggacgcaactaagcaaactgtggagtacgataatagtggtgcagcctctgctaaggngaacacggggctacctggncaacggtggcctaattgtaggcctgcacaaacacaagcagccag

SEQ ID NO: 8253 - DNA, 472 bp, Glycine max
  Clone ID: PAT_MRT3847_107462C.1
tttgaccagttgtgctgggaatgcaattacttataggataataatatatgcaaaacctgaacagctggaataggatggttacacatgttgtataatgctctattagacatttagtttgaatggaatattggaggggatgagaaaaaattatctgacaaatgatatacatgtgtcacagagaattggaagcaatgtgaccaaaggtgataatctcgacgataatactgtagatagtgccacatataatgtaaaatcttcaaatgttaaggaaccagttagatcaccaacaagtcttgtgtttggttatctcaatcttttctctgatggagtggtaagttatattttttcctttgattggctgtcaattgtaatgaaggaaagtttttgatgtattcatgcaaaatatattaatattgcagcataacttcaccgatggaatggctttaggaagtgcattcttgctttatggatc

SEQ ID NO: 8254 - DNA, 574 bp, Glycine max
  Clone ID: PAT_MRT3847_107463C.1
cccacgcgtccgtgctttcaaacccgatacatagggcttgaaccttggcaacgcataccggttcgacactcattacattggtgtgcgtgtggaactctgcctaaactggaataacttaccgaaagaccaaggtgtgatggactccactctgaacagaggatcctatgcatgcactgcacagtcagcttgcacaatcatgtggacacccattgacactatatggccggataccgtggcctaaccaaacgcaaaattcacaactaggccaacctcatctacaagaactatgggacacctctggctcatgaagggccatgggatatgactctctctacaaagaatctcacacttttggacctgggagatcaccattggagaatgagcatctctatcctagagtgatgaaccaattgctgagcctaccctagaggatactgagcttatcaaactcatgactagttcatgcagcttaggctctaagcaggctaggattagaagactgctttgaaggaatcatatgctttgagacccttaatcccatccacaaaagcactgtctctgatgatgaggatga

SEQ ID NO: 8255 - DNA, 454 bp, Glycine max
  Clone ID: PAT_MRT3847_107464C.1
tggaaaacaaagtgtgcctattgatctaaaggagtccatccgagtccttgctaaacttagagaagcaccttggtattatgcagaaactaaagaacttccgagatcatcacatgaagtaaaagatggacactggcattccatctcaaagggtgctccttggtttccttatgaaggtaaagaaataagccgtttatcttttgaatcgcgagaaaccatcaaatccacaccaaagctaaaagagcttcctagactttcactggatagtaaggaaggttcattgcgcagttacagcactgactcaaaagccactcaccactcaagaaacatttacagtggcacctccacctcaaatgacaaattccctaccctacaacagccttcagcaaccccaagtcgtccacctagtgttgtggcaaaattaatgggcttggaagctttaccggattcctctttg

SEQ ID NO: 8256 - DNA, 568 bp, Glycine max
  unsure (1)..(568): unsure at all n locations
  Clone ID: PAT_MRT3847_107465C.1
ggctcgagctcatactgggggcccaaagctggctataatacatatcacatgcttctctcaatgactacatttattggtgctgcattttgttttggggccttcttattcagaagcatgtatggcttccttgctcttttctctattggtgaacttcttgtttttgccactcaggtagtttccttctattcaattaatatctctttatgtttaattgctatattgaagtactatcctttttacatgcttatcatctatgaatattttagcaactctgatattgtcaagttaaattcttgattaatgattatgtttctaagtaaaatcacttctatgtttgggaaattagatgaaaatttgctctctgagaactaagtcatcctagggttggtttgtcttttgaattttatgcttgtttcaggggacaatgctttttgttcttttttttccgtatctattagcatgcagagtatatccctgattctttatatcaatttgtcttaataattttatcatgaaacttngaagataatcatttaatggtagtatggtactagtaactagtaactac

SEQ ID NO: 8257 - DNA, 232 bp, Glycine max
  Clone ID: PAT_MRT3847_107466C.1
aacatttggtaatttaataaaacgttcttaatgtcggggatttataattgggaacgcccctttaaattaattatctgccttattttacaatgtttttacaacaacaacagtccaacattttatcatctaatgacaaatcaaacccattcctgtaattatcttccaatgaagtatgtgtctaataatggtttgaaatgtggagttctgattgggcaaatcaaacttatgcatt

SEQ ID NO: 8258 - DNA, 267 bp, Glycine max
  unsure (1)..(267): unsure at all n locations
  Clone ID: PAT_MRT3847_107467C.1
tagacggctgcgcatagacgacagaagggttccccaaactatatacataaanaaatanatanattagcaaaaataagattcatcagagagatcttttgtttccccgacaaattaaaccatttagatatttaagtccaaacatgccctcagccgcataacaaaaaaataatgcggattagacttaaatttcagtgagacaaggataatgtaactataaatagatatatttgaattgaacccatgaacttgttgcatggtggaagatca

SEQ ID NO: 8259 - DNA, 233 bp, Glycine max
  Clone ID: PAT_MRT3847_107468C.1
caggtgtattgattgagtatttttactggaacatcccaaacatacatacatgagctcgatttaaacaggtacaattgacaaattacgctatatcgggcccatattatcaccatgtactatagtgcatcaggacttggggaaccactatagaggatagaccacaatggttattacttgccacacctggcttgtcgaggattactgatacaggcgacctccattgtagtagtaat

SEQ ID NO: 8260 - DNA, 141 bp, Glycine max
  Clone ID: PAT_MRT3847_107469C.1
tgttagactttcagtaaatttactaataaccaaatttacattcaatgggacaaagatatatcatacacctcaacatgagcgggtttccatgtacagaacatgcaaatcaaggtatatccccctaaaacatagttacggtaa

SEQ ID NO: 8261 - DNA, 767 bp, Glycine max
  Clone ID: PAT_MRT3847_10746C.1
ccaacacagatttgaaagcaatgcatggtcacctatgatttttgtccttagtagaaggacactttctcatagccacgatctctctatctctatatctgtctatctctagcgtagcatttccatgtccagtttacacccatgatcacatctacacttctatcgatattctcagaagaggctcactggtactgagcaagcgcccacaacctccaataattcagtagttaactgttatgatctatttggctttctaacctacaagcaaagctcttgtagtggtatgtgaaccacacaagagagatattaaattgtatgaatcggctatatggacgacctctaaccaacttcgccctctattggtaactatggtacacaccttgtgaccgatggagatgaacatcaactctttgaaaaaacccataaaatactagctatatacactcaatacaatatgcgcaaaacactaaatcatcctgcatatgctatggaataacattctatagagaatcacctcatataccatctcacagagctattcaacagatgtggtagtaacattaaacaccacgacctaccttcaaaaagtgtatcatttcgaaactttgcttggaaatcttatcatcgaacaagaatagttttataatatcattgacatgtatacttaatcccatgaattgcactgccaatcgaatacacaacaaatgaaagccttttattctatggtacaaactgcactctgtgatatgccaagggtctctactgtttct

SEQ ID NO: 8262 - DNA, 209 bp, Glycine max
  Clone ID: PAT_MRT3847_107470C.1
cagattttgatattctttagggaaggtttcaagattggggaatagctggtgatactcttatgccaactttttgtgcttcacaggctactgctagatcttctgaaaaatgcgagcatgctctgcatgatctggaatttgtgattgcttgcgctagctcgtttggttaattcaataaaggaaaggaggcatgactctcttgttgagtatgc

SEQ ID NO: 8263 - DNA, 165 bp, Glycine max
  Clone ID: PAT_MRT3847_107471C.1
gagacctcaggtctggctgttataccctgtaaggggtattgggtaaaatgaagttgctaaatgaaacgaagcgatcgttttaaaggatccaatcttacatacaccagcgtgcgacgccatagtctctcttatcgtgccacctaaattctattgactggccggaac

SEQ ID NO: 8264 - DNA, 497 bp, Glycine max
  Clone ID: PAT_MRT3847_107472C.1
tacatcgttagcagtgccgcctgcttggggggggggggggggggggggggggggggggggggggggggggggggggggaagtatacgtggcaaattattaggggggggaaggtgacagcaagtacaccaggacccgttaaaaggttaaggacagggaatacggggaaattattaaaaaagaaatttagcgacagtgatagaggtgctatcaacagcaatgcccccgcggtgcagcgcgcaaagcatagcccgaataaatgggataacaaaggtgggatgctggaaggcggcaactagaacccagaaagtgtagcaccaactgccagacccattaaagctaaagtatattaaccaaggccgccatagggaaaacccgatttaaacactgcgggagacttagcggcccccaccctagggtactgttgtgaataccaaagcagaaactgcgtattacggcgctgctgtgagggaacgccgctaagtgagatatggcaaac

SEQ ID NO: 8265 - DNA, 553 bp, Glycine max
  Clone ID: PAT_MRT3847_107473C.1
aacattctccacacacattaacacgatatatatactcgtactagatgaacttagcgtagatcctgctatgaattcgtccaatcaatgccgagaggacacacagcagaacgcaagagaaagcagactactccccgaatgctaccatgaccactcctcccttccgtagtcaaccagaagaatctcaagaaggccttgcacagaacccccatatctcaaatgataccaacgctactttgtctgaacgcacgcgcgagaccactattgcataccagaaaaagagtgccaccagagtccccaggacacagaatgagactcacgggatgatctgctgtcgctcgtgaccacgctggcatgctcgtcatacttggagactgtcatggcgtatccgcagaaggatacgtcgatcctgcgggagaatactgctatgatgcttagaaccacatgagacttatgagaggtatgtgcatgccacgcctatgcatgagcgtcatggcacaccgccatgatgagcatcacagacacgtgcatagatctgtctacactactgacatca

SEQ ID NO: 8266 - DNA, 346 bp, Glycine max
  Clone ID: PAT_MRT3847_107474C.1
attattcaagaaacttatctacacggtatctgtgcaagcagggccacattgcatcctcacatgggcaaacaagctgcttagccaaaaaccattagaatccatcccgaagcgtaaaaaggcaattatctccaataattgcgaaccgctttgacgacagacttactaggattcacaatgtggccacttggtggagacacacaccacattatcagagctggaggaacttgtgctgatgagctgaacctaacaaaccattttcattggcaacagccaaagaagtattgtgaccatcatgagcaggcttagtcatcgtcccgatctggcgcatgacgaagaaattctttga

SEQ ID NO: 8267 - DNA, 388 bp, Glycine max
  Clone ID: PAT_MRT3847_107475C.1
ggctcgagcttatagaaaactaggatctaggagctgattttaggcctaatcggtcaatacggagtgggattctactctgcttttcttgttgctgagagggttgttgggggtacaaagagcccaacttctgatatgctttatgagtgggacgctgaaactgactggggcccttatgtgatttaagaagatactgaccctgtataggttctgcgtcggggggctcagattacactccttttaagagaggaagccaagaatcaattccctacgccaagcaagccccttggattgttgtggcaaaagccacagagaggaggctttggggtgtgcccatgggaacaaatgaaaggtgcttttgaggggaaaatattggctcctctccatcccg

SEQ ID NO: 8268 - DNA, 184 bp, Glycine max
  Clone ID: PAT_MRT3847_107476C.1
acgagcaatattgtaagcttagcttgaatctgaatacaaatgtttccagtacctcgcacgtcatgcgcatgcacaaggcatgagttgaattcccttggcatgtttgtgtttgatttgcaccgtattgtattctgggtcaagaagactgattgaatggcaaataaaagcatttgtgtctgagaat

SEQ ID NO: 8269 - DNA, 962 bp, Glycine max
  Clone ID: PAT_MRT3847_107477C.1
cagaaactacaccatttatttttggaataagaggtgtaatgtgagtgcattagttctggagaaacctatgaacacaaaacaagacaatttggattttggtgtgaacaaaaaggatatgatttggcttttttattttatgtcgcctatcagaaattattaatgtttttgcttcccctcaggtcagtcatcacccaatgattgtcgcatgtcactgtgagggtacaggttggaaattttggggtgatagcaacctaaagagcaaattctgggggcgatcaattcaactggaccctgttggtactttgactttggaatttgatgacggggaggttttccagtggagcaaggttactacatcaatatacaatctcatatttggaaagctatattgtgatcactatggtacaatgcgtatacagggaaaccaagagtactcgtgtaaactgaaattcaaggaacaatctataattgatagaaatcctcaccaggttcatggtatcattcaagccagtacgggaaaatactgttctacattactcggaaaatgggatgacagcatgtattatgttaatggagactacagtgggaaagggaagggttatgaatctatgtcagatgcccatctactatggaagcggagcaagcctcccaagtttcccactagatataactttactcggtttgccatcacattaaatgaacttacccctggattaaaggtctttttttaactgatactttcttttgtgttgccagtttatcttccttttttttttctttataatggaaaaatgtgctatattttatacctttttaccaccattattagtgcttgcatcactaaggaaacgttttgatcatttctatatcatggaggagctatataaaataatttaaatttaacataaaaggaccaaaatattcatatcactatattttgcatattgtgagtgcttgtgctc

SEQ ID NO: 8270 - DNA, 217 bp, Glycine max
  Clone ID: PAT_MRT3847_107478C.1
gccgaattccgggtcaccccgcgtccgacgctgcagaggacacttaaggggaggagaggctgtggctagagtctatacgaacgcgggacttgtctacttgagttggagggctgtatgactggcaccccttattgcctgaatatgtataggatacctccttactccgcctagggctgttcaagcttcttgggactgtgacactgcgcgacagaatccc

SEQ ID NO: 8271 - DNA, 352 bp, Glycine max
  Clone ID: PAT_MRT3847_107479C.1
caaaggataaattattactttcaatctgttcttacgtaaaaaattataatgggaaaacacaattaatttgtggcagaatataacaaatttactctccgacacattttgcgggtatacaattctttacattgtatcatagtaaagtaaataaatgtgttagggctaaatcttaattgatgcaagccctggaatacatggggcaatattcaacacaataggctgacttgactatgtacagaatacacagtgtttgcgcatacaaatactttgatataaaaccttgtaattgggcaagcaaagcatgattaggccttggcaatttttttgggtatacttgaacaaccagaataca

SEQ ID NO: 8272 - DNA, 183 bp, Glycine max
  Clone ID: PAT_MRT3847_10747C.1
gccggaattgaaaaatccaccaaaattaatctctgaagttaacagagacccctagatttagggaaaagagaaatagaacctttgtaccatctagtggttccgcacaccaaataagaacctcgaccaaaacacgtagacaaataagggtagccccatgaggaggatcttgttttgtcccccatt

SEQ ID NO: 8273 - DNA, 349 bp, Glycine max
  Clone ID: PAT_MRT3847_107480C.1
cccacgcgttcgaccacgcgtacgtttttgtgtttacaacgatcaattgagggagcgtgtgcgcgccaggggagtccatgcaagcgcataaagataaatcgtactgaaggatatttaaccagcttgctaactattatgccaaatacatgatcaaacatatcgtggacacagctgtgttcaggatagagggtaccccactctctaatattacatactacagaaaaacatggatatggggtggggaaattaactgcgccttggatgatgaatggttaacaagggcattgtacacgggcatgtccgcgctatataaagtacaacatgctggtgggattagggttcatgattc

SEQ ID NO: 8274 - DNA, 271 bp, Glycine max
  unsure (1)..(271): unsure at all n locations
  Clone ID: PAT_MRT3847_107481C.1
atgcttttagattttacccaaaaccctcttccatggcagaagaagcagcactggaagtcgttgatcccaactaccgncgntgccgccgccgccgtggacatggacgtcgagattgttgaggccgagctggtccgagccgagccgaaccaaaatcgcgccagggaggaagaagtgcctaagagcggtagacgctgctgcacttattggtctaactatgatgcagacctataactgatcccgcaacgatgactgatgtagaggcgcgttattc

SEQ ID NO: 8275 - DNA, 836 bp, Glycine max
  Clone ID: PAT_MRT3847_107482C.1
cccacgcgtccgcttttaaaactctgaaatcgtatcgtcatcgttctccttcttgtctattcacttctttcccttatcaattcaattcaacttcacgacttccatgccttctaacaaacaatcttcaatgccgtcaaaccctaatccaagaagttccgaagtcggtaaccctatgagaaggagtttcactggaaaccccttctccaaaccctcaattgtcccaaaccatggagtaaaaactcccgccaacagcccttctgcagatttttcgagaagaggctctgttgggattcgggaaagcggagggtcgttgagggactcctttgatgacaaagaaaacgggaaagatcagattttgaaaccgacaaaggttcgatcaccagctgtttcttcaaagggctcaaagaatttcatgtctccgaccatttctgcttcctgcaagatcaatgagtctcccagaaagaaagtcctgattgagaagaatgaggcagttccgagtcccgcagacaagaaaagccacgttcgcaaggtaacttttgccgagcccttggaggagaaaatgattgatgggatcatccccaattttgaggaaggtctcagatcttccctgagtagtgaagatttgagtggtgagagtgaaactagtgaaactcattatatggatgttccctttgattcaaaaatgatacagatttgtgctttgaatctgtcaatgatgtaaatgtgaatgttcttttggttctagaaaatgacatttacactgaaccatcatttgaaactgagcctgattgggttaaccttgaccctacttttaagcttagccccactgccacttc

SEQ ID NO: 8276 - DNA, 1781 bp, Glycine max
  Clone ID: PAT_MRT3847_107483C.1
ccagtgattccgaaaagaatgagagaaggtgaacactcttcccttgcttctaattctcgaggagctgcgactgagattgccagctctggtaccagtttggtgtctggtcttgatagcaattcacctccctgtcttgtagagctatatggttcacaagattctggactgcaactgaatggcatttttgggtttgtggttatacttacatctgacctagagcttgaagaggacaatgaagattgtgatttatcagatgggatttctgaggatcctttgtgtcatctcccacctagcaaggtgccacaccttcattgttttattcacaggaaattagcggttcacgacttccttcagcataaccctattgtagagccaaggcccaacttggtcagagaaatcagggaagcattgctaaggcatctcacggctgttcttggcaatgatgatttggctactcatttcatgttgctgcatcttctatccaacgtgcatgctagagcagatgatcttgctgtgggaaagctttcattaaatcttacttgttttagcaaagaaattgtgtctgtatttggaaaaccattaagcgctgctctgaagaacctcctgcaaatcacattttacataccccttactgttgaatatttgaatactcttgcacttgtgccaaaaaagtattatgatactaacaggctggaaactggagtctttcaactagctgaaggttcacacttgattgttgatgagaccaaactagaagctggaacgctcaactctgtaggggtagagaatacaaggctgctgaaaaatttaatggaattgcaaaaggttgaatatgatttcaagtactataaagtggatatggcaacggatttccaactgctagttttgtcagaggggaaatcaaatatcttgccagctgatgtaattgtaccgttccggccttctgcaaccagttgctctgaagctgtgactgcagaagctttggaggcttggaggtggtatttggccactgttagacagctatcacacactattgaaccagaaatgcagaaggtggtagaaactgatctagttgcagcaagacaagcagacaggagcttgagctcccaagacttaagcagattggtaacaatgggccgtctcatgtcattgagctatggtgagaccagcttgtcactagaacattggcaaacggtcaaggaactagagaggctgcgaagagagaggctacaatgagacacaatatggaagcacaagtggtaccaatttgtacaaggttttaaatgagtgcagttcaaagggtctggctgttagttctgattaccagagctgtctttatgggtgcttatttggccagcatacttaaaagacagatagtcggttccataagttgtgaattcagtaaaatgcaatataaggccgttttactaatccttgtacgaatctcttgccttgttttttgttagtattcaggtagatatcctgttttcatatgcacatgttctaaatgtaatatgtgcatagaagcgagtgcaccaagcgttttttcagccataaattgtgaaatggctgtgaacatagaaaggttagcttggattgaagtaaagatccgtagaagatggcataaccccataaggccttagggctgcgcaggcgggggaggtggggtggggatctgcgccttaactttttccttcaggactaattataatttaaaattgtttctgaattatagtaccttatttggtgctgatgtctttacctaaacatcatttgatctt

SEQ ID NO: 8277 - DNA, 665 bp, Glycine max
  Clone ID: PAT_MRT3847_107484C.1
atacggaagagtaaagactgcccaaaatggctttggtcgtcgaagacaacgatttccagcacattctgcgtatcctcaacaccaacgttgatggtcgccacaaggtgatgtacgccctgacccgcatcaagggtattggccgtcgcttctccaatctgctgtgcaagaaggcgcagatcccgctcaccacccgcgccggcgagctgaaggaggcccagatcgagacgatcaaaacgatcctgacgaacccgggtcagttcaacatcccggactggttccttaaccgtcagaaggaccacaaggacggcaagaactcgcaggccgtgtctaacgtgctggacaccaaactccgtgaggatttggagcgcatgaagaagatgcgcctgcaccgtggtctgcgtcactactggaacatccgtgtgcgcggtcagcacacgaagaccaccggccgtcgcggcaagcaggccggcaaggagaagtaagcggcagctgcaggactgcgctacggggctggacgcttggcattgcgcacgaccgattggatcgcatcggtgtggagctgttcgtacggtggctgtgggcggcgcttctcgccggcccgcgcgtacggcagtttcgtgtgtgatgctgtcgcgttgttttcggtgcacaactctttcgatgtc

SEQ ID NO: 8278 - DNA, 557 bp, Glycine max
  unsure (1)..(557): unsure at all n locations
  Clone ID: PAT_MRT3847_107485C.1
aggaagcttcctttacaacaaaaagaagagaaagatgaaggattgaagaaatacaagtggtgaggatgtctcctccacctctaggacctcacaatcactcacaaacttatctcaagctctttaatgcgacttcctcttcaagctcaattctctgcgggtcttcacactgcaaaatctctcaaactctctagaacttggacctttctctctctagaaaaccctagacatgcaacttcaagaaaaggcccaaactccactcnnnattttggtttcaagcttaaataagtggctttgttcctgcttgcgcgcttagcccaactctgaaccgcttagcgttcattagtggatttcgacttagcgcgtgtttttctcactcagcggatggactgaagtggtgtgcttctctggatgacccttcacttaacgcnnnngcacagctcatccttctcccagnttcttcctcgcgctcagccgnngnntgttgtgctcaacggatggctcgttaagccggangnnnggcttnnngagagggtgaaaatcaacacttcacaaacttg

SEQ ID NO: 8279 - DNA, 106 bp, Glycine max
  Clone ID: PAT_MRT3847_107486C.1
ctcacgcttccctctccgtatccgtgaaaaaccttcgctgcccgcacttattccttggacaccgctccttccagcatgcgatggatgcatgaggcgctggagccac

SEQ ID NO: 8280 - DNA, 967 bp, Glycine max
  Clone ID: PAT_MRT3847_107487C.1
cccacgcgtccggggtgagtgggaggcattttgatttgagaatggcatcagcgtgtctgaaattgagaaatttgagcagaggaggaggagcatttaggtgtgggcgttattcgaagttgatacatgcagagagagagagagaagaagaagaagaggaggtgccgagttctagaatctctaggccgctctctgaaatactgaaagagctgaacaagaaagtaccggactccctcgtcaaaacccgcctccagaaagatcaagatgcctcccccatcagattcattccctggcatgttgtcaatcgcattttgaacttacacgctcctgagtggtctggtgaggttcggaatatcacctattccgccgatgccaagtctgtctccgttgtctaccgagttaccctttatgggactgatgctgagatatttagggaatcaactggtactgcttcagtagacgacacaagttatggagatcctgtacagaaggcagaagcaatggcttttcgtagagcttgtgcacgctttggactggggctccacctttatcatgaagatgcatcataattaaccagcagttctgcttctcagcttcaatgttttgatgatgcccatcgttttcttttttcctatagttatgatcatttgtgatcatattgcaacactagaagggaaatattttgttgtaacctgatggagacctactaagcttcaatcactgtatgcaaggtttgccatattttttatctttgaacttctccagttatctgccatgcaattgggagaatttatgttctattacacatctgatgtagaacagttagaacagttttatgcaacctcgttcattgtggtatgtaatgctaacggctgtacttatgacataggttctgggaacaaaatatgttccgtgcgggtgctgatgtatttttaaaaacaaaatactatttttagttaaacaaaaaccc

SEQ ID NO: 8281 - DNA, 684 bp, Glycine max
  unsure (1)..(684): unsure at all n locations
  Clone ID: PAT_MRT3847_107488C.1
aattcggcacgagacaagatgaactggcaagagttgttcctcgtcttttatacataccccattttttaaggtatcacatttgcatgctgcagattcattgcgtctcgtttagtcacttgtgccttgaattttcttctaatttggcaaaataaaaaaaggtgtactgttcattgtttgtagtactaaaatggataaatcacttttctatatcaacctaaaatttcaaagcttatttattctccatgtcaacctaaagtacaaaaatgtctctaatatgcaccaaacataaaaaaatggtacatcaattcaacctctaattttaactttatattgtttattaatttatggaaattcatctttccctttttaatgtccctaaacaattggccaaggagttatcagaatccaaggttatcttttctgacnncnnaaccatcctccacgcacaccttccacgaggccatggtgccaccacaagcagaatttgcgaggcaagccagaaaggatgagaggaaaaggtgtaatgatagtggaaatttgacacaatataattgcatttccgtggttgaggtcaaggggtgaaaggatgagtaatgacggtaacaacataaaattgccattttatctttttttcttcttctcttgttttaatnnaaactattcattnnttttnnnnnnnnnttt

SEQ ID NO: 8282 - DNA, 400 bp, Glycine max
  Clone ID: PAT_MRT3847_107489C.1
gtacttatagccacactcattgatatgccaaatgctgcttttggaatgaagagatcacaagggcgacatcttttccatgaagtccctacccggactgttacgtacgtggcttgtactatctgtggcgtaactgcatcaatagatgtggctgttgacaccatgaatggtgcggctcttccacacaggatgttgcagtttgaagagattgaggaaaaagctgttaggaaagcttcaccagacgctatatgtacagttagttcaactaaagcgcgtgctgaaacagctgtgtaggcagacgggagtccatcttatgcccctatcggacatgatagaggagagcctacattaccaggtgaatgtgccattgcagttaaggcgactcccataaacaagccaagtg

SEQ ID NO: 8283 - DNA, 346 bp, Glycine max
  Clone ID: PAT_MRT3847_10748C.1
tacggctgcgagaagacgacagaaggggggcaccatagctggacataactaccaccgctgaagagactgggataactctgtggctgggatgaacactaaatctgtaccaggtggggatggtaaaagacaactcactttacaagctggattattggaaaactcacatggcctgcgacaggaatgggctcttgccaccgatctacaaaagatatatgtgcgtctacgacaacgacatgaagcggcgaccctaccacatgaactctgaatgtactgtaaactttacgtggaagatgaacagcataacgtgcacacacgagttgacgatatgcaacaacgtattctaccc

SEQ ID NO: 8284 - DNA, 363 bp, Glycine max
  Clone ID: PAT_MRT3847_107490C.1
ggggaaaaacaaggacaaacttcccacaattaacagctgaccgctaatataataataatgaacatctcaacacttttttcagatttaggggtgcaagtttaattctagacagaatcgcaatagatgactatagttctgaagagtgtaataaacagaccctgtatattgaacatctataatcacattttacgaatatacatgtaccctacattgaaatcaaactacatacctcaaattctataccttacttgcttgtctctcagcttcaaccacgggctgtgttcggaaatgaagggcatcatgcccccaccatattgctcctatcccggaggcccacttatttttagcaaccctggaaagtcc

SEQ ID NO: 8285 - DNA, 109 bp, Glycine max
  Clone ID: PAT_MRT3847_107491C.1
agttcactagccataaagccgaagttgaagctttcatgagagagattttgtccccgtgacccctttaactttccttatggtactctttgcaacaacaggcgaactatat

SEQ ID NO: 8286 - DNA, 487 bp, Glycine max
  Clone ID: PAT_MRT3847_107492C.1
ggaattttgccacaggattatacacagtgattctccttatcacaatgctatctactgctataagaaggataatgaattgcttcttgctttacacataatcccgcagtattgctatcaggttatcattcttccactcttctatgttcattccctcaagggtgcacctcagggtctgaagcagttgctttccttttccaaacaaataagaggcttttcatcattttacatgctggcagttgcattatatttgcttccgaatttactagcacagctgttctgtttctcttcccaatgttaaggcgttggattgaaaactcagactggcacatagtcagattcttcttatggtggtctcagccaagcatctatgttggaagaggaatgcatgatagtcaatttgctctcatgaagtaaactatattctggttgttgcttttgacatgtaaatttttattcagcttttttgtccagataaaacctctagtta

SEQ ID NO: 8287 - DNA, 678 bp, Glycine max
  unsure (1)..(678): unsure at all n locations
  Clone ID: PAT_MRT3847_107493C.1
acgaggttgtagtcgtagacgaggtccttgatcttgcgggggttggtgggggcctccatgtggctgttggaggagctgacagaggcgagggtgaggttcatgcgggagacgaccatacccttctggttgttgtacagcacggggctcaggatgaccttgttggtggtcacggaggactggatgggtgtaccgctggaggttgccggacaggacaacacggctgacagaggagcgggccatgaactcgcccatctggttggaggcgggcttgacgtcggtgagggcgttgaagccaaagttgtagccggggcgctgctcgcagtggctgaagttcttggtcttgacgatgtcgatcagctgaccgtcaccgcggagctggggcatgggggcgagctcggtgcggctctggagctggtactgtggcagggggctgatgtcgtacatgacctcgcactctccagtgacgtcgtcctccatggtcttgaagacaccgttgacggagccgtggctgggcttgttgttgatgcgagagctgatgaggttctcggcctgagtgtcaacctgcagctgactggcgatacgctcgagcatgttgacctgtccagtagggacgttcttgctcacgataagctcatcgacgatgcccgttctgagcttgatctggtanggctttgtgct

SEQ ID NO: 8288 - DNA, 1047 bp, Glycine max
  Clone ID: PAT_MRT3847_107494C.1
tcggctgcgagaacgacagaagggacagcgggatcaaactacagatgttcagaagaggaagtcattagtagatgtttctgttagtacaaataaatctgtattgagaagatggagtgccggtatgggggaaacctctgttcaagaccaggcagaacatgttcctgaagatcctgttccagtgacttctaatgatgtggtacatgctgaggctcctacaaattcagaagtaggagtggtgtctgattttattaccgaaagtcacaataataatgataacactgatcccgacgtaaaaccagaaagacaggaaaatataggttcttttgctgcagataatccagatgaaaccaacccaacagtgaaaggggaaactaacaaaaagttagcagcatcagcagagtggaatcaacgaaagcaagaagagttcaaccaaattcttaaaaaaatggtcgaaagcaaacctgttttatttgggaagtccaagcccagcagaaaccagaatatttcatttgagcagagaggagggtcttatgataattataaggaaaaacgtgatgcaaaacttcgaggagcaaaggctggaaaacaagtagaaaaagaagcacaatttcaacaaatgcagcaactactcgataagaggaaagttgaaatgcccaaaagtgtgagtgcaagtaaaaaaagttctccaaggatgccccaaaattctcttagaaaatcaactccacctgcaaattccacaaaggaaacctctaaacctttaactacgaaaaaaatatcatctagaacatcacccatgcctgctacacgtaagtcttggtcagcaacaccttcaccaagggcagctgggacatcccctgccaaagtgcgtggtggaatttcatcagctaacaccaccccaacacgtcgtaagccagtgtcaacaacatctgttccccaaccaacctcccaaagggaaaaatctatgccctggaacagaaatgagaaagaaactcagaccaataatgccaggagcctcaaaagcatggatgagaagcggcagccagctgt

SEQ ID NO: 8289 - DNA, 394 bp, Glycine max
  Clone ID: PAT_MRT3847_107495C.1
tttttttttaggggaggtaaaaaccccaaccgcctttaatagaggatagataaagaatatcctgagtttgataaggttcttgagcatgcattttatccaacaaaatcatataccatccttcatgaaacaatgccttagtgaatcaagagaagctataaaggacttaaaaaaatttgatattagaagacgaggaacattattgtgggacagagaatgaataagagcttgaactctccctcttgcatgaagattcagccgtggaggacacgtcttgatcaatgcttgacacccctgtatccttgctaagatttcgcgaattattctgcttctgctcgacctctgccgaacattttggtctctttctattaagaagatcaatctggggattatcaag

SEQ ID NO: 8290 - DNA, 482 bp, Glycine max
  Clone ID: PAT_MRT3847_107496C.1
aattaatattagtaattaattggatcatatcaattcttctattgctttttatttttaatcaccgtaattgtgcagtagtaattaaacaacagtttcattatgaatcaaaaaaagagcaacagtttcattgtttaaattctggttgaatccgattatttcaatttttttattcaattcttatttgcatgcataagatttcaattctaattgtaaaaaatgtttgttttcattttcatatttatgtataagatttcaattctaattgtaaaaattgtttgttttcattttcatatttatgtttttattttttatttttattttttttttgtattgagggcttacggcttaccctaggcttgtgcgtatagattttagaacaattttctggaggtaagccatttatttggaaaaatgatttgattttggaaatgattgcttatttttaaaatctgtcttatgaaagtttaataaagcgcgataat

SEQ ID NO: 8291 - DNA, 311 bp, Glycine max
  Clone ID: PAT_MRT3847_107497C.1
cgtgatctatatcgctatatcaagcgacatgcgagtctgacatttatggatccatggctgggttacatcgattacgtgacccacctacactagttctgagagcattgctacatagctatgttcttatattaaagtgtgaaaagcatagatgtacatgaacacttacttatgttcccttgttttgtaagcaagaaatgtgtcaagacggtgaggaaattttggtgtgaaatttacaccaaggcgtacgtctggaagactcgatggatacttaaacgaaacctctctattgataagagcagaaaggatagcta

SEQ ID NO: 8292 - DNA, 342 bp, Glycine max
  Clone ID: PAT_MRT3847_107498C.1
acgcgtatctgcaaattcagttcatccaaaagcaagtgtatatgcaaatgataattcttatacggattcgcaaaagcatcccttgcggccatatcttgactacattgaatatctttaccaaataatggatcctctatctgatcaagaacattttcagcatatcatgccatctaggttacaggaatttttaacaataacctatgcaacctttgatcgatactacagagactcatacttacgatacttttaaaagagattcacataaatccattcattacaaactaccaatcattcaatcattcatacacaagcttactgatcaaaatacttctattaaaacca

SEQ ID NO: 8293 - DNA, 388 bp, Glycine max
  Clone ID: PAT_MRT3847_107499C.1
aaagcccatttgataatcatttaaaaaaaaattttttgggggatttaggggtttattaaaaaacacacagggcccggcaaaatttgataatcttataatgccgagatgatgaagtaatgaaaacctggggttttcaattcttcaaaaaaaattccctcggcatccttgggtggatacttttttgggacatgcttgaaaaattttacctgcaactaaaacacattattcccgggaagcacattacgaagcccagtttccttagtttttattgaccccatttttaagggtcctttgatgaccccccttaaaaggtggcaatagtacaaaccttgggggttggcaggaagctcaacaaaatttcccaaagggtttttccccaaaaaaatac

SEQ ID NO: 8294 - DNA, 234 bp, Glycine max
  Clone ID: PAT_MRT3847_10749C.1
gaaggataataagcatccaaaaaaatcaggaaaagccctggcaaaaagtggactttgcaagacacttcacaatttatatatgtacatttagcaaagagacaatgggaaactgaaaattgtataaaaatttatatccatccactcgggcacaggatttttttgataaagtataggcataatatattttgcgagttcccataccaatgacagaggttagtttagagtcatatgcta

SEQ ID NO: 8295 - DNA, 1007 bp, Glycine max
  Clone ID: PAT_MRT3847_1074C.1
atggtgacacgcgatgaaggtgtgattcagagcttctattttggatgggggttccgtgactatgtgagggagaagtctgaggggaaggggagggggtgtagggatttagtgaatgggcaaaagagtgatttcacaaaactttgtagtgccaatagcactgttggtgatgggaatagtagatcaattaaaagaaaacgctggcctattgtacactcactagaaacggcccatttagcaatgtgcccaaacccagaagccaggaaaaacctatcggtcttgaagaagatggtgaagttccttaagcccaacaaggctgtcatcgtcctgcagggccgctacgccgggcgcaaggcggtgatcgtgaggaccttcgacgagggaaccagggagcgcccctacggccactgcctcgtcgccggaataaagaagtacccaagcaaggtcatcaagaaggactccgcgaagaagaccgcgaagaaatctagggttaaggcgttcgtgaagctcgtgaactaccagcacctcatgcccacgcgctacacgctcgacgtggatctaaaggacgctgttacccccgatgttctagccaccaaggacaagaaggttaccgctctcaaggagaccaagaagcgcctcgaggagaggttcaagaccggcaagaataggtggttcttcaccaaactcagattctgatttcgaaagcgtgaggttttatttattagggttttcggaatgttgccttttaatatattgtatccgtgttttgcaaatcttatcaaaactattattctgctcttagatttgttatcgtcgccgacttttgttaattaatatttctgccttttaatttacgggggaaatgaatgcgaacatattttgataccgagtcattcgcataaaatgtgtcaattcggatatgaaaatttctagtttgtttgatgagcactttttgtttttgttattgttatcacactattcatgtctagaaagaattaggccatacaaga

SEQ ID NO: 8296 - DNA, 576 bp, Glycine max
  Clone ID: PAT_MRT3847_107500C.1
cacttatgagctttaaaatcttctggtaatgtagttaggtttttatcctgaaaaaaagttagtttggcattgggcataaatggttgattttgttggcctaaagggaaatggaaacagatgaatgatgaaaatctatataatgagtcttcatgataaattgagcaatgtgaaactgattttgtgttataatcgatatagttgtcaaggagggggggaagctttgtccaaattacattttcaagtgatatatagtcattgattatgctaaaattcaacctgcatgtaattgtctagccgtacatgcatgatgactttcttgggattgtctggcttgtatacttgcacattggctcagtattaatgttatgaagttactaagttgtatacttggattaaattatttactaatgtttcatttgttacaaacagtccaagggagctttcattgctgtatataggtatgcaagtgcaacgccattgccaccatctattctcagtcggcgtattggatgacagggagttggcattctgttatcaagattgtttggaaaaaattgagcatgattttgcaaatta

SEQ ID NO: 8297 - DNA, 727 bp, Glycine max
  unsure (1)..(727): unsure at all n locations
  Clone ID: PAT_MRT3847_107501C.1
ccacgcgtccggtttccttttactacacctttctgattcctgaaaagcacaagaccttttctgcccttctcacgtgctgcgtatcctctaatctaacataaacttagaaaagtgaaaaattgaaattgtttcgtttttctttttccaatattaaaactttcaacttcctcttcctctgtgtgactcaaactgcatcaaccaagttagtaggattttctataaatggttgtcaatttgtcatgtcatgtctatgagaaactcatgaaaactctggtggcgacttaagttctctcagcaagtaaggaattcagacaaacattagttgaaaagtgtacaatggctttggaaactcttgcttccaatgagttctccaacttcattatctatgacactatctctgcaactccatttagcagccatggctctccggaggctagtttcttggaaagtttagtgaactatcaggagcatgaccctgcatttgataacagcgcattgaggacccgaaatcaccaagccggcgaacaagaaagcgttggcaggaggcagaatgtggtgggggtgcaagtgcaagggaggaagaagaggagaaggaaaccaagggtttgcanaaacaaggaagaggctgagacacanagaatcacccacattacagtggaaagaaccgnncgnagcagatgaatgaacaccttgntgtccttcgttcactcatgcctgagtcctacgt

SEQ ID NO: 8298 - DNA, 652 bp, Glycine max
  Clone ID: PAT_MRT3847_107502C.1
ctctagccgttctatccgcacgtcgctccgaccattgacaccggacgtatatcttgttctcatggagcgatccgagaaaaacgtctgtaaacatgttggtggaccaggaccttcttacaagggatgagcattatctctgactccttgctgctcaaggaaaattgcaaatggaatgctgtgagacgctgaggggaagagcattcgtgaaatgagcagctgatgtctacataggtgcaaacccttcttctctgggtggcggagatgatcatggagtcgatgatgcattttaatgaggtgcttacattgttgaacattcagacttcaagatcaaccatgatgcgatatgaaccaagcagacaccttgatgaagaggtttatcaagaataaaacatcccaagctcgatgcatgagcaacaggtagttggataataagctcattgaggtaacagctagcatacctcctctataagattcaagatgttcaatttcttagatgtgacatcctatgtgatgatgcttgcttgaactgtgcctactacaaggacagtgctggtgcatcaacattgctaatctaaggatattccgttacagacgtcaaatgctaagtgacctaatgtaccgagctaaccactcatgttatctagtttccttt

SEQ ID NO: 8299 - DNA, 184 bp, Glycine max
  Clone ID: PAT_MRT3847_107503C.1
ggatgcatttctatttctaaccaattattgggcttattattattggtggaaaagaaaaggatggccaagttaataaaatttttttagttgaacaccggggccaaaattccttttgtggggttggcacttggcacacgctgcctctggttttgtccaaagaggtgacaccacactttttggtggg

SEQ ID NO: 8300 - DNA, 403 bp, Glycine max
  Clone ID: PAT_MRT3847_107504C.1
ctcgagccgctcgagccgattcggctcgagctcgcgtccctcatcacttcttcaattcgtaactctttttttggttcgatatgagtcaactcggtgtggcgttgcaggaatcgctgcggactcagagggaggccaggagtaccattcttgggttgttgagggagcaaatggacggtgtagatggtgggacccgcaggaggcgaagcttgaaggagcggttcggattcatcggcatgggatgttgtggggcctcctggggattccgttctgacgcgttaagtgtcaaccagggagagcaagaacaacaacaggaaacggattccggtcgagtagcggcgccagaatgtgtgggccccgcgggttcgggttcgggtatgaatcttgcggcagcgctggcggcgga

SEQ ID NO: 8301 - DNA, 492 bp, Glycine max
  unsure (1)..(492): unsure at all n locations
  Clone ID: PAT_MRT3847_107505C.1
gaaatagtgaagcatcaggcctacaaaaatgtgtacgatttgaaattgattgaagagactaagttgaactatttaaatctagctgcatgtctaaaagcaaggcagtctgacactcaagatcaaggtctgcaacatgttaatatctcaactgcacaaggtatatgtaatggtataacttttggctatttcatcatctcctattctgtatcactcagcaagactttgaacttacaagggatcaatcactattcactaagcaagggctatggcaggacaggttatgccataagaatcttttgtcttgcagatatattaaaactcgagggagagtacataaacagtcactgtgctatattgcccaagttattcaagcacaaaggcttttgtttctttatatacttgaagtagtaataaactggggatgcatatcctcacttatttttaatataggaggaaactcccaaaatatgaacaaagactantgggaaattg

SEQ ID NO: 8302 - DNA, 598 bp, Glycine max
  Clone ID: PAT_MRT3847_107506C.1
gggaaataaaaaatagataactcgtttctgcacactcctgctcttctatccgctactctcaggtcttcacttcccttctatcactcttctcacttctgagaggtggaatcgttgggtcttaatgggtccctttttcatctcttcacttcccttctatcactcttcttcattctgagatacttgtacgaaaagaaagcagaacttacttctgaaaaattcttttgcatcagttagcatgggagatgaaaagccatttgacttcctacgcattttatttgagggcgttattgcaggaggtacagctggagttgttgttgaaacagctttatacccaatcgacacaataaaaacacgtctgcaggctgctcgcggaggagaaaaactaatattgaagggcctttattccggattggcagggaaccttggcatctgctttatttgttggagtttatgaacctataaagcagaaattgctgagggtatttcctgaacacctgagtgcttttactcacttgattggttgacatttcctaatcaaactcccactttatgttctagcattgcctgactccatatgaataagagaaaaacaaaaact

SEQ ID NO: 8303 - DNA, 1363 bp, Glycine max
  unsure (1)..(1363): unsure at all n locations
  Clone ID: PAT_MRT3847_107507C.1
cggggattaacggatagttattatagataactcgtatctgtctactcctgcttcttctatccgctactgtcatctcttcacttcccttctatcactcttctcacttctgagtggtggagtcgttgggccgtaatgggtctctttacactgtccgttatggttaatgactctgccatttcattaccagatacttgtacgaaaagaaagcagaacttacttctgaaaaattcttttgcatcagttagcatgggagatgaaaagccatttgacttcctacgcactttatttgagggcgttattgcaggtggtacagctggagttgttgttgaaacagctttatacccaattgacacaataaaaacacgtctgcaggctgctcgcggaggagaaaaactaatattgaagggcctttattctggattggcggggaaccttgttggtgtcttaccggcatctgctttatttgttggagtttatgaacctataaagcagaaattgctgaggatatttcctgaacacctaagtgcttttactcatttgactgcaggtgccatagggggcattgctgcttcattgattcgtgttccaacagaggttatcaagcaacgaatgcaaactgggcagtttgcttcagcttctggtgctgttcgctttattgcttctaaggaaggcttcaaaggattttatgctggatatggatcttttttgttgagggatttaccctttgatgctattcagttttgcatctatgagcagattcgaataggttatatgcttgcggcacaaagaaatctgaatgatccagaaaatgcaattattggtgcttttgcaggtgcactaactggagctataactaccccccttgatgtcatcaagacaaggttaatggttcaaggatctgcataccaatataagggaatctgtgtccgtgcccttaccatggttgagggaccacgtccccgtgcctttgggatgggtcccggtccccgagggctaggcataggcggtgcaggttcctttggcgtccgtgagagtacaaaacgtttgcgtgttctgtctcgccctccccctcccctgcccccgtactcagagtcgggcaagggctaagagtttttgtcgttgcccctgcctcttttctttcttttttccaattctcccctcagtgccttttcccaggggcactattttttccttaattccggtttccccttcatttgtgagcgttgcgatcttaagcgttgcgtgctctgttccccttcctgcttgtgcttgtccgtgggctgtaattctataacattgttctatgttgcccaactgctaaaatgatcttttgttttgaatttnnggaagcannnnncaataa

SEQ ID NO: 8304 - DNA, 382 bp, Glycine max
  Clone ID: PAT_MRT3847_107508C.1
ggctcgagatttctctaccgttcgccgttgattgtatcgtgcaaaaaagaaaagaaaattataattgctttttgtcttgtggtgattttattgattgattacggttgtgtgaatcatcgaaaaacatattgaatcctccgtcctgatttttttggagggttacggtttgtaaatttgaggatttttcatcgcttgggtgcgatatacgtccctcttcctttcttaatcgcttattgagaggacttgcgcttccgcttggcaatcacatggcggctaggcgaggatgtgtttacctgacaatagattgttgcgcatattgttccaccatggggtctgatcaccatacgaatggttctttcggcgcaaaagcgtgtggttctct

SEQ ID NO: 8305 - DNA, 399 bp, Glycine max
  Clone ID: PAT_MRT3847_107509C.1
cacttacgtcctctcaaacgtcctctacttcttacattacaaactcctgatcttaataaaacagccacgtttaaaatcctggtatagcaaatcaccttcccaaagtcatcaaataattcaaacccaatataactcttaaaccatctaccccaaatcctgttcaatcaaaataaaatcaacctgtcaatatgaattatattaaaaataattcacttaacaatacttctactccttcaacacattatacttcttaatttactaaataaatgtcttttaaaattccttaaatttctactttaaacatacttttaaatttcttcttccatatataatacaataactcttttattaatataatttattttttttttcctttatcaatatttatttcttcatttt

SEQ ID NO: 8306 - DNA, 228 bp, Glycine max
  Clone ID: PAT_MRT3847_10750C.1
attttatccagttgaaatcattgaactgacttggataaacttaagaatgcaattatggatagggaatcagtgaacacttcaattggattggtctaatggtatgaaaaaaatggagtactcactccgatatattattgattattgcattaacctgtcaactcgctctgtaatggtgcacttctttccgatctcaaaacttatgcagaaaacagcagaatctatctggat

SEQ ID NO: 8307 - DNA, 190 bp, Glycine max
  unsure (1)..(190): unsure at all n locations
  Clone ID: PAT_MRT3847_107510C.1
gcccttntttttttttttccttaaataataatggttctctttcgttgcacctggttcgactgaaagggaggtctccatgctgtcgggtgaaccataagggctcatattaagtggttatgtgggacaacccagggtctagctgctttttgaaagctagtataaaagacatgttactattgcttgtgtgttc

SEQ ID NO: 8308 - DNA, 621 bp, Glycine max
  Clone ID: PAT_MRT3847_107511C.1
aaaagtaggaagcaagctgcttttctcactatcaacatttttaagactgtgcttacatagttacatgtacttgcatatttattcgagcatcgtagtgaaaagggtaacaaaacttatgtcctattatttttaattcctttatcctccttgcttattagtagtagtcctactactcttaagttttttattctgagggaagatcaagctgttatatatggaaattccaattccattccactctcatctatgttactctttctacttctgtaccttgctgcatttgctcttccccacttcaagatcctgaactagtggttgaagatgtacaaaagagcattaatgcctcaaggaggaacttagcatttctttcttgtggaacggggaaccccattgatgattgttggagatgtgaccccaattgggaaaagaaccggaagcgtctggcagattgttccattgggtttggtaagcatgctgttgggggaagggatggaaaactatatgtggtgactgaccccggtgatcaccctgtgaaccccaagccaggaacactaagatatggtgtgatccaagaggagccattgtggatcatattcaaacgtgacatggtgatcaagctca

SEQ ID NO: 8309 - DNA, 349 bp, Glycine max
  Clone ID: PAT_MRT3847_107512C.1
ttcactcattcattattaggtaaacatctcataataagaacagaaaagggaaagaaacagtcacttcataaaatgaacaaacgaaatccaaatcatcgatgggtggtaaatctgtcgaggtttggattactgctggcattgatcgccgccgcttggtgtgtgttaactccagcgagggcaaattcaactacaatatatgaggagctgcaggcgcagggacttacgatggagcttgttccagaggaaatagcgaagtactagatgaactcgaactattggaaattgcaggtgtggatgaaggaaacgtgcaacaccatagtcgaaaacgaggagcactactactacaata

SEQ ID NO: 8310 - DNA, 343 bp, Glycine max
  Clone ID: PAT_MRT3847_107513C.1
gtcaccattagcatcaaggcgaacattcacatactctaaattctccttgatgtgggtgctggaatgtaacgcaagaaaggccaacattttccataaagaaattcccaacagtggacaaaattgaatttccgccggaattcaacaatcaagcaattaattagcttgcaaattttactacatgtggagaatacagcaatcaagcaattaatgccagcccccaatttctcccataatatatattttctagaaaaatagaaggcttttggtcaagatgtcagctgtttgctgattggaaggcacaaatggcaagcaaataattccagcatccaatttctcaaataat

SEQ ID NO: 8311 - DNA, 349 bp, Glycine max
  Clone ID: PAT_MRT3847_107514C.1
ttgggtaagcccaccgcttccgaaaaaaacaggtggtggaaacctaaaaagaaggaattggtttcctaaaggacctcctcccaagttgttacaaccgtaaaccgtgccggtgccggattggttgttcaattaaccggcctaaaatccatggttggtttccccacgaggaagaccaacattgcctttacctccattgttggcaccgggggaggagtccattgcttgcaggggtggccaccaattggcaagaaaaagttggggactttttcttacttgccagacctggatgatgcccaattggcaaaggaggtcgattcccttttaaggaaaggatggattccttgcttgg

SEQ ID NO: 8312 - DNA, 836 bp, Glycine max
  Clone ID: PAT_MRT3847_107515C.1
gaaatacaaaaaaaaaaaaaaaaacttcggttattcacaaacgaagaaccaaaaactaaccctcttttttttttcctacaattttaatataacaaatggatttcattccctccattttctccttcaaacgcagaacctctctctagccgtttccaaattcctccgttttctttttttctttttcttttcattttccactaaaaaaaataaataaaggaaagaaaaagaaaaaaagaagcgagatgaggtttttcttcgagttcgtgtcttgttgcggcctgccgacgcagcgttcgccggagccagtggttccagcgaaggaggaagagaggtcactggttccggcgacggccgtcgccgttgtgccctcccgtaagaagatgaggatgggctcggcggagtggaggccgtcgctggggtcaatctcggaggatgttacgccgccggcgccggcgctgagggatagagagagtccccggaaaggtgaggtggcctccgctggaagggacgcgaagaagaggagcgccggtggtggcggaactgccaaggttcggcaccggagtttcagcaacgcttattacgggtcagcaccttccatgccgacgatgataccaacattctctccgacgccatttatgttctaaagtctaaacattagacttgaatttataatagcaaatgtgtatatatacgtactacttgaattggggttaaaaaaaaagcactgtacaagtgtcattttgcattgtgaatgcaactgtagccttttttttttatcactccattgtttataaatgaatacatattcttcctaaaaaaaaaacaaaaaaaaaaaa

SEQ ID NO: 8313 - DNA, 146 bp, Glycine max
  unsure (1)..(146): unsure at all n locations
  Clone ID: PAT_MRT3847_107516C.1
nnattnnnncatgctctacnaaagcncggaattcnncncgancgngtnaggnnntggngtcntgtncgtggngatgnnnagtngnctggcttntgagnnnggcnggtttatgangnttgncncncgtcnnggtcnagatgtctntn

SEQ ID NO: 8314 - DNA, 380 bp, Glycine max
  Clone ID: PAT_MRT3847_107517C.1
gaagaaccttccttcgttagttcccatcatccttcgcttcaccggtttacttccccaactcatacaacaacaccccactttttttttttctttcgcaactagcttctcttcatttgaccatattaatcttactatatttaatatttctctctctttcttcaatttctgagtttttgttccagcagctgagtcgtaagaagctggagttggaagtttgctcgcgatcatgcaaaactccgtgctcgatccgcaagatcagagggttacttcctgcatggaagattccactgcaatgactattgaattcctgcgggcaaggttgctttctgaaaagtccatcttaagaagtgctaaacagaaagcttattaactggccaaaa

SEQ ID NO: 8315 - DNA, 1414 bp, Glycine max
  Clone ID: PAT_MRT3847_107518C.1
gaagaaccttccttcgttagttgccatcatccttctcttcacctctttacttccccaactcatacaacaacaccccactttttttttttctttcacggctcctcgagccgaatcggctcgaggtttgttcaaaactagcttctcttcaattcactcccaatttttcaccatattaatcttactatatttaatatttctttctttttcttcaatttctgagtttttttgctccagcagcttcgtcttaagaagctggtgttggaagtttgctcgcgatcatgcagaactccgtgctcgatccacaagatcagagggttacttcctgcatggaggattccactgcaatgactattgaattcctgcgggcaaggttgctttctgaaagatccatctcaagaagtgctaaacagagagctgatgaactggcaaaaaaggtcatggaattggaggaacaacttaagacggtgattcttcagaggaagatggcagagaatgccactgctgatgttcttgccattttggagagtcaagggataagtgatgtatctgaagaatttgattcaggctcagaccttgaaaatccttgtgattctagcgtgagtaatgagtgtgcaaaagaaggtgaggagcctatgagctcaaaaggaagacaacatgggtcagataaaatgcctggttccaatgtagattcttcaccagtatccagtaagagtttgtcttggaaaggacgccatgattcttcccattctcttgaaaagtacaagacttctaatttgaggcaggcaaagcagtttttcatctatcagttcttctccaaagcatcgccaaggaaagtcatgtcgcaagataagacatcgacaaatcaggttggtagtggaggagtccagaaataagtttgctaaccacgaaaaagaacttgcatccttgtctaaaggatttccaaatttcttagatggtgggtctaacatgccgaaaatagaatctgaaattcaagaagagggtggatcagaggcaaacccacttaacaaaaatcatcatgtagatggatatggaagagagaaggacatggaaaaggcacttgaacaccaagcccaacttattgaccaatatgaagcaatggagaaggttcaaagagaatgggaggagaaatttagagagaataacagcacaacaccagattcatgtgatccggggaattactcagatatgactggataaagatgaaagcaaggttcacattccatatgctgctaaggtggtcacctcagatgctcaagagagtaaaggagaacctagaggtgtttgcttatctgaagaagaattcaaagctgaagccagaaatattatgccaaaaactcatgatgatacaaggggttatagtgaccataagagtgcaactattagcacttctgat

SEQ ID NO: 8316 - DNA, 376 bp, Glycine max
  Clone ID: PAT_MRT3847_107519C.1
gatggtggtaataataaaggtgaaggtgaagtcagttcaggaaagcctgcggagcaaagcgctaagccagcttcggagcctccgaagcaagactacattcacgttcgagccaggaggggtcaagccactgatagtcacagtcttgcagaacgagtaattttttgtttttattgtacttgagagggttgtgtttggaaaaatgaagtgaaaatgtgatgttattgtgagtttaccttttctgagttaaaggggtaattttgaggttattgatttgtttggattaaagttgttgactgtgattgatttctgattgggatgtttgtggatgctggacaggctcgaaaggaaaagattagtgaaaggatgaaaattcttc

SEQ ID NO: 8317 - DNA, 128 bp, Glycine max
  Clone ID: PAT_MRT3847_10751C.1
gcgaggtcataaatcataaaatctcctatgactcaaaaatccgatagaaaggaataactacattgagttcatcgattggccctagatatcaatagactgcggaaattattttttattcgaaaccaatt

SEQ ID NO: 8318 - DNA, 504 bp, Glycine max
  Clone ID: PAT_MRT3847_107520C.1
cagtattccagcatctgtttctgctgcgcctcgacagactgctgtcgctcccagtgcaattgtctccgcttcgacgacatccaagtcttctaaccgctcacgtgcgttggcaacgtcgagcaacaacgacggcagcagtgacgaggacggcattggggacgtcgacgctcagaaaaagaaggagcggcgtcgacagcaggttcgttacgcgtcgcgccgccggccaaaaatgcagagggacgtggagagtttcctgcgcgaccgtattgcggagctaaaggaacaaatccgtatcatcggtggtgacctgacggagcagtgctctcagatggccggtatgagcgagcaggcgttgacggaggcgtacgagaagcagatggcgacagtgcaaactctgcgcaaggacaacaacaagctgaaagagcagttgttgcagcacgagaactttgctcgcatgattcagtacggtctaaatgcgttgccgagcgactgccgcgacgtgga

SEQ ID NO: 8319 - DNA, 484 bp, Glycine max
  Clone ID: PAT_MRT3847_107521C.1
tgccggaccggaatcgcagggccggcccaggccacccgttttcttctgaaacttgcttctggtcccaagttgctgaaattgattacgggtaacattatgaatctgcacaagaatggaaaaggagcgcaattgatgactactctcacacatacatggatcgacccccaagaaagagagtgcgtgtggtctgcaacaactctgtggttcacaaggtttaggatggatagtttatgtggacaagaagttgagaatattatatgctacgctgcttcagaacatacctctagttgtctgtttaagggagttgctcgaaatggtacgcccacgcggggagacgatgacattaatggccacaccatgctagagcttgtagataattgaacttctgactatacgattcatgcgataatgggcgaatgaacttttgagcaggtctcggagtgctgcgacagggaatggaaggaaaagcactccataaaaattg

SEQ ID NO: 8320 - DNA, 573 bp, Glycine max
  Clone ID: PAT_MRT3847_107522C.1
ggttgatttccctgcgcgacgcgaatcagctcccttcactgcacatatgccccagatgcacacagagaatccccctccacacggcccacgttttaagagcgggtatgcgcctggcaatccgtgggggaatcattggactgctgcacctacctcgccagcgtccgcttagcaccacattcctcagccaaaaacgcagcgaccccaagcacggccttttccgaaggtattcgctgaccttgcccttccgattgggaagctgtgggttggccccccggctcttcctgcttctgtaccgttgcctctgcttcttcctttctcgggtggactggacggcggctccacggcagcaccgctgccacttcgccgccttcccttctcgttccgtcctagagggggccctgagggggatcttggtggtcattccccggggctcctttagcttgtatctcgacttccacatgttctgcttgtgcttagggggtgggctgccctcggagctgctcccgccgctctctgccggacctgttttggtgccctagttcaggtcgagactgagatgcaacaactttatct

SEQ ID NO: 8321 - DNA, 829 bp, Glycine max
  Clone ID: PAT_MRT3847_107523C.1
gcaccagccaaaccctcatccaaattaaccagcaagcggtattcacaatgggaaaagctgcaatcatcatccttgcctccaccctttgcttcttatccttcctaggctctgcttatgcccgagcccgcttcatggtggagggcaccgtttactgtgacacatgtcgcgtccaattcctcaccaagttgtccgagatccttgaaggtgctacggtgcgtgtgacgtgctcacaagttgataatgcgaagaacgtgacattcagcaaagaggcagtgacagatgcttcggggtcatacaaagtggaagtggagggagaccacgaggaagacacgtgcgaggtaacccttctgaagagtccaaggccagactgctcggagattgaccgagagtctcacctgcaacaggctgccagaatcagcatcaccaaaaacaatggaatagtgtcccctcttcgccaagccaaccctcttggtttcctcaagaaggaccgtctccctggctgcgctgacctcctcaaggagcttggaatcaacgaagatggcactctctccgtttgaacaacaatacattaatgggatatagctatcgtatatccctcttttgttaattagctatctaaggagctagggctcaatcttctccttttcctctttttttatattttaggatcaagatgtgagtattaataatgcgtatgagctcgtgccttaggggggaagtttttttctagacttttatcaaatctctcaaaggatcctcggccttgtcaactctcacattttcttatttgctggagttaatcattactaatctccggctgtttcaattc

SEQ ID NO: 8322 - DNA, 258 bp, Glycine max
  Clone ID: PAT_MRT3847_107524C.1
caactatttacaaacactaactaattagtagtgtagttcttgatcaagtgatagctggtagaaaaatgatggagtgctgcaagattgctatagttctcaccatctacattatggctatgttggtttttgctcactgttgtgtggctgagaatgtagctgaagatgttgctgcaattccacccacaccaatggaaagtgcaggggtgcatctttgtgcctcagctgtttttgtagtcactgctttggtggttgcaatgt

SEQ ID NO: 8323 - DNA, 276 bp, Glycine max
  unsure (1)..(276): unsure at all n locations
  Clone ID: PAT_MRT3847_107525C.1
aaaacnggangaagcgaaaattttttccattgctacaaattttgttttttctactcaactcttcttattaacattcacccttttctacaaccaccacaccatcatgattgccccttttattttaaccctctctttgaatctttaaaaaatatttcttttattccttccacacatacattttttatttttttttttatttattttatataatattttctgtattctcgccctctcttctacaattcaatcttttacttctttaaatttttttattaa

SEQ ID NO: 8324 - DNA, 362 bp, Glycine max
  Clone ID: PAT_MRT3847_107526C.1
tctcgcgtccgcggacgcgtgggaaaagtggtagaatttctagcaaaaccaaaaaacaaaactccaaataaaacacaacaaaaaaaaaaacatactaggcattggaataaatggcgggaagtgcaagtaaggtcacccttatcttcttggttgcttttgccatttttattccatgcccttgaggcgggcattggtgagtttgacgattttctggaaggccaaggctggtgagggccatgagaacgctctttggtcctacgaacctgaccctataaacgttacagtcgagtttcattttcaaggtcaaagggccttaaaggggggatcaaacgacccaaggagggaactaaagcaagaatacc

SEQ ID NO: 8325 - DNA, 417 bp, Glycine max
  Clone ID: PAT_MRT3847_107527C.1
cggaaggaacaggggcccggagggtttccaacaaaacaatttggaaggttttccaaagaggaacacccataagggggggataggatccccccaaaatctatcagggaaaataaaacagaaggggggggaaaaaataataacccccccccccccccccaaaaggaacacaaaatgggaagcccccttttcggcccagggtaggccacccaaaccccaaggccagttaaactttggcactaaaaaaagggggggggcaggcgaacaacccgaaaaaaggcggcaattaacaaccctcaggccataagaaaaaccaaaatcggggccgaaactaacattactttccgcccaaagaattagaccaaaatagcaggctcaactctaaaggccctgaaaaatgggccagtaaacccaacaaac

SEQ ID NO: 8326 - DNA, 834 bp, Glycine max
  Clone ID: PAT_MRT3847_107528C.1
cccttgctcaatgcttcagaaagaggggattgcttaaacatatagcgagtgtagtttacggaacgagtctaaaagcctacactgggattattgattaacaataagctagccacgcacggtagactgattcaaagacggatactataggcattgagaattgcttatagagaagagcgtccgctggtgcggaagatgagctgttaataaagattctcttacttacgcaattcagtctttaacagcgcttatcccgcatcctggactattcttaatgtgaagaaggtaaggtctctcgttgaggcgccgtcaaagccgacttttgagaaacaaaagtggaacaaataacctcggagatatggattgaaaggcattcctcgtcccagccataaatcaatgggtaaagacgggcgcagccaaatcaaccatttcctatcaagactaggagaacggcgatttgacaatcgaccaagagacaactatcctacccctacaatcctacagaaggtcatatatgaacctctgtacggtatattgaaaccgaatggcacttaagccatggggatgaaagtcgttactgagacaacggatcgacaaaagaaagaccggtaccatctgactcctttcgatataaattctttatctctcccatctttcatccatctggaagctcatttttcaacactccaggaaagttaaaaacaggctctactcctgagaagcaaatgcatcttctcaactggaagacagtggaagaaagtaggcttgtgaaccagagatagaacctggtgaatgcgtaagcgcagtgcctttcgtaactatatattataccatacc

SEQ ID NO: 8327 - DNA, 151 bp, Glycine max
  Clone ID: PAT_MRT3847_107529C.1
aagcaggcacgccggcacgggccgggccggaccggccggaccgacccaggcgcccggcttcaacggccgggagaaaggcaggcccagaacaagccggaaaggaagcctgccagaggaagaacacaatgccacccagagcccacacacgaag

SEQ ID NO: 8328 - DNA, 435 bp, Glycine max
  unsure (1)..(435): unsure at all n locations
  Clone ID: PAT_MRT3847_10752C.1
agataataagtaagcattttgacaagaatttatacctacttagtaatatgaagactagagaaaagaaaaatgaaaagggaattctaatgcaaactatgaacaatgtatagatgtcatgccatgactcgtaatttatcgaactgggatgaaacagtatgaattgaaaacatgcagccaagatcaaacattgtattagattagagagccaactaaaagaagaaaaaggaaattgttcgacaaccaaactcacaaaagtatgtcacaacaacaagaaactacacaaaacagcacacaaatctatctaaagaagaatgataaaagataaatttaaattgaattataaataattatgacaacattagctcatgataatactttgagaagaatttccaaggganatcgagtttagatttggaaaaaaaaaaaaaaaaaaaa

SEQ ID NO: 8329 - DNA, 1038 bp, Glycine max
  Clone ID: PAT_MRT3847_107530C.1
ccacgcgtccgcggacgcgtgggcggacgcgtgggcggacgcgtgggcgcctctcttatcttccaaccatgtcttgccggaaaagacaaaagacttcgccggacaaaacctccgattgcttcgactctctccctgacgacctcgtcctctctatcctctgcaagctcagctccaccgccacctccccctccgatttcatcagtggcttaataacgtgcaagagactaaacttcttaggccttcactctcttgtcttatcaaaagcttgctgcaagcattctcagtccgggtctaaccctgcttccaccacgcgtccgggcgaaggcagcgatgaactctacgcgccggcgctgtactcgctcgcggtgatacagttcaacggaagcggcggcacgaaaaacgacaaggaccttcgagcgggtgtggcgctttgcgcacgcgcggctttcctcggtcacatcgacgcgcttcgggagcttggtcattgccttcaatcggctcgcggcgttaaacaaaacgtaacggagggtcgacggtttttggtgcaagccaacgtgcgtgaactcgccgccgtgctctccgccgggaataacaagcgtccctggctgacgtggagccaccaacctgtcccccacccgaggctccggtcggaaaccgggtcgggttgtccgctgttaagtgattacggctgcaacgttccggcgccggaggttcacccggcgagtcagttcatgtcggagtggtttgatattcggcgggttccgagtgcgggtatgagactctgttctcaatcgggttgcgggcgacccgagacaaggaggcacgagtttcgataacatttctcctactcctggcaactactttggaaatggctatcagtaccagagctcatatctccactagttagcacagatgatggtgaactgatgactaagaagctacatatccctttgtttaatatttagccttaaggcttaacccttaaactgttgtatgttgcactttatctatgtagtctttaagaattgctgaaccagg

SEQ ID NO: 8330 - DNA, 1260 bp, Glycine max
  Clone ID: PAT_MRT3847_107531C.1
tttcattctgtatctggccttaaagaaaagaaaacttcggtttgaagataaaaacagaaaagaaatggaaattaataagatgctcgagccgaatcggctcgagaattatatataggcagcatacaaagatgctgaaatacagatgcaggaatgaaaataatctaactcagctactactgcattgccaactcagcactcctctaacagaattggttagacaaaatcttctagatgctttggtgggaagatccttcttttgggcctctcattcgtgcctatgtgtgcagtatcttgttgagccattattcccttcacaacatattcctattttgaacataactacataaatgacatgcattgtatgactcatgtaacatactaatgacactaagtttttttggcatggaacactcgtatattctatacatattctaataaaaggttgtgtttccattgatttgatggtactagaagcaagctactagactggaagaagcgtttcaacataatagaaggaatttctcaaggattactctatcttcacaagtactcaagactgaaagtcattcacagagacttaaaagctagtaatatacttcttgatgagaatatgaaccccagaatttctgattttggattagcaagaatggttacacgacaagaatccacaactaacactagtaggattgttggcacctatgggtacatgtctcctgaatatgccatggaaggagttttctctgtaaagtctgatgtgtatagctttggagtcttactacttgaaattgttagtggaagaagaaacactagcttctacgatggtgaccgctttctaaatctaataggacatgcatgggagttatggaatgaaggtgcatgtctaaaattaattgatccatctctaactgagtcacctgatcttgatgaagtgcaaagatgtattcatattggtctcttatgtgtagaacaaaatgcaaataatcgacccttaatgtcacaaatcatatcaatgttatcaaacaagaatccaattaccttacctcaaagaccagcattctattttggaagcgagacctttgatgggataatatcttctacagagttttgtacggattcaacgaaagcaataaccacttccagagaaatagaatcaagaaacattaagaaggcatctagagcctagttcggtcatcaatggaggcaacaatcaattatgttccctcctcttccgctccccaatcttttcatccgatctatgaa

SEQ ID NO: 8331 - DNA, 1901 bp, Glycine max
  unsure (1)..(1901): unsure at all n locations
  Clone ID: PAT_MRT3847_107532C.1
tttttactttatctctctctctcttcaaagttcaaagttccaagttccaagttccaagtttcaagttccattacacaacacacctattttagttgtagacaaagccacataaatagacccaagaggtttaacttaggcaacgaggagacgcctctcttatcctccacttccagtttcaaccatgtcctgccggaaaagacaaaagacttcgccggacaaaacctccgacgacttcttcgactctctccccgacgaccttgtcctctctatcctctgcaagctcagctccaccgcaacttccccctccgatttcattagtgtcttaataacgtgcaagagactaaactccttaggccttcactctcttgtgttatcaaaagcttcccacaaaacattctcagtcaaagccaaaaactggtgcgactctcttcaccgtttcctcaaacattgtgcagacgccggaaacattgaagcctgttacactctcggcatgattcggttttactgcttgcaaaacagagggagcggcgcgtcgctgatggcgaaggcggcgatgaactctcacgcgccggcgctgtactcgctcgcggtgatacagttcaacggaagcggcggcaccaaaaacgacaaggaccttcgagcgggtgtggcgctttgcgcacgcgctgcgttcctcggtcatatcgacgcgctgcgtgagcttggtcattgcttgcaagacggttacggcgttaagctaaacgtaacggagggacgacggtttttggtgcaagcaaacgctcgtgaactcgccgccgtgctctccgccgggaataccaagcgcccctggctgacctggagccaccaccctgtcacccacccgcggctccggtcgggttgcccgttgatgagtgattacgggtgcaatgttccggcgccggatgctcacccggcgagtcagtttatgtcggagtggtttgatatccggggcgggtttccgggtccggatatgaggctttgttctcattcgggttgcgggcgacccgagacaaggaggcacgagtttcgaaggtgttcggtttgtggtgtggtgaactattgctcacgcgcgtgtcaggcgcttgattggaagtttcggcacaaggcggaatgtgctcccgttgagaggtggctcgatgacgacgacgaagatgtcgccggcgagaatgacggcggagatgacggagtaatgatggttgatagttagaaaactagactatttttacaaacgttaacggtgacggtaagcctgcttggaagtttcgacgggtatgaatctatttttaacatggggtaaaatggggggaaaaatctcatttattaccgtggctttgcaagtgcaacttcaatgacagggttttgcttcgacctcttttccttttacttttactgttgtatagaaccgtaaattaattctcctgaaaaacaaaatgaaggggatattttttattatagagcaactatcatccttaattaattgttaattctggaaaattataatatatgaactttttatgtttgttcttccaatttatttaattactttttatttgcttgattacattcttgcctccctgcagactccgccatccccgtgtcctccaagtgttggtggcttctggctattttttgcggccacccttcttggccccgtcccttccgtggatatttatttctcgcgtgctgggtggagctgcgtccaatcttctgggggggtttttcttatataattgcatacagaaaagaatgtccaggaaagtgttaaccggaaagtaaagagtgttggaatattaataatctcatttggaatcatagagtcacttttctacatataaaatgtattcttatcttaattnnatnnngtcataaataatatttccccc

SEQ ID NO: 8332 - DNA, 541 bp, Glycine max
  unsure (1)..(541): unsure at all n locations
  Clone ID: PAT_MRT3847_107533C.1
ntcgacggtgggaaaagaccaccaaaggggggatgaaggaaggaggcactccaaaaaatgctaaaactttgttggacatgaggttttatgttgttgtgttttggtaatttcaattcaagcagcacaacgcaaaggtaaaaacagagagagagagagagtgtcccattcccatcccccacacaaaaggtggtggaaaaaaagttctttttgtacacactgcgatgatggcgatgatgatgcctgcaatctccaacacaaacacaaacacaaacacaaacaccatttcctcctcctcctcctcctcttcttctctctcttttatcactccctctacttcttatttctcagccagccatggtttgcttcttgttctcactcactagaaaggaacccatgaatatgaaagttgttgtgagcatggagaacgagaagaagtgcggttgctgggctgtcctcaaacgcggcgttagaggtgcgtgcaaaccttcagcttncagagactctcctaacactatcnctcgaactagtctcgtttatgatg

SEQ ID NO: 8333 - DNA, 514 bp, Glycine max
  Clone ID: PAT_MRT3847_107534C.1
aattcggctcgagcttgcatcttcttttcaaaattcttccccaccccacaagcaaagcacccttaacttttccacttcatttttttttttttggttcctctttatttctttctctctaccccatttttctttttctgggtttctgtgctttttgttgggatctacttcacaatgggtttctcacaagacccctgcactgattccaatgccccaacctcaacctcttccaccttagttgtagatcactactgtgactacgacaagctcaaattcaaaacctttctcagaaaaatgttctgggaattcggtctcgcctgtgtggccaacccttcccagcgccggagaagctccggcgacggcaaaaagacgaacatggagaacaacaaggcgtggctgcttgcggagtctggtgggtgtggagcagaattgaccaatgctgaccctcaatcggttcactcctctttcaggttcagcttctgttctcttgttgatcggggcgtcctgaacatgagtt

SEQ ID NO: 8334 - DNA, 343 bp, Glycine max
  unsure (1)..(343): unsure at all n locations
  Clone ID: PAT_MRT3847_107535C.1
gaaaatctcactaaancctggggagtctggtgattgctattctacttatttatcaccttctgatgtgaactcaataggctaaggttgggcaactttgattgcttatagaatgggcaatgaaagatacttttttaatcgaactgtttggaataaaattcacaattaggctagacaggctttcgtctaagctcactatgaacctgatatcacaaggctggcatccggccatactctatttgcacttccaagctacacgttaccaggaactatgctcatctcggcctattttgggagatgtggtttgcaataaggccaggaggaaaaaaaggcttgcattgattat

SEQ ID NO: 8335 - DNA, 162 bp, Glycine max
  unsure (1)..(162): unsure at all n locations
  Clone ID: PAT_MRT3847_107536C.1
ctacttgtaaaccttcatcaaacattactatcttactccaggaacaccaataaggatatancatangagttatttgattcttgttaattcacacaacataggaggtagagaaaggggaaagggggggtgggtgttaagatattagatgtgtgtaaggtgttt

SEQ ID NO: 8336 - DNA, 443 bp, Glycine max
  Clone ID: PAT_MRT3847_107537C.1
ggaattcggcacgagggttgatgttatttctgacttaaaaatatttagaggtgagtcttccagtttttgtaagttaaggaactttttttaaattatttaattggagtaataattttttttgttagaatgaagtatcaatgtactagtttaagtttaatagagcaagcaaatagattttttttatttttatcattcacaaaatatttaattgaagtaataattatttttcttagaaaaaaattttaacgtgaagtttaagcgtattaatttttgtaattaggttttttactttgaagttattttaattatgtttaattatttacaaatctttgttgatggttttttaggccatacaaatatttacctgattcccttctagttttttaagttagaatgaaattttaatctgtagtttaagtttaagtttaagttagtagatgaag

SEQ ID NO: 8337 - DNA, 420 bp, Glycine max
  Clone ID: PAT_MRT3847_107538C.1
cattaacaacttttatttaatcgcctgcttagctcatgaaaaggcgtttttgttaaacaaataccaaaccacgtcctaattaacgaaagctagagggcgctgtttttcccaatgttagccaccctacctaaagttatggaccaattgcttacacacgatatcggagtctgatctcatataataattattaaccccgggagaatgagagtttcggaatcacatcaacggacgcccgtttcctcacataataggaagcatccctttaaatggtggtgctcacttctgcagatggcactgacctgggccaccacttggtgtatgacacatgaaatgcaagctgttgaatgcgactcggaaactgccttccgggggttgttcgccgagggaccatggcggatggcgtgttacgagggttatgca

SEQ ID NO: 8338 - DNA, 561 bp, Glycine max
  Clone ID: PAT_MRT3847_107539C.1
aaagggaaagcccaaagggtaaacaaaaacaaaaaaaaactttacaaaaaaaaaaaaaaaacgggggccaaaaagaaaatatcccaaacatgggcccggggaaaacccccaaaataactgggcctgggaaacccccaggttaaaaaaccccgggccgggggaaaaaaaaaaaaaaaaaaaccccggcccccagggaccaagggggggttaaaaaaaaggttttcccaaaaaaaaaaaaagggacattttttttgggttttaaaccgaatccttagcccctaaaaaaattccccccaccccacccaattcagttcggccccaggcgggaaaaaaaaaaaaaactaagggcaaaaaaatttaccccacgggacccgggggaaaaaaaacaaagcccccggaatccatcccccaataaaaaagggggggaaaacgggaagccaaaaatttttttttttggcaaaaacaaaccggggggggtatttagcgggcccaaattaggccccccccgccccattggaagaacctccaggaggaaaaattttgcccgccggaaattaattt

SEQ ID NO: 8339 - DNA, 233 bp, Glycine max
  Clone ID: PAT_MRT3847_10753C.1
cctgaaataccaggattgagcccatatgcacacatattgtttatacttgtcaacttgacaccaatgacaaaatcacctggtatttcaggttctcgtcttttgggcaccattcctccaccgagaaggtcaatagacaattcacacaccttctgcctgctagagtcagaattcaatggtgttctcactgttgccatttgattctagcaagcagagcttttgtcaattttctattg

SEQ ID NO: 8340 - DNA, 878 bp, Glycine max
  Clone ID: PAT_MRT3847_107540C.1
aacttcatcaattcataggcttcgtctctctcttttaaaggccacggagtctgtgatttcggaaggtacaatttccggtgtttcagaaatccttaatgacgttattcatgaggcagaacttttaaggactgctcttggcagctccttacccaccagttggtcggctgaggcagatattagttatattggatacaatgtgggcagtgacacaggaattcgagctcgcaacccggggatcctctagagtcgacctgcagcagggctcgaaatggttgagcttttgattttttcagctcagattttgagggacttacaaacgaagatggtattggttccttcctgatatacaagttcaatgaactaactgctccttgtgtgatacttattatggttaccggtgtgggtcatcttaggtgctttgtatatttggctgattgttgaggcagggtcatgatgtaaaattggaaaggagagcttaatagaattttacaatttgttttgttgaggggagaaaatggaaccatgtgccatacgaccatatattgattacctgcatgttgtggtagtttatatattataaccctcatcgcttaagttgaatagtttgcatccgcacttcttgcctgtgcttgccaaagcctaataagattagtcgcatgtcagttcttatgtcactatttgcttacttatggtttctgtgactgtatattcattctatttcgtgcttatgtaaatctgtaatatctttaaaaatgtaatttattaacgaatcgtatgtttgagtttaacctggttttaggggaatatttaaaatgatataattaaaaaatgattgaaaatcctaacaaatagtaaaatattattaacatatttataga

SEQ ID NO: 8341 - DNA, 523 bp, Glycine max
  unsure (1)..(523): unsure at all n locations
  Clone ID: PAT_MRT3847_107541C.1
cgctacgtnacgtcggngggggggnnntnnnnnnnnnnnnggtggnagcacatgcttaccacactctcacgcacatcatatatcatggatccgctttccgaacattctttgaaactcaagctctcgctactgcccgttattgtcatgatgcaatcgtgaaaaatgcgcactgaccatacaatccatgcgccagcatttggcaatggggattgggacgatcccctaccttccacacatggcttcgagatccacgaagcatagctggtcatgctacgatagtagaatgactctgagactgaggaaccagacctttatgctacaggggatgtgtgcgagaataatgtcgtcacgcccgacctgatcgctggtcctcgcgtaaaggctattgtggtggaccaccttgagcaatagacgatgcttatgactggggtcactgatgatgcggatagtgaatcacccaacccaactgcactgcccagggcagctgctacacccggtgctgaagactagtacgagatctcac

SEQ ID NO: 8342 - DNA, 242 bp, Glycine max
  unsure (1)..(242): unsure at all n locations
  Clone ID: PAT_MRT3847_107542C.1
ccgcctttgcgcttggacgcggggngaagcagaagggaaagggaggcgaaaacctgcaaacacgggggacaaaaagccccacggcggagcccgccgaacaaggggagaggagcaagcaacaaggtggcaaacagaaagccgcaccagagaggactggggaacacacagacgacaaacggcaagcagaggagagcatcacaacccgggcccgaagcaaggcggcgcaggccaaaccgatgaac

SEQ ID NO: 8343 - DNA, 1310 bp, Glycine max
  unsure (1)..(1310): unsure at all n locations
  Clone ID: PAT_MRT3847_107543C.1
tacggctgcgagaagacgacagaagggggaagaatatgagcagcagtgcagggaagttggtgtgtgtcaccggtgctgccggttatattgcttcatggattgtcaagttcctacttgaacgtggttacactgtcagggccactgttcgaaacccaaatgatcacacgaaggtagaacatttgctaaaacttgaaggtgcaaaggagagactgcacctttttaaggcagatcttttgggtgaaaattcttttgactccattgttgagggctgtgatggcgtctttcatactgcttctccttttattatcaacgtcaaagacccacaggctgacctacttgacccagcagtgaagggaactcttaacgttcttaaatcatgtgtaaaatcgccatctgtgaaacgagtcatcttaacatcttctgtggctgcagttgcatataataaaaggcctaaaagtcctgaagttgtagttgatgaaacctggtggtctgatccagattactgtagggaattaaagctgtggtatttactttcaaagactttggctgaagatgctgcctggaaatttgccaaagaaaacgaccttgacttggttgttgttaacccagcaatggttgtagggcctcttttgcaagcagagcttaacactagtgctgctattattttaaacctaataaatggttcagaaactttttcaaatgatacatatggatggatcaatgtgaaagatgttgcaaacgcccatattcaggcatatgagattgcttcagctagtggaagatattgtttagttgagagagtggcacactactctgaactcgccaggattttacgtgatcagtacccgacatatcaaattccagaaaagtctgcagacgataagccttatgtaccaacatttcaggtttccaaagaaaaggcaaagaccttggggattgaatttattcctttggaagtgagtcttagagagacagtggaaactttgaaagaaaagaactttgccaacttttagtctctgatatctctgcttgatcaggagtgaacacgttgagaatctcaacggtgtttcgtttgtggttctggttttagaatctcattgcttgaaaataaactattgtactgaaatgtcaagcttgtgtgttgtaataaaacaagattaattgttggttttatttcggtttgtactcatgaaggaaaccaacgtgtggtataaaaagataataattaagtatcaggctatttctagtccaaaaaaaaaaaactataaaaataaaaaaatttttaattttaannttagcgcggccgccgc

SEQ ID NO: 8344 - DNA, 1637 bp, Glycine max
  Clone ID: PAT_MRT3847_107544C.1
ggctcgaggttataattagatgatataaaattattttaaatcaggatttattttttcttgtaatttccataaaccattctatagtacaattatgatattgataatttttaattttatgtgatgtagagagtaatagagattataacagtacgggagtaataattaaacttttccattttggctttgtaccatataaaatccccacacccgcagagggtacagcgtttatcgctcacactcgtcacgacttaagagatatttttccaagaaaaaagcaaaaacactctccatttgtgcttgtgttttgcccgggaaaactgagttcgaaatgatgaagaagaaaccgagcgcgagagagaattcgtcgtcgtcgacgacggcggcgagagaagaagagagcgaatgggaaatgaggcccggaggaatgctggtgcagaaaagaaccacgaatacggatgttgtaacacgcaatttgcgcctccgaatcgcgtatggcgctctccgttacgagatctgcgtcagttccatagccactttcggggaagtgaagaaggtgctgagtggggaaacggggttagaggtggatgaacagagactgttgtacagaggcaaagagcgagaaaatggagagtacttggacgtgtgcggagtgaaagacagatcaaaagtggtgctaatccaagacccttccagcattgagcgacgcttcatccagatgcgtatcaacgctaagatccaaaccgcacatcgggcaatcaacaatgtcgctgtccaacttgatcagctcgcagaccaggtctctgccattgaaaagtctatttccaacggagtcaaagtaccagaagttcaaatcacaacactaattgagatgcttatgagacaagcaatcaaattagaaagcatttctgcagaaggcgatgcttccgcacagaaaaatttgcagggaaagagagtacaaaaatgtgttgaaaaactggatcaacttaaggtatttaatgcaagaataaagcctgttgttgttacaaccaagtgggagacctttgatcatcctccatcctcaaccacgtgggaattattcgattgagtttgcttctccctcccccaatctttttcttttccccttctttaccccaatttcttctcctttgtctatacgtacaagcttcttgtttcggaactctgtcaataagtcttgctatcacactttttgtctaaaatacttcttcaaaatggaaattaaatagaagtcagaaatgttaatatatccacatccacttggtaattattcgattgagtttgcttctccctcccctacaatatttttcttttacccttatttactctagtttactctcccttgtctatacgtacaagcttcttgtttcagaactctgtcaataagtcttgctatcacacttttttgttcaaaatgcttcttcaaaatggcaattcaaatagaagtcagaaatgttaatatatatccatatttgttatttgatggtgaattcattagtcgtttctttcagggttgtatttatgatcacacgcaatttaccattcactatttgtaccagtttaaatgtatcaatcagttatcaattaaacattaattaatacgtggggctttccattgtgac

SEQ ID NO: 8345 - DNA, 155 bp, Glycine max
  unsure (1)..(155): unsure at all n locations
  Clone ID: PAT_MRT3847_107545C.1
cncccagaggcaaggttaagtagtttttttcacatttcccatcattatatataggagaggaataattttttttatacagacaccagacatacggttatatgaggtattccgatccaaacaagaaagggaacatattttaactggagttctgactg

SEQ ID NO: 8346 - DNA, 294 bp, Glycine max
  Clone ID: PAT_MRT3847_107546C.1
tgggttctaacgactaagtttaatcatccttgaaagtcaaactgaactatattcatctcgtatctactaaagcaattggaaagcacaacccttctatattttccaatattacctccgcttactcccaacataaaacctcctctatttacattaataatttgacttctataacccaagccttacatttaaacctcaagcccaacctttaccatacacttccttattttctttcttaacataccctttttatttcctattactccaacttttattccctttccgattcctcttcca

SEQ ID NO: 8347 - DNA, 1008 bp, Glycine max
  Clone ID: PAT_MRT3847_107547C.1
atttgaatcaaatctcagaaaatcctcttccactcaacaaaccctccgaagagctaaagcaaccactatggcttgctggtctgcagaaaatgccacaaaggcctacctcagcactttgaaaatgggtcaaaagtgcaaagagccagatgtagcagagtttatatcagcactagctgcaggaaacaatgcacaacttatggttgtggcatgtggtggtgcagctgactccaccacactagcattggttgctgctgcgaaccaaactggtggcaaagtcatttgtattgtccctagccatgaagagctaagagcttccaaaatttccatgggaagaatggcttctcatcaagttcaattcatggttggagaagctcaagaagtgcttttagagcactatgatcaggcagcagattttgtgctcattgactgcaaccttgagaaccatgaagagatccttagagcagttcaagagggtaggaagcaaaatgggacagtggttgtagggtacaatgcatttagctgcagaaagtcttgtttggcatgtggttcaaaaactcagcttctgcctataggaggaggtttacttgtgacaagatttggagtgagtgaaacaagtccaaaatatggaaacagaattatgggaaaagtcaaaagccgttgggttgtaaaggtagataaatgcacaggcgaggaacatgtgttcagggtcagatttcctcaaaggaaagtggtccaagcttaatcatgtgcatgtatggtagtacaatattagcctcctccaactcctcaccattttgttctaggcaaaaatgagtgctaaattttgcttctaatatgaagtactaggagtaattagtcctattttacaatatgtatataccaaattataaaacataaattggataaaattggttgaaaagttttgttgtgtttaatttgcatttgttctaaccaagagagaatgaaggccacgcataatagaccagcaatatttactaactctttgtc

SEQ ID NO: 8348 - DNA, 229 bp, Glycine max
  Clone ID: PAT_MRT3847_107548C.1
tggccaccacacaaccatatcacttgcaaggcatacaaaaaatttacataccctaaatctatcttaatacgcaaatttaacaaacaacaaattaaatgtcattatagatagctacttctcactaaagttacttaaactttttaaatactcactaataacaaatatttttctgaacaaacactcaaacccagagattcagatccttaaattaaagatatcccctttatta

SEQ ID NO: 8349 - DNA, 1188 bp, Glycine max
  Clone ID: PAT_MRT3847_107549C.1
atttatcctgagccccgaaattgagaggggatagaattggaaaagagggaaaacactctattgagtttttcactatataagttttagccactctcgaagctgaagcagattagggtttctgcagccgccacactccctttctgaacgagatcttagatctctcgttgatgctttaaaagaaccctaatctcatctcatggctattgcttggtgcaccagcattattgcttccaaaataaataaatgaatgaatgaatgagcataccactccctctctctctctctttctcaccactcactcgctttgcctggctgcttgttttgatctgtttcattctttcttttctttttatgtgacctttggaacttcactctctctctctctctctctctctctctcaaccctaagaggctgtgaagatggtttcggagtgtggacccgatggatctgccgtcgtcaaacctactcgacggtggcgcggaaactttatcgcttttgattgtgatgcaaacatccctgacggtgatgagaatcgatgaccaataccatcgatgtgccagatctgaacctcaccaattacctaatctaaaaactgtccctcattggcggtgtctgaacgcagtgtttggcagaggtgtatggagtgagagaagggaaagggtattttccgattctgtcgttactctcttccctctctcattccatacatcgtctgacgaacgtatcgttgattggttctgcatggttgcattttctgtttgtttttagccttactttttttcccgttaaagtaacttatgagtatctgtggttacttcatttctaatttcttatgtttatgagtatctgtggtttcttcatttctaatttccccaggttagacgagggagggaagactatcatgtgagagagactcacactggattataagggtgagttgaagtcgcaattccgacaaaagtggactagagtaatgatctgcttttgggtgatgaactggagtcatgtgttaacactagtattttgtgtttgagcgatctatagaactaggagaatgatttttgtactagcactttaattattttgtcaaacaataatcttaccagagtttacattttttattttctgtatgatgttcaacggtttgaggcaagcaacgaagactggttgcacttcgttttattttt

SEQ ID NO: 8350 - DNA, 356 bp, Glycine max
  Clone ID: PAT_MRT3847_10754C.1
ggaaaaaaaggcaattgaaggttgcaaaccggaaaaaaaaatttaactaaaaataaaaacccttttctcttcaaatatccgaccacggcaacttcatctttgtcggctcgctcctcctttgccttactgacgatggaaacaatgcctctttttcacgatttgagatccgtggcggtaacaacgtctattttttcagatctgagatccgttctcgataacaatgacgacaacgatgatgcttctcccccaatgcgggtggatctcctccgatactatccgcatctggaggatccgtaacgactatcagtggaagcttgtagattttattcgaattctttttcttgtgtttctgggtg

SEQ ID NO: 8351 - DNA, 275 bp, Glycine max
  Clone ID: PAT_MRT3847_107550C.1
gcgacacatacggttagcatagtaacaatcgaaaaatctcacgcacacgcaatggccaacacaggtagctctagaatcatacatgattaaggttaatctccttctgtaacgccccgctcatatgaattgctacatgtggatcataagactatgacctaatgatatccgtgagcaagactcatagctggtaaaagtgcaaagtgaaaagcttgtcagatcctaaaccaagcctcgttgcatcctactgttcagaaatagatagatgctactatcct

SEQ ID NO: 8352 - DNA, 514 bp, Glycine max
  Clone ID: PAT_MRT3847_107551C.1
aggagctcccatggttgttgagaaagtagttggttacatcgaaactccccatggtctccgatcgctcgccactgtcagggctgagcatctgccaaaggactgccgacgtagatatgacaagaactggaaccaatcaaagaagaaggctctcaccaagactcacaagaagtggcaggatgaattgggccgcttttttattgagaggaacatcaagaaacacgtgcgctactgcactgtcatcaggggaaactgacacacacagatgaaaccgaagaggcatcgccagaagaaggatcacatcacggagaacccgctcaaaggaggcgccactgaagacaagggaagcgggcgcgagagcaccagggagaagcacaaccaggagaacaaagacttcaaggatgacccaaagaaccgactgaaatggggggcagaacaggcgatgaaaagaaaggagcgcacaggccggtggcgcaccgaacaagcaacccggaagaaaccaaagggcgcgccaaaa

SEQ ID NO: 8353 - DNA, 502 bp, Glycine max
  Clone ID: PAT_MRT3847_107552C.1
tcggaagtaaagaaatgccttcttgtcttttcacgatgacaccgactacatgtttgataccaatttcagttcccataactaatgcctgggcacaaagtaaaatgtaggcatgcaaattcgctggaggtgattacattagaaccgacactccatacatgtgtcctgatctaggtacagctggcaataatcgtactagttgtgtgaggcatgaaatactctggtgctgtatctaccctcactagaaactatagtgaattaatgactatgggcgtttatgtaaacctgatacagcagatgcatcggttcgcatgtatgatatggcatcgctgtgcccacttaatgatcgtgtcgaaaaacaatgcccatggataatgtttctgccgacccatggagaccggttggaagtctatgacccctggcaccaaaaaggctatgctatccacatgcctgacgctgcgggctatgatagtagctacacccattatggtaggttgctgcgctg

SEQ ID NO: 8354 - DNA, 632 bp, Glycine max
  Clone ID: PAT_MRT3847_107553C.1
ttgggatttgcacaataaaaagaatgcgccatctgcactctattgaagggtatttgataacgccttatgcattgatgatggaccactaattcaaaacagcctagataatgaatgctccaaatacccttgccctaacctaaagatttgaggcacactcgccacaccttatctatacatgaaggggaagtttacgtgacaaatgtctgggggagtcctaaagaacccaccatgcgggggcgtgactgtataatgcatgtaacaagggggtgcagggttgattaacactgtggcggagtggaggggaccatatggagctgttctttctaagcatgcatggttcactacttgtatgcatgaggaatccttcgcacctaaccttggcaaagttgtctttgtttcccctaaagtaagacccgccagactaccacattcgggtgacttactaggatatctgagctcagcgaatagatctttcagtaaaaagatccttgacttggagggtcactaccatacatgttggggaggtaccaccccccgcgcaggtcgttggattgccatagtggcttaaagctcgagcttggtagccaacatgatggaccccctcatcttatggccgattattgctttcactc

SEQ ID NO: 8355 - DNA, 322 bp, Glycine max
  Clone ID: PAT_MRT3847_107554C.1
caccattgaattttgattgtagcaagcagagctaaaggaagttacatatagacctattcaggggacgaataatagtggacataactggacataggatcacgctaatacaaaaattcttcaatgaagaacttgtgggcaaggaaaagattggaatgaatggcatatgcatgctgaagattgccatgcttatgaatgtatcacataataggagtgagggaaggtaatgggatcaagaattacaagcataccaatactgagcagcacatgacagtgcatgccagagatcaaactcggacatacagttcggggaaatgcgcttgct

SEQ ID NO: 8356 - DNA, 412 bp, Glycine max
  Clone ID: PAT_MRT3847_107555C.1
cccacgcgtccgcccacgcgtccgcccacgcgtccgggttcaaaataaatagttagcagagttagttttttgtttcttttccctaaagagttaggctctattggaccgtacgattaagatcgttcggtgaaattgatcacgctggtgccgcataccctagcgttcctgttattctattgtggctgaaacaaaacagtgttgaacggcgaggtagaacgacgacccccttctgcgttttgaccttcaatctcgtaagttcttctatttattaatttattttcaattgaacaccgtgtgttcagatacgtgaaaagattttagtgttgattccatgttgaaagttaggcactgcgtgaatggaaataatctaattgatggatgaggttctgtggtttttgagtttggtggatat

SEQ ID NO: 8357 - DNA, 247 bp, Glycine max
  Clone ID: PAT_MRT3847_107556C.1
atgagtaaaaaagggggttattatgttttatagacttgagaaaaaccacgttttaaacgttaccaccaaaaacatgtaccagggggtacagaaacccctaaaaaggttggaagaagaaacccaaaatatcttagttgaaacttccttgaaagggaagtctttggattttaatatgtccaggggggggaaagtttgtaacatttaaagaaggataggtttttttttgtctgcaaatacaaggggggag

SEQ ID NO: 8358 - DNA, 408 bp, Glycine max
  unsure (1)..(408): unsure at all n locations
  Clone ID: PAT_MRT3847_107557C.1
accaggataggtacaacccattaatttatgaaatttgagtcacaaattagtgtacattttttcgtggcacagagtctgattgacactaacattgtagaccgatctatgtagcaaaagacaagtgattgaaatttactgtacattgtatttcgagcatcttctttctattcagacttgagaggtttgtaacttgagcaccaaaatatttttgtatatcaattttcttttatgctatataaacctttagtgacaaataccaatagtttcgaaagatcatgtcaaagttagtttcagtggattaaaatttaatgttatctacatcaataaaatttgcatttctattaaaaaanaaanaaaanaaaaaaaaaaaaaaaaaaaaaaaaaaaaaaaaaaaaaaaaaaaaaaaat

SEQ ID NO: 8359 - DNA, 930 bp, Glycine max
  Clone ID: PAT_MRT3847_107558C.1
ggggggtaagtttaataacaaaagaagtcaattgattacttaatcccatggcataactgcaggaacaaaactatgaaatactgcttatggatgtgcttaacatatccctacccaccccttacttctgctttctattctcccgccaagattatacaatgcatcaaaagcagatgaaaaaacattcttttttatcaggaaaattctggaaagcctaaaagtttattcaaatgttgcctaaaagtttattcaaataaatcatcttcgtcatcaggaagaggctgagcagccgctctacatatctcttcttcattcaattgttgggtagctatatcaatgactacgtccgggggagcaagagcaggcatttccacaaaatgaaggccctgatcccctgcaagtttcttggcaaggtatagaaagggtttttcgaaattgtagttactctttgcagatatctcatagtactgcagattctttttcctgtgaaatgtaacctgctttgctttaacctgtctattcttcacatcaaccttgtttccgcagagaacaatgggaatgttctcacacacccgacagagatctctgtgccatgtagcaacgttcctgtatgtcatgcgagctgttacatcaaacataatgatagcacagtgtccatgaatataataaccatctctaagaccaccgaatttttcttggccagcagtgtcccagcagtaaaagcgaattcttccacaattggtatggaagtctagtggatgaacctccacaccaatggttggttcatatttcttctcaaactctcccgttatgtgtctcttgacaaaagtggttttcccagttcctccgtcgcctacgatgacaagcttgaaactgggatagtcaaccgtatgttgctgtggcaaagccatatgagtaacgcccacgcgacaa

SEQ ID NO: 8360 - DNA, 387 bp, Glycine max
  Clone ID: PAT_MRT3847_107559C.1
cttagctttctattccaggtagttttgttgcttcaaaggatagaaggtgtggaagtttgcctatttggcatgtatgttcaagaatttggatctgaatgtcaatttcctaatcagcgccgcgtgtacctttcatatttggattctgtgaagtattttaggcctgaggttaaagcagtgacgggagaggctcttcggacttttgtttaccatgaaattctgattggatatcttgaatattgcaagaaacgtggttttacaagctgctatatctgggcttgtcctccattaaagggggaagattatattttatattgccatccagaaattcagattaccccaaaatccgataagctacgtgaatggtatctggccatgttaagaaaagct

SEQ ID NO: 8361 - DNA, 218 bp, Glycine max
  unsure (1)..(218): unsure at all n locations
  Clone ID: PAT_MRT3847_10755C.1
ggtttaaacgtgaagtcacagcaaatcaaacagcctaacttcaacgaggtatcaacgtcacagttcaagagaagaagagagggaaaaaccgattaccgtgccaggattcggttgattaatcaggacaagaacaaatataacanccgaaatatcctttgttgtcgttcagcacaagacatgtgacaatatatcgtacatgcgggaatgtctgtgacata

SEQ ID NO: 8362 - DNA, 120 bp, Glycine max
  Clone ID: PAT_MRT3847_107560C.1
atggagggaatcttttattattcatgctcacttgccggtcactggggtctaagaaagctgagtgggcgatatcatgacattcaccactccattgatggtgacactgacatggctttctct

SEQ ID NO: 8363 - DNA, 4872 bp, Glycine max
  Clone ID: PAT_MRT3847_107561C.1
gagaagtctatctcaatggaatctttttttacagaagtcaccgcttacccccctgcacatgtggtacatgaaaaattaagtgagatgaaaatggataacaataatgcagatgataaaatgcctattgctgaacctgtcaaatatgatgaacctgctaatttagctaggcctgaaaatataaaaactgagaaagaaactggacaagacaggaaagaaaatgttgtgcagacatctgaaaatgcagctggaaccaagtctggcaagccaaaaataaaaggagtctcattaactgaattatttactccagagcaagtcagggaacatatcactggcctcaggcaatgggttggccagagcaagtcaaaagcagagaagaatcaagcaatggagcattcaatgagtgagaactcctgccaattgtgtgctgtagagaagcttacctttgaaccaccgcctatttattgcacaacttgtggggttcgcattaaacgaaataatatgtattataccacgggcaccggtgacacacggcattatttttgtcttccatgctataatgatgctcgtacagagaacatcattgttgatgggactcccattgccaaatcaagattggaaaagaagaagaatgatgaggaaactgaggaatggtgggttcaatgtgataaatgtgaagcatggcaacatcaaatttgtgctttatttaatggcagaagaaatgatggtggacaagctgaatatacttgccctaactgctatattcaagaaatagagaggggagagcgcaagcccttaccgcaaagtgctgttcttggagccaaggatttgccgagaactattcttagtgatcacatagaacagcgattatttaaacggctaaagcaagaaagactagaaagggcaaggcttcaaggaaaaagttatgatgagattcctggggctgatgctcttgttgtaagagttgtgtcatctgttgacaaaaagttagaagtgaaaccgcggtttctggagatttttcaggaagagaattacccaacagaatttccatataaatcaaaggtagttttgttgtttcaaaagatagaaggtgtggaagtttgcctatttggcatgtatgttcaagaatttggatctgaatgtcaatttcctaatcagcgccgcgtgtatctttcatatttggattctgtgaagtattttaggcctgaggttaaagcagtgactggagaggctcttcggacttttgtttaccatgaaattctggtaaatttggacactaagatcttgctttggagcccttccttagagatattctagttctgggttactatcttcctgtaaattatatttgatatgaattatttctttttagattggatatcttgaatattgcaagaaacgtggttttacaagctgctatatctgggcttgtcctccattaaagggggaagattatattttatattgccatccagaaattcagaaaaccccaaaatccgataagctacgtgaatggtatctggccatgttaagaaaagctgcgaaggagaatattgtggtcgacctcaccaacttatacgatcatttctttgtatctactggtgaatgtagggctaaggttactgccgcaagactcccgtattttgatggtgactactggcctggggctgcagaggatttgatttatcagcttcgccaagaggaagatggaaggaaacaaaataaaaagggaacaactaaaaagactataacaaaaagggctttgaaagcgtctggtcagtcagatctttcagcaaatgcctcaaaagaccttctccttatgcacaaacttggtgaaaccatttgcccaatgaaggaagattttattatggttcatttgcagcatgcatgtactagttgctgtattctaatggtgtctggcaaccgttgggtttgcaggcaatgcaagaattttcagatctgtgacaagtgttatgaagcagaactaaagcgcgaagagagagaacagcatcctattaaccagagggagaaacatactctttatcctgttgaaattactgatgttccttccgatacgaaggacaaagatgagattcttgagagtgaattctttgacactaggcaggcatttctgagtctctgccagggaaatcattatcagtatgatactctaaggcgggccaagcattcctctatgatgattttgtatcatcttcataatccaactgcccctgcatttgttacaacatgtaatatttgtcgtcttgacatagaaacaggccaaggttggcgttgtgaagtttgccctgaatatgatgtgtgcaatgcttgttatcaaaaggaccgtggcgctgatcatcctcataaattgacaaatcacccatcaatggcagatcgtgatgctcagaacaaggaagcaaggcaacttccagtattacagttacgaaaaatgcttgatcttcttgtgcatgcatctcaatgtcgttctgcccactgccaatatccaaattgtcgcaaggtgaaggggcttttccgtcatgggatgcattgcaaaatccgtgcctctggaggttgtgttctatgcaagaaaatgtggtatttgcttcaactccatgctcgtgcttgcaaggaatctgaatgccatgtaccacgttgcagagatttaaaagaacacttaaggaggttgcagcaacagtctgattcaagacgaagagctgctgtaatggagatgatgaggcagagagctgcagaagttgccaacagttctggatgagcattttgatgtttggatatgtacatatgggatgttttggaagaatgctcctgacaaatatagacattagctttgcccgttctccagttagacactgctggaaactagggcttgacatggatccggatcaatccggtgaatctgaatcaattcaaactcaaaattccagattggatcggattgaaaaattgcaattctgatttgtttggattgcatcacggatttcactttgaaaatcctatctaatcctatccatcaaattgcttagtatttttttaaatatttgtttaatctttagagtttgggttttttagcccagcccaatttaattgtattttttttcacttggattgcaaacttaaactaggaaaaaatccattggatccaaatatgttaaaattgattggatcggattaaaaaatgccacagaccaacctaccaggttagttgctcggatgactaactcatacccgcgttacctaaacgtcagtagcatgttggcgtggagctggcgatccacggcaaaaaggcttgggggctctatgaatttcatttcccggcccgggaaattatcagtctgggctaatcgctaagagctcatcccgagagaactcgggacgggataactcgaagtacggcatgaagtaagaagttagccaagttctgtgatcctcgagaatgaactatcagacctaaagcctagactagaaggaaagaactgatctggtcctaacagacccgtgtccacccctgctggaaaccgtattttgaccagctgtgcgtggatggtttctatatgcatgacctgattgttaccatgaggatcatagagttcaaccaactagtgatgcctcaactaactaatcaggtccaactgggtataacggcggtggtgtcttcgtatgctagtcgatttgatgattctttgatatagtcagcttctcgtgttatctctaatggtcattgtgtggcaatttactatagttctaatttgtcaaaagtatattactttctttttttcgcgggggcactgctaagtcgcattttgtcctcgtcttctttaatgttgacactttctgtagtacctttttatttaaagattaagtaattagtagtttcagaaaattgtactaagtggctcaaagggttgtccttgggggatcgggacgctcatcattcacatgagtgagaacaacgagtatcgcagctacggaaaatgcttgatctcctcgttcatgcatcccaatgtcgttctggacattgccaatatcccaattggtcgaaaggtgaagggacttttccgccatggaatgcactgcaaaacacgagcttctggaggttgtgttctttgcaagaaaatgtggtatttgcttcaacttcatgctcgtgcttgcaaagaatctgaatgccatgtaccacgttgcagagatttaaaagaacatctaaggagacttcagcaacagtctgattcacggcgtagagctgctgtaatggaaatgatgaggcagagagccgcagaagttgctaacaatgctggatgagcaatttatacttgtaaatatgtggcactttgaagaaatgctctagacagaggtataccttagtttcacctatgctccgacagcagtgattgtttttgtgaatgaataggaatagatagggtacatgtatccttgcgtccatctcaacatgtttgtcccagaaaaagatctgagttcagccatttagtgctgctgtcctcttctgcaaaggactaaccaggtccggcgggatatttggtggtgcgtctgtttttgtaattctttgattttgttaagttacttgttttatgtcagatgccatccttcttcggtggcgggtgtactatagtcctaaataggtctcaaatttcttagaaatctttgtgggagggagggatgtcatcaagtcgtttttagttgaccgttttaaagattcaatgcattttgtagaatcttttatttaaagatggaagtaaataattagaatcttcacatagttctgcttcctttatgggatagtatctactgtctcttttgcgtacttttttatattcaatattgctattcgattttttgctatgg

SEQ ID NO: 8364 - DNA, 1142 bp, Glycine max
  Clone ID: PAT_MRT3847_107562C.1
atacattctttgacactagacaggcatttctgagtctctgccagggaaatcattaccagtatgatacactaaggcgggccaagcattcctcaatgatggttctctatcatcttcataatccaacggctccagcatttgtgacaacttgcaatatatgctatcttgacatagaaactggtcaaggttggcgttgtgaggtttgccctgagtatgatgtatgcaatgcttgttatcaaaaggatggaggtattgatcatcctcataagttgacaaatcatccatccatggtggaccgtgatgctcagaacacagaagcaagggaggttcgagtagtgcagctacggaaaatgcttgatctccttgttcatgcatcccaatgtcgttctgcacattgccaatatcccaattgtcgcaaggtgaaggggcttttccgccatggcatgcactgcaaaacacgggcttctggaggttgtgttctttgcaagaaaatgtggtatttacttcaacaacatgctcgtgcttgcaaagaatctgaatgccacgtaccacgttgcagagatttaaaggaacatctaaggaggctgcagcaacagtctgattcacggcgtagagctgctgtgatggaaatgatgaggcagagagccgcagaagttgctaacaatgctggatgagcaatttatacttgtaaatatgtggcactttgaagaaatgctctagacagaggtataccttagtttcacctatgctccgacagcagtgattgtttttgtgaatggaatacgtagggtacatgtagccttgcgtccatctcgacatctttgtcccagaaaaagatctgagttcagccatttagtgctgctgtcctcttctgcaaaggactaacaaggtccggcggggatatttggtggttcgtctgtttttgtaattctttgattttgttaagttacttgttttatgtcagatgccattcttcggtggcgggtgtactatagtcctaaataggtcacaaatttcttacaaatctgtgggagtgagggagggagggatgtcatcaagtcgtttttagttgaccgttttaaagattcaatgcattttgtagaatcttttatttaaagatgaaagtaaataattagaatatgcgc

SEQ ID NO: 8365 - DNA, 423 bp, Glycine max
  Clone ID: PAT_MRT3847_107563C.1
tttacttgtagtaatgtgctcaatgtataaccaacaagaaagtgagctatatgagggccaatttcttatgtacatgcatccttttgggcacctaatacctatgatgacataagtgggctgtataactaggtatttgagacataatacaaaaccatgccaaacctatatttctttctgacttggtctttactataaaaattgcagcacctaacgctggttttgtgcaactgatcatgcacttgtagaaacacaatggaatctttgagatccatgagagccaagaataccattaactcacatatgctctaatcgctgtaacatatcttatagcaaatagtagtgatcgttgttttatctcaatggttttagcgtttaccgatccactttggtaacagaaaataccataacttgcgaggaatggat

SEQ ID NO: 8366 - DNA, 559 bp, Glycine max
  Clone ID: PAT_MRT3847_107564C.1
aaattaattatattattttttttttttttttttgtttacactcttttttttgtaatatacaaatgcctttatttttaaatgttacaaattttatggaaaaaaaatattggttttgtttaaatgattacaaaagaaaaaaaaggcttcatcttttttacattaagaaagcctaagtaacaggctaaccccatgccctctaggatacaaaaacgatcaccatccaaaaatactaacatgggtgctagaaagtcaaaatctcaaacatacattccatcaaaaatttaacggggtaagcaataaaaagcaatcccccaactgccctggatggaaaagctcttacagaaaaaagagactccaatacatttctaaagaacttaggggggggggcaggctgagacatgcttggcccccttaaaggatgctaagaagtacaaattatccccaacctcaaaaactgaaaaaattcgttctcagcaaagccaaggaaatttctgacaaagcacccagaagctgaaccagtctccagggacctgttacatattcacacagaaccgccacc

SEQ ID NO: 8367 - DNA, 1909 bp, Glycine max
  Clone ID: PAT_MRT3847_107565C.1
ggctcgagagcgtcgttgatagcaagaagaggccagagtcgttttaaatccaatttttccatgtcgttcgcatcatcattctcgatgctccgccaccgcgcggtggcggcatacgcgcccactctcctcctccgccgcttccgctgtctcccaacgatcgccgccagacaccaacaacaacaacaaaaccctaacaaacaagctgctgccccgagccgcaacctcctgaaggcgaaacaaacactgaaagagtattcctgtcttgcccctgtcctctccctcgaagacagccctcctctgacggaatcccaggccatcggcgtggtggcggcgtcgcaggccaacttcatgcgcgtcatcgtccccgaaaatgacgaaccttctggaagcttccgcggggtggagattctctgcgtggtgagggcgctgctgaagaagattaagcagagggtgatggtccgcgtcatcgtccccgaaaacgacgagccttctggaagcttccgcggggttgagatactttgcgtggtgagggcgctcctgatgctcgtcccgcccggggcgatcgtcggccacctgctcctgcgtggctcgctcgaacaccccaagcctgaacccctcaacctcacgcgctttcctcgtcaggctgaatccaccggaatccctctcatgctcgcactcaacaagacggagcttgtggataatgagatcattagttcatggaaggctaggttgcgcagctgggggtatgagccggttttttgcagtgttgaatctggacatggacttgatcttcttggttacaagttgagggatcaaacgacagtgattgtggggcctagtggagttgggaagtctagtttgatcaatgcccttagaagcaatccttccgatgctgcggaaggggataattggtttgagcctattttgggaagcaagtggcttgaggatcagcgagttggggaggtttcaaccagaagtggtagagggaagcatactactcgtcatgtctctctacttccattgtctgaagggggttttcttgctgatactcctggatttaaccagcctagtttattgaaagtgacaaagcagtctcttgcacagacttttcctgaaatcaggaaaatgcttagtgccaatgagactgagaaatgttcatttaacaattgcttgcatctgggtgaacctgggtgcattgtgaagggagattgggaaagatattcctactattttcaacttcttgatgaaatcagaatcagggaggagttccagctcaggacgtttggaactaaaagagaaggggatgtaaggttgaaaatgggagacatgggtgttcagcaagcagaaccacgtttggaacctaagaagcatagaagacaatctcggaagaggattaaccagtcaattttagatgaattggatgatgatgatgagcgacaatttgcttgatgaggagaatgatcccattttaagggcgctaaggaatgaaaactcttagaattccgttaatccccagagtactcattgtaaatagttcctttccgcgctttcgcttgtatctcggagtcagctagttcctattactgaagttcattatgttttgtttgacccaagtctgtgtcaggtaggctcaatcgtgtatagtctgtacaaattttcaccgatggacacactgtggaattctgatgactgataggttgatccatgcttattgcctacgattgaattacgagcatcattcacactttttgtgagatgatcattttcggttagaactgatagcttccgacatcagggacttgtaaggggggatttacaaccacaactaacaattgaagatacactggacattcgttgttatgataaattgagacacgggaagtaattagtcgattgctcgagagcctat

SEQ ID NO: 8368 - DNA, 360 bp, Glycine max
  Clone ID: PAT_MRT3847_107566C.1
tgcgccgtcgatcttaggagacgacggaagacacgtcgaatcggtcctccggggaatagtgctcgttgccccgtgtggaataatttccatcacttttcgttgcttccgttcagttcgaggttgggaggagaaaatgtatcttgtataaggagtggtggtttccaataacatgcctaaatcagttgcggtggcaggggatagacttttctatcacaaagtctctgatccttatgtcaagcgcacctgttacttcatgggtcacgatgagaacaacctctgggacattggggacgaaggtcgactggatccttcttagactttgagcaaccataaacattgggttgttgctgaaatgctcta

SEQ ID NO: 8369 - DNA, 174 bp, Glycine max
  Clone ID: PAT_MRT3847_107567C.1
tcggctctagcagagtctagcgatgagtgcgtttctaaaagccttcgtggccattctctggggtgttctgtgtctgggtcgccatgagggagcggtagaagataagagcagatagattggtagacgtggcgaaatcagagattccgtataggttcgagcagcatgcggtggggt

SEQ ID NO: 8370 - DNA, 219 bp, Glycine max
  unsure (1)..(219): unsure at all n locations
  Clone ID: PAT_MRT3847_107568C.1
tggcttncaggcaattgtgggcntcaagagctgnctcttacctgaggntctctgtgtttcacagaggcttntctaatgttgttaaagatttgaagtatgctgantctcatgagtgggtgaaagttgatgaaaattctgcaaccgncggcataactgatcatgcccaagatcatttaggaaaagttgttgaagttaatgaagcgcttaacagctctcctg

SEQ ID NO: 8371 - DNA, 352 bp, Glycine max
  Clone ID: PAT_MRT3847_107569C.1
ctatctctcaccaatgtcttcctaaaacgaatatgctctgatgagcaatattgcctcaccgctagaataagaacatgcattggctcttaaatcttaccgacgaacagatctccgagaccaacgaagccgtgaacttgttcgaccaggagcggcaggggatgatgaatgtctctgtctatcaaggtttgggctttcgaatggacatgatttatgcctttggggctttcgaagagcggcgttcattgttgcgatactggataaggaaaattagatgacatctgattgtatttataaccactttttatgttgagggttacatggtgagagtggaccttggattagctgtactttg

SEQ ID NO: 8372 - DNA, 176 bp, Glycine max
  Clone ID: PAT_MRT3847_10756C.1
ctcgacttcaagttgaacttcaactcctgtgcaagcatctggtgtggaacctgacagagggccgattgtgaagtgttatgcaaggatatctcacaatgctcacctacctcatcatcctcaaccgaaacaattgttgatgggcagggcccattcctaaattaaagggccttctagat

SEQ ID NO: 8373 - DNA, 1041 bp, Glycine max
  Clone ID: PAT_MRT3847_107570C.1
cctcgagtcgtatggggttccgtacggctgcgagaagacgacagaaggggggagcgaagtgaattgaaattgaagtgactcggggtgagttgactcagcaatggcggaagaggtgactcgggtgatggtggcggtgaacgagtcgagcattaagggataccctcatccttcgatcagcagcaaaggggctttcgactggaccatcaacaagatcgttcgcgacaacgtctctgccttcaaccttctttttcttcacgttcaagtccccgatgaagatggttttgatgacatggatagtatctttgcttctcctgacgattttaagaacatgaatcagagagatagaattagaggagttcatctgctggaatacttcatcaataggtgtcatgaaattggggtggtttgtcaagcatggataatgcatggtgatcccaaagaagtaatatgtcatgaagtgaaacgactaaggccagatcttctggttgtgggtagccgaggtcttggaccttttcaaaaggtttttgttggcactgtgagtgaattttgttggaaacatgctgaatgccctgtcattagtatcaaacgcaagccagatgaaactcctcaggaccctgttgatgactgatatcttgtcatacaccagacattgaagatagttcacctatgctcccatgctttatgtagtcaaaagaagaaaagaaaagaattgaatatcattcaagattagtatatggagattttcaatgtgggaacaggagcaggaaatccaacttttggtgcttttattgcctttgttccttttgtccagtttgtaattctatgatgtgttgatttcttttagtgtacaaatctatctgcttaagtcaatgttgtttgtaattctgaaagttggatgctgtaatattgctcttcaatgtgatgcatgcattaatttaccaagccataatcaagtcaaactcaattgttcttcaatggctcgtcaagtgtctcggcaaaaaaagaaaaaaaaaaaaaaaaaaaaaagggcggccacgggca

SEQ ID NO: 8374 - DNA, 466 bp, Glycine max
  Clone ID: PAT_MRT3847_107571C.1
gcgactttctccaaaatccgttgactaatgtcatctgggtcattctcaacaaaaccccagtggatctacgatgtgttcatcaacttcaggggaggagacactcgcaggaacttcgtctcccacctgtactacgccctctccaacgccggcgtcaacaccttcttcgacgaggagaatctgctcaagggcatgcagctggaggagctatcgcgcgccatcgagggctcgcagatcgccatcgttgtcttctccgagacctacaccgagtcttcgtggtgcctctccgagctcgagaagatcgtcgagtgccatgaaacctacggccagacgatcgtgcccatattctacgacgtcgacccgtccgtcgtgcgccacccgacggagcacttcggtgacgcccttgaagcggctgcgcagaagaagtattccgcgaaagataaggagtatgggttttccaggtggaaaa

SEQ ID NO: 8375 - DNA, 448 bp, Glycine max
  Clone ID: PAT_MRT3847_107572C.1
atctatcgctatctgtcgctacgaatgtgccaagtaccgtacctggtgtggcaatgacgtgtgctctgatatttgttcggtgtatgggtgtttggtggtaagcttatgtggtggttgggtgtgggtttatgcacacacatgctaaatgaagggtgacgaggttcatttcacatcttcgtttcccgtctcatttccctactaggctttacaacaactcttctcatcttgtccttcaccaccaccaagttctgaaccctcttgttattattaagcttcgcaagcacccccaccccataccacagccccaatatcccgtaacatcacgcacacgcccaaaccgcaatcacaacttacggtatcaaactggctccactagacgcacaacttatcggaccacttgttagactaacatgatatgtagctctcacttaaagcgcagtaactgatg

SEQ ID NO: 8376 - DNA, 251 bp, Glycine max
  Clone ID: PAT_MRT3847_107573C.1
cgagaacaaaaaaaaaaaaaaaaaaaatccgcgattcgctcttctcttggaaaggtgaaacccagaggtacgaacgaaagagaagagcgttttagaagtgagaaaagagggggttgccgtccacgaagctgttcagcaggttttttgcgaaaagggaattggggatcctgatggaaggccccgatgctcccggaaagacacccatcttgtacaagctcaagcttggagaaatcgtcaccattatccccacc

SEQ ID NO: 8377 - DNA, 975 bp, Glycine max
  Clone ID: PAT_MRT3847_107574C.1
tcgagcatttctaccatacgtcctctaaggtttggagttgctccctacaatcccactcttggtgaaactcaccatgtttccaaaggaaaccttaatgtcttactcgaacaggtttcacaccaccctccggtatctgcccttcatgccactgatgacaaggaaaacatagaaatgacatggtgccactctccgatttcaaagttcaatggtactttagtagaaactaaggtgcatggcaaacggcagttgaagctccataatcatggagagacttatgaaatgagtactcctaatttggttaacataattcttccaatccctgggactgattgggttggcaatgtcagcatccgggttgaagctcccggccatggcaaacggcagctgaagctccacaattctggcttgacctatgaaatgaatgctcctcatattaaagggaaaatctttgaatcatttgctatgaagattctatacaaaattggtatccattgggatagtactgtaacagtgaggaatactactaatacagaagcaagagtgatatatgatgcaaaagaagttctttctggacttcaagctcctattgtccaggatccagagagtgtgtggccaacagaaacagcccttgtttggggtgagttgagccaagccattttgagcaaagactgggaaaaagcaagagaagcaaagaaaactgtggaggaaagacagagggagctcttcaaagaaagagagtcaaaggggggaaattgggttccaaaacacttcttggtgtcttatagcaaagaagggggttgggaatgttcaccaattcaaaagtcagtcccaaaagccccaatcgccaccttgtaagagcatgtttggtttacggttacaaaattatatttgaggcaaaagtaattttgctaacgaatgagaggaccctttcttttgtgttattttacttttatctattggattgcatggaacaca

SEQ ID NO: 8378 - DNA, 2521 bp, Glycine max
  Clone ID: PAT_MRT3847_107575C.1
ttcttcccacgcgtccgcccacgcgtccgtccacgcgtccgacggctgaattcggctcgagaagacgacagaagggggacatgagagagagagagagatgagggaggtgtaagaaactggaaggagtaggtgttgttggcattctgacctaaagcttgtgtctttctgcttcgtttgtatcttctgctgcgtaaagaggatccctttctgattcttccgtaaatttcgtctctgaaactagggctaatacttcatctaccgatctctatattctggatgaaggtttgcttttgatccggcttgggagttttgatcgacttgattttaactccaacttttaagaaatgtcattccgcagcatagttcgtgatgtaagggatagtttcgggagcttatctaggcgtagttttgatgtcagacttactgggcatcatagaggaaaatctcaaggatcagtgcaggatttgcatgaccagcctctagtaattcaaaatagccgctgggctagcttacccccagaattactatttgatatcattagacggctagaggagagtgagaatacatggcctgctcgaaagcatgttgttgcatgtgctgcagtttgccagtcttggaggaatatgtgcaaggacatcgttaagagcccagagttttgtggcaaacttacattccctgtgtccttgaagcagcctgggccacgggatggaatcattcaatgttttatcaaagtgccttgtagatttatcctattttgcttatcaaggcttcaagcctatttacttggtattttatttttatgttctgggttatatccctatctactcagtggtgatattttctttgacttccatacaccagatcaaattttcttggtacaaagttcattatatacgatacacagcctccatactcttctgcccatatatgccctcctgggactgggaagacgagccgcatattttattccaaaaaggtctcgcctaaggtcccatctgggagttacaacatagctcaggtaacatatgaattaaatgtgcttgggactcgaggaccaagaaagatgcactgcgttatgcattcaataccagcttcagcactagatgcaggtggcactgtttctggccagccagagcttcttccccgttccctggaggactcgtttcggagcatctcgttttcaaattaccggtccggcgtccgttagatcattctatcgagtccggcagttcgcgattttctgagattggggaatcctgcatcgaagatgatgatggcaagatgagacctttggttctgaaaaacaagcctccaagatggcatgaacagttacaatgttggtgccttaatttccgtggacgagtaacagttgcgtctgttaaaaactttcagttgattgctgccacccaaccagctgctggtgcacctacaccatctcaaccagctccaccggagcacgataagatcattcttcagtttggcaaagttgggaaggacatgttcaccatggattatcggtttttcttagttccatggctttgaagatgaaagacaaatttgacaggtactggagcaagtgcagtttacctttagctgtagctgcagtcctggatcctcggtttaaaatgaagttggttgagtactacttctccctaatttatggtagcactgctctggagcatatcaaggaagtttctgatggtatcaaagaactttttaatgtgtattctatctgttcaactatgattgatcaaggctcggccttgcctggcagcagtttacctagtacttgtagttccagagataggctaaaaggctttgacagattccttcatgagacatcacagagtcagtctatcatatcagacttagacaagtacttagaagaaccaatctttccacgcaattctgattttaacatattgaactggtggaaagtccacatgccaaggtacccaattttgtctatgatggcacgtgacgttcttgggactccaatgtcaactctggcgccagaattggcatttagcactgggggcagagtgctagattcttctcgtagttcactaaacccagacacgcgagaggctttgatatgcacccaagattggctccaaaatgaatctggaaatctaaatccatcaccaatccattctgctctacctcttctcatcgaatgaagtttattttttcaaggttttattgacgaatcatcttagaattgtcgagtttgcctttgaagtgatctagcttacaaatattctgtgaagatgcattgtatattcttagaacaacaatgtagatttttaatatttatagatctcttttctattagttgtttttattggactagcacacggctgaatctgattttgtaaaaagggttgcgtgcccttgatatcaaaatctttccttgtctggaaaagttttcttttgcttctgtccataaaagaaggttgctcaaaataaaaaaaaaaaaaaaaaaaaaaaaaaaagaagggcggccgccgaaagtgagctc

SEQ ID NO: 8379 - DNA, 479 bp, Glycine max
  Clone ID: PAT_MRT3847_107576C.1
cggctcgagttggagtccggacatgagagagagagagagatgagggaggtgtaagaaactggaaggagtaggtgttgttggcattctgacctaaagcttgtgtctttctgcttcgtttgtatcttctgctgcgtaaagaggatccctttctgattcttccgtaaatttcgtctctgaaactagggctaatacttcatctaccgatctctatattctggtttttccaagttcttggaaggaaaatgatgaaggtttgcttttgatccggcttgggagttttgatcgacttgattttaactccaacttttaagaccatatgctcacagtggttgaatatagtacgtcagaagttcacacaagatatatatataattattattgggtaccacctgcagaatgtcattccgcagcatagttcgtgatgtaagggatagtttcgggagcttatctaggcgtagttttgatgtcagacttactgg

SEQ ID NO: 8380 - DNA, 2451 bp, Glycine max
  Clone ID: PAT_MRT3847_107577C.1
tacggctgcgagaagacgacagaagggggagagagagatgagggaggtgtaagaaactggaaggagtaggtgttgttggcattctgacctaaagcttgtgtctttctgcttcgtttgtatcttctgctgcgtaaagaggatccctttctgattcttccgtaaatttcgtctctgaaactagggctaatacttcatctaccgatctctatattctggatgaaggtttgcttttgatccggcttgggagttttgatcgacttgattttaactccaacttttaagagttagtagtctctcttctggtccttggtgttcgcaataatagccaaaggaaaaagaaatttgaaagctttctatttctgtacctgctaaattggccagtgaattgaatgtcattccgcagcatagttcgtgatgtaagggatagtttcgggagcttatctaggcgtagttttgatgtcagacttactgggcatcatagaggaaaatctcaaggatcagtgcaggatttgcatgaccaacctctagtaattcaaaatagccgttgggccagcttacccccagaattactatttgatatcattagacggctagaggagagtgagaatacatggcctgctcgaaagcatgttagtgcatgtgctgcagtttgccagtcttggaggaatatgtgcaaggacatcgttaagagcccagagttttgtggcaaacttacattccctgtgtccttgaagcagcctgggccacgggatggaatcattcaatgttttatcaaaagagataaatctaatttaacataccacctattcctttgtctcagccctgctttgttagttgaaaatggaaaattcctcctttctgctaagaggacaaggagaacaacttacacagagtacgttatttccatggatgctgacaacatctctagatccagtaacacttacattggaaagctgagatcaaattttcttggtacaagattcattatatgcgatacacagcctccatactcttctgcccatatatgccctcctatgactgggaagacgagccgtagattttattccaaaaaggtctcgcctaaggtcccatctgggagttacaacatagctcaggtaacatatgaattaaatgtgcttggaactcgaggcccaagaaagatgcactgcgttatgcattcaataccagcttcagcacttgatgcaggcggcactgctcctggccagccagagcttcttcctcgtcccttggaggactcgtttcggagcatctcgttttcaaagtctctagatcgttcgattgagttcagcagttcacgattttctgagattggggaatctatcatcgaggatgatgatggcaagatgagacccttggttctgaaaaacaagcctccaagatggcacgaacagttacaatgttggtgccttaatttccgtggacgagtaacagttgcgtctgttaaaaactttcagttgattgctgccacccaaccacccgctggtgcacctacaccatctcaaccagctccaccggagcatgataaaatcattcttcaatttggcaaagttggtaaagacatgttcaccatggattatcggtaccctttatctgcattccaagcttttgcaatatgcttgagcagctttgacaccaaattggcttgtgaataaagataaatcatgaagctaaagggttttaagtgagctaatgaaacagttatgatgatggtatctttcccgttgtttatctttctttttctattttcattaccagtatcatgggaataggcaattgttgttactcagcttctgtatgattaaattgtaaccgtagttcatctctgatgtaataggattttggagcatttttaacatacaatgttgctatgtttctttctcagttgattccaccaacaaaccatcatttaacatatattttaggctctgctgcagtctacattgtctggtactgtttggtaattgagaggtatatatattctgtcacatggtgattgtatgtacttgtaccttgtatggtgggtgctgaatagattgatcttaagaattgtttgggaatcaggaaaacaatgatgcttgcctggtctggatgttgtgcccatgccaatagagatgtttcacttgtttttggaagatactgatcatgtttaagatggctgaacaaattattgtactcatgtgaattgtgatgtgatgatgactacataacatgactagaacggctttcgtgaatcagttaacaagttagccaactgatttattacaaaaggccttttttaagtactcgggaattacttgatatacgctctgcaacacatctcataaaatccattgctcaagatgccatggacgcattgcttctggtaagacaaaactttcgggagagcatgaaatatattagaagttcacaagtagtgcaaggaaaatttaa

SEQ ID NO: 8381 - DNA, 503 bp, Glycine max
  Clone ID: PAT_MRT3847_107578C.1
gagagaatgaggtggggcgtggtagttattgtagaaaataactttcattcccatgggaatccaatatacccttctccatgggaataagcagcaaaataacgaggagtattttacattcctctgaatcaaatactccaggtaatatttgcaccaaacctgagaatatgatattttcaagtccacgttcccctgggaatcttgcttgaaaccttgaaatcttgaaacaagcttcctcaggtgttgttggcttgttgcctgcatgtagttgttatatatggtggaataaacttgcattgcaggtagtatgccctttcattctagatcagttttattgggctgagagaatgcattggcttggtgtttcacctgaaccactcagtagaaattatttgctgcctgataaaaatgataacacgagtatccccgaagctgcgcgtgtactatcactggcaatccatgatgcattagcatcaaccgttaaaggcagggcagcagaaattggc

SEQ ID NO: 8382 - DNA, 817 bp, Glycine max
  unsure (1)..(817): unsure at all n locations
  Clone ID: PAT_MRT3847_107579C.1
angttcacaactttccgtccgtaatcaattcaagtgacggttttaggtttaacctttaacctttggcctaaagcctcttcttcttcttcttccttgtgtgtgttgcagtaagtacccaaatcaatgttcacactcacttctccttcttccagggccttacccatggattctcttcccaaattgcgccacccttctccatttcccactcccttatcctcttccctctccttccgctctttaccgccaccccattttccttcgtcgtcgtttaggttaccctccatcagagcctcctcctcaccctcccaaaacgaccccgcttttcgcaccccaagaaacacgccctccctcccccccctcctccaaaccctaacctccttcctctcccccctcctcgaaaccacctgcatcgtcatcgccgccgccgccttcttcttcatgcgcttccaccacacgcccgccgtcatcgccgctccgctcacttcccccgccgcggaaaccgacaccgccttcacccaggaggaagccgagaggcttctcgaagagcgtctgagcaccaaccctcgcgataccgaggcgctccacgcgctcatggaggtcaaaatcaaagcgcgtaagatggacgaagcgttcgaggttttgaaccgtctgattgagctcgaaccggaggagcaggagtggccgctcctgaaggcaaacatgcacatctacaacgacgaccacgccagcgcgcgcaaactgttcgaggaaatcctcaagaaagacccgctccgcgtggaagcgtttcacggcctcgtcatggcgactgcgcagtcca

SEQ ID NO: 8383 - DNA, 476 bp, Glycine max
  unsure (1)..(476): unsure at all n locations
  Clone ID: PAT_MRT3847_10757C.1
gagcccctnattcaaactcgcatgaaacactatcctactaatttgtgaatcactgcaagcataactggactgaattgctgataaagctgatcttgctcatgctgatctctcaaagaaagatggtacttcagatctgcctaaagaggcagggcacggcgggcctaaatcgaagagataccgagtacatctatgtaatggctgtagacatggatattagtcatactcaactgcctaagcacatttgtggatgctatattagctattctcacttggcaccgtgctgagcctctcgagccatagacacatcataaggatgatatggatacaatgcacatgaccaatacgcatatggtgcaagaacataattattacgatgacttggatcacaattgcatggatgtggatgctacccttgtcattgccaatgatgtgatgacgatgaagctaatcatctcttaatgcacaggagcttgccc

SEQ ID NO: 8384 - DNA, 342 bp, Glycine max
  Clone ID: PAT_MRT3847_107580C.1
gatgtatagttgaagcttaactttttagtatatgggcgtattctaatgcagatggagcgttagaaccaccatatccgaaaggactcacaccagctagaagaagatcaatgtcatcagtttgataattaaccacgtcaggattgatataaaatggggtattaataaaatcaattaacgagttaggtggcttcagttttaaagttggcgggagctgcttatgttacatagaataaagtgtatttacaagtgcggacgcctctgcatctgtatctaaaggaccaacattacttttaacagaacctatagcaaaaaaagatttcttgttccaccagttgaagcgct

SEQ ID NO: 8385 - DNA, 2006 bp, Glycine max
  Clone ID: PAT_MRT3847_107581C.1
atttttgaatgaatttctataataattcctacttctattattatatattctttttttctatgtatctatataatcgaagtggaaggacgattcgatagaatctctttatttactcggtcgcgttgtacgacccagggaaagccggaccgttactagtttttgtccatgcatatatatatacaggtagatattctatatcttttatcctaactaatacttgacggctcgagtaaaccctataccacgaaattttgaactcaccacacaatagagaatctgaatcaatcgcgatcacagagcgtgtaagcaataagcaaataacaatgttcaacgcttgacattgtggtgtaacttaaccacagttctggaacattcaattattctgatacagcacctccaccgttactaccatgggccgtcactccagtaaccattctccctcctcacgccgccaccgcagtagtatctctccgccgccgcgagacaagcacgagtattccggccgcagtacagccaaaccggttcggcacggttcgccggattctcccccttgttcgcgctctccgtctccgcgaaccaagcggttgaagaaagctcaatccgaacgcgagcgtgagcctcgcgagagcgagaggaaccatggcggtagcagagggagaggttcggagaggggcgccggtgagcggagggagaagaagagaacggagaatgatgagggtaacggaaggagtaacaaatcggcgaagagaatggagtacgaagacagtggcggaaggagtagcaaatcggagaagggaacagagaacgaagacggtggcggaaggaagtttcatgttattgcgatataggcaagagagatcggagagagtattttgaagatgtaaaaaacagtcatgagccgcccacttaaccacggttccatcttgtaggctgagatgtatgacctcgtgatgtgatgagaaactcaggaacagctgaacgaatggatgatgagggatgagactattaggaatatgaaggctgctgaggaggctcttggaagaaaaacagaagcaaaaaccttcatttgagctagctgggaagcttgcatctgaaacaaatcgagttagaggtgttactttgttattcaatgaacccgcagaggctcgcaaaccagatattaaatggagactttatgttttcaaggctggtgaagtgctaaacgagcccctttatatacatcgccaaagttgttatctttttggaagggaaagaagggttgctgatatccctacagatcatccatcttgcagcaagcaacatgctgttattcaattccggcaagtcgaaaaggagcaacctgatggtaccttattaaagcaagtaaggccatacattatggaccttggaagcacaaacaaaactttcataaatgatggtcccattgaacctcaacgatattacgaacttagggaaaaggacaccattaaatttggtaacagtagtcgagaatatgtattactacatgagaattctattgggcaatagacattagtctccaatttcgctctatctgctcatcaaaactgattaaagcagcatttgacctgcagtttttggtaattaatgtccaacttctgtgtattccctcctttcagaagtttctagatcagtctgtcaacaagtttcttgttattattatatatgcaagatacattagataatttattttgaagttgtataatacaatcttgagccgcccacttaaccaaagttaactcttgtaagctgataaatttgccctgtgaatttaacttgcttggttggaacatttgcatgttagtttcggacagggttcaacattttcatatagcattgtgttatctttctccttcccctccttgggtcacctggtagagaaattatttggttgttctgctgtctatggtcttgatcaatatttacaagacatgtatttaagtttttaaatttaatttaagatcattaataacacttgattatatgtc

SEQ ID NO: 8386 - DNA, 337 bp, Glycine max
  Clone ID: PAT_MRT3847_107582C.1
aaaccctagcagcgcgcaaacaacatgccactcgaaatcttgaaatctgtgatctctaaaaaacttcagtttttggagattaggatgtagcgacttggattctttgctgcaaatgctttgggcaagtggctgtgtgcttctgctttgtgtgctattatttattatgtggtgcctattgtcagagaggaattctacaattctcaaggacagttacttgcattgacatctgatattatcacattaagtggttacttaatctcctcatggttccctgtgtaatgattacttcaaacgagtgactatcgtgtatatgcacagagtatggagattggggacc

SEQ ID NO: 8387 - DNA, 261 bp, Glycine max
  Clone ID: PAT_MRT3847_107583C.1
atgtctatcttatctattgcctcaccaacgtacacgatgatcaatttcaatctcaattaatcgacagccattgacatgttctttgacggctcacgcgagaagaagagggaaagggaaagtggttatgagcatggatgcaagaatgggagcgacgggcaccaaattggagctgacgagctatttctaatccaaccgacaggttagacctgtgactgtcttgagcctcaaagaaaggctcatcgagacccagatcaaaactga

SEQ ID NO: 8388 - DNA, 473 bp, Glycine max
  Clone ID: PAT_MRT3847_107584C.1
acccattttgttcaaggaaaagatctagcaacggttaaagtgaatgtaacaggtgctgctgacgggtcgacaggaaggtacactgcaactccattgccggaatctgaggggcgaaaagacagagggtgaattgtggatgccttcgtaaggacggcctacctaggtgataacggtaatgaaccccacaagaaagattccgcggagggaaactggacctttgatattaaatcacactgtagattggaaaaaggttcctctacaacagcgcaatctgctagcgcaaaaaccttcaaatatgatacaattggtgctgggtcacactcttcagaagattctactgaaacggaagatcaagaaaaacccaaagagattgatgccccattgagacacagaaaagattctcaatcaatgaggctcaagctcagatggagacaaatatgtttaaattgtctctggatgatgttgaaactcct

SEQ ID NO: 8389 - DNA, 424 bp, Glycine max
  Clone ID: PAT_MRT3847_107585C.1
gttctgggaaaaaccccaacttggccgataatttttttgaaatagagaaaaaaagttgcagctccgggtaccaaaccttgggggcttggactggctttttatgaaacgggggggaaggaaaacccaaaaaaaaaacccctttttcccccttcgccaatcactttaaaaaagaatattacatcccttttcctccgccttttaggggggggggttttctttgggcaaagggttccaaaagagggggatccctttggggggcaacttaagtaataatatacgcctccatggggggggggcccaatttttaaaccggtcaggggagaggcaaaagcataaattagagctccttttatggggggtgctgatgtttgaacctaaaagcataggaccccctaaccccgccaccatgggggtcctttttttt

SEQ ID NO: 8390 - DNA, 179 bp, Glycine max
  unsure (1)..(179): unsure at all n locations
  Clone ID: PAT_MRT3847_107586C.1
gcatttctcacagaattttagggtnnctttttaaatagtgtcaaggggagaaattttaaattacactattgaatgcttttaattagtattagtatttagaagaatcaggaagttgaacaatctatttcataatccaattcgtaggtttttcaactgaatttactgggaaagattggatt

SEQ ID NO: 8391 - DNA, 390 bp, Glycine max
  Clone ID: PAT_MRT3847_107587C.1
taactagtctgcggacgcccttattttttttttttttgaaacgttaaccactagaattatatgtgatgtgaaaacataaaaataacccttcaggaaaaatactgacataggtcagacaataacctgaattgtgcacacccaacactagttcttacatgctaccagctcggaccgtagtggtttttggctccaattttgccatgggacgaggtcttcaaataacttattcctctggcttgaccggccccccagatagagcatacgatgtggtataagcttggccagggctggtaaactacctttgcctgtaacacacataccataactctgacggtcaatacatggaactacctgacggtgataaagaactgcacagcgaagaccataacc

SEQ ID NO: 8392 - DNA, 469 bp, Glycine max
  unsure (1)..(469): unsure at all n locations
  Clone ID: PAT_MRT3847_107588C.1
tttcggaacatctatacctctctaattctgtttccgaccaatctctcgcgtaacttgtgtgttccgagtaaaaagtgaattgggtttgtgcctaggaagcgccatcagatacacgatgggcttctcgatacgttcaccctatcacgaaacctgccattcacaagctaacgaaaacaggtggggagaaaaaaatcccagggtttgtctactaagaaaccgcacggagctctcgacgattttcgttcgcagaacgntgatgtctaagatagctgaagactcgtaacacccgtagctaggactcaggtangcaatcactgcatgtgctgcacatgtaatgtgagcttatgctattcaagacgcactttaagaccctactacttgatgtgcaggatacataatgaagccctgctttcctggaaagcaagagaatgcatcgtatcttctgaacttgcagagaagatttaaatga

SEQ ID NO: 8393 - DNA, 381 bp, Glycine max
  Clone ID: PAT_MRT3847_107589C.1
gtaattaaatttgcacaggcacttccacatccttggactttgtatatattaatcgttccattttagcgcacccttgagtaaaccatttatttttatgtttgttggtgcgtcactcccacaaaagcagacggttttatacaataaagtgatggtgcttccatgactacccccgttcctagagccttataggtctcaggtgcgtcatgcttgtttgccatacttggagaggcaccggctctatgtacaagtgccccagctagactaggagtgtttacactagggatactttctctctatgaaagaaactacatactgagggctgcaaggggcacatctgcttgccttttctgaatgtaggacccacgagcgaaaccagcattc

SEQ ID NO: 8394 - DNA, 377 bp, Glycine max
  unsure (1)..(377): unsure at all n locations
  Clone ID: PAT_MRT3847_10758C.1
ggaagaaggacaaaatntccttttttagactttttattccccaacaccatcaaccattgttgtgttctatactcaaaggtgcgcacacaataaatctctcaaacaaaattaccattaaaaatgcgaacaaattgcctctgtcaatgatcacgaacctcaaaaggctacctcctattctagccaaaagcatagctatgctcataagtgtatgcccttatcatctattagttaaagtagcatgatcactaagtagacacctcacacaatatcaatccatgtcacacctattaataatacttttacacaagtttcatcggaaaataacagttagacatcacatgctgaacttgacattccaccctctagcaaaaagacac

SEQ ID NO: 8395 - DNA, 442 bp, Glycine max
  Clone ID: PAT_MRT3847_107590C.1
aataaataatttcataaggatttccattcatgtttcccctttctttatcagtaaataatggtggacaaaaagtggatggaaaaaataaaaccataaatgtacatgtacaaggacttgtgtacatacactagaccaatttcttttctttttcattcaaatccactccactaaatacagcaacgttaacaagaatcagcctcaaaggttttattctctgagtgatgctaatggatatttgggttgctcaatccagtaaaatcacactttgtaaagggttagtagtagttgtcaccaaaaagaagctgccagcaaactctgctaaaaaagaagctgagtttttgccaacgaaagttggtctagtttttaagaataaaactcatcttacaagaatttaagttcgaagcctattaccaatgcaaggaactttgtgataggttatcta

SEQ ID NO: 8396 - DNA, 466 bp, Glycine max
  Clone ID: PAT_MRT3847_107591C.1
gtaccaaggtcctgtcacatacaaaaaacgcaaaaaccaaccgcaggccaaacccggaagacaagttagaagaaacaccacaataataacaccctaaccggatcgcatggccatcagactagtgccctgggcttgcagcatagtagtcagttggcctcaccatttggataggcatgatatagccaatcgcattgatcccattagacttttagaccagcgcttttaatacccgagttgtagtaagccatactggtctccttttcaaagtaatggtattactgataataatcgctatagtaagcgcggtaataattgtcagcacttgtgtggcgcgatatcctagccgcggtaatactacaacaatgcgacctaacagcctataggcccgcttatacctttgagtcgctaagctattaatgatattcattcagggtaccggaaacagtaaaggccaatggatggtgat

SEQ ID NO: 8397 - DNA, 351 bp, Glycine max
  Clone ID: PAT_MRT3847_107592C.1
cgagtctattttctttttcgacagggccgggaaatctaagaaaatgcatggcgaaggggaaagaaggaatacagctgacggaactcgggcaacatctgcttaacaaaacgaacgtaagaagctataccccctcacagcaagaaaggagaggctatacaatggcacaatacgaccgccgatagactagagctaaacgcttacaaggcataaattatccgtggggcaatttaaaccaaaaggattatttaccgcagtatgtgaacgggatcaaggtgatggggacccttaaaagactttgactgaaccatttaaaaaaaaagcttcaattaattgattttgccggacgcgtgg

SEQ ID NO: 8398 - DNA, 152 bp, Glycine max
  Clone ID: PAT_MRT3847_107593C.1
aattagcatccctattatggcgagggcatagtactccgcattgtttgtgacatgatggtacctgggcacgtgtatctacaactgctctgcaatcttatgatctgacgccctatgctatatatagcgttacagatagagccccataacaaagg

SEQ ID NO: 8399 - DNA, 465 bp, Glycine max
  Clone ID: PAT_MRT3847_107594C.1
aaaaaaaaaaaaaaaaaaatttaaaaaaaaaaaaaaaaaaaaaaaaaaaaaaaaaaaaaaaaaaaaaaaaaaaaaaaaaaaaaaaaaaaaaaaaaaaaaaaaaaaaaaaaaaaaaaaaaaaaaaaaaaaaaaaaaaaaaaaaaaaaaaggggggggccttttaaaagaaccaaatttaaaaacccgggatttgaaaaaaataattttttttttggggccccaaaattaaaatcacggggcgggtttttaaaacagtggaaatggaaaaaccctggggttccccaaattaaagcgcttaaaaaaaaacccccttttcccaagtgggataaaaaaaaaaaaggcccacacaaaagtcttttcaaaaatttggccaaccttaatgggaaatgggaccccccctttaacccccctttaaaccccggggtgggtggggttaccccccaggggacctttaaatttggcagg

SEQ ID NO: 8400 - DNA, 489 bp, Glycine max
  Clone ID: PAT_MRT3847_107595C.1
ctcgagccgcttcccctctcgctgcgtggcttgttcgccttggtggtttctactgagtcacaaactcggtgagtgagcgagtgaactcaatggcttcttcctcgcgcgcaaggagtagctcaccgttttcttaccgaaaaccttcgactccttactcttccacttcttcatcctcttccttcatcaacggaaggttaatgcctcgctccagctcttcctctacgtcgtcgtttttcaactccggaggccgatccattactccgagtcgcggttgcagcgactcggcgtatcacggttcgcgcggttacgccgcccgttctccggtggcgttcggagcggaggagctgattgcggagcagatggtggattcgtcgaggaccggcgatagcatttcggtcacgattcggtttaagccgttgagtgaaagggaatatcagagaggggacgagaacgcgtggtatgccgatggcgacaaaattgtcagaaatg

SEQ ID NO: 8401 - DNA, 445 bp, Glycine max
  Clone ID: PAT_MRT3847_107596C.1
gttgagtggaatcacaaggatgtaggcattgaattggagaatgatggcacaaaattccattgtcgtgctctgctactaggactctatctactagtccatgttaaaccacgcatctagaactaatcacacattactcggcctgccagttgctacaccagatctggtgcaagcattccagccattgtggttaaacaccgcagggtccattgcaagcgagctagcttattgccctaatgatactcgatgcactgatttgcttgctggcctcaggatggcatattcacattgcggagtctcacgaataacaactgatgacccactatctatgcatcttcactgccattatccttttaccaggctcacacacgatcaatcctgctgtaccaactgattgccctacccgtgggtaagtgccccttctagacacccatgaattcacgttcgc

SEQ ID NO: 8402 - DNA, 382 bp, Glycine max
  Clone ID: PAT_MRT3847_107597C.1
ataatagatttgccttaaactccaatggaccaacctaacatgcataagttatggtccctattgagcgataaatcgaaaacttatgcgaggaggggcgtgggccacgcccctcgatgagttttattaatgggccagagtgtctaactcttgacccctaggcacaaatatcatgggatgaactaccaagccagaatccgactggattggccgattacattcaaacgaataggatcaggccctcccggaggcataggtactattgcatgctgatgatcgactacgcgagacgggtgactcattctgattgaacacctattgttctgtagctgactgctcatacgatttccctagagtagttacttgggcactctattgcacttga

SEQ ID NO: 8403 - DNA, 261 bp, Glycine max
  Clone ID: PAT_MRT3847_107598C.1
atcttttataaagttgattgcactctttatcgttataactcgatccaaaatgatccttctatcacttggaacacaagacaaaaaatacgaagttttatcctttacaaccctaattcccttttggattgaaaatctcatagccgctcttgtaacatcaacacggtactgccatttgctttactgatgatgattatcatagcagcttagatgataaatttgtcctcctgctaggtatggataaaaaaaaaaaaaaaaaaaaaa

SEQ ID NO: 8404 - DNA, 388 bp, Glycine max
  Clone ID: PAT_MRT3847_107599C.1
gaacccagagaaaaaaaaacatcatttgaaccaagtgaagttgagttacaagcttataaaatgggtttttcttggataagagggaagtgcattggtaagggcgcgtttggcaccgtcagcgtcgcgcttcgcaaacgcgacgatcaaactcaaaatttcgcggtgaagtccgtggatttaaaaacgggtctcccgggtcagctcgaagcgttggagaatgagattcggattctccggcgcatgtcctctccgcacgtggtaacttttctcggcgacgacgccacgtgcgagcagcggaaccttcacatggagtacatgccacgtggtacgctcgctgacctggacgctgacgtggacgaagttttagtgagacgctacacgttgtgcc

SEQ ID NO: 8405 - DNA, 304 bp, Glycine max
  Clone ID: PAT_MRT3847_10759C.1
gacaagatcacgtacgaaatatttctacacactactctatcacttacattacacgctgcagcttttctgatagtaggatgaactagctagatatatatgaaattcctaattaatttgatacatggaaatgcaaacaaactagctcgatcgatcacgagatcaataccgaaaaagaatgaatgtcctgatagctagtcaaggatattcttaccttaatgacttgcatgtgtaacttaaaaatatcaagtgttttgaaattgtttgtggtgtgttgaagtggtttttggatcactgcggattatat

SEQ ID NO: 8406 - DNA, 452 bp, Glycine max
  Clone ID: PAT_MRT3847_1075C.1
ggaaagaacaaataaattacactaattgaacgtgcaattcacaaaatggtacgacaaccttgacataattccttaagccaaaacgaatggaatatctattacaagatttgctgcgagaattttaattctgggccttttgttcttgccgtctcaagctacagggtggccacacaaaatgaaaccttgagtgaggcattgagcattgtgagtttgatctggggctccaaacacaatcaccagaccctcaaaggttccaggttttgaatcatgaacagccacgtttgcaccaaacgtgtgaggaaaacccaagggccaaaaacctgctgaagacaatgtttaaaaaacaataagaaatgaactggctgaactcagattaaaaaacacctggcaaaaatgagttaggaggctattgttctccccatacacgagagttaaatccttatttgggatgg

SEQ ID NO: 8407 - DNA, 402 bp, Glycine max
  Clone ID: PAT_MRT3847_107600C.1
ccctcgcgttcgcttaatagtaacttctcttgtatttgacatcgattcattcgctagaaaattttcggccgaacaaagtgacttcactctaagtcgcttttcagaaatttttatggaaatggaactttcaagcatatttcttggtcgcttttctttttctgacttggttgaggtatggaatgcgttctctttcaaagtttatataatattattgtataatatgacattgtcgaggggttttcgcgaaatccggaaaatctgaatttgcgacttttttaattgaaactttacttcctttttacagttttctgaaaatctgttcatctattgctcacgttttatgttcaccccattttcgagcactggtttctgtggaaatggtgatcagattcatttcaactc

SEQ ID NO: 8408 - DNA, 238 bp, Glycine max
  Clone ID: PAT_MRT3847_107601C.1
taaggtcttgtgatgatgaaagctataattctattcttgactagtaaacatgtttatggtcttgtttaacactggcatagtgttctgtttctgaaatattatgctagtttcattcgtggacctcgtgtgaaactaaactccataaatttcattcaggaagcaacttgtacttctggctgtccttcgttcctagcattttgatgcttatcattggtactagattgcatcgagtggtagt

SEQ ID NO: 8409 - DNA, 155 bp, Glycine max
  Clone ID: PAT_MRT3847_107602C.1
atgcacgccctcctcagctacgaaagctggtaaagcggcttgagcgaaactactatttgcagcgttccctcatcaaaggacaaaaggggggggctgatttcaatctgggggcaccgcccaagaagatactgaaggaatataaggctctggcctca

SEQ ID NO: 8410 - DNA, 395 bp, Glycine max
  Clone ID: PAT_MRT3847_107603C.1
ggctcgagctttctggacgttcttttttcttaccggcttccctagtcacggagattgatctgtgcaggctgcttaagaaaagacaccgtggtgctgatcggctgcatggctgctggatatgtggtgggcccaacaaggccaggcagtgctctggacggcccctgcattgaggggcctgtggatgacatcttcaaatcccccattgccggatggaacagaggccagataactatctatgaaccaggccttggtggcggggggaagccatgcagaggaaagatccttctattcaacactgatgttgagacacatgtctatgaagcacacatactgtggggccatgagcacgcccagacaatagctcgtgtcctaggagccaggagggtcgtggattt

SEQ ID NO: 8411 - DNA, 405 bp, Glycine max
  Clone ID: PAT_MRT3847_107604C.1
ccaaatccccggcccgtcccacccccccggataaacccccacccccacaacacaaacaacaggggggctttaaaaaaaaaacgggggttccaaccacccaagccccaacacagagacagaccaaccggaggggaacacacccaagagggagcacccagccggaccccaacgaacacccccacgggacccagcacaacaaccaacacctgcaacccaacaagggggacgagacccacgcacaggcccaacaacacaccacacaacttgcccacctccccaaccaaaaccaccaacccgctggcagaaagcacaacgaggaacaccgagcctacaaacaccagccaccaccccacaggcaccacgcaaaacaggcgccagcacacacacgcgagaaaaaccaaaggg

SEQ ID NO: 8412 - DNA, 148 bp, Glycine max
  unsure (1)..(148): unsure at all n locations
  Clone ID: PAT_MRT3847_107605C.1
agtatttccaacttactgataaaccaaattgatgccctactttctaccggtccacaatggccaaccccgaagaggaatatgaaaagaagggaatgggcanaaaatgaaaccagtgaaaactgagtcaaatatttcaaggctaactcct

SEQ ID NO: 8413 - DNA, 354 bp, Glycine max
  Clone ID: PAT_MRT3847_107606C.1
atgggcaaaccccggaaagacttaacttttttgtggaaaagggaagaatcccggggcaaggtttaaaaaaaagccccccctttaaaaccccaaaactttggtgggtctccccccccggggaaggggtttcccaggggtaagagtttcccccccgggccttggggccccccccggcctcgggggctaaaacaattcccccagttggggcccccccaaaaaggcccttggggtttaacaattttgggaaggcaccccttttggccaaatctccagaaagccccaaagtttttggggggaacaaatccctcgacggtttttccccggaaaatgcttccaatttcaagggcctccccc

SEQ ID NO: 8414 - DNA, 510 bp, Glycine max
  Clone ID: PAT_MRT3847_107607C.1
gcctattgtagattccgatttgagaaagattggcgccagagtcctcgaaaccgctaaacaactttgcatcaacaaatccgtaaatgatgtgacagcagaagtggtggaaggtgatcctagaaatgttctttgtgatgctgtagataagtaccgtgctgcaatgttggttgtgggtagtcatggttatggggctataaaaagggcggttttaggtagtgtcagtgactattgtgctcatcatgctcactgcactgtgatgatcgtgaagaagccaaaaatcaaacactgatctgtaatggctgcgtctatatagtacaacaataaacataatcctttcagccaaagaagagagaaagaaaataatgttcacagtttatttttaaagatggaaccatcagaaaatatgtacgtatcaggactttaccttacattgtacacgaaaagttcttgaactgatgagttcaattccattactgctcttttcatccttaataaaataaaatagtaaaa

SEQ ID NO: 8415 - DNA, 698 bp, Glycine max
  unsure (1)..(698): unsure at all n locations
  Clone ID: PAT_MRT3847_107608C.1
annttacaacaatcatgcatttggtacgagcccggcaatccaattagtaggatttaggagcatcaaatacataaactcacagtgagtaatgacaaataatcaaacacaacacaaaaagcagaatacaaattaagtttaagccaggagggagaaaagatgaaaaccaagcaattagggtggcgtaattaattggcaaaattgtaaatttagttttcgtagttgtctctaatttcgattttgatctctctttaaaattattcacgcattgtcttccttttttattcaatcacgcactcttagttcccaagtccagatttagatattgactgttacaaaagaatattgatggtcacgtgtcacgtttgattgaacgataattgccacttgttatgttctgattgaccaatgattacaagaatgcatttcatcgtccatcgagtcaacatctcatgacacgtgacagttatcgtccaatcagaacgtgacacgtgacagtcaaaattcatttgtaaccgtcaacgtctagatctagatttggagattaagactgagtgattgtataaaaaaaagacaaaatgcgtgaataatttgaaagggagatcaaaattgaaaattaaagacaactaggagaaccaaaaatataattttacctaattaattagctagggacgaaaccaaggtcttggagaaggtatcac

SEQ ID NO: 8416 - DNA, 873 bp, Glycine max
  Clone ID: PAT_MRT3847_107609C.1
ttttttttttttttttttggaattaaacacatcaatttaataacttttttgatggttccatacttccatctttaaaaataagctgtacctcaacgtatcaaaccataaggacaatatgtagtatccatacaacaagcatagttacgaatttctgtgaacattattttttttctttggctgaaagggccggttatgtttattgttgtactatatagacgcagccattacagatcagtgtttgatttttggctttttcacgatcatcacagtgcagtgagcatgatgagcacaatagtcactgacactacctaaaaccgccctttttatagccccataaccatggctgcccacaaccaatattgcagcacggtacttatccacagcatcacaaagaacatttctaggatcaccttccaccacttccgctgtcacatcattcacggatttgttgaagcaaagttgtttggcggtttcgaggactctggcggcaatctttctcaaatcggaatctacaataggcaagatctcagcggctcctgcatacacagggccggcgaagcccacggcggaggtggcggtgggccttgagtggatgagaacgagcttgaagattgggctcgggaagaagtgatccaaagcccaattcagcgcgtacgtgctctgctcgctgtcgtctatgcctatcagcaccacttgcttctccgacgacgacgacgacgctgccatttcaaaaagcaaaactctctttacttctctgtacttggttgtcgtctatgcctatcaaaccaaacaaaccactcgtcaattattgaatcagtccttcactatggaagccgtgtttgaaaacgacgtcgcggattctcgccctttgcg

SEQ ID NO: 8417 - DNA, 625 bp, Glycine max
  Clone ID: PAT_MRT3847_10760C.1
tttctgttgcgtgggtttgagccttaaaatgcttcttctacgtcaactttgccttctgttgttcgctgtgttttatttgattgatgcgcgaactcaatccgtcgcgtgaaaggacgtctgctgtgtggtacggcaccggcacgaaatgttcgggttaaactgtacgatgaagacgctggtgtcgacccggatgaccaacttgatgccggatattctgacccaaatggcaactttcaactttctggccatacctcagagctgacgaacatcgacgttgtttttaaggtctaccacgactgtgacgatgggattaagcccggctcgcgcaagttgaagttcaaaattccgaattcatatgtcacggacagtgcgacgccaaagaaaacgtttgacatcggtgtgctcaacttggagactgtgttcaaggacgaggaacgcgagctgatcgtgaccatgaagaagaagcggagaagccaccgttaccaagactttttggacattttgccatgaaaaagtttcgagaaaatgacaaattgccaagaaaattattttcaattttaaaaatggaagcggtatttaaaatggaaatattgattattaaagttaaaataaattgtaaccattt

SEQ ID NO: 8418 - DNA, 142 bp, Glycine max
  Clone ID: PAT_MRT3847_107610C.1
ctctcacccttgggataatatccactctgatgtgtcaatagacgtgaccaaacatcatacccctaagtcattagcagacaatgatgctcttaaggctgtcaagtttctaagggttctttctgatgtctacttcatggaacgt

SEQ ID NO: 8419 - DNA, 1198 bp, Glycine max
  Clone ID: PAT_MRT3847_107611C.1
ttattttgaataactagaaattgttcaggctagtagtgcattgcaataaactagtacaatatttttttactattttattttattaaggatgaaaagagcagtaatggaattgaactcatcagttcaagaacttttcgtgtacaatgtaaggtaaagtcctgatacgtacatattttctgatggttccatctttaaaaataaactgtgcctcaacgtatcaaaccataaagtcaataagccatatccatacaacaagcatagttacgaatttctgtgaacattattttctttctctcttctttggctgaaaggattatgtttattgttgtactatatagacgcagccattacagatcagtgtttgatttttggcttcttcacgatcatcacagtgcagtgagcatgatgagcacaatagtcactgacactacctaaaaccgccctttttatagccccataaccatgactacccacaaccaacattgcagcacggtacttatctacagcatcacaaagaacatttctaggatcaccttccaccacttctgctgtcacatcatttacggatttgttgatgcaaagttgtttagcggtttcgaggactctggcgccaatctttctcaaatcggaatctacaataggcaagacctcagcggctcctgcaaacacagggccggcgaagcccacagcggaggtggcggtgggcctggagtggatgagaacgagcttgaaaattgggctcgggaaaaagttatccagagcccaattcaacgcgtacgtgctctgctcgctgtcgtctatgcctatcaccaccacttgcttctctgacgacgacgctgccatttcaaaaacgacaaccaccaccacaccacaactctctttagtcttttaatcattactccgatcccgaaggccaacacaataggatcagaatcctgtggtgttatcccatgctaatgtatacagagcgtaggcttgctttgagcactctaatttcttcaaagtaacagcaccggaggcacgacccggccagttaaggacaggagcgcatcgccggcagaagggacgagccgaccggtgcacaccggaggcggaccgatcgacccaacccaaggtccaactacgagctttttaactgcaacaacttaaatatacgctattggagctggaattaccgcggctgctggcaccagacttg

SEQ ID NO: 8420 - DNA, 725 bp, Glycine max
  unsure (1)..(725): unsure at all n locations
  Clone ID: PAT_MRT3847_107612C.1
ataggtcaaatacttaattgaattcacccaacaggagataagctgttgcgattcaaaaaaactgtaattattgtttgatgatggaacattttaatatagctactataatccaaatggtcaaataagatcctataactaagcacaaaaatgatatcttaaattacacgtatcaattttgccggttttaaaagaattcagacatttacaggcaaaaagctgtccacaactcaagttttttgtccaatcttatcaaaatgggagaccaagcagcaaactcttaacagcagcaggaaaggtaatagatgcacaaagctagaaacctgctgccagaaacaataatttgtgcaaaatgacagtttttgaagggaaagaaaaataccgtatctattcggaggcaaggaagatgattcatggattattgtgtttcgtgctccatcatccctgtatccttatataagggggtgaaaactaagcaggatgatgtcattggctcgtctgcagaactcttatgatctatgaaaagcaatgactgaattccaagtatgcttgaaggaagtaaggaacggtaacatgcgtcatctctggaatcagaaaatcccttgaattgctccaggagggagtctacaatcacctatatgtccatctttctcggcgagttaaattgacgcaacacaaaattatggtacttgcctgatttnnnattgtcagnnnnntcatgtagtatt

SEQ ID NO: 8421 - DNA, 211 bp, Glycine max
  Clone ID: PAT_MRT3847_107613C.1
cccacgcgtcctgtgaagctgggtcattcctccgcggtatggatgtgaaccgggtaccttctgtggttgggggcgatgagtaagcaggtggttcatcgtcaaacagcacggattctatcgtcagtggaaggcgcagcgagagggaaaccactggagaagaaaacgacacagacagagcttgtgccatgtgcatcatcagcgacgaagaaga

SEQ ID NO: 8422 - DNA, 1793 bp, Glycine max
  Clone ID: PAT_MRT3847_107614C.1
gaaaatggtccatgtctaaagattccttgttccccgttttaatctcttggctctgagtcagtcaaagtcaaagggagtctcattcattctgtacaatttgtgtgcacaaccagggaacccacaatttgaggcaaaagagtgaggcattaggggccaactatatcattcctctcattgaattccttccatgtgaacacttcacactatcttcttaatttgaggccttctttcatcatgactagtcactatctttcagccaagttgttttccacagttgtgaccactggccacagatgcaccactgtcgcaaaattatcacaaacaatagctatcacattttgcatgcaaaacacggtatagtccccatttgcactcttggtgcatagagagacacataggatggatttgttggcagaagattggatcattttaggaacatttcactgctacacaatgacaaaatataattttcttaaacaccaattttgttagaaactgaaaacttaagtgtgttcaggtttttggacaaggctgctattaaagaagtcagtgctggctccacaagagtaccattgacagtatcccaagtggaaggagcaaagcttatctttggcatggcccttgtatggctagtgacactgattccaagcaccatttgggcacaaatcaacactctttttgtgaaacaaggcaccactttggacagaaaccttggccctcattttaaaattccatcagcctctcttggaagctttgtgacactctccatgcttctctcggtgccaatgtatgaccggtttttcgtgccgttcatgcgccagaaaaccggccaccctagaggaatcacattgcttcaaaggcttgggattggattttcaatccagatcatagccattgcaattgcctatgtagtagaagttagaagaatgcatgtcataggagcaaaccatgtagcctggtcctaaagatattgtccctatgagtatattttggttgatgccttagtatgtactaatagggatagcagatgtgttcaatgccattggattgctagaattcttctatgatcaatcccctgaagacatgcaaagtcttggaactacattcttcactagtgggatcggtgttgggaacttcttgaacagctttttggtgacaatggttgataaaataacaggaaggggtgacaaaaagagctggataggggacaacttgaatgattgtcacttggactactattatgggtttttgttggtcatgtcaagtgtcaatatggtggtttttctttgggtttcaagtagatacatttataagagggaatcaataagggtcaaggagggtctttgtgttcaaatggagggaggaaacccaactttggacgcctctcttggtttacaagtgtgataactagctatagggtggtggtaggcctaggccatgataaaataaccaaccagtagtatcatattaaatctaaattttcttgacaaattctgcggcaaactgataagtgattgtttatttgaatttaattggtcccacctataagtaaagttggagccaaataaattcagatacacaagtttgggtagaatttatgaatgtataaattaatattaatatatatatatatatatatatatatatatatatatatatatatatatatatatatatatatatatatatatatatatcactagtcactacaccgtgtgtgctattttgaaaaatgtgtgccatgatggtatttttttttcctacttttgctaataaaatttcgtgtgaaaatg

SEQ ID NO: 8423 - DNA, 293 bp, Glycine max
  Clone ID: PAT_MRT3847_107615C.1
ataatctcatcccaaccacaaatattaaaataataatactaattacttatgcgattctaactactcatactacttactcaggggttggatgggggggcatctacctggggaaatttaacaattttcatggaacaaaggccctattttacaaaggtaatttcctcctacattatcacaataccataccgaagcatatctaaatactattaactacggtttaaaaccatgatatacctccaaccttcgcacgcaatttcttatcagaacgtttaaaatccactactctagcaaaa

SEQ ID NO: 8424 - DNA, 786 bp, Glycine max
  Clone ID: PAT_MRT3847_107616C.1
ggggataacaaacaagtctaaactatccattggaggctgtgggaatgcaatgaaaagtggtgcctgtgaaggctgtggtgctggttgtggcggaggctgtggaaatatgattaaaagtggtggttgtggttctggttgtggtggaggctgtggaaatttgattaagggtggtggttgtggcggttgtggtggtggttgtggcggaggctgtggaaatttgattaagagtggtggttgtggtgctggttgtggcggaggctgtggtggtggttgtggaggctgtggaggagggtgtggaaataggttggagagtagtggctgtggtggttgtgggggaggttgtggtggtgatcttatggatagtaaatgtggtattgatgaacatttcaatgaagagctaaagtatgtttcatgattatgcatgtcactattgtattgtatatatgcacatgtgtctatgagcgtctcaatttagcttctctcccattgatgtctttcttagacaggtagaaaaataagcaggagagagttgaatgtgtaataatcaagcagaggtaatgactctcagttaattacctgtgtgtccttatgctttttctgtttatgcatgcttcgatatgtatggatattaagatattttcaggtggtatagattctaccatttttatttttttttaatattcatgtggaaattcttctactcttttttattttttttccctcatgatggaatttatggattttgatagctaaatttgcaaattgcatatatggattttgatagcc

SEQ ID NO: 8425 - DNA, 151 bp, Glycine max
  Clone ID: PAT_MRT3847_107617C.1
aaaaaaaaaggtggtttttcctaaaattcgtgttgcataatcattagtgactggtcaacgatcactacgtgtcactgtacttggcatttgctttctgtcagtgtgttcctcaaggaagagattcatttggatgtgaaaaacttatttataa

SEQ ID NO: 8426 - DNA, 405 bp, Glycine max
  Clone ID: PAT_MRT3847_107618C.1
tttttttttctttttttttttttcttttttttttttttttttaaccagaactagaagtagcccctgcattaaatcaaaacccctcagggtataccgccataaggagggcctatggggaaaaggaaaaaggggggttcacaaggatataggggggggggggcgaatattaccaccggggggcaggaaaaaaaatcacgggggccagcactagagtccccacccaattccccccggggaaaaaggcagcaaaaaaataaaccccctagaagcgggggggccaccaactaggggggtataccagctttactttgcttgcaacagggggggaggaaccacctttggaaaaaggccagggcccctcaaaaacccactaggcccttggataccacaaagccgcctcttttg

SEQ ID NO: 8427 - DNA, 224 bp, Glycine max
  Clone ID: PAT_MRT3847_107619C.1
ggacccctgggcgaacccttgttattttctttttgttaccggtcaagaacctaatttcccccaaagtttcccaaaatgaaacccacaaaagcttgggaaaaccagattcacagccgaaacttgtgttaattgcgcaaccccccaaaaaaagcgaaccacaaacaaacggggacccccccgggaaaaaaaggagggaccaaaaagggatcaaaaaaagaaacccc

SEQ ID NO: 8428 - DNA, 386 bp, Glycine max
  Clone ID: PAT_MRT3847_10761C.1
ggataagctttttggttgtgccttgttttcattccaacacgtttgaaagcagtgccccacgacctatgaattttgtccttcaacgaaggacactttctcatagccacgagcattcagtttccacccatggctgctctcacttctctatctttctcagcagtgactcattgctcagaaagaaaagtgaccctttcctccactcgctttctggcttcctcctcagagatatttgggttccgaaccgatttctcgtaccactatgttggtgttcgagcttccaattccccatctaaaatggttgttcaatgcatgtcttctgctacagatgttcctcccactgtttctgagacaaagttaaatttcctcaaggcatataagcgaccaat

SEQ ID NO: 8429 - DNA, 263 bp, Glycine max
  Clone ID: PAT_MRT3847_107620C.1
cacggagccagagaatcaatgtgctggagcatgtgctaatcatccatgcccatctaaaccatgtaccaacgtacagtgtcgtctcctgcccggtaacgatgtatctatcaacggcagagtatgtgatgaggtatctaactgcctgagagtaataattgtttcatttatcaatgtctgggaacacccacgaatatcagcaatgattatatagcattacccggtccatatcaatccatatgtagtaatagcagcaacctctgtta

SEQ ID NO: 8430 - DNA, 594 bp, Glycine max
  unsure (1)..(594): unsure at all n locations
  Clone ID: PAT_MRT3847_107621C.1
ccacgcgtccgatgacacgctctgcccagagctgctgctgctgctgctgctagcttcgacattcaggttcgtttcccgatcctgctccccaaccaccaccatgggatgcttcttcgcttgcttcagagcccgcgactcctcctccgccaccgcccccacagctacggtgccttcttctccttccggcaaacacaaacctaccgatgttgtggtctctcgaaatcagttatccactttgtttctatccgaagagagagaaaactctgttgtgcgtgatgatcggaagagttttgaagtgggatctcagaaaggtgactatgaggccaagtttctcaaagctggtgataccttggcaaggaccccccttgagaaagcccaccctgttggtcaacctttcaatccctcaactcctgtaaaatgttgtgaggaaggggggaagagaactgattccttatagcanacaccaagcagctgtatctccaatgtgctaagtactcaatgtgacactcttgattctacggaaggaaataggacaggggagtcttcacagtttggttaagaatgacaagaatacagcttctgttttaccttggc

SEQ ID NO: 8431 - DNA, 881 bp, Glycine max
  unsure (1)..(881): unsure at all n locations
  Clone ID: PAT_MRT3847_107622C.1
gtccggnaattcccgggtcgacccacgcgtccggagagagagagttgaagtaataagactaagcaaaaccaaaggagaagagcattgtagagaaaataaaaaaaataaaaaatggaaggagagaaagggagatgaatgttgttacttgttattagtggaggcttctgaagagagtgaagagtagtagcgtgtgttgtgttgttgttgctgctgctgctgcaatgggaactccaccaacggatgagcttgtgaagaagatccaacagctggaggaaggacacgcgcacctgaagcaagaaatgtcgaaactaaaactctccgatgtgagacacggccaccatcgccagaggtcgcactccgtctctccgcagcgttctagattgggagctccgccgaagaagcggagcgatgcaccggctgctgcgtggaagcgaggttcgtgttcttttaaacagtcgtcgccgctgcagagggagagtcgcggtggcggcgatcctcaaattcacggcggaggagaagaagctgctccgcgccgtggtccctccgccgtcaatttcacggaacggcagtatcttaatattttgcggtcaatgggacagtccgttcatatattggatcttaactgtcgcataatatactggaaccgtagtgcggaaaatctatatggttatacagcagaagaagctctaggacaggatgggattggactacttggagaccctagggatttggacttggccaataatacagtgaatcgtgttatgatgggagagagctggacagggcaatttccggtcaagaataaaacaagggagaagttgttagctgtagcgactaatacaaccttttatgacgatgatggaaacttagttgggctaatt

SEQ ID NO: 8432 - DNA, 479 bp, Glycine max
  unsure (1)..(479): unsure at all n locations
  Clone ID: PAT_MRT3847_107623C.1
cagaagacgacagaaggggtataagtgtaacaagctcaattttgcacaattcacataattttataactcattgcgtaacatcacttatctcaagaatttaatcataaaatcatatttcacacattcacattaatcacttgttcggaacaataaatttcaagtacaacatcttacactcacacaattcattactcaccattacatagcaagtcacaatgatcattacacaagcgttatgcaacatatacattaagactcaatcctatatgcaacgtggtactatatcaatgaaaaacaacactaaagcaccaaagagtacataacaagacacactacacaatgagtatgttaggtcgctctcactaagtgaaatcataaggtgactagtcatggtcactctgttttgcgagaatgctccaatcatatgggatcaacataggcttaaaggagtactcanatngagtatatntactcccaaa

SEQ ID NO: 8433 - DNA, 419 bp, Glycine max
  Clone ID: PAT_MRT3847_107624C.1
cccacgcgtgcgatttctattacatacatttagcagctaggatgagcaagttactactgggtcttgttgctgggttcgtggcaacctctgtcaccatggagatgataatggtacccaaaaacgtgagttcccaaaacatatgtgattacattttcactcaagacttatacaatagtataatcagtcaggctgatgatggttgcgcttggaagaacttctactaacaatatgctttctttaatgctcacaatacctacaatgagtttggtaggctcggtgatcacgatgactgctagcgtgaaggaatacctggttttgcccatataaccctttaaacaagacatttttgctacatagactagattaactgtgcatcatgggactactgtgacgagagcagcaccgattacccaattgcc

SEQ ID NO: 8434 - DNA, 145 bp, Glycine max
  Clone ID: PAT_MRT3847_107625C.1
tcgatttttcaccagttcagtgataaactcagaagctaggctagacattttcagctttctaccgggggacgttctggttgcatcgttggatgcattcagtagagtgtgcgatgccggtgaagtaactggaaaacatgtcatgtca

SEQ ID NO: 8435 - DNA, 538 bp, Glycine max
  unsure (1)..(538): unsure at all n locations
  Clone ID: PAT_MRT3847_107626C.1
attagaattaaaattttaagcttaaggcatgtataatcttaatatgttttggaaatttacaacgaaatnngtttgtcaaacgggcaactaatctttgcaanngggcaattattatcaaaaaaaaaaaaaaaaaaaaaaaaaaaaaaaaaaaaaaaaaaaaaaaaaaaaaaaaaaaaaaaaaaaaaaaaaaaaaaaaaaaaaaaaaaaaaaaaaaaaaaaaaaaaaaaaaaaaaaaaaaaaaaaaggggggccccttaaaaaaaaccaaattaaaaacccaggggccgggaaaggaaaaacttttttaaaagggccccaaaaataaattacagggccgggttttaaaaaccgggggaaaaggaaaaaaccgggggaaacccaaattaaaccccttgaaaaaaaacccccttttaccagggggggaaaaaaaaaaaaggcccccaaaaaagccccttcccaaaaggtgccccaccctaaaggggaaaaggaacccccccttttaccccccataaacccggggggggggggggggtacccc

SEQ ID NO: 8436 - DNA, 530 bp, Glycine max
  Clone ID: PAT_MRT3847_107627C.1
ttttaagcgattaacaaaagtgctcattgttgataaaaaaacacaaaatcatatggtacaccttagtgcatgtgatgcccggggagaaaaaccccggaaaataaaagtcaactcaaaattaaaacacatgatctttcatcaacctcgtcccatgttcttttttttagtttttggcatggttttggaagaagagctagtttttcttactcttagaaggataacccccattggacctttgtatgggaatgacatcacataataataactagtacatgaattttaatggtttgttgttactatataggactaggaggaggacccaaattctaacgtaacatttctggtcccacgatgactcctaacggttcgaacgctctgtgggttgttggaaggtgtctccgagttccgacgcatgacggtgatgagatcgacgaaagcactgagaatgaacttgtgcgatttcttctcattgaggttaaggtaacaaaacaagagctcctccatgaaatcccaatcaaccacgctttcat

SEQ ID NO: 8437 - DNA, 280 bp, Glycine max
  Clone ID: PAT_MRT3847_107628C.1
gtaccgggccgggatttccgggtcgacgccacgcgcccgcgactggggggatatcagactgctgaatgtactcatcgctagttatggtatttggaaagtagtctcgagtcgaggatctaggcattacccgatttaatatactttgccaaagggggtgctgaaggggctaccacaccggcgagatcagttcatgggacaggatttaagaagtatccatggaggttcagagaatccagcagagacaattgccaataatttgacagagtacataaataaacaa

SEQ ID NO: 8438 - DNA, 358 bp, Glycine max
  Clone ID: PAT_MRT3847_107629C.1
ggaggcaaaaaaaacccttaaaatttctcaatactatcaaggttcaaaccccttggggggaaaaccccctagggggaaaaaaagggattttttatcccacaaaacaaattgaaattaaaaaaattaaagcctcgcagcacttatcctggttcaacaaactatttcaaaaaaaaacccgaggaaaagggggttttcgagtatcacttgaaaggggaaaatctcggaagcttgtctctaaaatagaacaattttgctctcctgaccttacgggggctaaccactctgatttctttgagggtgggggagaaaacggggaaaactatttcaacccctgggccagcaatgattcttcggattc

SEQ ID NO: 8439 - DNA, 631 bp, Glycine max
  Clone ID: PAT_MRT3847_10762C.1
ccacgcgtccgcccctccctctttattaatacaacacagccaccacttgccggaaaatcttcgacggtaactttttccgatcattactctctttgtttggccttttcgcttcccttctttcaaacgctttaacttctctcttccgttccgttccgttctcgcatcatcttaaactagggttcccggaaaccctagccttggttggttgccatatctgctccatgagtttgggagaaaccttactggagctattcagattcagctggttcagataaacgaaggcgtttcgctctgcgatttggtgttttttttttcgaacatgaagagattgaggtcgagcgaggatctctactcctacggcggagataagagtaataatagttgcaaggattcgaacaatcttaaccgttcgttttcgtcggcgcagcggagcttttactacaagcaggagaatgcgcgcaagggtttggtctcgtcgtcttcgtcgtcgtcatcacggtacgagagggatcgaacggtggaggaggatcgggagggttcgcggctggttcggaagcgatcggagcacgatttcgagggtttcgatcggaggaaggggttcatttcgaggctttcgatcggagggagttgt

SEQ ID NO: 8440 - DNA, 351 bp, Glycine max
  Clone ID: PAT_MRT3847_107630C.1
aggcaccggcccggaaaacccgggacgaaccacgcggactattaaagcgagcagcaaacacacaaaggacagggggaaacgacaaacccgaaaggggaacaaacaacccagcgcaaaagcgaaaccccccaggcggaaaaaggacaagccagacacagagcgacaaccaaacagcaacaagaccaaacaaacgaaaaagacgagaacggggtgacagatgaaccaaagggcaaaaggacaaaggcacggaccggagacaccaaaacaaacaaggggaaagcaaggaacgcgggacagggcccaacaaaaagaaaagccaccggggaaaaaacaaggcaaaccgcacgagcc

SEQ ID NO: 8441 - DNA, 204 bp, Glycine max
  Clone ID: PAT_MRT3847_107631C.1
ttgggaagggcatcttaacgatcacatctagcatagagctgcttataagagactgtccacaaagctcatgaagcccttttggcaagagccaaagctatctcagaggcaactcctgaaacctagaacggtatcttacagcttgctgacggtgcctcagagagctctctatgtttcgaactacagctactgatcaatggaaggcta

SEQ ID NO: 8442 - DNA, 423 bp, Glycine max
  Clone ID: PAT_MRT3847_107632C.1
caaacttatcgggacacacggcctagcacgaaaactggcagacggtgtccaagcgttgggaggcaaatttgtctatcctacagagaccaacatggtctgggtcgaccttgcaagcctggggatcccgctaaaagatctccaagcagccggcgaggctctcgaacagccgctcgtaattcgcggcgcacggttcgtggtgcatcaccaaataaccgagcaggccatcgacgaccttctcattctcttcaaagaattgcaagacaaacaccgtgcaaagcaaggcgacctcgacgcgatcaacgaaaagaggccgcaggaaaagctgattgctggacagtactagcgatcaggatcatccgtgtgtgtattcgttgtaggtatatacaactcgccagcagatgacaactataaacctcgtagtga

SEQ ID NO: 8443 - DNA, 181 bp, Glycine max
  Clone ID: PAT_MRT3847_107633C.1
agcaggaatcgggtcgaggagtaagacacatccatttccactttatttaccatgtagaggacgtgtgtggaggcttcaggaaggtgagaaggatgaaaaggaacatgacgagcgtgaattacaaccacgttcattttcactaccagttgatcatgaatgatatacagtttaaggaaggcat

SEQ ID NO: 8444 - DNA, 2174 bp, Glycine max
  unsure (1)..(2174): unsure at all n locations
  Clone ID: PAT_MRT3847_107634C.1
cgtggcgtacggctgagaggcgaggggagggggatgcagtagaatagtaatagtggtaacaaaaggcaacagagaacagaagagaaaggaaaagagagggtttggtgagttacccaagagaaaggatgaagagagagcgccagcagcttggttccaacgcaggaacctcaagctgcggttattcaagcggaaaatcgaatctttgggaggaagaaggaggcatggacgagcttcttgcagtggtgggttacaaggtgaggtcatcggacatggcggaagtggcgcagaagctggagcgtcttgaggaagccatgggaaatgtccaagatgacctcacggacctttcaaacgacgccgttcattacaacccttccgacatctccaactggctccaaaccatgctttccaattttgaccctctcccctccgaggagcccgagaaggactccgcctcgtcggactacgatctcaaggctattccggggaaagcaatctatggagctggtagtgacgcgctaccaaaccctaagcgcgtgagagccgacgagtcaaggcgcgcggtggtggtcgttgactcgcaggagaacgggatccgcctcgtgcacagcctcatggcgtgcgcggaggccgtggagaacaacaacctcgccgtggcggaggcgctggtgaagcagatcggcttcctcgctgtgtcacaggtcggagcgaggtaacaaaaggcaacctacttcgccgaagcgctcgcgaggcgaatctacagagtcttccctcagcagcactccctctcggattctctacagattcacttctacgaaacttgtccttaccttaagttcgcgcacttcaccgcaaaccaggcgattctcgaagcgtttcaagggaaaaatcgcgttcacgtgattgatttcggaatcaaccaggggatgcagtggccggcactgatgcaagcccttgcgcttcgcaacgacggccctccggttttccggctaaccggaatcggaccgccggcggcggacaactccgaccacctccaggaggtagggtggaagctcgcgcagctggcggagaggatccacgtgcagttcgagtaccgcggcttcgtcgcaaacagcctcgccgatctcgacgcctccatgctggatctccgagaagacgagtccgtggcggtgaactccgtcttcgagtttcacaagctcctcgcccgccccggcgcggtggagaaagtcctctccgtcgttcggcagattcggcctgagatcctcaccgtcgtcgagcaagaagcgaaccacaacggactgagttttgtcgaccggttcaccgagtcactgcactattattcaactctattcgactcgctggagggttcgcctgtgaacccgaacgacaaggccatgtcggaggtttacttagggaagcaaatctgcaacgtggtggcgtgcgagggaatggaccgcgtggaaaggcacgagacgctgaaccagtggcggaaccggttcggttcgaccgggttttctccggttcacttgggttcgaacgcgtacaagcaggccagcatgttgctatcgcttttcgggggtggggatgggtatagagtggaagagaacaatgggtgtctcatgttgggatggcacactaggcccttgattgccacctccgtgtggcaactcgctacaaaatcggtggttgctgctcactgagtcgactcgccgattcctcagccagctttttctttttattttttgttttaaattaatttctaatcatgcccaccgaaaaaaaggaaaaaaaaaaaaaagaaggggaacttgaggggggattgagaggtcagtgtgtaattgtgctatgctgagctgtgagcactgattgcatgagcctgagacccaccattgtctattttcctgccccaacttatgtctctctccaacccttaatttacttattttgcatttgccgcatttgtaaaccttgattttattttacttggctttctttggggatgggttgggtggaaatctcttgtaatttttcagggttgggaaatcaaaaagcttaatgtgtatttatttattatggtttaattaatatattagttgtattatgtagcttgctggtgatataataaattagaatatatttttagtgtaaaaaaaaaaaaaaaaaaaannaaacaaaaa

SEQ ID NO: 8445 - DNA, 1795 bp, Glycine max
  Clone ID: PAT_MRT3847_107635C.1
cccacgcggccgcgcgggcggccgtatggcttgcagaagtagagaaaagttgaagaaggaatctcctaagactaaaaaaacccaatggatttgaattcctctccttccaacaacacaattgccgtgaatggaacaatccccgtcgcttccacgttcgcaacggccaccgcgcgtgtcgaataaccctccgccggcggacagctccggcaaccggaaacccatcgccctgtggccggggatgtaccattctccggtgaccaccgctctatgggaagctcgcaccaatattttcgagcggcttctggaccctcccagggacgctcctccgcagagtgaattgctcaccagaaccccgtcgcagagcaggaccagcatcttgtacaacttctcctctgatttcgtgctcagggaacagtatagggatccctggaatgaagtccgaattgggaagttgctcgaagatcttgatgccctcgctggaactacttctgtcaagcattgttctgatgaagctagcacaacaaggccacttatagttgtcactgcttctgttgataagatcgtactaaagaagccaattagtgttaacattgatctcaagatagttggttctgttatatgggttgggcactcctcaatagagattcaactggaagttactcagtccaatgaagagggcaatgattcagactcagtagcactgacagccaacttcatattcgttgctcgagactcaaaaactgggaaagctgctccagtgaatcgactttcgccagaaactgctcatgaaaaacttctttttgtacaagctgaagcaagaagtaatttgaggaaaacgaaaagaggaggggaaaagagggactttgagaatggggagaaaaataggcttcgggccctattggctgaaggaagaatcttctgtgacatgccagctttagcagaccgaaacagcattcttctaaaggataccagccttgagaatgccttaatatgccagccacagcaaaggaacatccatggtcgaatatttggaggtttcttgatgcatcgtgcatttgaattggctttctcaacagcatatgcctttgctggattagctccttgctttcttgaagttgatcatgttgatttcttaagacctgttgatgtaggggactttttgcgtctcaaatcttgtgttctgtacacggaggttcacgatccagatcagccacttatcaacgttgaagttgttgctcatgttacacgacctgagctgcgtactagtgaggtatcaaatactttccacttctctttcactgtccgtccagaagccaaggcgatgaaaaatggatttaaacttcgcaatgtagtaccagcaacagaggaagaagcacgacgtatattagagcgcatagatgctgacaacttgaatgaattcttcagagcataagaagaaaaacatcaattagctgataaagtatttaaaatatccaccgctaattatgtgagcagaagttcaaagatgattaactctcttatataataaatttttctgcccaattttaagagggaactagtatgccttatatgtctagcatcattggacttgatagaaggcaactggtgtttagacaagtatatgaacctgaatctagtaggcacctgctgtgcaagttgtataaggaaaaacataggtaagccaatgaaagaaagtttacaatgaattctgtacaatcaatgatggctatagtggattgctacgtctgttacttgtggcatataaagcaagtgatattatattactattacttag

SEQ ID NO: 8446 - DNA, 259 bp, Glycine max
  Clone ID: PAT_MRT3847_107636C.1
tctaaactacagcttgtatgtttattatgcagacagtcttgtgagaatcataacaggaggcggggtgttaacattcgataaaacaggtttcaacatactgccacaattaggcccgccttgttcggattaccactctgtgaaaagtgtccatcccatgacttgtatgaatactgaatgatccaaatttacattatacagggggatgacatcttttttattgcaaagtgcatgcaatgaagcacatcgctccagctcaaat

SEQ ID NO: 8447 - DNA, 151 bp, Glycine max
  Clone ID: PAT_MRT3847_107637C.1
atgccaagacaaagaagaataaccagtatcgcggaatccgtcagcacgcatggggaaagtgggctgctgagattcgcgacccaagatagggggttcgtgtttggactggaactttcagcactgctgaagaagctgcaagatgttgcgatgc

SEQ ID NO: 8448 - DNA, 2063 bp, Glycine max
  Clone ID: PAT_MRT3847_107638C.1
cccacgcgtccgtacggctgcgagaagacgacagaagggggtgttggatgaggcgaaactggagagggtaaggctttgcatttcatttgagagagagagcgtcttacctttccattatgaaaatggctgtttcggctatcactggagcgaggctaaccctagggataggttggcgatacctctttcctcttccacgcgctctcgaaccgtcgcaatggccgtatccgtcgaccccaagaccgacaacaaactcactcttaccaagtccgaggaagctttcgctgctgccaaggagctgatgcctggaggtgtcaactccccagttcgtgccttcaaatccgtgggtggtcaaccaattgtgattgattcagtcaaagggtctcgtatgtgggacatcgacggcaatgagtacattgactacgtcggttcttggggtcccgcaatcattggtcacgctgatgatcaagtgctttcagctctggttgaaaccatgaagaaaggaactagctttggtgcaccctgtctgctggaaaacactttggcagagctggttatcaatgcggtccccagcattgaaatggttcgctttgtcaattcaggcaccgaagcttgcatgggtgcactacgtctcgcccgagcttataccggaagagagaagatcatcaagtttgagggctgttaccatggccatgctgatccttttcttgttaaggcaggtagtggagttgccaccttgggacttcctgattctcccggtgtccccaaagctgccacttttgaaacccttacagccccctacaatgacactgccgccgttgagaagctctttgaggctaacaaaggagaaatcgctgctgttttcctcgaacctgttgttggaaacgctggtttcattgttcctaaacccgattttcataatttcttgcgcaagatcaccaaggagaacaatacccttcttgtgtttgatgaagttatgactgggtttcgtttgtcatacggaggtgctcaagagtattttggcataactcctgatataacaactctaggaaagatcattggtggaggtctgccggtgggggcttatggagggaggagggatattatggagaaggtggcaccagctggcccaatgtatcaggctgggaccttgagtgggaaccctttggccatgactgcaggaatacagaccctgcagcgtattaaggagccaggaacttatgagtacttggacaaaatcaccggtgagcttgttcagggcattattgaagctgggaagagggcaggccatgcaatatgtggtggtcatataagggggatgtttgggtttttcttcacagaaggaccagtgtataattttgcagatgccaaaaagagtgatacggacaagtttgctaggttcttttggggaatgttggcggaaggtgtctatttggcaccttcccagtttgaggctggctttaccagcttggcacatacttctgatgacataaaaaagacgatagccgctgctgagaaggttttcagggagatctgatggttaaattttgttttgttgcaaatttaattttcggagggtgaatttttaggtcaatttagattattgttatggcagttgctttcgttatgatctgtatcattttcgcatcctgtatctatccagtgtattatgttgagctgtaagttacttgaatgtgaagcatgtaagcattcgaattattgtttttgaagcttgtaagcattcgaattcattgtttaactcctcattctagtttcacatgttatgtttttaatgtaggcatgcattttgctaatgcattacatatcagtatacatctttgtggactacacactttcggggtgggaatagatagagaattgtctttgtgctagataaattgaactaatttttgagctgtgatccaatattgatattctttagggaacatagatgaacattattatttactggacggatgaacctgaacatgatgtcaaagtttgttgtagctttcaaaggatggactgtatgctttacttgtagattaattgaacaaagtttgcat

SEQ ID NO: 8449 - DNA, 132 bp, Glycine max
  Clone ID: PAT_MRT3847_107639C.1
ccccaaagggaccggaattaatggaatgcctaatcctaaaccggggtttaagatcgggcaacccctttggctagaaacaggtttcaggctttaattattaaaccatggggtttacctacgcttaatgaagca

SEQ ID NO: 8450 - DNA, 353 bp, Glycine max
  Clone ID: PAT_MRT3847_10763C.1
aggagagtctctttttccccttcgagttgccgagcgaggagcgtggtcgtcgcgctgttgcgtgagaagcagtgtggagggatgctaacggaataaaatggccacttgtattgctatcccttgtgctagcataatagaaagggttgaatcgagctaatccgagtttcattcagtttaactcgagtttttttttaaaatgaatttttcgggcccagaggacgatacccaaaatcggtcatctcagcattctcctggaatgtgctgcaagctgcgcttcaagtatatagacccttctagctatcatgcatcattatattaagtgaatttttacttatttgattgcgctgtccaaa

SEQ ID NO: 8451 - DNA, 696 bp, Glycine max
  unsure (1)..(696): unsure at all n locations
  Clone ID: PAT_MRT3847_107640C.1
ataaggctttgcatttcatttgagagagagagcgtcttacctttccattatcaaaatggctgtttcggctatcacaggagcgaggctaaccctagggatagggttggcgatacctctttcctctcccacgcgctctcgaaccgtcgcaatggccgtatccgtcgaccccaagaccgacaacaaactcactcttaccaagtccgaggaagctttcgctgctgccaaggtacgcatgacctccctcttccttccttccttcctcctttcaattttgatttttgatttttgatttcaggagctgatgcctggaggtgtcaactccccagttcgtgccttcaaatccgtgggtggtcaaccaattgtgattgattcagtcaaagggtctcgtatgtgggacatcgacggcaatgagtacattgactacgtcggttcttggggtcccgcaatcattggtcacgctgatgatcaagtgctttcagctctggttgaaaccatgaagaaaggaactagctntggtgcaccctgtctgctggaaaacactttggcagagctgggtatcaatgcggtccccagcattgaaatggttcgctttgtcaattcaggcaccgaagcttgcataggtgcacaacgtctcgcccgagcttataccggaagaaaaagatcatcaagnttgagggctgttacatggccatgctg

SEQ ID NO: 8452 - DNA, 324 bp, Glycine max
  Clone ID: PAT_MRT3847_107641C.1
gggggcacaatggtttgagatcatataactaaatctgggagaaaataggggggggggggtcgtactaaattctgtagtatggcagtgcatgcgacgatatgtcccctatcaagaacactgggttggtgccctctccggaagggatatgcgcaggttcaaggatggctgggtaaacacacacatttttcttttgggggggttctggaaagtcttagcagcccaaaggacctctccatggcgaacattacacatcaggctctacatcagttagccaacgtgcttactttgatcccagagacctgcacccccattctaaggacacgt

SEQ ID NO: 8453 - DNA, 345 bp, Glycine max
  Clone ID: PAT_MRT3847_107642C.1
ccacgcgtccgtacggctgcgagaagacgacagaaggggagcggaacgtgtgttcgcatcaatactatgcagcgcatacgaatggaattagggggtttggaaaagaggataatggccaatctcagcaattctatatccactaatgcggatatagtaaacggggagagcttgaacttcaacctatgcgcatgtggtgctggggagggcatgcatgaactctgcgagtgcctatcatacaacagctgaagccatgaactctgtcatgatattgagctatggcctttatggcgcagaagatgcacctgctcagaatgagcctttgattctagagccagagccattctt

SEQ ID NO: 8454 - DNA, 191 bp, Glycine max
  unsure (1)..(191): unsure at all n locations
  Clone ID: PAT_MRT3847_107643C.1
ncggacgcgntacgtnagctcggaattcggctcgagntgagtgganananaggtnnngaagttgatgggaanngtggancagcnnanngtgntgtgatcnntntaangagtggcagaatagtggnggtgggantnngtgtaggaacgtgnntagnagacnnacattgnagaagntaagcnggcaatganna

SEQ ID NO: 8455 - DNA, 243 bp, Glycine max
  Clone ID: PAT_MRT3847_107644C.1
atcatgtttgcaactcagatacatagccgaatgtgtgaaggaacttttgggcaggtcgtaggatgctgggataaatcaaggaacgaaactgggtgccgtcgaaattgtccgtggcattaagaagtatccagaaacagccatgatacaaattgaggtgttgcaacagcttggttaacacgatgcacgacgcaatcgtcatgcaagacttgcacatgatctcatactgacctcgaaccctgacaa

SEQ ID NO: 8456 - DNA, 606 bp, Glycine max
  Clone ID: PAT_MRT3847_107645C.1
cctcgtgccgaattcggcacgaggggtagatgatcaagagttttggaatggatggctctggcaatgtgtaccattgccaaagtttgctaactaatggcaagtatgtttatgtgattggaactaaaggcttggagtcatcctctggtgaccccaacgtgtatacttttgttcttctatagtttgccatgccattttgaaaccttcatggaaactaagccttacaggtcaaccatttggcggtgattgtgacaagcagcatcagtgacatagcttccatgatggtgatggcagacaacagtcaccttgactatgatatcaaattatggctttctaccagtctgttaaattgttttcttttttgacccaagtttgttataaacaaatgatacatatattggatacaggatgatacttaaacctgagaaacctgtttctttgcttcttcatgaagcaccccccacccctcacttttgtatttcatgagatagatttgcaatggttagaatctaggcttcttggactaagtatattttgacttatatagtgtttcaagcattttattctccccaatgtgctttcctcgacacttgtttggcactatcatat

SEQ ID NO: 8457 - DNA, 267 bp, Glycine max
  Clone ID: PAT_MRT3847_107646C.1
agagtatgccatactgataccagtttcagctggtgtggcacttctttgcctcttgtgcatatttattggattcgtgatgctcaaatccaaaaagaagaaggcctaatggctaatactgtcaatttgttgcacaatttgttctaatttttgaaacagtgaatttattaaatgcattttcgatcatttcgttcgaattattagtagccactttttgtttgtcttcgcatggaaatacatggatgagttaagtgaggcatgcttcaaaaa

SEQ ID NO: 8458 - DNA, 390 bp, Glycine max
  unsure (1)..(390): unsure at all n locations
  Clone ID: PAT_MRT3847_107647C.1
taactanaaacattntcaggaatatgaatgtccttgttttcttcattcctacggggtttttaacagggggatgccgtgcttaccatatcttccctctccnaatgaacactggctatcgtgcccgtactctctacgtgaaatgcgcaacttggaggctttttttgtaagcacacaacatctataactttgagaccattcctgaaaagtgcgtttaatcaacaaatgaatacatccatgtctaacaatatacatcatactccaaaacatttaaccaacaagcttacttttattccaaaaacctctaaaatccatcccaaaaacacatttttctttaatataaatggcaccctactttctaatatttccatactacaaaaaacatttattttt

SEQ ID NO: 8459 - DNA, 816 bp, Glycine max
  Clone ID: PAT_MRT3847_107648C.1
tttctgcacttaaaaaatatccagcacttaatacttctttcaatgaagaagctggagaggttgtacacaaacattactggaatattggtattgctgcagatacggataaaggattattagtaccagtagttaaacatgccgatcgtaaatcaatattcgaaatttctgatgaaattaatgaactagctgtaaaagcacgtgatggtaaattaacttcagaagaaatgaaaggtgcaacatgcacaattagtaatatcggttccgctggtggacaatggttcactccagttatcaatcacccagaagtagctatcttaggaattggccgtatcgctcaaaaacctatcgttaaagatggagaaattgtagctgcaccagtgttagctttatcattaagctttgaccatagacaaatcgatggagcaggtccaggtggatatgtcgcagccattcgcgcggctcaattaggacaaaaggtaacaatcgttgagaaaggtaatttaggtggtgtatgcttaaacgttggttgtataccttcaaaagcattactacatgcttctcatcgctttgttgaagcgcaaaattcagaaaacttaggggtaattgctgaaagcgtttcgttaaactatcaaaaagttcaagaattcaagacttctgtagttaataaattaactggcggtgttgaaggacttttaaaaggtaacaaagtagagattgttagaggtgaagcttatttcgttgataacaatagtttacgtgtcatggacgaaaagagtgctcaaacttacaatttcaaacatgcgattatagctacag

SEQ ID NO: 8460 - DNA, 244 bp, Glycine max
  Clone ID: PAT_MRT3847_107649C.1
ggctcgagctaaaattctttcatccttgatctacattctaactaaatttcattatctgctaccgggtacgcaacaatttattacccatgtgttaagctcaactaccacgacagacgcatatgatacatttcacactacccgcctgatttctcagatttcagaagaacatgcatcgacattacaagctgttcaatctgcactcgcagctcatcgctgaactcgaagcatatgtctctcctcattt

SEQ ID NO: 8461 - DNA, 157 bp, Glycine max
  Clone ID: PAT_MRT3847_10764C.1
gcgtactcggccgctgccgcttttttttttttttttttttttttggagaaggacaaacacgatggagtgaatactctggatagtgacccaagaccaaatctccaaactagattaaaggttaaacatccaacaaagaagaacttgtaaatttgtcagc

SEQ ID NO: 8462 - DNA, 234 bp, Glycine max
  Clone ID: PAT_MRT3847_107650C.1
ggggagaaccaaaactagctttccaacataaaaaaaaaacctcccaggggtcatccccctttaaacaacaagggggtattgggggttaacaaaaaaaaaattgccctgcaaaaagccctaacccacacaatggataaaagaccaaaacagggggctttaagaggggttaaccccggaaaaaaccaccctttccaagggggtaataaaaaacaaaaaaaccggggaaagaaaaac

SEQ ID NO: 8463 - DNA, 782 bp, Glycine max
  unsure (1)..(782): unsure at all n locations
  Clone ID: PAT_MRT3847_107651C.1
ttcgggaaactttcctttgggtgatgaacaccttttaagggactcttaacattgaaggtcagtgtcaatatctgtttttttatgccaaaagttattcattttccagtctcgctgtagacttgtttcctcatgaatctgtgtgtttaagtgttaaactattctggtggtgatggtaaagcaaaatagagtttgttcactttgatatacacactaatatcaatcagggacaaggtagtacttatcagctggtattctgggcttgtgtaaggtatggtgtttcatttgacaggtttggttttgttgctcattggctgttttagtacaattctttaagagaatgaattgaaaagtgacattcaacactagttgggtgcccactatatcttctagccaagagcaagagactaattcctcaaagtatggagatccaatcaagggcctgatctttcaacaaatattttttcatacaaaaacctgagaatcaaacttctgagatgcttgagatatgattatgtatcaaccataacccaccacgttggctcactggttaggtgtataaattatgttctttgaaaactttgatttgctgagtagacaatgtcagatgttttccaatactccaaagtctgctagattatgttgtgttgtgttgtgcctcttcagtcttttgtattgttgttgaggttaggtttttgattttttgaatatgtacttacggttgtcataggtacgtcaacatgactttatatttatttaantatntctcattttatttggcaaaa

SEQ ID NO: 8464 - DNA, 328 bp, Glycine max
  Clone ID: PAT_MRT3847_107652C.1
ttcgtcctcaggcgggcgcgccacgagaccgaaagcgaaggctatcgatactagctctcaatatttacccaaagaagaacaacttctgtgcaaacaagtgctgaagggcaagaaaatcacactctattgtggccacggactgccggaatcattgcgttcaggaccttgggtccaagcgctgaacactatcctatcgacataggactacgcgacaaactccaactccaaccgtccacctctgagagacataaatgaggtgaaatcctggctgcagaagacctagattagtgctagcgctctactataaagtgttggacgagctgggaag

SEQ ID NO: 8465 - DNA, 845 bp, Glycine max
  Clone ID: PAT_MRT3847_107653C.1
gtaagctcggaattcggctcgaggatgaagcagagtgttctcagttatgcagaacgtggaaacagttaattgtaccagcaaggtaatcgatgacgatgatgatctgttttgagatttaatatgcaaaatgaaatgtttaacaacttaccgtttaagaagatgggaatcggaaattatcatacatttttcagttataacttataagtcatcaattccgtatcagttccaaggaaaatactcactttgttaaaatatatttaattattttcgtcagagacggatcccaagtacattgcaacttctttaaatttaattattacatatatttattgacttctgattaaaatataatttagaatcccttcaaaaaaaataaattagaattagatcctctcctagatatggtcatgttagagaaaaagacacgaaaataattagcgagtctcgtgactaattataagtttggaaaaaattgggctaaaaataaaatacatttttgttcctcatcttctttttaaataagttttactttaatcccttaaatttgaagtttcattttagttttttgaagttcctttatattaaatggggatttctgtcatttaattatattgggttaaatttgattaacatatgattgaaatcgaacccaaatttttcccctaactaaatatttttcacttataaacgccctgcgattttgcaaaattgggttaactttttttatttacaaattgtttgaggtccatttaatgataaattaatataaggggcaatttaatttaacaaaaaccctttaaataccccagtataacttgttaaacttaagtaatcaaactggaatt

SEQ ID NO: 8466 - DNA, 761 bp, Glycine max
  Clone ID: PAT_MRT3847_107654C.1
cccacgcgtccgcccacgcgtccgcccacgcgtccgtacggctgcgagaagacgacagaaggggatatcaaagaccatagtcatggatgatgggcatatgcacggcatgggagggatggccccaacgccgccatcgacaaatggcaccaccatgacgatgatgatgcaccataagatgatgatgcacatgaccttcttctgggggaaagacgcggatattctcttcaacaactggcccgggggtaaatctggaatgtacgtgttggccctggtcttcgttttcgtcatggccgttctcgtggagttgctctcccacacccgcttcatcaaacccggttcgaaccatgtcgtgtccggtctgattaagacccttttgcatgtcctcagggttggcctcgcttatttggtcatgctcgccctcatgtcttttaacggcggcgtcttcttggtcgctgttctcggtcacgccttggggtttttcgtttctaccgtggctttcaataaaccgccacaaaatgagggctttgatcttcctccaatttcttgttagttatattcgctgtttttttattccttttgttgattaattgttacaattgcgtaatatttgatagcggataatgaaattggagctgttttaggtttaaatctaggtgcctatattatgtggtttatgtctttgccagtacgttgttgttaatgtgaatgaaaaatcaattaattttaaaaaaaaaaaaaaaaaaaaaaaaaaaaaaaaaaaa

SEQ ID NO: 8467 - DNA, 127 bp, Glycine max
  Clone ID: PAT_MRT3847_107655C.1
ctcgagccgaatcggtttgagatgactatctctctaagtcattgtcaacgttgagaactgctcagagtccaagccatgtactgtgaaaccaccaagagctaatccttgacgctagtagccgtatgat

SEQ ID NO: 8468 - DNA, 301 bp, Glycine max
  Clone ID: PAT_MRT3847_107656C.1
cggtccaccacctagtaaatggatgggcttctgtcaaacttctaaaaatttcacatgccgggattaaattattgggggttaaaattaccaaagtaaatggtttttttaccagggttaatccaaaatctgtgagggatataaatggccatggacctaatgtaccatcacacagcggttggaaatccagttaacacacttcgcatgttacgccttggtcaggaaacataaagaggtggtgtcacaaacacacacatttgtgtacacaaagtgtgtgggttagatgggtgcactgacacacaca

SEQ ID NO: 8469 - DNA, 1468 bp, Glycine max
  Clone ID: PAT_MRT3847_107657C.1
ccttcgcgtccgacggctcgagatcccaaaaccaaaaggtggagggcgtgggcgagggatatctatcttcattttcgtcgtcgttcatttttttattttttttttctgttttccattcgcttcttctctcagaaaagctcgccaatcgatcttgctctcttctacgcttttcgaattccttccattccattatggacgcagattagattcacgttcacattcacttctcttcgtttgcttcaaccactctgctctgctctgctctactctgagatccgatcgcattttcattcagaaaggaaactcgtgtgactgatttatgcgctaattgcaattgcactgcgagcgtccctgtgccgaatcggaagatgggattagtgtttaccaaattgttttcctctcttttcggtaacaaggaagctcgaatcctcgttctcggcctcgacaatgccggcaaaaccactattctctatcggcttcagatgggcgaagttgtctccaccattccaacaattgggtttaatgtcgaaacagtgcagtataacaacattaaatttcaagtctgggatttaggtgggcaaacaagtatcaggccatattggaggtgttactttccaaatactcaagcaataatctatgttgttgattcaagtgacgttgataggcttgtgatagctaaggaggagttccatgcaattttggaggaggaagaactaaaaggtgcagttgttctcattttcgcaaacaagcaggaccttcctggtgcacttgatgatgctgcagtgaccgaggctctagagttacacaagatcaaaaatcgccaatgggctatttttaaaacttctgccataaaaggagaaggactttttgagggccttgactggttgagcaatacactcaaatctggaggtggctaaaggtgtcagcttcaacgaattagatggacgattgaactcagaaggaaggttgaaatgcatattttgatatctctttcactgtgaatgatgctataataatatgattattaaagctcgtacacatgttttattccactttgtgtttacagttaaaggtatggacaatggtcattggttgtctttttttttttatttcctttttatattttttaagtgagtcacttggctcctctaatagcagtagctgaatggtttctaagaaaaaatttcttgtctaatcttgtgtaatcgaactacatggtttactcttaatgtgcttgacctatcgatgattccataaggtagtttgtcaatgacctgacggctgatgagggcaaaccttcaaagctctttggtgacatgatgaggactgagcagccattgttgttgacaatgtaaatcaaggtagcaaatttttcattaatgtaaaatgtatcgaagacaatatatgatattctttttggatttgaaaaaaaaaaaaaaaaaaaaaaaaaaaaaaaaaaaaaaaaaaa

SEQ ID NO: 8470 - DNA, 268 bp, Glycine max
  unsure (1)..(268): unsure at all n locations
  Clone ID: PAT_MRT3847_107658C.1
aggttatccagttgtggtcaacgctccctcaaatctgaattcctttgctnttggccttaatgccgagaacaaccagaggaacttcctcgcaggttcgcaagacactgtgatgcgccagctccctagccaagtgcaggagctcgcttcccctgggtctgcacacgccgccgngaacccctccacgaaccaaagagaatcctacctcggggacgctccgcctccgacgaaagcaggaggggcactccgcaagaaagggccccccgcctcc

SEQ ID NO: 8471 - DNA, 598 bp, Glycine max
  Clone ID: PAT_MRT3847_107659C.1
aggctgcgaaaaaagacagaagggggagggcgtgggcgagggaatcaaacaaaccttgtactactatttatcttcatcctcatttttgtcgtcgtcgttcttcctttttccgtttttcatctggttcttctctcagaaaaagctcgccaatcgatcttgctctcttctacgcttttcgaattgctttcattccattatggacgcagattagattcgcactcacattcccttctcctcgatttgttcaaactctctgctctgagatctgatcgcattttcattcagaaaggaaactcgtgtgactgatttatgcgctaattgcaattgcactgcgagcgtcactctgccgaatcggaagatgggaatagtgttcaccaaattgttttcctctcttttcggtaacaaggaagctcgaatcctcgttctcggcctcgacaatgccggcaaaaccactattctctatcggcttcagatgggcgaagttgtctccaccattccaacaattgggtttaatgtcgaaacagtgcagtataacaacattaaatttcaagtctgggatttaggtgggcaaacaagtatcaggccatattggaggtgt

SEQ ID NO: 8472 - DNA, 1729 bp, Glycine max
  unsure (1)..(1729): unsure at all n locations
  Clone ID: PAT_MRT3847_10765C.1
ggctcgagggctgttaaggcattgggcctgccaaagctgtcgtttggtgacagtgagtcagcgacgtgcgggtgcttggtgtactgtacggccgtaatttccattttgaagtgtttgagagagagagagggagacacaacacaagggaaggaaaaccaagtggaatcaatagccatgaagatcgttcggaaagacctcgtacccaatggacctggcagcgttaagatggttgcagtggattcggatgatctctggtttgcgtataacctgatagctcccggagactctgtcatggccgttactgtcaggaaggttctaagagaagctgctagtggcggacgggaagcagaacgcgtcaagctcaaattggaaattaaagtccaagagcttgctgattatgacaaagaaggttctattttacgtgttcgcggaaagaacattttggagaatgaatatgtcaagataggagcttttcatactttagaactcgaactgcagcgcccgtttgtgctcagaaaggatgtttgggattctttggctttggaggtactacagcaggcctctgatcctggtgcaagtgctgatctagccgtggtgttgatgcaagaaggattagcccatatcctccttgttggtagaagtatgactgttactcgttcgcggatagaaacatcaattcctcgcaaacatgggcctgcaattgctggttatgagaaagctttggataagttctttcagaatgttttgcaggctttcttgaaacatatagatttcaacgtggttcgttgtgctgtaattgcaagtccaggatttacaaaggatcagtttcaccgtcacttatttttggaagcagaacgaagacagttgcgacctattattgaaaacaaatcccgcatcattcttgtgcatacaagttcaggatataagcatagtttaaaggaggttttggatgctccaaatgtcatgagtttgataaaagatactaaagcagcacaagaggttcgagttatgaaggatttctacgacatgctttcaaatgatccatcacgtgcttgttatggaatgaaacatgttgaggttgccaatgaacgactagctgtacaaatgcttctcattacggatgagcttttcaggaattcagatatagcaacaagaaaaaagtatgttaacttggtcaactctgttaaggattcagggggctctgtccatgtattttcgtccatgcatgtctctggagaacaactagcccagataagtggcattgctgcgattcttcggtttcctctccctgatcttgaagacattgagatgtgatggacaatgttggtcaagcatgttaatgttggccatggctctctctgttttttactattcttaaatactcagctgatgttgcaagttgcaacagtccctgagtaatcctagcggtcttgtattacaaaccacacaatgctagtgtaaaattcatagtattacatcagactttattgagtggttaaatatctttgtatattttccccttaaagtaagtgtcttttttgttgagcgaggggacttgtattacaaaccacacaatgctagtgtaaaatgcaccttatatagtaatattacattagactttattgcgtggttaaatttctttgtatattttcccttaaagaaagtgtcttttttaattcttgtgcgtttatattaaaaaaattaaattatgcnnnnnccgttttgaaaa

SEQ ID NO: 8473 - DNA, 271 bp, Glycine max
  Clone ID: PAT_MRT3847_107660C.1
cgtaactctcacacacaacgcaacccttttagtttttctcgccatcttccgaaactgaccaaccattttcttgggatgtacaatatttccccttttctctgctcttttttcatcattattcacttcttcttcttcttcttctttctctaaccagaacgaacaaatggggttggtgagcagtttcttggggattcttggtttcgccgttcgaatacctcttggcctctctgtggggttctttccccttgtcctcctcagaaccaaacatgtc

SEQ ID NO: 8474 - DNA, 234 bp, Glycine max
  Clone ID: PAT_MRT3847_107661C.1
ccacgcgtccgtttcaatgcttctgcttagtgctttcaccttgaggaaggaagccacccacaaccacaaccagtgacgcttgaggttagtgataagtcactgttgtatgtgcgtgaacttcaaagaacacacgcggctctttcattttcattttcaaatagtatttggtttgagtagttgtgcaaactttctctctcttcagtgatcgtagtagttgaagcagttaactgataa

SEQ ID NO: 8475 - DNA, 470 bp, Glycine max
  Clone ID: PAT_MRT3847_107662C.1
gcgagaagacgacagaaggggaaccccaattccaactctaattctcataacatatcaaatctctactcatgggtacttgtttgcttcttggatcatacaatttatagccaccaatagcatggtaactaatcaatatgacttgctcacccttgtcatccagtttccttctcaattagtcaggaatatgtttgtagcagattgaaccaaacactctaaggtgagctacacatggtttcacaccagtccaagcttcttctagtgtcatacctgtaagtctcttggttggagatcgattcaaaatgtgcactgttgttgatacagcttcatgccaaagataatttggtaggtttttagactttaacatgcaccttaccatgttcatattggttttgtttttcctcctagttgttccattataaaggggtgtgtaaggtggtgtaatttcatgaatcaacccctcactatcacat

SEQ ID NO: 8476 - DNA, 3298 bp, Glycine max
  Clone ID: PAT_MRT3847_107663C.1
acccggggatcctctacagtcgacctgcaggttggagctcaagtgtttcagtattgcgaagtatgtggcagactttctggctaagtgagaactgggatggctaactttttgtgcacaaataaacagcaaaagcacatgactctttttgcaattggaggagtactaaagtgatactagtatttttttttttatcacatggtgcatgatataacaggagtttcacccggggaaggcacgggagcaacaatgtctgatgacgaagatgagcaagtaggtagtgatgccaatctgtttgatggtgctttggatggtcctgatagcatgggattcggtcctcttattcccacagagaatgagaggtccctcatggaacgtgtaagacctgaagtaaagcacgaattgaaacagggttataaagagaaaattgtggacataagagaggaaattttacgcaagagatgagttgggaaacttcctggtgacacgacctctgtccttaaagctttgtggcaatcacattccaagtggccttaccctacagtggctacgaagactgagtcaaataaagttgcagggaatgccattttatatgaatgtgttcaaacaataatgagcattgaagataatggtggcttacatgtacttgccattaatatcctgggaagattcttgtcaaaccatgacaacaatatcaggtttatttctgctcattgcttctcttaaataatgagcattgaagataatggtgggttacatgtacttgccattaatatcctgggaagattcttgtcaaaccatgacaacaatatcagaatatccagattttgccagatgcccgcaaatcagtattttgactgatattaactcaatatgaagagagtaatctctttttgtagttgtgtttcgtgcgtttttactggctgctggaatccccaacaaggatgttctcctacggaagaaaagggctaggattctaaagccagctttcacagttatacgggataaagaatcaaaatgtttgcttgtgttcatccgtggaactcaaagcttaaaagacacactgacagaagcaatcggtgctcccgtgtccttcaatcatttcatttgaacgatgatggtgagctgaagaggaacaacagggttgcaggacatggacactggtatggttgccgcagctcgttggattaagaagcactgcaccactatactacttgaagatctttgtcgacaccccgatttccaaatcaagctgcctccgtatcattggagttagcagaattcgggaagccctttatcacttccattataaatgattcagacatagtgcctacattgtcagcttattctattcatgatttcatttctgaggtggagttccaaatctggccatggttgagagtgtggacaatcagaagaactgcaggtagcaaatcatcttgaccgtatggtgtcaacccttcgaagaaatcctctgaaggttttggtgcaagtaaatacgagtggagaagaatccaaatctggtattgatccttccaactgtgttgacttaatcaatacaaaaagatgcgagacacaaaaagaaaagaagaaaataattgaaaagtacttcaagaagttcatgatttactctttaacccaaccaatccagaagctagtaggaatttcaacaaagcacaacaacatcaggaccctactggtcttgcatgcagccaaggaaggtacttacaggtgatcgttattgtgccacatgaactaaacagatctcgtagttatttatcagtagcatcatcatcaaagttctttacatgaaagtttgatgatgatgttaccgataaagagctacgagagtgtttttagccgacgctgcaaattttctcaactccagaattgcttccctttgatctgaacctttccaatttcagaatcatcattttctgaacaccaattgataccaagaaagaaaaaaagaaagaaagaaagaaagaaagaaagaaagaaagaaagaaggaaaggccaaaacagaatgcttatggattacactgactgtgtacatatatcttaaatttgcaacaactgttcttataacaatttttattaagtaaaaattataggagttaagttaactaaaaagaaatttctagtagaatcaaattcagttttttttttcttcaccatagctgatctgttctgatctgtacatttttgaatttgacagttagttttactgaacctaacaaattgctgtattgtatatatgctatgcacacaggttctattttctcctttatttcttttctaaatccttctcttattttttttatttaattattgaatttattggaatttagactctttcagttcaataaactttaaaactcttgagcctagggatacaaatatattctatgcttccatgtgaattttcttctcttaatgcttttgagttatgactaatcttgctcacttaagggattattatattgttcacattaggggaaaaaggatttatcatctaaggaattagggttaaattaattaaattaaagaaattggttagcaattgcataaaacatggatttaatgttacttataattagttcctttccattgctggtttaatataatatgatttgctggaaatgatcataaatcaagtaaaacctctgcagataacatgctgtatgataatcggtaaaattaaatatacatgatcaaacatacaaaggagaaaacaaaacaaatgtattccagtcttctattgaaacttggaaaattcttcgttgacaacttacaagatcacacaaaattctcaatacaacataggatacgaacgagtaaagaaaaagaaattccgtcaaaattgaatacatatttcaccacagactgacttaatcaatacaaaaagatgcgagacacaaaacgaaaagaagaaaataattgaaaagtgctacaagaagttcatgatttactctttaacccaaccaatccagaagctagtaggaatttcaacaaagtacaacaacatcaggacccttctggtcttgcatgcagccaagaaaggtacttacaggtgatcgttattgtgccacatgaactaaacagatctcgtagttatttatcagtaacatcatcatcaatgttctttacataaaagtttgatgatgatgttaccgataaagagctacgagagtgtttttagccgtcgctgcaaattttttcaactccagaattgcttctctttgatctgaacctttccaatttcagaatcatcgttttttgaactccaattgatcccaag

SEQ ID NO: 8477 - DNA, 325 bp, Glycine max
  Clone ID: PAT_MRT3847_107664C.1
cagagagtgatttcagtgaatgatcggtgttcacctgatcacaccataatcgtcaccgtcaattgaagaagatgccgatcagaagcatcgccgtcggaaggcctgaacaggctactcacccggacacgttgagagcggccttggctgtgttcatctcacccttcatcatcgcgttcgccggctcaggctccgggatcgcctacagcaggctcagtgacaacggcgctgccatcccagccggcctcatcgccgccgccatcgcccatgcattcaccgtcatcgtcgccgtctccagtcggcgccaacatctccggtggccacgtca

SEQ ID NO: 8478 - DNA, 990 bp, Glycine max
  Clone ID: PAT_MRT3847_107665C.1
tcggccatagcatcgcgaaactgggaaaccattcaaattgaagacctcaaaattgagcgcaatgagctgcttgctgtgaactgtctggtaaggtttaagaatttgcttgacgagtcaattgaagtgaacagtcccagaaatgctgttctgaatttaatcaggaagatgaaaccagatatttttgttcacagcgtagtaaatggatcttataatgctcctttctttctcacacgcttcagggaggcactgttccattattcttcaatttacgatatgtttgatactctcatatcccgtgaaaatgaatggaggttgatgcttgagagagaatttttgggccgggagataatgaatgtggtagcatgtgaagctcttgagagggttgagaggcctgagacatacaaacaatggcaggctaggaatactagagctggttttaagcagctcccactggataaggagataatgaccaaatttaggggcaaattaagggaatggtaccacagggattttgtctttgatgaagatggaaactggatgcttcaaggttggaagggtcgcatcattttgtatgcttcaacttgttgggtgccataatgatgtgtgtgactcaactcttggtttctgaattcatactggattgaaggtcaccttcagctgttgtgaactgtgatgaatattcttcccaggtttgcaccaagtgaccctgtataatagtggtagaatttccacccagattagcatcaaatcctacaatgacaaggacgcgaacattagtagtcagatacaatgacaaggacgcgaacattagtagtcagattgttatttacgatgtttttccttccctttcctttttctgaccgacatgtattataggcacttcagatcttaaaaagtagcaaattggttaaaaaggtttttgcagagtagtatcttgtatcgttagccactgatttgattgatttgaaatggatgactatttcatttagt

SEQ ID NO: 8479 - DNA, 461 bp, Glycine max
  unsure (1)..(461): unsure at all n locations
  Clone ID: PAT_MRT3847_107666C.1
ccaggaccaaaaaaccaaaaaccgcatataccccgcaaaagggggaggaaaagccaattatttggacccaacctaacccagattccaccaaaaaacctctaaaccaaccaaaaaccccaacaaaaaaaacccccccctaaccaaaacggggggtttaaaaaaaccaaaaaaaaaaaagcccctttttaaaacaatccacgtttggaaaaaacaaccattttccggagggaggaccgggaaaatttttttggaaaaaaaaaatttgtttataaggaaaggcccaccccccccccccgggggaccaaaaccaccaaaccctacaaaaaggctattataatcagcccattcttaaatcgaaatcccccccctcgccacggccttcctggnaataatcctaataattcccctaaaaaacaaacttttaaaattctttttcaccccccccagaagaaccttccccc

SEQ ID NO: 8480 - DNA, 658 bp, Glycine max
  Clone ID: PAT_MRT3847_107667C.1
ctgagttgctcgctctagatagtttatagagattcatgattgttcaaaggcatggttttggttttcaagatgagccttttgtaaaatatttccttctcaatatttactagtactaccccaccctttgtggccgtgtttaattaacgatgagcatcttctactttgtttttgttgaaaatctcgcagatctgtgccctggtgttgctcctaaccaaagtacgttgaagaccctaaggtaagagagctttcttcagtccactcatgggtgacagtaagattcaattagctgccgactcattcatccaaatgttgagtgtaagcgaataaatatactcagcagatgagtgaatgatgcgggagacaaattgaatcttaagtttcctgtacttggactgaagggagctcccttttccttttgtctcttacttcttctactatttttatttgcacatgacaaactgcatatcatttctaatctctctttaaagtaaggtagtacataattgaacttttgaacttaatatgctgtcccaaattatgttcccccccggttcccaggttgtgattaattacagttttcttcttctttcggtgtaactttgttgcttttcaacaaatatattactgctggcatggcatgtaaggtctttgacaataa

SEQ ID NO: 8481 - DNA, 362 bp, Glycine max
  unsure (1)..(362): unsure at all n locations
  Clone ID: PAT_MRT3847_107668C.1
acgnagatgtttacgatcctcatccggccatgggggcagaatggcctaaaagaaaccgcccctcaaaaataaccagacaggnccccaagggtggttaccccctagcacntgtattgaacaatcatagaataaaaagctcctaataccacaatcagggcgccacgagaaccccaaatacaaaaggaacaccaccgttgccaacccaaaagagtaagtgtgaacccaagacctaaaggaacccccaccgtggcttgctgacacaagccnaaataacgntgaggaagatcctaatcatgcttaccaaactnattggcaaatctggcctcgcagaattggaaagctgcccctttccttgcctggaa

SEQ ID NO: 8482 - DNA, 486 bp, Glycine max
  unsure (1)..(486): unsure at all n locations
  Clone ID: PAT_MRT3847_107669C.1
gcacaaacagataacattgagacacccgcatgcctcataagtcctcagcaagtgaagtatggttgctttattaaatgtgtgggcaggttctgcattgatgctgactgacttttattgtatatgttgtagttttctcctcaatggaaaaggagtactcaataggactaatgttcaaatggatcctggagcacaggtgccaactaatgtgactggtatgcttaaatttgggacaaatcttcttcaagctgtgggtcagttcaatggtcgttatgttgtacttgttgcctatatgagtgttacacctttgcttgaggatccagttcttcaagattatcttcagcctgctgttacatctgttgatttagattcagatattattgagggggcttcacggatttcacttaattgtccaataaggtgtgttgtgaatttctctgttcatgacattgatcagtgataactntatctttcttttgattcctttgc

SEQ ID NO: 8483 - DNA, 274 bp, Glycine max
  Clone ID: PAT_MRT3847_10766C.1
gtcaagctctacttctgcactcaacccttgtaagttgtatgttgctttatttcctgattttcacattcacatgcacacacgccccaaaagcatggccagaggagcctctgctcccgtgtgccgatgtcctctagttcctcttgctgctcaccctctcacgcgcccgctatgctgccaaccccttctccgaacccaaacctgactgcgaacctggatcccatcgtgccgaacctaataccgtttagattaccatcgtgaccagttatcccgttcc

SEQ ID NO: 8484 - DNA, 325 bp, Glycine max
  Clone ID: PAT_MRT3847_107670C.1
atgtggaaattatcccaaaacttgctttttacttcagtcaagaacagaaccacgaatagcgtgcttttaagcacttttccccccagacgccgttcatggatccaccccggcaagaaaaggaagattctttctccccaaaaagacttaaggttctggagaaggggagccttatgccctcgagaggaaattacaagccctcgggtcgtattcattacatcgggaagatttggctgcccaaacccggaataaccccccaccccgccttggggggggggggcccccatcttaaaaaactttgcttgggaagggaagggcttggcccccc

SEQ ID NO: 8485 - DNA, 457 bp, Glycine max
  Clone ID: PAT_MRT3847_107671C.1
gagacaaacaaatatttttttaggcattgattgatcaggatgcaactattacgtgcgggcgaacatgatctgagcacaatactatacataaaatctgactccacaccctattatatatgaaaaactagagagcacccatattacagaccttaagcatacataggaagattatgcacacgtactcatgcacgaatatttgatggagctaggtacagcggatggcaagagacgcacatcttacattactggacgctataagttgcaccaaatgcgcgatgtacaacgatcgtgagcaaggccttacccagtgacagcaacaactactgtggaatgaatcaggcccgggccataaaggttattaggggttgaattcgcggtctttgctgatatgatggccttaattgacttgcgaatgtgggggaacaggttaatggctcgaattgcctttgtgcatgaa

SEQ ID NO: 8486 - DNA, 1294 bp, Glycine max
  unsure (1)..(1294): unsure at all n locations
  Clone ID: PAT_MRT3847_107672C.1
aaatgttacaacaagaacctcccggagggaaagtggagaaaatcacgagaattgagaaccggagcagaaaaccgatccgattcactaaaccttaattttctactttcctttcgcaacttaccctcttgtctataaacctgaatccctgctttatccttaacctctccaacaaaatcccacaatccaagttctcttgctccatccatcatctcttggcactgctccaacctcttcaaacaacaaaccaactccaccacttccccgaacttaaaccctcccaacctctccttaaactcactcaccctcacgcgcacctcaacttccacgacaccccaatcctcacgcgccagcttcacaatctcctccactaacccgttgttcccgtagacgttgttgggctcgggcctcttgcaaatcccttcaaccagagccaccaaggagtcaaactcggtcaacaagtccgcgttgaccagacccgacaccctgtcttctctgtcggtcggggttccgaggaagaatcccaggatcctggaagtgcacaggagctgctcgatgtgcttcgcgaaccatcggacccaggacgagagttcccatgatgtggggtcggcgttgtgtcggaagttggagaggttgaggtagtttctgccgcctgcggaggggtacacggagagctggtcctggaggatgaagctgccgtggtggatgatgtggtggacggcgatcaggcacttcagggccacggcggcgttgttggtcccctgaaggcggtccatcaggacctccacagcggccgaggcggtagcgcgtgagccgtcgccagaggagaggagcgtggctaggtgcttgcgcgtggggggcgtggaggaatcgtggctcgtggcgcgtagaaggaagagcgtggtgcgtttggagagtagcgccgccttgctctgcgatgctttgtccttgattatcccaattagatgcgtgagttttgtcatgtttgattttgtcgcgagttcaaacatagacacagtcactagtcactactcgcgcgcatggtgtctgaaaaatttgatgctggaaagttgaaaaaagggagcgtttggcgttgggcatgcgaaatggaattaaaggcaatgtagttagctgtccctagtgggatatatgattatgaaatgttgccttctctgctataatggtgacccccagatttttatattattcttatgcgtagttaacatttgcacatgtacaatccagtggttgatgacttgatggctctagaaagctgtacacttacgtgnnntattga

SEQ ID NO: 8487 - DNA, 379 bp, Glycine max
  unsure (1)..(379): unsure at all n locations
  Clone ID: PAT_MRT3847_107673C.1
gtacttaaactacattcccatttgtttttgctttttgagatttcatcatcctgtatttttggtttctgttttcggacttcaatggaaattattggatgccctcctatgaggggggggaaaaaacaaaaaaaaaaaaaaaaaaagaaaaaaaacaccaanaggggcgggggaggggggccaaaattttggtcattatgcataggggggtgaagccgttcgagagaaggccagcatagcatcggattcccaatacgtactatccaccattgagggggagacccaggatttcccagatgctagggcctatcctctgactttgaaagaccaggaggcaagacaggtattacggctgatccaggtgccgtggctctgatgaggg

SEQ ID NO: 8488 - DNA, 106 bp, Glycine max
  Clone ID: PAT_MRT3847_107674C.1
ggagaaaatcacgagaattgagaaccggagcagaaaaccgatccgattcactaaaccttaattgtctactttcctttcgcaactgaccctcttgtctataaacctg

SEQ ID NO: 8489 - DNA, 329 bp, Glycine max
  Clone ID: PAT_MRT3847_107675C.1
gggagacaagtggagataactgacccaatgtgcccgctttgcaataactccgaggaggacgcagcacacctctttttcaactgcagcagggcctccccttgtggggggagtcactttcatgggttaagtcagtgggtgctttccccaaagaacccaaagaccattttatgcagcataccgtaccgagcgctacacgatcaaaggatattagatggagctgctggtgggtagccctcacaaggaccatatggcaacacagaaacaagttggtatttgataatcacaattttaatgccacccaactgatggatgaagcacttcttctttta

SEQ ID NO: 8490 - DNA, 285 bp, Glycine max
  Clone ID: PAT_MRT3847_107676C.1
cctcgcgtccggcttcattgataccatatgaggggccagttgtgcaagctcaaagcgcgtctcgttcttcctgactttctattctggcgggtctgttatcccagagggcgccgctcacattggtgagcattcacatatctagctcgtcataccccctcaaatacttactcgttggctactcccatggaaaggtaaccggatctaccttgtgacaaaaagcactgtgtcttcactactcttgtcgagagattggttggcaccgaacactgcgggatctgatccttt

SEQ ID NO: 8491 - DNA, 431 bp, Glycine max
  Clone ID: PAT_MRT3847_107677C.1
aagagatggaatgttgttgcaatttatgctttttgatacttgcagcttttgcttggatatcttctaccaaattgcgggctttggtcaactgaattagccaagaaactagcaatcacagtacaatgataacgatgttgaatcgctcaaaataaactaggattctaacaattctgtagtataggaataaccaaggtcaactcagagacacaatccaattaggtttcaacttcaattcacttataaatcaaagtaagggatttcatcgagcagtttgcaaacaattaaaattcaaaagcagaattaaaaaattaataggattatgaaacaaatttaaggagcatcaatgcaattcatcaaatccaaacaatttgaattatcatagttttctaaagatgatgatcctattataaaggttcagtcaatctaattag

SEQ ID NO: 8492 - DNA, 379 bp, Glycine max
  Clone ID: PAT_MRT3847_107678C.1
ctacattggagaagtatgagattttggcgtggggcttataaggccttgaactctccaattacaactagcttttatggtgcggttcttccaaagttgttatcgattatctttcaatttggctcctctaaagtgaggtaggagatattctttagagaataaagtgcagttatttttggtgattagaaaacaactaacgattgagatgtgaacaactttataatttgttatttatgtgtgtcatttgatcgcaatattatatgttctaataaacgattataattgcactttatcttctaaagtctacttcttactttagaggagctaaatactattatctttgaattttggaaccattttgcaatgaagaggattttctagc

SEQ ID NO: 8493 - DNA, 395 bp, Glycine max
  unsure (1)..(395): unsure at all n locations
  Clone ID: PAT_MRT3847_107679C.1
ggaggaaacaaagaaattctggtgcatatgctttgttcagcctttatacctggcaatacttttaggtgatcacctagaaagggtttgttgtcaattttgcttagaaagtggaagccattcctgaacctttcaatttttatcactttcccctcacttcatagtaatagcgtaatcatttatttattatttatttatttttatattgttccatccttagaatttgaagtcctttcaagtactcagttcattgcagaggatagatcattacatggatcttgtcttttagtttttggcttttcaagtacctcttgttctttgatttacatgttatgtacatattancccctggaattatttggaataagttgcaaggtatatactttaattagggaatt

SEQ ID NO: 8494 - DNA, 2094 bp, Glycine max
  Clone ID: PAT_MRT3847_10767C.1
cgtgtgtaaatccaagagagtccaaaaaaggtagagtaagatactctcccaaagatatggggtttgtaatcaacacaacattggtcctctcttcaaaagacactgcaggaatagctttagagacatcagatatgggtggcaaacaattggccagaagggcaatattccatgtggaagtgtagtaacaacttttcggtaagctcggaattcggcccaaaactcatttctcatctcaatcaatccaatggactctcccaacgctttgtctaccgctccggcagcgggtagtaggaagaacgcgacgctaatttgcgtcccaataatgggagaatcagttgaaaagatggagattgacgtggacaaagcgaaagccggaggcgcggaccttgttgaaattcgattggattctttgaaaacctttgacccctatcgagatctcaacgctttcattcaacaccgttctttacccttgttgttcacttacaggcccaaatgggagggtggtatgtatgatggtgatgaaaataaacggctggatgcacttcggttagccatggagttgggagctgattacattgacattgaacttcaggtagcacatgagttctatgactctatacgtgggaagacattcaataaaaccaaggtcattgtttcatctcacaactatcagcttactccttcaattgaggatcttggtaaccttgtagcaagaatacaagcaacgggagcagacattgtgaagattgcaacaactgccttggacatcactgatgtggcacgcatgtttcaaataatggtgcattctcaagttccatttattggacttgttatgggtgatagggggttgatttctcgtatactttctgcaaaatttggtggatatctcacttttggtacccttgagtcaggagttgtttcagctcctggtcaacctactcttaaggatctattgtatctatacaatttaagacaactggctcctgatacaaaagtatttgggattattggaaagcctgtcggtcacagtaaatcacccatattattcaatgaagtcttcaagtcaattggtttgaatggtgtttatctatttttattggtggatgaccttgccaattttctcaggacttactcttctacagattttgtgggattcagtgttaccattcctcacaaggagacagcacttaagtgttgtgatgaggttgatccagtggctaagtcaataggagctgtgaattgcattgtaagaagaccaactgacgggaaattgattgggtataacactgattatgttggtgctattactgcaattgagaatgggttacgaggtaaacataatggtagtagcacaactatttctccattagctggtaagctgtttgttgttattggggctggtggtgctgggaaggcacttgcttatggtgcaaaagcaaaaggagctagggttgtgattgcaaaccgtacctatgaccatgccagaaaacttgcttatgcaattggaggagatgctttagcccttgctgatttagataattaccatccggaggatggtatgattcttgcaaacacaacatcaattggaatgcaacctaaagttgatgagacgcctgtttctaagcacgctttgaaatattactccctagtttttgatgctgtctacacgcccaagattactagactcttgaaagaagcagaagaatcaggagccactattgtaacaggattggagatgtttatggggcaagcatatggacaatatgagaatttcaccggattaccagcaccaaaggagctcttcagaaaaattatggaaaactattgaagagtgatcggttatctttgcaacacaatcaaagaatctaatggcgaggtactttaaagtgtttaggatgtgaatgaggaggtatcctccccgttctacttccaatttttcaaagtcttgttaattgaaatcaacaaatgattttgtatctcaattagagtgtatttggatagagaattttaactgaggagactaatttatcagagaatttaaattttttttaatttaaaaaaaattaaaaaacaaaaaaaaaaaaaaaaaaacga

SEQ ID NO: 8495 - DNA, 417 bp, Glycine max
  Clone ID: PAT_MRT3847_107680C.1
gcacgtaaaatgcttgtattttcctgcgaaaaaaagaacgctagaatcttactattgcccggggcctaccgcagggacaaacaaaaaaagggaaagggtaaatcttgccctaccattatactgtgggattaccacatcgtaccccccgtgttatatctaaaatcctaaggtaaatacctaataaagtttctcataggcaaggaaacctgaatgtatatactgcaagggatcctttccaacacggtgtcctcacgcaggtaccggccgacagaagcactaccctttgcacttactttggggcccccatttatagcaggaagagcttttccagatcgaccggttactatgttccctcttaaccaatgcggatgaaactcccctcactcctcggggatttttaccttgagatcctgatca

SEQ ID NO: 8496 - DNA, 693 bp, Glycine max
  unsure (1)..(693): unsure at all n locations
  Clone ID: PAT_MRT3847_107681C.1
tctnnnttnnnatcattatgtctatgtggaatattttttgcaagattgagttccagatattaattgcactacgaagatgtaatacattacaagtatagttcgcacgggaatcctcttataactagatagaagactcagatttgccattaattttgctttattttatctatgcatagatttataaaactgacggaagtagagagcattagttttgctcctgatagataaggtatttgagtctttttgaggcttcaatgatggaatctctctggccaaaagcactaattcttatatattcttcaccacctggtccaaaaccactacccgggactgtaattatgtgagtcttctcaagaatttcagcaaaaacattccaagattttgagccaggaaaatggacccaaacatagggtgcatttttaccaccatacactgtcagaccaagagaagtcaaagcatcaaccagtatccttgcattctccatatagtagtcaacaagggtctgcatggcccttaaaccctctggggaaaggcatgctagtccaccagcttgagctatgttggatgctccattaaaacatgtgcacattatacggttgaaatcatgcacaacaggaaagccatttgaatacaagagttcttcagggaccactgtccaaccaaggcggacacctgtgaagccagcaaatttcg

SEQ ID NO: 8497 - DNA, 605 bp, Glycine max
  Clone ID: PAT_MRT3847_107682C.1
cagtattaagggaacaacttttttaatcaattacccttcttatataaccaattaaaataccggagaaaaaataaaaagaggggagcccaacaaaacccgttccaattaaacgagggggtaattgcattttgacccctaaaggggaaaaccaacaaatccaaaaattgcagcagtagggcctccgggaatgaaaaaaaaaaaccagcaaattgctagagtttatcaatcagggtgggccatttaaacccgtctgattggaaagccaatccctgacctgagtaaaaatggaaggggggataagaaaatggacgggggtaataatggcaacccatcaaaggggcccaaaagcttccttttggggaccccttcccttttttttgggctaaattcacccctaacctcctttgtgggcatgaaatccttaaaacgcttaacataaaaaaacttcactggcttcactataaaatcctttgcaccctcctccaaacatttgtttatgcggggaaaaacgttttcaaatgacataatacccacaggcgtttccttgaaagaaaaggatcccttgattctttggagaaattaataaccggtcattccgggcatac

SEQ ID NO: 8498 - DNA, 196 bp, Glycine max
  Clone ID: PAT_MRT3847_107683C.1
aatttctatatgaattgcacaaattgcgtttattatatccaactcctagcgaatcctttcgttctcataaacatcctggttcagttactactcttctacattttcatcatcaatctactgttctcttacttcattaccctcactcgttaatccttcaccaacatatacttctgcttcttctctctctctatcaacc

SEQ ID NO: 8499 - DNA, 240 bp, Glycine max
  Clone ID: PAT_MRT3847_107684C.1
acacagagactttataatctaaaggcgcttttcacattattggagcagggaaaacctacattaaaaaaatgaaacaacaattcctcgcttgacaataataagtaccaccaacaaacaatacctaacaacatgcaatgttttcacatctagaatgcacacaaaaacattgaaaaacaaattgtccatctttacaacaatactattccgatggcaccacataaatgactaaactgtacttat

SEQ ID NO: 8500 - DNA, 319 bp, Glycine max
  Clone ID: PAT_MRT3847_107685C.1
tattttctgcttgttctgtttaggttcctaacctatgttcacttttatgcttttttttttcttgtgtttccaatcacttttttgtttttaaaaaaaaagccactagggaaatgaaggacaccccccggcgcccaaaggaggagagcggggcattaacactcccaacctgacccttttttccaacaaggaaatgggggcccccccccctttttccacagcagcaaaaacagaaggatatgttttgaaagcacaaccacaaaggggccggggcccctatttaactgaatgaataagggccccccccaaccctggaaagctt

SEQ ID NO: 8501 - DNA, 497 bp, Glycine max
  Clone ID: PAT_MRT3847_107686C.1
ctagctatctcgatcgaactgtccaaggtcctgtcacgtgtgtagatatggttgctggtgtgtgtgtgtgtgtcgttgggggttgtaggtgtggtggtataaaatagtatgtggggggtagggtattcataatataataatcgcacggaaataaaaaatacgaatgttatctaggtagcatacatacccgcgatttagttcttaactttcatcgccggaaaccatcctcttcataatttagtgggtttctcatcaacgtgtaatgggatcacgttattcgttttattgatcggttgtaattttattattcctctctcacttcatcatcacgtcatcatattggtggtggtccatgcagttgtatcgcgtgcagttgttgttgttgcagtcatcgcattcatactcgcggtgattgctgtgattcgttctattattttattggtattcgtatcgtctgcaaatgtgatgattgcaattgcattgctgatgctaatatt

SEQ ID NO: 8502 - DNA, 341 bp, Glycine max
  unsure (1)..(341): unsure at all n locations
  Clone ID: PAT_MRT3847_107687C.1
tttttgggaagtaattcttacataacaaacccccaaataatatggattcacaaggcaaccttgacattgaagactgatgctcaaacaaggtattcaaaacctgcacatcagtaccttacacggcatcaaaaataggacacctgccatggaatccttatccaatgatagagaggtaaagatggcacgaccattcttaatcgtcataaacaagaaacagcatcttactcgaaaanaaaaatctggcacagctacctattttgttgatttacaaactccaaggaaaggcttaattcctgagaagtgggtggccctgaatgcaaaccattcccgaatatagcgtg

SEQ ID NO: 8503 - DNA, 289 bp, Glycine max
  unsure (1)..(289): unsure at all n locations
  Clone ID: PAT_MRT3847_107688C.1
accactcgagccgctttttcatttctcacagccaaggttgttgtactagttgtattgttgtatctgaaacactctcaatgtgttcctgaagggagccatgagatctttagcatttcttctgattttccatctccgtgtatctcccaccattgtcaaatctctctctctcccccaccctccatccaatggtactttggacccaaaacaagcaatggccctagaatccctcaacatccccacctcaaaggacccttgcgcccaaccctccttccacaatgcnaccctctgc

SEQ ID NO: 8504 - DNA, 488 bp, Glycine max
  Clone ID: PAT_MRT3847_107689C.1
attatctttcccttttttttcttcctggggaacagtgaacaggtgaatgattacatcttctccgctattggttcaacatggcagtggccacaggggataccaaatacaagcgaactttttattggactactgatactggcctgcgacactaattatacagccccctctatttagatcaccccaactggacacataatgcttaattgataactaaaaacgagacgagtttgtcgaggcgtttgcaagcctctggggcaaatattatcaagggttacaagaatcttatatgaccaccccagagccctttttgaactattactgtaaaagatgtagagagccacatctttccctgaactgccaggaacactcaacaccaacattttggttcaccaaacatgggagtgtgacgcaattattgtatcaacatactaaagatagctgctcggacatttctttccaaaaagggacccgcttccactttatggacc

SEQ ID NO: 8505 - DNA, 347 bp, Glycine max
  Clone ID: PAT_MRT3847_10768C.1
gaaggggaccaatggatgacaaaatcatttggtgtacatgccaaacaccccaaaccccttctttttttactttacaacaacaatggcgctgcggaaaaaccctgaaaaaacccctgccccaaaaaccccagacgggggggaccgacaaaccccctctggggggaaccaagttgtttaagctggccaacgaattatcgggggggggataaatctcaagggggggggggttccctctttttctgaagggaaaaaggaaacaaccgggacggggatagcttctgttgcaggttttgtgagcccatttgccgaagatttcccccaaaaaaagatatttgtggcctaagggg

SEQ ID NO: 8506 - DNA, 269 bp, Glycine max
  Clone ID: PAT_MRT3847_107690C.1
ggacacatcactctccttacactcacaacagagttcacacagcgcagctcatcctgtcgtcagaattcggcatcagcttcctccatggctctcgcaaccgcacccatggctggtatggtcgttaatctggtcccatcagccgcagaagtgagaatggtgaacatgatgaagactgtcatcaagcaggtctcctcagggaacccatggtacggcccagaccgattcgcctacgtgggcacattctctggttagctcccgtcctacctaac

SEQ ID NO: 8507 - DNA, 511 bp, Glycine max
  Clone ID: PAT_MRT3847_107691C.1
ggctcgagtcgagccctactactttccccgcgctatgttctttgcttgttgttcttcttcttcgcttcttcttcttcgcgaccgtgagaacaacttcttcagcttctttgtacaacttgttcacgaccatgacatgtagccacattacctaggagttagtttgtggaagtcgtttgcttcaaggattaggtttttgctcgcaaggtgtcattttgagtgagtggtgatctgatcaaggtatgaggaaagcttcaagtctccgcgccattgttttagatctcactgccattgtgactattttggttcaaggtacatttggtggtgacctgatcgaggtacgaggagagcttcaagtctctgcaccattgttttagatctcagtgccattgtcactgtttggatctgaggatcatggcttctcacctggctcgtctactccttcttctacttcagacgcatcagcttcaccgtctgccatgaagtggacacgcaaagccacacgtctacgata

SEQ ID NO: 8508 - DNA, 336 bp, Glycine max
  Clone ID: PAT_MRT3847_107692C.1
tataggggttttttttttttttttttttttccaaaacaaaagaccgccattcctatcatttggtggcacattgttacaaaaaagcactacgcctgatcctaatatacggcctatacattatccttctactggtataattagtccgtacacttattttccaatcgtttgttgctgctcctattttgtcgaagataaatatgattacccatcctgcaaagaacttctttatccttaccaatgtcaacatgcctatcgcatgcactggcttaaaacccgaggtttacccattatccaccaacacaaaaccttaactttactttatacccctagacttaa

SEQ ID NO: 8509 - DNA, 393 bp, Glycine max
  Clone ID: PAT_MRT3847_107693C.1
tgtgaacccaatatacgccgttcgcaaagtgatgcaatgcctcctatgtcaatgcacgctgctagtttacttcttgaagctgtctttctcaaggcaaaatcgtttcaggctcttggaaggtttcaagatgctgctcagtcatgcaaaactatattagacactgttgaatctgctttaccagaaggctggcctgaaaactttgtttcagactgtaaactacaagagacagtgggaaatgctgttgaactgcttccaaagttgtggaagcttgcaggctcttctcaagacattatgtcatcctataggagggccttgctttatcattggaatcttgacattgaagccactgcaagaattcaaaaggaattgtctttttttcttctgtatagtggt

SEQ ID NO: 8510 - DNA, 241 bp, Glycine max
  unsure (1)..(241): unsure at all n locations
  Clone ID: PAT_MRT3847_107694C.1
gcttcgaaggcatgtgacaaggaacctcagcgagcgtttcctctggggtccattcacaatttcacatttcacgagtcacattcatcaattcatattcattcatggtccttctacaacctccttaatntcatgctcttcttcttctacctntgtctcacgcatcaccggttcttagtctagttctgtctacgtgtggtgtccnatacacgatagacaaacaacgataacacacacacaacat

SEQ ID NO: 8511 - DNA, 172 bp, Glycine max
  Clone ID: PAT_MRT3847_107695C.1
gcgacatatataactgcttctaatcatttaaaactcactcggaacatatctccgaatcgggccatacaaaaaacaaaaacatggctgtcttcatcggtaacaaacccggtcctttatatcgcttatatcgagccgtcgctaccctcaacttttactgtatggactcagcgta

SEQ ID NO: 8512 - DNA, 288 bp, Glycine max
  Clone ID: PAT_MRT3847_107696C.1
tccgggacttttagtagaaatttgattcaatatctctatttcttctcttttttattgttaaaattatctaaattgggcttaatattttagaattgggatggctggtgctaagttgcttcttggctcagacgccctgtatctatgcaaagcttgcccgtgccagtgtaaattgtattgctgtccttttcagattttttaaattttatgaaggactagcaattgtacgattataggaaaaatgatttttttttttatcaaaagataaagcaactccattaccatgaatcg

SEQ ID NO: 8513 - DNA, 540 bp, Glycine max
  Clone ID: PAT_MRT3847_107697C.1
gataaaccgcgatcacaggttgccgcaccttaaaaccggaaacaaaagcaatcgctacttgattgcaagaatctctcaattcacttcctacttatttgtgcacaatttctcaagggaaagcaaatcactctctgtgctgagcacatacttggagaataatctgctttaccactcttagtgtatttgctgaacactctcctatttgatataggacttggtgccaaatgtaacctgcttctgtctctttctcagacctctgattaatttcaagttcatgctggtgaaatcttggattaccactcccactctactatctggtataggatatcgagggtagactaatatatgtctttccttgcttacactctattgttctcactgaaccgcattgccgttcaaagtggttttattcgaaaaacactagcgcagaggtgcaaatgtttgctgcgatatatttatttggagacaacaggctcactgagaaaacaacttttacttgcagagatcaggacatcttggttgtttattacacaatcgcaa

SEQ ID NO: 8514 - DNA, 149 bp, Glycine max
  unsure (1)..(149): unsure at all n locations
  Clone ID: PAT_MRT3847_107698C.1
ccgggccggatctccggggcgacggaaagcccggaccncacanaaaaccaaaaaccaaccnggcttcncccncaacacaggaggcaccaagagggacccggcggaaccgcacccggggacgcagccaagccgaccaaccaaganncaaa

SEQ ID NO: 8515 - DNA, 511 bp, Glycine max
  Clone ID: PAT_MRT3847_107699C.1
ccacgcgtccggcctcccacgcgggtgaaagaaacaaaattctcatcttcaagtcatggccatctttaaggcgctccttgcttcaatcctcatttctctggtcattgtgaatctggtggaatcagatacaatgtatcaggtaatcaagaacacggtagagggatcaagtcctagcccttccccgccaacgatcgattgtgatgttgaatgtaatcggaggtgtcaattatcatcaagaccaaatttgtgcaagagagcatgtgggacgtgctgtcagcggtgcaattgtgtgccttcgggtacctatggtcattatgaagagtgttcatgctatgcaaatatgaccacccacggtggaaaacataaatgtccataattaattatatccattcattgactcttgtcttttaatatatgaattcaaacgcgtgtaataactagcttgggtgttttatgtatccatcttagatggcacatgattaattattaataaagtgaaatttctcacctt

SEQ ID NO: 8516 - DNA, 313 bp, Glycine max
  unsure (1)..(313): unsure at all n locations
  Clone ID: PAT_MRT3847_10769C.1
aattgnaataaagnttananttgatggaataagtnaaatagnttatnntnagaattggttttttnttanngtggnnanaatntgtgtnattangnagttgaattannttaatagggntntggatanattnaatggnanaattgtttntnntgtatattatgtaatgttnanaantnttantattattngtagtgnaataatgtttaaggattggtnnggtnaggatgttagtagtatagnntntgagatatgtggattnatnantgttnttanaggaanaatnatattgnanatgantagagaanaggaagaa

SEQ ID NO: 8517 - DNA, 651 bp, Glycine max
  Clone ID: PAT_MRT3847_1076C.1
ccgcaccgcttcccggcctttcctttaccgtacggatgttgcagcatatctttgtctttcctgtgatgcaaaggtgcatttagcaaatgcagtgtccggccggcacctccggaacctcctgtgtaactcatgcggataccaccttgcttatgttctgtgtttggaacacaaaatataatttcatagcttttttcatgtttggaattgaagactaaggaaatggagaaggtttgtgaattctgcacagctttgaggccacttgtttactgtaaggctgatgcagcatatctttgtctatcctgtgattcataggtgcatttagcgtctgcagcgtctggccggcacctccggaacttctgtgtgccactcatgcggataccatcttgcttatgttctgtgtttggaacataaaatgttgatctgtcgtgactgtgatcaaaagttgcataacctttctttaccacataagaaacgagctatcagaagtttcatgggctgcccttctgctaaagactttgcagcactctgggggtttgaatcgaatgagattgaaaactattctgctcaggatcagtttggttcagtttcttgtgtttctgcagatttgaatgttgcacaagtttcaggaaagcctggcattcaaactgggat

SEQ ID NO: 8518 - DNA, 573 bp, Glycine max
  Clone ID: PAT_MRT3847_107700C.1
ctttttaggcaacagctagagagtacttttaaattatcaagcatggctgataattataatgtgttagagctcaacattggtttaggcaacaacaacaacagcaaagttggtggtcatgcagggcaatcaccaaggcaaaggtgccctgcaccgtttctgttgaaaacgtacgaattgttggaagaattaagtgagaatgaaaaagatagcaccaaaattgtgtcgtggaatgcagaaggaactggctttgttgtgtggtccccagctgagttctctgagctcaccttgcccagatatttcaagcacaacaacttctctagcttcattcgccaattgaatacatatggatgtaagttattgtcctcctacctttgcgagctcgtgcccggcatgcttcagcgggcctgctggcacagtctagccgaaggcacgaggtgattgtgcctgccatgtgtggtgcctccattcctgatgccttcttctgcgggttttcttccatcgtgtcccgcggaggtattctctgatcgtcgtcctctccgcattgaagttagttatttatcaactttcttgaat

SEQ ID NO: 8519 - DNA, 526 bp, Glycine max
  unsure (1)..(526): unsure at all n locations
  Clone ID: PAT_MRT3847_107701C.1
angangttntcgncncnangtgcgagganacnttgcngggacgcannggtcacgcgngnntngnncagcgnagtgacgcnnngtatacgnggagcgangnntggcgatgtctananagcngacgnntgtgctncgngatgtanngngtngtnnatgcnaanagccgntnncgatncgactagagagtgangtttggcgttgagnnagatgcntnanatnncncgnnactncatgnnggtgaactcttnggtnangtngctngtnaantcgcngtgtagtnnncgnnnngttgnaacgcnnnggnatgnnangngncagnntgnngtangncgcagngctgcgcgnngnatnnnnttggnnngngnnctagagcntgtgtagtagacnnccgagnannntgangtatntacttgantnanactgngcnngtananntangacgncaagngnnaacgaccgcagntagagnagcngagnngncngntgnngtncntgtntagagnggatntcggcagnngcnatacct

SEQ ID NO: 8520 - DNA, 202 bp, Glycine max
  Clone ID: PAT_MRT3847_107702C.1
cacagtcacatacacatactactacttgtgttcattagcatcttgttgctgccacaagccatggttctacaaacacgcaataatgcacacgtcgtatctgttccgctaaaggctcaaggccacatcatgcccatgatggacattgcacgactattggcgcggactggcgagattgttaccatattcactacaccacaaaatg

SEQ ID NO: 8521 - DNA, 1416 bp, Glycine max
  Clone ID: PAT_MRT3847_107703C.1
agtgtgtgtaccttactcccatcccattatcaaataggttaggattcagatctcaccagagagaggagaagagatgcaattgcaagctggaatcattagcctcttcaagacataaatctgtattgaagggtttaatcagagagacaaaacctgatcttgagctaaattccaaagaaaacaccaatatacaattctagagtagtggtcctgtccctttgatgcttcttgtaccagtcttccatgaggctccttctttgcaatgatccctttcattctcttttgtctcgttgctcattgtgcttccatttctttactcccagtaaaaagggttgtcacaaaaaaacacacatgagcttgcacatatttgacaagctcaaactctcaagacctggccaaagccaattgctttgaaattttcctaattttttcttctctcactttgatcttctctctctctctctctctctctctctctctctttatatataaaattggtcctctaagatgggtaatgaaaaccattaccaccatcagttttactatcagaaaagcacattccttccaatgctttgttcaaggccttccatcaaagaggtgactcttcctcgattcagagacccttctgcttcttctggcaacgaccctttgtccccaagaatcagttgtatgggtcaggtcaagagaaacaacaaaataagcggcattccaccctctcatagactcactttcacaaccaaaaccgacaacaccaacagaaacactacctcctcccctattgtcaaatactccaagctcaaaaaactcttctctggcaagaactttattattagcaccccaaaaaccaccacagccaccaccaccttctcaagctgcagatcaaggcatcaagaagtttcagatatgcccaaaaaccaaaagtgtcttagcaacaatgttgttttcaacaaaagcattgaggaaatggatcctcctttgcctgtggtcaaaagagtgtgcaaattggaagaaccaaaagaattggatagtctctggaaaagaagatcaggtacggataggcctgcactcaaaagtttgcagcttcaacagattaaccatccaaggatttgtgttcagcctccaactgtttgatagctactatgggaacacaatcaaatcaacagatccagaattgtacttttttataattttatttcttattcagattttgttagttccattagatccaatgtaaatggttttcttttctctttttcattctcagggcttccagtttcctagtgttgcttgattgattgatttcttgcgggcatctcacatggcggcgatgcagagtttcagggtcatgtttgtgtggatacatcagtgaattggtcaaagtcaaacggtcaaaattttaaatatttaatgcgtttaatt

SEQ ID NO: 8522 - DNA, 1284 bp, Glycine max
  Clone ID: PAT_MRT3847_107704C.1
tctggctcgactccgtctctgcaattacgatggcgcccagggacaagactagtgccgttaagcctagcggtaacgccggggtgaaggacctgcattttcgtggagtcaggaagagaccgtgggggaggttcgccgccgagatcagagatcccgccaagaagacccgcgtctggctcggaaccttcgacaccgcggaggaggcggcccgtgcctacgacgccgccgcgcgggagtttcgcggccctaaggcgaagacaaacttccctctcccttcggaaaattttaagaacgcgagccctagccaaagcagcacggtggagtcctccagccgcgaccgcgacgtcgccgccgattcctctccgctcgacctcaacctcgcccccgtcgccgtctcctccgctcgattccccttccggaaccagttcccggttttccccggcgcggtgccggcggcgaaccaggttatgtacttcgacgccgtcctacgcgccggcatggccggtccacgtggcttcgcgtttggctacaatcctcatcccgtcgcggcgagtgagtaccacgcgacgacgagcgactcggactcgtcctccgttatcgatctgaatcataacgaaggcgttgttaaggggaacggttctagaatgttcgatctcgaccttaaccatcctcctccacatgagatcgcttgatccagaatctgactcatgccttgagtttttctttttctaattttgttttttaaagtagagaaagtagcagcgttcgataaggaaggaagggaagggaaggtaaagaaatactatgtgaatacgtagtcggtatgattgtctctatttttttgcgacagaggaaccaccagtttcatgctgttttttcttaaatcacgaagcgctcatccggtttttctttcgttttgattgatattttactacggtgtaatgttttttggttgcagccataatttggttcaatgaaattaacacggaaagtttgaattattttgattgtgatatacattttcaattaaatacgaatggggaaggaaagaaaagctgtgggtgaagcgtacttggtagtaatggtcgttgttgttggcgttgatttgattgacaggtggctcttgttacctctcccttcaaggtgactccaacgtccaatggtgcgtgggctatgtaactacacgactggtggcacagtgccacattctcaattcgctcccatcttcatgatgaaaatgaatttcatggtaaaaaattaactaaagtatgcaaaagtcatttaatt

SEQ ID NO: 8523 - DNA, 288 bp, Glycine max
  Clone ID: PAT_MRT3847_107705C.1
ttttttttttttttttttttttttttttttattttttttgaaccgggcgggttttttttatagaaaaaacccggacccaaaaatttaccccaaacacttacatgaaaaccgcttcaaattggaaccaagaacgcttttctaagatcctaatggttcactggccaataatccaacccggttaaggtttgacccttaccatggaatgggggtaaaaattcaagaggcgtccttgacgccctaaaaaaaatatggaccattttccttccctcgggggattcccccatgggg

SEQ ID NO: 8524 - DNA, 463 bp, Glycine max
  Clone ID: PAT_MRT3847_107706C.1
aaacaacactctccccttacaaaaagtgaatgactgtctgaacaacatctgtacgcactataactgagaaactagaagaggcataaataaccttaacggccccaaaaacaacacatatccttgggtactgcctgtgttaggtcagatatctaagcacctcacaacacactggcatataactctgataaaacggttttttcaaaacgtaatccgtgtacatttcaggggcgaaatctaaaaacatttccacactttggggtgcgggctcacacaccacaaagaatttagctcctgacggggtttgaatgcggggaagaacaaaaagatcaacttgaagaatttctcctcctaaacagccggaaacgagggataacagctcccagataaacggccttgagggccataaactggccacccccaggccgcttttggtttccatgccaccaggagacccatcatcctt

SEQ ID NO: 8525 - DNA, 311 bp, Glycine max
  Clone ID: PAT_MRT3847_107707C.1
ctacagaatctggcaatgtagacgaggctgggaacaacctacaatgctcaatccttattaaaagcattccttgtacatatacaccgcttaacccagacatgatctttgaccaatcaacatgtcctagggggcaaagggtattaagctctgccacaaccatagcaactgctcttcgaatgcgctactcccttaaaggcctcagagtcttaaggatcctctctctctggtacatatccatatatgctgaatgagcatgcgctcacctgtacttgtgtaataagaggccccggaatggaagaccgcttatttca

SEQ ID NO: 8526 - DNA, 546 bp, Glycine max
  Clone ID: PAT_MRT3847_107708C.1
gcgaggccaaggcaacattcatccgaagttctgcatcaaacactgcttgaactttgaatttctattgcagaaggacgtgtcaacgtaagcgtgtacgaattgcaatgttgagctcttttgtcacttttgtgacttgaacagctacgcaatatttcattcgtagtctgttccatggtctcgttgtgccattcctttttgttcatttttttttattaacgttgcttcttttggtgaactctcccttattattccatggtggttgttctagtttccgaagcatatataaattaattcgtctcgaataaccggttttaaacagcgtggtgtaatcttctctaagctaccctatgctacctgtcttctgaaatggaaacgccaaatgtaacgatacctaaagttggacctaaaccgtcgaggaaagtgaagcttccgacgccgaaggagctgatatcacactatgaatctaagggtatggactcgcaagatgcgtcgatgaaggtcattgaggatcttcagacggctctgattagagtcatatcctctggc

SEQ ID NO: 8527 - DNA, 1161 bp, Glycine max
  Clone ID: PAT_MRT3847_107709C.1
gacccaaacgccgcgaggccaaggcaacattcatccgaagttctgcatcaaacactgcttgaactttgaagtatgttctcttatctagggtttactcgtttctcatttcttcctgaactagttcttctgcaattgtcgctttttgataggcgttgcgttctttgtcagtttctattgcagaaggacgtgtcaacgtaagcgtgtacgaattgcaatgttgagctcttttgtcacttttgtgacttgaacagctacgcaatatttcattcgtagtctgttccatggtctcgttgtgccattcctttttgttcatttttttttattaacgttgcttcttttggtgaactctcccttattattccatggtggttgttctagtttccgaagcatatataaattaattcgtctcgaataaccggttttaaacagcgtggtgtaatcttctctaagctaccctatgctacctgtcttctggtacattcaattcattactatatattcattttccacgagtaaaagcagtgtcattgacgttctaatgaaactaagttttgaatttcagaatctgcaactgcgaattggaacgactaaattaaagtgatgtttgtcatcactcgctgattaaaatttgagaaatggaaacgccaaatgtaacgatacctaaagttggacctaaaccgtcgaggaaagtgaagcttccgacgccgaaggagctgatatcacactatgaatctaagggtatggactcgcaagatgcgtcgttgaaggtcattgaggatcttcagaaggctctgtttagagtcatatcctctggcaaaggtaaacacgacaagctattgactgaatcttctaggaagattgatgcaattaacaatagactcactgttcttgacatgaagcttgattccaagcctgcttatgttgaaacttttgcaattgggcttgcctctggagctgccctcaaaggtattggtgcagttgtgcctcatattattgcccctcttactcagatatggaactctgtttcctctgccattaaatcttccccccaatgatattagtatgtaattattagtttgtagaaatattttttaatgaaatgactatgcccccattttttatgtcattatctaaaaaaaaaaaaaaaaaaaaaaactcgag

SEQ ID NO: 8528 - DNA, 453 bp, Glycine max
  Clone ID: PAT_MRT3847_10770C.1
cgatctataaccggtcgcgttttttttttttttaatttctgaccgttacctgcatgcgttccagttttttttttttgtgtgggggtaaacccccacccatttttttcatcgcagattcctgtgttgggttgtttggcttgccaaaaaccacggcaaatacaatttcaaacacattactttaaggccacaggtgcctaccgagcaagctaacttagatccaaaccttcgctctcactgaaggctaagtggtggaaaaaccaatacaaccagctggatgaaaacattttccaactctacaaaaacacccagtttgtttcccttgggccaggttggtttttcaacccacccccgagacccccaagagttcaacatctttgatcttctggaaaaaagaaaaccgccccctggggggcaccctgggttgccccaggaattacaacccggccgatgggg

SEQ ID NO: 8529 - DNA, 461 bp, Glycine max
  Clone ID: PAT_MRT3847_107710C.1
ggctcgagaaaaaaaaaaaaaaaaaaaaaaaaataaaaaaaaaaaaaaaaaaagaaaaaaagaaacgaaaggggaataaaaaaacccgaaaaaaaattcaattccgagtctgggcggcccgctacttggggtctttttaccccgggatttaattctggcccggtccttgctgggggcctcctttcccctatggggcgttgctttatggttggcgggccccctggcattcgttgtctcctgggggaaattttttcccgctgccatttccccccaacttcctatccgtgagtctcattgttcaacccgggggcgcttcatgcgggggctccccttcttacttgctttgccctcactgccccctttccaggggggtacccttttgtgcccctcggttttattgattggtcccctccgcggggggaggccttttgttttttggccccccgggaggtttttccttt

SEQ ID NO: 8530 - DNA, 311 bp, Glycine max
  Clone ID: PAT_MRT3847_107711C.1
ttactttataataaaatgttattcccaaatttttagggacattgaagaaacaattttgatcaacgtggtttttatagaccaacataaattggccaccctagagggttaaaaaaaataattattctaattctctagctcccactgatttagttttagaatctctatgggataacaaaatttttgaaaaagcatatttgggtcttttatatgtgtaaagcccatggagcatgttgattgcaaccctccaaattaatactgtttgtatgaaagaggttttcttagaaaaaaaggcaaccaactaatactttttt

SEQ ID NO: 8531 - DNA, 450 bp, Glycine max
  Clone ID: PAT_MRT3847_107712C.1
gacgcattgcagtatacagtccctgaatgtagagacatgccaatgcagatgccagagtctacttgctctttcaacactttccctgtacaaccaacagacaattccaggaatactgatggtgctactatgcataataaaggttactcgataccaccacctcaccatgtgccatccaatcagttttcttttgttcatggggaacatcgtatgaagccacaaagggaggttccgccacccccttcatattccaatgggcaccactttatgccaagcatgacgagagagtatggttatgacaatcatgagagattaagaccaccatatgattaccaagagagatggaatgttcctccttgttctggtcctcggtatcatgacaagagtgtgcctgctccttatggttgtcatcctaatgaatcaattagttttccaagtcatggatggagattt

SEQ ID NO: 8532 - DNA, 204 bp, Glycine max
  Clone ID: PAT_MRT3847_107713C.1
ctcgctgcagagctgcgcgttgatctatcgcagtggcgaggataaatgcgtacgagttactgtctaagacgatggcggagctactgatgcagatctaggatctcaaggcggctctagccctgcttcgcgtccgcaaggttacaggcggcgccgcgatcgagctctccacaattaaggtggtgatgctatccatagcgcaggttt

SEQ ID NO: 8533 - DNA, 861 bp, Glycine max
  Clone ID: PAT_MRT3847_107714C.1
ctcttctacactaagtccctagccaccattgaccgctaggggttagggctagggttagggttagggttttcttctcctttcattcctccttcatcttgcgattgtttgttctcttaacttggatcttactttggctggatgattaaaacttattgccgtgtttgcatatttctgaagtaaccgtcataaatcaatgctcacggtgtagatggcaccgccctcatgggtggcatctccgccggagcagtttcatattcaattgccttgtggagcagcgtcgctgcctttaccatttgggactggccatgagaccgaacattacaatccaattttttcaatgtcttttttagaacatagggtttgatctactgacacaattgaccaggtcacccagcagccaataaaaggacaaaagtgtggtggggagttcaatttggagaaatggaatgcacatggagctgcatatcttctgcatgataggttgcacactcgttctgatatcacattgctgatgtttgttcattttgtgcaagcatgcttaaaacaacattcatccaaccttaaaactggccagtttgtaagacttgtgggctaccccctggaagagttccaaaaaagggaactagtcttacaaaattagggtttatgattccttagtctctgtttcactttcgaattttgctttcacaatatgcttcgctatctggtggatgtggattaacttgattcccatttgattcgttcccttgcagcaataatagggatttgtgttgttcttttttatctcttccacaatcctttggttttgggagaatacaggagcaactaaatcaaattttctattgaagatatcatttattt

SEQ ID NO: 8534 - DNA, 412 bp, Glycine max
  unsure (1)..(412): unsure at all n locations
  Clone ID: PAT_MRT3847_107715C.1
gtttgaaatctctgatgatgcaaaccttttggcggattgtggagctaacaatcctgtggtaggaattttgtatccgttttcaaagggatttctttgttatacatgctaagagattggccaactatacttagctgttccgctgttgagctttctttctttctttttttttttttctgtctaatgaatattctatatcctttgttcttttacttctttgtcttcccatctgataataattatttntataaaaatatatttaatctctttttaaaaaaattgatggaatttgcaggtaggtaaaaattttaagaccccccaaatgctttgcttctgggaatcatgtgatgggtctttctgtcaaacctctgtgcacaatatttctggttataagtcttagacttctaatctcttg

SEQ ID NO: 8535 - DNA, 249 bp, Glycine max
  Clone ID: PAT_MRT3847_107716C.1
cggaggatctgttctgttccataaggtaatgcaaattccctctctttttttttcccactttttctttggtttcttcatttcatattatgtcatcatttctgaaaattttgatattgctgatgctgtctggttcatatcatagaaacttaattgaaaggttttctttgtagcaatatgagtaatacccatcaaaactttttctgtttgatgaaacaatttgatctcctccccgtttcgttatactcctct

SEQ ID NO: 8536 - DNA, 139 bp, Glycine max
  unsure (1)..(139): unsure at all n locations
  Clone ID: PAT_MRT3847_107717C.1
ngctagccaatacaagggatnaacacaagcacaaggacagtgatctctctttcggtctttttgagcagactctctgaacacgttagatggattccccctctcgcccctccgtcatcatagtaagtgccggcctctccgg

SEQ ID NO: 8537 - DNA, 747 bp, Glycine max
  Clone ID: PAT_MRT3847_107718C.1
tttcaacaaaaacaatttattgaacctgatcaaaagaccaaagtggctcaatttgaagaagataatacagtatttcataattaactggggggctacatgtttgatgcagaataaaaggagatatcaaaagtttctttgttattttctaacaagaaattatgtataacactataactgacaggaacactggtcttggaacatgaagatacttgcttcgacaggcaattcaagcattaggcaataaaaccctgaatcattggtcatccggggatggagcaacagcaggtgctggggaaggtacacttccttgattagtatttgaaagtccaaatttcttgatgagttcatttgcaattagctcattagcactgtctgtggggtggtactcatcccaaaagacatatttgcttctatctttgcacagacttgatgcaggtacacatgtaagggcgggtcgaatattccaaaaggaacaacagggcgagtctgcgttttggaatccatacttatttggactgctaatcacatcataaacaacatcatatgcatctccaaatttataacttgaatcaggaaagtccttcgccaagtcatcaactaacttgcttgaagctttgttgaaggtaagagccagcttgtttgctttttctcgacaattcccgcttgtagtcagcaccctttgaaggggaatgcaacccattggacccaacccaaaaaccaccagttgtgttgctcctaaactatgaa

SEQ ID NO: 8538 - DNA, 182 bp, Glycine max
  Clone ID: PAT_MRT3847_107719C.1
ggatacccggggggggcgagcgacaaaatataaagttataattagaatttcttttgtacttggccacataccacaatggggtgggtcttttaaacatacagtcggtcacacaaacaatgaagttgctatcaaactgcatcatgatctctgctttgctgatttgagcaaggaaatggcactac

SEQ ID NO: 8539 - DNA, 410 bp, Glycine max
  Clone ID: PAT_MRT3847_10771C.1
acactgtaataattgaccacgtcaagtgatgcttaaatacagggtactttcacacaatttcattaactgtacagaaactaccaatgctttgatccaaaacatactgactgggtttgaaggctaggtatccatgacactcccagggactgttttaaggagtctaaaccctccatggcgcctggaacgacctgaaaatcgtttgaccacacagaacgaagacggccttatcattatttataccacagagtgctaatgccaaccacatcggggcagggcctctcacgaccctgccttggtcattgaaccgagatccacaggatgggcaccttgactcgaagaacgctcggttttatggccccatgcatccctgctgagtgcacgcagtccttgtcgggtaggtcgcaagggat

SEQ ID NO: 8540 - DNA, 599 bp, Glycine max
  Clone ID: PAT_MRT3847_107720C.1
acgccacgcgtccgagacgacagaagggggtttctaaaacactatcccttttactgtttattgacaaagagaaacaatcggaggatctgttctgttccataagatggctggacttttaggatataggagccttccacctaaggcaaagaatctggtagttgctgggggtttgacagcttttgtctttggtgcatacttctacaccatgagggctgttggaggcactgatgaactgcaggtagcaattgataagtttgaagctgacaagagcaagaatgagggtgatgccaacatgccatcaaaggtctaaagcttgtacaataaagcaatactttgggtgtattcactgttttggtttgggatcaagctttttacttagtatgagaatgttctaaaaggaatgatattgaatctagttgctaataagtttcaaccagctttatgtactatgactgtgtggtagggaaactataattgagattctgttttggccttaaaaaaaaaaaacacgaggataacacaaatctgtgatcattagtatatgtaagaacagctgctactgtgactttgggcagaattccattactatttataaaata

SEQ ID NO: 8541 - DNA, 241 bp, Glycine max
  Clone ID: PAT_MRT3847_107721C.1
cttctttgttgcatatcttggaattgtgaggagaaaagagtggcctcatttcttcagatttcatgttgtgatgggaatgttattggagtttaccccagtagagtgatagcggcatccagcggctacagtccctataacctgcagggcaatctccaataacatttttggactgccgtatcatttggttatctatttaccgtcttggagtccataaggtgtgctcttgccggtatgtatgctg

SEQ ID NO: 8542 - DNA, 439 bp, Glycine max
  unsure (1)..(439): unsure at all n locations
  Clone ID: PAT_MRT3847_107722C.1
cggaatnncccgggntcgaccccacgccgnntccgcccacgccgttctcgattcaattcnatgaggcaaccaatatggtatgttgtaaatnnntaagagcannntggctgcagcgaagcggtcttgtattcaatcagtcagtgctctgtaccctntnnctcagcnncgaggctttaccaagacanannagtctttggacccannagatcacntnnccaatctcnnncatttggnncttctcaagggaaaagggcctcctttcttggttaaagggcagctgcnttactccccctgtcaaagcaaggggatcagacccagacctttnnngtggtttggcattcaaagcannaagtctttctctaccttgngnnatggcagcnncttccgggtggacctatnnggatttgaccnnnctctgggaccctttcggaccccctga

SEQ ID NO: 8543 - DNA, 353 bp, Glycine max
  Clone ID: PAT_MRT3847_107723C.1
ccattcggaaggcccccccttttttttaaaaacccccgggggaagagccccccccctaaatattttattttattttttccaccaggggtcccccccttgggattttacaaaaaaccccgggccccaacccccaaagggatctttttttgcgggggaacccccggcacccccttaggaacaaaggcctcccttttaaaccccgggggccatcccccgccaaaggaaaaaaaaaaatttccaggtttaaaaacccatgccccaaatgccctttttatcccggggcccaatttcccccccgccccgaagggaaaaaacccaaaaacttggccaaaaaaaccatggcccaaataaaa

SEQ ID NO: 8544 - DNA, 263 bp, Glycine max
  Clone ID: PAT_MRT3847_107724C.1
tgacgtgccatgcccccgtacgaaaccttgatatccttaaaagcggccgaccttttttttttttttttttgggtaaaatgtttgggtgtacgtaaatttaatatgcaactctggactcttacaaaggcaaaattgcgtggtgtaatgggcatccgctactgtattccaaccaattgattcgacgggaaatttgacactgagaattccccattaagaaatgtgggtcggtacatttttgaactacaaagaaagcaatgaacagg

SEQ ID NO: 8545 - DNA, 509 bp, Glycine max
  unsure (1)..(509): unsure at all n locations
  Clone ID: PAT_MRT3847_107725C.1
catttttntttcttctaataatgaacctctcttttctttcttgggtcaattgaacatctaattttagattcctgtaaaaaaaacttgaatggttttaattatattatactccttagaaagaagacaatattttttatttttttcactaaattttcattaagttaagctgtataagtttcttctctcattcatattgcacatttgcagctttagtttgcaagattgaagtgaagacacagtgaatatgtggctgtgtgctaccaaaagatgatgatcttgttatatattgcattggtgagagaagtgaagtcggaatgcttgatacaggaaaaatacagtggaaaagcattcacaagcattataatacttatctattttggaaatctttccaagttacaatgattcccactaatcataactcgtaagatcttgggtaattaaaatggaaataggagacattttttcaaatcaaactcccccttgggtatctgtattgtatttatgatctt

SEQ ID NO: 8546 - DNA, 431 bp, Glycine max
  Clone ID: PAT_MRT3847_107726C.1
atgttaaggtattttttattgacctctttttggtattctcattacctttttcttctcaatattacccggtgccctattactctacgcttacatttgcccacacacacaggggcaggaatgatacaacagccgcggaggaggacaacccaccccccccgggggaaagactcctaaacctggacactgtttccgggaaaaaacccgccgcgggcggacaaaacctaaaccgagaggatatatttattttggcaaaccacccccaaatgccagaacaccccccagggggggggttccctgccttctaaaaaaaacaccgaaaatttggggggagtttcaagaaaacccaaacacatatgggggatttttccccccccgggctacatgccccaacaaattacctttcttcacaggggcgaaaaaaatactaagac

SEQ ID NO: 8547 - DNA, 506 bp, Glycine max
  unsure (1)..(506): unsure at all n locations
  Clone ID: PAT_MRT3847_107727C.1
acgaggctccggccagatgttgatcctttgctgtcgtctgttcccaatatcactattttattggtttttcactattgtccctcctttctcaccactctaacaagcccttctcagtactgcacattctgatacaaacccaactcctacatatatattcttcttcttttccttccccatccctctgcaccacatctgttatttttctcacttttttcagttactctttaaatacttgtccatcccttttccctttcccccctcactcactcttatcattttcactttattattactcctcccacctcccccctttttttccttgagcaaggtgaaacccataaataatggagcagcagcacatggacatgatgaccatgatgatgttgcagcacctccctgaattctctgaaccatacactcacaccatggaaggatttcatccnccatcagaagagttctgcggtaacaacaacaacaatatacgcaacactatgcaactagcagat

SEQ ID NO: 8548 - DNA, 334 bp, Glycine max
  Clone ID: PAT_MRT3847_107728C.1
agtattagcacttcttattgggttgtccactgcttgcctcagactaaagaacgatagagagagagatgaagaaataagcgaacgaacgctattacaagagttgtctacccccaagagtgtagcagtcacagaagaaggtgacttgattagttccgatgaactcttgttcatgactttagctgtcattaaggccgctactgatgacttttctgatacaaataagctgggacaaggaggctttggtgcagtctacaagggtgttctaccagatggtaatgaaatagcagtttaaagattatcgagaaagtcatggcaaggcatggaggaattgaac

SEQ ID NO: 8549 - DNA, 285 bp, Glycine max
  Clone ID: PAT_MRT3847_107729C.1
cttcttttttttttgtttttttttttttttgtggattttttttttgttacagtgtctgtttcactcttaataaatttttttgggggacagcggaaaaaaggcctcaccaaaacttaacctcaaagggaacatgcattctaaaacaaggggaaaaacgaccaagaaaaaaacacctgcaaaaaaaaacccaccaaaaaaaaaaacatccctatcctgagggccatgttcaccgatgtctcaccccgccatcaagggctcccccatgcaagactgcaggactttcct

SEQ ID NO: 8550 - DNA, 346 bp, Glycine max
  Clone ID: PAT_MRT3847_10772C.1
aatccaagcctaagagtatattacaagccacgtaaattttcaaggatcctactgtgggtggaccaggtcactgagatacacagtgcgtcttatgtatatggacaggcaacatcccgtgaaaggattttgcctaagtcattgcacgtattatcatactttttattagcacctaataatgattctctcagattcacatctttttatttcaatcttgaacgcttgaaaacatattgtgagggccacatgaattacatttgagacattgtaaacaccatactggatctagctctgatggtatgcaaagcggacgcgtgaacggactcactatatcaaccggggaatttcg

SEQ ID NO: 8551 - DNA, 299 bp, Glycine max
  Clone ID: PAT_MRT3847_107730C.1
aaaaaaaaacataacattccttatttattttttaaggaaaaaaatgaatgggggatcgcccacctgatccatgggaaagagaaaccgcaaaccccttagtcgtggcttgaaaaaaaatcaataaaagaggggcccccctgcttttaaaattttcaaattttcatgtttcttgatcattcttcgctatagcaggcgtttttgaattttcatgcccaccccactggtttattttatcttccgcaggggatgcctttttattccaatctgttttatagaccatgaagaataaaacccaagtt

SEQ ID NO: 8552 - DNA, 198 bp, Glycine max
  Clone ID: PAT_MRT3847_107731C.1
agagcgggcgctcgcgagctagaactacacatggaaagacatcacctgctaggtacaaccaacagagtgatattaggaccacatacttactacgtgcgcagatatgacaacacagtcaggactgacacactgatccagatgcagagaaagaaaactcatatagattccatcgaatgaggcaaaaaataactttatttt

SEQ ID NO: 8553 - DNA, 767 bp, Glycine max
  Clone ID: PAT_MRT3847_107732C.1
gcctccctctctcgtctctgtggctgtgatttacagcaacagcagcattgcccatgtctccttcattcctttccctctcttgtttcctccgccccttctcaataagaataactaacctctttctttctttctctctcttctcattcacacataaatctcaatgtctctctccgtaccaaagttggctcggcctcttcctctccatcatcacagttcttatggcagcctcaccatgtctttccacacattcactcccttccttggatccactcacaagcttcgcttcatttcccccattaagctcaatgctcctcgctttaattcctctgttgtatctgtctccgatcttttcaagaacaacaaacccaaatcaaccaccaatctgcttattacgaaagaggaaggtttgcagctctatgaagacatggtattaggcaggtcctttgaagacatgtgtgcccagatgtattatagaggcaaaatgtttggttttgttcacttgtacaatggccaagaagctgtgtcaactgggttcatcaactttctcaagaaagaagactgtgtagtgagcacataccgggaccatgttcatgcactgagtaagggggtccccgcacgtgctgtaatgagtgagctctttgggaaggccacaggatgctcccgaagtcaaggtggatctatgcatatgttctcaaaggagcataatttgattggtgggtttgctttcattgctgaaggaatccctgtggccacttgggcagcatttt

SEQ ID NO: 8554 - DNA, 379 bp, Glycine max
  Clone ID: PAT_MRT3847_107733C.1
gattgttggcttttgcgccgcccgtggctccagggttaacagaactcgatgtccaattgcgctctctcagtttcgaagaatcgtatgccatgggaaagtcggacccaaccgttcgcgctgatcaacatactgacgtagagaaagctaatacgatgctcagaggactcatcactgagaagagattcactcctctaacgctccgtttggtatgacactctgctcgaacatagtgacgtgagctcgaagacctgtagtaccttcggaaccatataccagccctcagacctcgactacggtactaactacggtcataacatcgctgcaaggccactagagccactcgaagcggacttgactatcttgagctactccgatttca

SEQ ID NO: 8555 - DNA, 477 bp, Glycine max
  Clone ID: PAT_MRT3847_107734C.1
ggttataacaattattattattattattgtttctcaaatttctcaaattaaagtgttggtttgaagaaggcggcaccagaggaagtgagaggcatccaaaagtactgtggagaggttgcaccggctctcctcataactcctcataaaaaatattcccttcgttttccaaggttggagccaatcattgaagaagggtctgataatattcaaggcctccagattatgcctaagaggatgctgtttcttgttcctgcattgatttcttttggtacatactacttcttgttgtacagcaacgttaataattaataattagtgccggaaaaaagaagaagaaaaaaagttgatgaaagcatgttaattaattaattaattttagtgatttgcacaccgggaggggatgtgtaaataatatttattttatagtattattattattattattattattattatagactgattgattttcaagat

SEQ ID NO: 8556 - DNA, 712 bp, Glycine max
  Clone ID: PAT_MRT3847_107735C.1
caaatcatcctcaatccatcataaagtactatacgataatgttcgtatcatgaatatatttttttaatacaatctgataacttacatgatgcactagcacggatcactaattcactattgcatgtcatacacctccaatagataatctctcagttttttcactaggtcatgcatggtcatgctgttttcgccattcatctgagcaataatgttgattataagagtagaagtcccaaatggcagtacggtgctactggttgtagagagatggagctttccaagcaaggcatgtattttgaacactatgtccttttgtttctcacaatggattccaatgagtacttcctcatctaagactcttgcttcaacctcaaatagtgatatttctttgttcgtttcacaattgccggtgtttttatctgaggaggcttcagatttccttatgaatgttgctgaatctactttgttttgattttccaactctttaactcgctcttgaagttgttttgtgtaattgacagcttcacgaagcacataagccttgtccatcttcttgagcccaggaatagttgctgaaagtgctataatgctccctgtcagttcctgcctccttttcctctcagcaattatgtgatgccgtgtctcacatgaccttctaaccttcttctttggttgggtttggggcatcaatgcatcaaactcgagctggtgc

SEQ ID NO: 8557 - DNA, 610 bp, Glycine max
  Clone ID: PAT_MRT3847_107736C.1
ggaaaatcttgggcataacttcattcagtgacagtaagattaaattaaattatacaaggtacatgtaagatcctatgttaagtggttacaccaagaccaaaacgagctgtttaaacttcaaatattcactgcaataccactgtcagctgtccaatgcatagtcagttgttagctctggtagttcttctacatttgctctaattacaagtaacggcagaattaacatgctcaagtagaaaccggtacaaatttttccttagcttctctaccctgggatcaaccttatctccaccagccaaattatctaaccagtgattcacctgtttgagctggccaagaagacttgcaatttcaatgttcccttcatttttcaacccatattcattactcagagactcctccaagtacttcaggaaccattcgctagatgcctcaagcagtttttctgccaaactcgcaacctcttttaattcgatttcttttgatcgatcatgtttgtcagcatccttgttcttggctgccaagagattccgctttgaagaagggaagtttttttagcagttgaatttggcaaagtggtttgcttgagttacacgaattttgcttgttt

SEQ ID NO: 8558 - DNA, 483 bp, Glycine max
  Clone ID: PAT_MRT3847_107737C.1
gggtttgtttttttttttttttttttttttttttttgtggaattaaaatttcgccttttttttccatcgtctttgaaaaaaaagtacccttttgagcccttgggggcaacaaaacccttgacttattggggaactgggctgccaagcttatgaaatttttttggggggggccccagggcccggcattgacttcaccaggtggtccttcttgggagggacctttaaaccctttttcttgggaccacccttggggggcttctttagacgggcccgggcaaatttgggctttttggggattttgccctttctaagggacccatttttaagcggggaaatgccctgggggggcttttcgatcttcttgccaaagatttctgggccaaactttaggaataggtgctttgatgtctcacttgggggcctcctccgtcatgatcgatgtgatttttttacggatagcacaaatttgacctgtcttgggat

SEQ ID NO: 8559 - DNA, 735 bp, Glycine max
  Clone ID: PAT_MRT3847_107738C.1
acgatccatgcatgccttttttctgttctccttgatatgcaaatccatctatttgaaccctaaaaggaggaaatcgcaagttataaccacatgacgatataaataaaggcgtgtctgagacagaggcaacaggcaaacaatgcctagtactcttgtaaaaacccaactacaacgaaaaaaacaagaatcatagccaagcaggccgaaaagaataaggtacagtacaccctatctctgtaatggcatcgtgtcataaattactttcatctatgtcaggaagatccaactagcatggaacgatgatttcatgccatactataatgtatccaactcacgacttattcaatatattttttgtgtagactcacacctttttttgtttccatcatgtactgctgttgtacttctaagtctctgttgagtgcgaaaatgcatgcatgaagagactaaatgcaagtagcaattttgagaaaaaacaaaaaaaagttcaactatttaatttctccacttaatgctgctccatcatcctcagcatccaattcttgttccacacctttgacctcaggaacataatgcatcagcatattttcaatgcctgatttcagagtcactgatgaacttgggcagccactgcatgccccttgcattctaagttttactattccagtatctaggtcaaaacctctatattcaatgtccccgccatcatcttgcactgcaggtcgaattcgagtc

SEQ ID NO: 8560 - DNA, 571 bp, Glycine max
  Clone ID: PAT_MRT3847_107739C.1
cattgccttactttagaataatccctttagtctctctctcagttctaattggcatagtgtatgcagtagtggcgccactgttgctcccatttctcatcctttacttctgtttaggttatgtcgtctatgtcaaccagattacgatggttgggttatttggactgaagttgaaacctgctgcttctatatcaaccattccattaattttgttcacatggatgtttaatgagtactgcaagatgcgttttctcccttcctttcaccattatactctccaggatgctgctgaaaatgatgaacttgatgaaaagtgtggtctattggagttacattatgagaatgcaattaatgcctattgtccaccaggtttacgaccggtgaatttcatggcatcagaatccagctccacaccattagtttcttcgtgatctttcatttgacatttatgctttatttattctcactagaagaaaaaaaccacaatgaaggtgtataaaaggaaatgctaaaggacacggtcaattcaaggaatctcaggaaaatgtactggaatccaaaaaaaaaaaaaaaa

SEQ ID NO: 8561 - DNA, 795 bp, Glycine max
  Clone ID: PAT_MRT3847_10773C.1
gaaaaagaagcttttacaacgcacttttcacgtcgttagttcgaaaaatcgtcttagaagaatacaaatacacacgtcctacatgggtaacatatgcagttcagatgatcgtccttcaagggtcagtccagctgaatcgagtctcgtagactcttcttcatgccatgatcgtccacttaacttggaggtcactactgctgaaagagagcacgaagacatgatcagtggaaacattggttctgtgaataagaaaattacttgggaggttcttcactcgtataccctaagtcttgttacaaaaacccaacatgaagggaaagggaacggtagcactgaagaagcttctgggcaaggagcgagagtcattgttaatacagatggaaattttcatggtaacggtaatggctctaaataccaaaattgcagtattgttatgaattacgaagctgctaaaggcacgaactaaaacgttggctgatgtgcatggtgattaattgatgcagggttcaagatttaattttaaggcactaaaagttacggagtttaattgtagggtttgtatatatcgaatggtgattgatgttgttaaccagttatttcctttgataagcaagcgtagatgggataattgttgaattctttgttttacctttcctttttcttttgttgaaaaggatacttaatgagttgttgtttcatgtttttgtttctgtagctgctgggatgtttggggaagtttatgatgtacaagatgcaggctattatcatgccttttgttttattgaaattaataat

SEQ ID NO: 8562 - DNA, 211 bp, Glycine max
  unsure (1)..(211): unsure at all n locations
  Clone ID: PAT_MRT3847_107740C.1
attctggactaaacacgagaatttgtatctgccgacanaaaaccaaagggtcatattaattagaggtaggggcattccttcttaaattcttgccaaacttgctcatgcatttctacaacatgttgctcattaaaaccacaaggatcaaatccctgcttttatcattctgttttctactaaagataataccatcatcataaattattcacct

SEQ ID NO: 8563 - DNA, 306 bp, Glycine max
  unsure (1)..(306): unsure at all n locations
  Clone ID: PAT_MRT3847_107741C.1
tagttgtcatcgacatcatggtgaaattgatttagttcaactctatagtgccccaaaggttggttatagacttatagtatgttacatgcaatactgatatcatanttgtttttcnccttgtgatcgnggttcttttattggccttagaacatttttgtttagaatctgtttcaaattaatatcagaccttgcttgaaattgaagtggcatattagatttatatttttagttaacattgttatttgtaaatatactatactattcaacaatgtcagtaaattgtgggttgaattgaaaaaaaaaaaa

SEQ ID NO: 8564 - DNA, 575 bp, Glycine max
  Clone ID: PAT_MRT3847_107742C.1
tggatgtgctcctaatcgtgctacatggaacaccatgcttgctgtatgtagcgaggagggtaagcacaattatgttaacaaggtcttgagggaaatgaaaaactgtggatttgagcctgataaagacacattcaatacattgattagtgcatatgctcggtgcggatctgaagttgattctgcaaaaatgtatggggaaatggttaaatcaggctttactccatgtgtaacaacttataatgctcttctaaatgccctggctcggcgaggtgattggaaagcggcagaatctgtcattcaggacatgcgaaccaagggctttaagcctaatgaaaattcatactcactgttgctccattgttattccaaggctgggaatgtcaaggggatagagaaggtcgagaaagaaatttatgatggtcatgtctttcctagctggatacttttgagaacccttgtccttacaaaccacaagtgcagacaccttaggggaatggaaagggcatttgatcaactgcaaaagtatggatacaaacctgatttggttgtcatcaactccatgctttcgatgtttg

SEQ ID NO: 8565 - DNA, 425 bp, Glycine max
  Clone ID: PAT_MRT3847_107743C.1
gcgtccgtccaggagttcgaacgggtgagataagacttattgattgtaaaattgttgatcaccacgggtaacggaaaccgtgtgaaggttccccacaaatctcaacacattttaatattttaaaatcaaatatttttggaaaataccacatcagtttttagctttctacaacgtttgatttggatcacttttcgagagaaaatatttgatcatataaacattgcttctcaatcatatgttgtgtgccaacaaaacgttttttgtgttggatgtgtactatttttcaaataatggaagctatgtttaccacatcggagactctgattcttttttttcttcgtgatttgatcgattttgtttcattgagttattttttgtcgagttactcactatacattatgattttaatgtttcatatttgatct

SEQ ID NO: 8566 - DNA, 560 bp, Glycine max
  Clone ID: PAT_MRT3847_107744C.1
ctttttcttcttttttttttttttttttttttttttttttttttttttttttttttttttttttttttaaaaatttcaaaggaacaaaaaattttttttttttcccgttaaaaagggttacttatttcaacaaaaacctaaaaaaaaatattccttacataactggcccaagcgggggataaaataatcttcctatgctgcccccttttaacatattaaaaaatcctttgggaaagcttttttggagggactaaacattttatggcaaggcaggtctggggaagggtttccctgccaactgggttgacaaagggtttttttttgccccaaataaaaaaaaaaacaggggccaccacccttgcccaaaaaaaaccaagggccggggggcggttttggcaacccatgaaacctttgaggaagggataaaaataaaaaaccccccaaaaggcaaaaaaacctttcccaaaaaggggcccccaaaactcatcccctcctttaagggcttcaaaaaatccagcaccacccccacccttgttaacaacgatagagggttgtgggag

SEQ ID NO: 8567 - DNA, 395 bp, Glycine max
  Clone ID: PAT_MRT3847_107745C.1
cccctcgggagaaagtgtttttttttttttactttcttaaccaattgggatgggtcacttattagccggggccattaaaaaaaaatccaccaatccggggactcccttggataccacctcctccggattcataaatattcttaaccatcaagattttgggccagggagataaatggaaataaacaacgggggattccatttttcacctctttgggggtcatttgacacctaaaatttcccattaaaaattaaaaacaattttacaaagcggttttggcttttgttcccactaccctctccaaaaattatatttttttttgagaaaaaggcctccactcccaattttttatgggaccctttttctttttttttttacgtggactggaacaccaacc

SEQ ID NO: 8568 - DNA, 147 bp, Glycine max
  Clone ID: PAT_MRT3847_107746C.1
ggggtgcatcatgggaggaggacctgccgacgctaatttttccgtcttagaaggacgcctcttcttatgatggaataattattatcttcttctcctttttttatctggtgtagttgagggccttttttgttactataacaccgtaat

SEQ ID NO: 8569 - DNA, 1903 bp, Glycine max
  Clone ID: PAT_MRT3847_107747C.1
caacaaacatcccctcccttcatcctcttctcatcttctttcctttgcaactagtagttagggttttgagtttgtgttgttgcttttatccctgaaaatcaaatcagactcagaagaaaaagagaaaatggcgctgaagtttctgaacaagaagggatggcacacggggagtttaaggaacatagagaacgtgtggaaggcagagcagaagcacgaagcggagcagaagaagctggatgagctccgcaaacagatccaggaggagagagagcgcaccgagtttcgtcttcttcaggagaaagctggcctcgttccgcatcaggagaggttggaatttctgtacgattcgggattgtcggttgggaaatcttcgaattccgaaggattcaaggcgctcgaacagttaccaaaatccgatgcaacggatgcagcaggctcctctgcttctgcctttctaaggagggggcgagtgtgcctggggcattgttcgaggagaagcctcagtctgccaatgatgcttggaggaagctccattctgaccccttgctcatgattcgccagcgcgagcaggaagcgcttgccaagataaaaaacaaccctgtccagatggctattatcaagaaatcgattgaaggaactgaaaataaggagaaagtttataaaaaggaaaagcggaagaagcactggtctagtaaatcaaagcataaaaaacagtctgattcagaagatgacactactgagaggagaaaacgaaagactggtaatgaagtttctgaacaagaaacatcataaggctcaatcagattcagagtatcagtcaagtgaaggagaaatgagaagaaggaaggatcgctatgaggacaaaaaatacagggaaagatcacccagtcaccaacagagacaaagaaatggcaaagactacaaagaagatgctggtgacagaaattataacaggtccaggtcagaaaggagtgtccaaaagggtcaattggattcagggtatgaatcaagtgaaggagaaaagagaaggaagaattactatgaaggcaaaaaatgcagggaaagatcacccaatcaccaacagagacaaagaaatggcagagactacaaagaagacactggtgacagaaattataacacttctaagtcagaaagatatgcttcagaaggttggtccaatatagatgcccctaaaagcgggggtggacgaatttctgaagcaagctccaatagatattctgcttcttcacctgaacatggatcacactataagtgcaggaacgtggctcctaagctttcagaagaagagcgggctgttaaacttaagcagatgcaattagctgctgagttgcatgaagagcagagatggaaacgtataaagaaggctgaggagtcggatacaaaggaagcaattcagaatgataatgtttgtggcaagaattttttggatactgttcagaaaagtgtatatggtgcagctgaaggagggagcacatcaatagctgagagtgtccgtcgtcggacatattattctcaaggcaggtctggcggtgaaggcaatgcatttcggcgatgaacactcggtggttttatcgctaattgtagctctcttagttgtcgccagacccctcttgcatgtgctttcttccttggaccaaaaaatgattccttccatgtataatatgcgaaaagttgtttaatttcaagtagataatatattaagaattcatagttcatccttcatgattcgaaatttctatgttcctttgtgattttaaggtattcatgtcatgatgtaaaatatttaaaggcgtttggaatacagcatcaatatagtattttgaaattgacccaactgggcaatttggtccatataattaaaaaatggtatatttagtcgttg

SEQ ID NO: 8570 - DNA, 568 bp, Glycine max
  unsure (1)..(568): unsure at all n locations
  Clone ID: PAT_MRT3847_107748C.1
aaatcctcctaaatttctaacaaaattaacaggttaaaattcgttgataaaataaaaaaactagagaaaatcagaggaaaaaaatatataaagaataggccaatggaccaagccgaatttgatagctatgcctagcaagcatacgagtgtttgcattatcggttccttgtcttcggcctaagttccctctcaactgcgttcactgctgaaaagcaatacattagtacacaacaagaaatagttgtaatttaaaattactaccattagtaattaacgcataataacgttactcaagagttctaggtaggatataccatgaaatcacatcatatccttggtcattttttctccctcctctatttaaacttttcagctactttgtctctgaatcagatacagatagacaaggctgtttatcagaaaatggtgagatggatttgaaaattttttatatggcaggaagtaccgacagattgaatcataacccagtggttcaagtttggaaattgaaccctcactgnaaatcctgacactcgaggataaacagntctatcattcatctattttt

SEQ ID NO: 8571 - DNA, 388 bp, Glycine max
  Clone ID: PAT_MRT3847_107749C.1
tcggcttttttattgttaggagaatatgaagccgcttgatacccggggcgctgcacaagttttggcagcacggccatgccatggagcaggctaccaaaggctccctctccaaatgaaaactggctatggcgagcgttcttcggaggcaaaacgcgcacgtcttaggcttgctgcggaagcacacaacatccgagcctttaaaaccattcctgaagagcgcgccgcaccaacaaaggaccacattaatggcggacaactcaggatcagactctaaaacaggtaaccaccaaccttcctgatatgctagcgaacgccaagtccatcacaacgacatatttatattcggcatagataacaccgtactctctaatatcccatactatgaaaa

SEQ ID NO: 8572 - DNA, 296 bp, Glycine max
  Clone ID: PAT_MRT3847_10774C.1
cgatagcttatagggggaactgggaagacgaccgaatcgtcgcgagtggtttgtcgttgatgaaccctaactctcgtaaaccagatcttggattcataaccctgacatcgcgaggtaaagcccccaccctcgcatcacggcgattattttactggaagtttccacgtcttcggtaaggtcgttgaccaaggcgatacgatgaggaagaagcgacggccctggcgcccctacgcttggccctatcgatattctttactgcgcgtgattgtccacaaaattttccagtctcgacttct

SEQ ID NO: 8573 - DNA, 123 bp, Glycine max
  Clone ID: PAT_MRT3847_107750C.1
tggacacggctgcgactagacaaacgatgggttcgctgaccgtagacgacttacgggtaatgctgctttaagacgacggaatggtaccgatgagggaagaccacataagggttctcaacagtt

SEQ ID NO: 8574 - DNA, 279 bp, Glycine max
  Clone ID: PAT_MRT3847_107751C.1
taatacacacgggctaggtaggaggatggcccgggccccataagaagagttattgtgctttacaactcccaaaacaggggaggggcattgggctagatctagctcgacatggaggtcttgataggtgctaatacacgtactgaatccaactgatctcatcaaaggtctaagacgattgactctcggaacactaaaactaatgaacctcaacagatgactgactgcctactggatgacattactataaagaataacccacacctaaaggctgattattat

SEQ ID NO: 8575 - DNA, 258 bp, Glycine max
  Clone ID: PAT_MRT3847_107752C.1
aagtacacttaactgaactaaatgtctctagcacaattgcacatttcaagacattaaatacctcaaggtttgcggctgaatcagagactgtgctaggccattcatactcattctgtctctccactacaaagatattgttctctatggaacactcgatatccagaccaatcatttgaacctgatttataatcccaaccgaaagtggtctatggataactactacctatgttccagcgtctcataataaacatgtgtgcc

SEQ ID NO: 8576 - DNA, 455 bp, Glycine max
  Clone ID: PAT_MRT3847_107753C.1
gttctagatcgcgagcggccgctcgcgatctagaactagctattttgcagacgtttttcatcacatgaacaaatggacaagtctctgaaaggttgtggggaaaaaaatttttcttaaagcgacaagactcttagatctaaaaggaaactgacttgccaccttgccagaggaattcttgaaatgtttctgcagccacttggccttgaaaataaagggtgcaactctcaaatcttgttctaacccggctggaggaaccacaagacccaatgaaatagcattttctctccttttcccagcactagtatataacctatgaggaacccttgtctctgaatctgctcagcttgaaattttgtctctgaaggaagagaatgaactcagccctagtctgacagtcctagatttctgtgaaataagagtattcttcaacttagtgctcacactcacataccatg

SEQ ID NO: 8577 - DNA, 247 bp, Glycine max
  Clone ID: PAT_MRT3847_107754C.1
ggcacattgatctatgttgcaaagactgaccatcaatgatgctctactttgctatggtactatagagatatcatcgaatcactagaggctgagtgatctacaattgacgaactgcacgagtgatgccgatagcaaacatgtgaccaacatgcgcaactacgtcattaaagctcattaaaatatgtcagactgcgctcaactgccccattttgtaagagcttgatataagctcttgccacaaaccctc

SEQ ID NO: 8578 - DNA, 464 bp, Glycine max
  Clone ID: PAT_MRT3847_107755C.1
gcgtgataaaccgatccatggaaaaattatgctaatatacctgaatctgttcaaaatggtttttgaaaaaggagggatcatgttcaattggttaatgactagccataggattatgggtttagttcatttctgaggaaaggaatatgagaagtgggtggtaatgacaggagagaatggatatagctaaaataattcctctccattgtttcttttactgcttgagatcaattggagagagaaaaaaacaagtttggggccctcaatataagaactgatggtctcctcttatttttttctgtcctatggttccatgtgacagctgcgaatccaaatttctagcatttatagggtgtgcatgttgttcccctattgatgtaatgtgtttggtaagatacttttcgttttgatgagctatttctgtataagtttgcatgagacaattttgtaatgctttatgtcatttt

SEQ ID NO: 8579 - DNA, 807 bp, Glycine max
  unsure (1)..(807): unsure at all n locations
  Clone ID: PAT_MRT3847_107756C.1
tcgcccacgcgtccgtacttatctaaggcaaattcaaaaatcatcatctgccaaacaatagttgagaataaacaaaaagaaaaacccacaccaaaccaaaccaagaggggagaatctctctctggttgtttgggtttgaagtctcccttccttccttcctctctctctccttttctttcctctatgaacttcctcaccagaaaaacaaaaccaccacaaggtttcttttcttcctgggcttgaactccacaaagccaaggaaggaaaacaaaccaaaccaaacatattccttatttcccacttgttcaacctgtggtttatttatccttggaatatggttcaaagaaaagtgcctagcaagcttggtatccaagctgaacatgttaaatcagacaagaggttgtcaaacctgaagctactatcttcatctcatcaccaagatggaaaaaatagaggggctgatatgaagaagaaaatgaaaaaatcaaggtcaataaagctttccgatcttgaggctcttcaatcatcatcatcatcatcaccttcaaggagaagcttgtctcttcacactccaacaactacaacatcagcatcaccacagaagcaacaacctttgttcagaactgttgatggttcaccaaattacatgaagccaacaagcagttcacatgcaaaaaaggagcttttcctggtaagccaaaggaacactcaacctgnttctgattttaagaatcttcctagaaaaatttccagtgattccaaagctgcatgtgttaagaaacctgcanaagccttgacaagacatct

SEQ ID NO: 8580 - DNA, 437 bp, Glycine max
  unsure (1)..(437): unsure at all n locations
  Clone ID: PAT_MRT3847_107757C.1
tcgcaccgagatttgggtaaaattataaaatttgggtggtttttattttggggttagaaattataaaatttgtttatttatataaattaaattcatgaagttagttctcatttttttatcatgtattatttagttttaattctaaaatagatattaatggcctatcacattttttactgaatatgtatcctcacgtgttatattnntattaaatattaatttcgtgaagcgtgacaggtcangaaaacattaactattagcgtttaatttcaaaattaaagactcaactaaggagttcaatttcaggatttggaactgaaccaacaggatgaaaaaaaaattgaagaattaaattataaagatatcaaaattgaattttaagataaataatagaatcaaatttgccaatttggttggaaattttgctacatccatcg

SEQ ID NO: 8581 - DNA, 338 bp, Glycine max
  Clone ID: PAT_MRT3847_107758C.1
tcctgaagcggcaaaagaatacattcatcgcgatttttatacatcagactcaaaacagtgaggtaaatcttacttctatgcgagagacctcgaaatccatcccaaggacacatttgtgttcagtatagatggcaccgtactctctaatattccatactacaaaaaacatgcatatccactggagaaatttaactcgaccttgtatgatcaatgggttaacaagggctaatcaccgtcactgccctaaactcttaagaattacaacaagcttctgtctctttgctttacatttgcatctgttacagccttattttacaacgtttttccttactagaata

SEQ ID NO: 8582 - DNA, 479 bp, Glycine max
  Clone ID: PAT_MRT3847_107759C.1
cctcgtgccgaattcggcacgaggcctctgccgaattcggacggtcaaaattgtttgtctctgtttacaagacaaatttggataagcattacaaaattagtactcttcccatgtggtcaaaatatgttatcaaccacctttgtctcccatattttgtttttagcattgcctcctggtcccatcatatgttggatagcattttatcatttatgagtgcagttggtgggtccagttggatgcttctgatcactaggcccacaatgaatccagctacttgatggaaacaatttcaagcttttaacatcattgccaacttcatagttggatgcttatgaagaaatcaaaatgctggctagctaatcaatatcaactgtatctcctacttcttgtcatgaatggcttagatttcccaaatggaacaactggcactgggagcagggaagtgtgccggaacttggtcataggttttggtttcattg

SEQ ID NO: 8583 - DNA, 290 bp, Glycine max
  Clone ID: PAT_MRT3847_10775C.1
cgtcaccatcgcatacacgacgatacgttcattctctctactttttactagcctcactctctttgatctccgaactaccttacaaaacaaacacgtccgctaaacaatcattaaactctccaatcaccttcttgcactacttatcactcattctctaacctcaatatgaaatacgagcgtcaatcttttcactgctgcaatctcccctttttgatctgacttcaaccacgagatggctcaaacttctgcttatcaagttagacactctctctctaatattctagaaagct

SEQ ID NO: 8584 - DNA, 338 bp, Glycine max
  Clone ID: PAT_MRT3847_107760C.1
ccccccccaaaacacccaaaaaaaaaacccattcaggataccccaaaaaggacacagccttacccatgtgatggaacaaaaaccaacaccccacaaattgattaaacaaggaagcagcccccacggtaaaaaagagaccctaaagaaacaacaattggcccttcccctgcaacgtggggtaaaactataaacccaaaaaagcccaacatacccaatcccccatgggaaaattcctttcccttgcccccaaaagaagggccaaattcaaaggggttaaacacaccaccggggttcccacccctatttggggacaacgctttttattaaaaaaagggctc

SEQ ID NO: 8585 - DNA, 307 bp, Glycine max
  Clone ID: PAT_MRT3847_107761C.1
aaagtaaacactctaataaaaatggtgacgccagccaccaaaattatggtggggactgcgaggagcagaagtacattaggcctcattgacgttcatgacaataatggacgtgcttacccttgtttaggaaatgaacatgcgagaatcttaatcctatgagaaccctagaaaaccttaataaactgatttacaaaattataaaaatggactgagaagtgtcaatattatcaggacatgcattaatctttatgtctagaacgaacgagagcagatcatttccaccacttatgcattcacagcctgtgct

SEQ ID NO: 8586 - DNA, 359 bp, Glycine max
  Clone ID: PAT_MRT3847_107762C.1
aataataattttttttttatttaatattttttttttttttaaattattttttatttttatttttttaaaaacattgtttgttttaatttttttaagataccaccataaaaatacacaagtttgaaacatatgtgagataactaattaaactgtttattatttagagtttaacatcaggaaaaaggaaaaaactagaaactccacgaaaagaaaacaccctctccaaaagtcttttgttgacagcaaccaaagctaacaagaaaaaataattccgtatcctaaaaaactggttgactatcaatgtaagcaaacaacaataaatgcctgattagggcttaaaaaaaagcactattagttgc

SEQ ID NO: 8587 - DNA, 263 bp, Glycine max
  Clone ID: PAT_MRT3847_107763C.1
cagtggttacttgactctcatgggctacttgatattcaacgcttgctgatataccagacatgcttgggattgcctacactatcgggactgcataaggcgccgctacagcacatagtttgccggtggcttactaaggaaacgtgcattttggggaccaccttctttgacacatcgcagtcgtatgggcttcatgctgatgatgaaatgatgaatgggaaggcttcaaaggagcttgctcgagagaaagaccagctggctacaaa

SEQ ID NO: 8588 - DNA, 548 bp, Glycine max
  Clone ID: PAT_MRT3847_107764C.1
atcacttgataattgagctgttactgagtgagtgccagttgaaatttgagtgcgactcttccagtcccggagggtgggtagaatttcaatgtaaggtcaagcccggcgggtagtccgacccagcacacagcaaggtagtcgtcagggtcacaaaatatcggacctggcagttaacttgttgggaaaatagtaaactataacaagtgtgttatcattttgacgcttataaaatgtcaatttttacttttattggatttaaataatcctcaagctctgagaagattgtccctattccaataacataatttatactttaaactgtggttaaaaaaataatatcaataaaaaaaaaataaataaaaaaacatgaattttttttttaaatttcaatgtgcgtgtctaacattttgccaccgagtgtatgaatttgtgaactagatttagaataacactgataatgcttaaaaaaggcaaaaaaaatgaataaaaaaaattaatgtattaaaaatataaaataaacacctcctccttttctataaataattata

SEQ ID NO: 8589 - DNA, 282 bp, Glycine max
  Clone ID: PAT_MRT3847_107765C.1
gcaatctagagatacataagattcaggaggcaacaacatcaaaaacacagggtggtcaatgtgtatggtccaaccaaaggatcccccaacagggtcccggtatgtctgattgaaaaggaaactcaatgtcaaatagtgcatcttgatctcttcagtgcatagattaatgaacctgagttccaaaagcagcagtcatttagataccatcccgttagacattatcgtaactacactcgcaatgactctcgtggttaaatcacatacttcactgagaagtatacc

SEQ ID NO: 8590 - DNA, 444 bp, Glycine max
  Clone ID: PAT_MRT3847_107766C.1
cttgcttgcaaacaaggataaccaatggtggattaactgattataatgccgttgttggcctaggccgcccacatggatggggtgggggatataaaaaaatgacttgcttattatgggactaacaccacatgtgcctggtctgaactgactctcgagactaaaacacttgctgtggatatttacatcctgtatgtcgcatcaaatacgtaaccattagaaacatgggctacctttctcatccctggtataatggcttatcctcttccatacccaatgatgtttacacactctactcggcctgtattcttgggggacattctttgtcccgggcaaccataattgcaccaagacaaacgttactaagacccagctctagattacactaacataccattcttgatatggtataactgacagaggaaggcttttgcaccgacgattgtg

SEQ ID NO: 8591 - DNA, 752 bp, Glycine max
  Clone ID: PAT_MRT3847_107767C.1
aatcaggaacagtatagatcttcagactcaaaatggaaactcaatgaaaaaactgccacaatgaagtcaaggcgactatccacaggtgctggtgttaatttgacttccccaggtggttcagcttccttagatacactctattcgaagtttctccacccaaaaaggattttggaagaagattcatcaagtgataactcatcccttatcagcagcaattctgatgaaggttcttgcagtacagatagcacggctgattcaaccagtacagatgactttgctgattatatttttggtgatgtgggacgtggtgcaggtggcatgttgagaaattctgattccaacatctgccctgcattgccatcttttccccactctggatattttccctcttctgatatagaccaacatgattcagtagttttgccacattcgactgggttccagccgtctccttcagaagagggtcttttgtacaggaacagagtagtggatgttaaaaggagtgggggaggtgtttctcattttcatcttgacacaaatatagagcataggaagttagatacaagtagtagtagtattagttttagggagactgattctgtatttaatgatagaaattctggtgtatcatgtacaaagtctaggtacagaacggattgaaaattttattgagtaccataccaaggtttggagaggcaatgaactataaataacaactatggaagctccacgtaatgtgttgtaaccccaca

SEQ ID NO: 8592 - DNA, 470 bp, Glycine max
  Clone ID: PAT_MRT3847_107768C.1
cgtactttcaggttcttgctttgttgatgaaaatcgtgaggcttattgggtttggttgtctgttggcttgacattgtttgctgctggctgctttctattcttacctcaagagaaataagagaatgggtgcaaagaaatggtttaagataatagtcaaattgaagaaatcgaagaaagataaatccaaagaagaaaaggttatttcttttgttcctcttttcagaccttgcatttcaattttaaagtttgcaagcataatgataatttggagagtatttctctactcattagatattttgtctggattagttttactaaggtggatttgaatctttgctagatttacttgtttttcttattctcttgactttttctattttatttgctttgagttaaatgtataattttaagcaaattgttgaagttgaggaaaaaatcagagcttgtaatttgatatgcaatccactact

SEQ ID NO: 8593 - DNA, 378 bp, Glycine max
  Clone ID: PAT_MRT3847_107769C.1
gccggcaatgcatgacaccctctgctttgggtttttctccactactaattgggctaaaaaagacataataagggcgtgatcaccatgcttaatacagggggaaaaacactaaaaaaaagaaagttgctttaaagttcagaccttggcgaaaactgcataaggagaacaatatgctctacaaacataaatactaactttacgtctgaacacaccttcagaaatgtccctgaactaattgaactcgaagttttatcatcataattcggttccacataagcaagggaagggatccaaatcgtcactgccacttcagggggttaaattcatgtgaaaatttcttctacctcaattttaactcacgttcccagagctaaaatc

SEQ ID NO: 8594 - DNA, 414 bp, Glycine max
  unsure (1)..(414): unsure at all n locations
  Clone ID: PAT_MRT3847_10776C.1
tgtgtggctttggactagtctcttggctggaggaccccctcttatgaatggtgaatcacaacaacttggtaataataacatccaatcatcttcagacaccttacctattcctgtctctaatgctgttcttataccacagcacatgggttccttttcagaagttcatgcgggaaatcagaaatttccaaacacaggaaggcaacttgattctagacatcatgggaaaacgaatgggagaaatccaagtaaaacaaatggacccaaggccctgaatccagctccagaaaattatagcaatataaattcttctcaaactggcaactatacccatactgttcccccaagtggctctaccccaaattttatttgtggcaatcctgttcatntgcggggcttgaatggttttcttcattc

SEQ ID NO: 8595 - DNA, 458 bp, Glycine max
  Clone ID: PAT_MRT3847_107770C.1
ctctttctctctccatcttttctctgtttctgccctcgtatttgctctccttgtgcttgattctgtgaaaggtttcgcatctgttccgtctcatgcccactctcagatcacttcttcataagcagccaaagaataatcaaacaaatttaaaagaagaaaaaaaagagaggagtgagaacacttcttgatcgtctgatcttgaatcctttctttccatctcatgaaacagctattttgatcaaactctttagtaccctttacttgattcctcttgagtatttgaatctaattctctcttctaatcacctcacctctcatactcttttaccctctcatccatgggaccaagcaaacatcacatgttaagtcttcatagagagaaaatagctagctaagccctttgtttcttataaactatgtgggtttgactttttttttctttctcttttttttgctct

SEQ ID NO: 8596 - DNA, 187 bp, Glycine max
  Clone ID: PAT_MRT3847_107771C.1
agctggaatcgttcgacatcgcgagccatggcgccgaaaggacggcgtctacatgtattacgaagattatgctagtgtcattgcctatcccaaaggagaaatgaaagggactgctatcactggtcccattggaaaagagtgcgctgatctgtgccataggattgcaggtgcagtcaatgctatcgtt

SEQ ID NO: 8597 - DNA, 378 bp, Glycine max
  Clone ID: PAT_MRT3847_107772C.1
atgacttcttgtctgactcgtccacacatatgttcaacctttcagtctctcttcttaggtggagtgggatccctctctcaagctgctttgcagatggccatcgtagaggttgcacagcagacaccatctgctgttccacagagtgaatcttccgaggagcgcatgacccaggagacagccccagtgactgaagctcctgcaacagaacaaccagcagctgaggtttctgcatcagaaccacctgccgctgaggctcctgccccagaatcatccaccgtagcaccaggggatgaaaccaccccggcaccaacagatacagtagaagaaacaactacagaagtagccccagaggagcctaagggaaggaccagttgagac

SEQ ID NO: 8598 - DNA, 386 bp, Glycine max
  Clone ID: PAT_MRT3847_107773C.1
acccaggcgtcagcccacgcgtcagcggacccgtcagattgctgccagacgacaactgaacggggtccgcgcacatctcacagcataactgtacacaatgcgcaatctctcatttctctcatattacgaatgccctaacgttcatctcggtttcaccgattctcggcatgccgaaagtgtcatacgatgctatcgtcgccgatagccggttgaagcacacaggcgctggtgcttgaatgaatcaatcttggatagctgatatggatcctaacattccaatcagatctccacacgctttcgtcatattcaagtccgagttcagagagcattttaaggaggagcattctaacaacaagtccgtctctgtagtcggtaaagctggtggt

SEQ ID NO: 8599 - DNA, 477 bp, Glycine max
  Clone ID: PAT_MRT3847_107774C.1
gtatggttttttttttctgattcggtaccaaaaattgatggcggaagctctaactttactattctgctaccccttcagccgcttattacacttgagtaagggggcttttctacctataggcggccgaacgagtttcacaccctcattttagatgtttctactctcttcatattttttgaactatattacgtgtaatacattgagggacaggttgtgacctgcaaatttaagcgcggagaactactgacggaatcacagtatgcatgacggtttaaagaaacatcaaaaaacatatcgatggaacatatacttcccataatctgcagcaataggataactcacgcatgaccctgttgagagcttgttttcaagtcaaggattggaaaagggtggatatcaattatttgaatcgatgagggtttggaaccgatgtcataaaccaatcttgctgatcctggtgggtgagaggtgtaattc

SEQ ID NO: 8600 - DNA, 2961 bp, Glycine max
  Clone ID: PAT_MRT3847_107775C.1
ctcttattcaacaccaccacttccggcgaccatttctaactaattccggcgacgccacgctcccgacaccggtgacctctctacctctcactgaacgagtgaacgtgcatcttaatttttttttttttttctgtttatgattttggatcgatttgtttctgttactgaaaccaaagatgtgagatcccaccacttcacttcaattctctttcactacgctttcattttgcgaatcccgaacgttctctttctctgaatcgctcggttcaaattcacattcaatttcgaaggattttcttcaccagaattcatagcagtagcatgcactacgtaacttcgttttcatcaaaggtgtcactgaagtagaagcgttgaatattttctcaatcgttgttaaatgcttagccaccgtggaggataattgttaattgcgctgcgaatccgtgttctcaatcgttattctacggaaatttgattattcaaaattcgagaaagctagaaaatatttatgtagaagtaaaagtggctatatgactagtatctgtgcaaaattatttttggcccaccaaacgccattcaatttgcctccctcccaatcccacagcgctccctccaccgtgacaatcactcactccccactcatcaccaggagaaacgcgtgagaaacattcctctcagagcgcgtggaaacaccccctctcccaccaccaacccttgccgtcgtgccctgtccctccacaaccaaacccttccttctctcaacttgcttattcctgcgcgaacacgaccgaccacgcataatgacacaaaaaatttctagagcgagaaagtgagaggagagagaaagtagcagatcctccatggcctccaccaaggaacgtgaaaacttcgtctacgtcgccaagctcgccgaacaagccgaacgctatgaagaaatggtggaagcaatgaagaatgtggcgaagctaaacgtggaattgacggtagaggagcggaaccttctgtcggttgggtacaagaacgtggtgggtgctcgtagggcttcgtggaggattctttcctcgattgaacagaaagaagaagctaaagggaacgatgtgagcgtgaaggttaaatcctttggctccacgaggagcgcaaaacttgtcaacaccgccaagctagcgaacatgccgtaggttattaacatattgtcgatagaacatcgagtgaggcgaggtgactttgaattatgaggcgggaacggtacctgtagctcgtagggtcaaggcaggtggtgatggacataaggcttctgagcattttatgaaggcgattcaattgacttcagaagctaaagggaacgatgtgagcgtgaagaggataaaggagtataggctgaaggtggagtctgagttgtccaatatctgcagtgatatcatgactgttattgatgaataccttattccctctagctcatctggtgaacctagtgtctttttctacaaaatgaagggggactattaccggtacctcgcagagttcaagtccggtgatgagagaaaagaggctgctgatcattccatgaaagcgtatcagttggcttccactactgcagaggctgagttagcatccacacatcccatccgtttgggcctggctttgaacttctctgtcttttattatgaaattttgaactctcctgaaagggcctgtcaccttgctaagcaggcatttgatgaagcaatctctgagttggatactctgagcgaggagtcttacaaagacagcaccctaattatgcagcttctgagggacaatctcaccctgtggacttctgacatccctgaagatggaggtattcattaatggaaatcaatgttttgtgtcactctgttagctggacttgtccacaatgtaaattaaatacatgaaaacttttagggttaattacaagaattacactaaaaaacatttgtagctaagcagaacttaaaaaattaagagcattcataggcttagcctggattgatccaatgaatttaacccagtaaataccaaataatttaaaatgaaaggtttccaaccaaaaactcaaaccatcaaaggttggttttgggtggtgaagattcatgcttgcccttattgggtcagaagcccacaaaacttgaaattttggctgcctggtgtcagaaaaaactaaaaggggtttccaaaataaaaattgcaaaagcatgcataccatgcagcacacattccagtattggacattgttacagactacagtggcctgaagccataccactgctttagtatttttagggtcaggtgagtttgctgagagtattatgtacttggttgtggtgacttataaggtgatgtcctagtctttcgctttgtttttcaattcattttcactctaatttattgcttctattggtcatcatattttgattgtggtttactgtttggtatacttattttgctgttgtttccgactaggctattgcttctcattttattttctagctatttttctttctttgttctgtggtcctgccaacccaacatcagtatctatgatttgtctggttaattaaatacgtcctcttttaacagctgaggaacaaaaggtggattctgccagagctgctggaggtgacaatgcataggtaggttatgtacccatttagctgatggtatttgggttttacttttcaccttaacaaagttacattttgcaatgaagtgaagcaggtattggctaggaatttgtggtgtcatacgagaaggctagtctttctcttgataatttaccattaggatgtagtaatagaacatggagttggtctctagaaaatcaccatagggctttgtgagccttttattctatgcgtgtgctttctgttactggatggagactggagttgagatttgtatgttgtttgcctgtgattcagtgaatttcttcattttgacttc

SEQ ID NO: 8601 - DNA, 502 bp, Glycine max
  unsure (1)..(502): unsure at all n locations
  Clone ID: PAT_MRT3847_107776C.1
aattctgcaccagccactttccagttctctctcttcccacaacgcttcttccaaatacgatttcgtcaaggtttctatttcaattcgaaatttctttctttattctcttttcctatgctttctatttctatttctgaaggtgtggttgggtgataatgcggatcactactacgctctctccggatttttgctcagcataatgctaacggtagccaagcaacaaacatgaaaatccatttgcaaaaatgatgaagttttgcggatggagctggatatccagaggttcctgagtaatgcaaattatcagcattttaagtttcaacatttcccttcttcctatctcanactgaccacacatcatgttgctcaacactataatatacaaacaataattcaaaataatagcttagatagccagagaaccagaattataataagaaatataacagaaaccaattatcccataattcacttatctaagatacctactaaacacttagaa

SEQ ID NO: 8602 - DNA, 283 bp, Glycine max
  Clone ID: PAT_MRT3847_107777C.1
ggaacaagaatcgttcgtttatttttgttattgaaacaccaaaactcatctaaatcagttacagtttatgtgatgaagttcttaaaatttcctcactaacctgagatacattatcaaactgaccctcagtcctggattaaattaatggcaattcttcctcattggaaccattttcttcagttacctttgattcttgatcagcaggtggtccataaatccaactgcatactagataatacagtacattaacagcactgagtgtggcaagaagccagtagtactt

SEQ ID NO: 8603 - DNA, 243 bp, Glycine max
  Clone ID: PAT_MRT3847_107778C.1
gaaaaagggggccgaccgacgcgatcgtacatttacaattatactacagtattgatatctttaagcggaataacataaaaaccgcacgggttctattcatagtaggcttctattaatataatattattatactttaataaacatatgtaaaaattatgacccttaaacaaaggtttattttttattattttatacaaattatcttatcttcaaaatccacaagtatatcttgatttgaaatca

SEQ ID NO: 8604 - DNA, 163 bp, Glycine max
  Clone ID: PAT_MRT3847_107779C.1
ataaaagagacgcaactaacttgcaaactgcctacacgctatataaagatccaaccacgcgtacccaaccccgaagagaagcacaaagatccatatgtagaaagttaccccccatacttgaaacaaatatttcaaaaacaaaaaagaacacagcccaccagca

SEQ ID NO: 8605 - DNA, 223 bp, Glycine max
  Clone ID: PAT_MRT3847_10777C.1
tatacatacaaacaatattgagtttaacttcttctcaccgtgtaacacgaggagttaacattaatcctttaattttgtgatatatatactacatccatagacatactcctgtagtatttacaaaaagggaagaaaaataggttaatatggcggtggataaaacaaaattcattaaattcatcttcgaataaaatgcacgtcccctgaatgtggatcaacatgc

SEQ ID NO: 8606 - DNA, 221 bp, Glycine max
  Clone ID: PAT_MRT3847_107780C.1
tgactatagacaacaagaagacgtttcatacactgggcctcggattgcatttctaatcgggtctatacctttctttcccctaacctcacaaagcacaaatactaactcatcctctctgctatcaaccatatcttcccacccttcttattatatcatgcccttacccttatatcaacagtaaagaatatcgtatacctatattaaaatccctattctgatcc

SEQ ID NO: 8607 - DNA, 398 bp, Glycine max
  Clone ID: PAT_MRT3847_107781C.1
cttacactctatgttactatctcactcacatgcagtatttgtgtagttcattcttttatggctgatgacaccagacaggatttacctgctcaagactatgatggaacacccatctatccagcatccgaccatgatacgtcattttacgatcatgcatcctaacaaagagcatctaaatctactgatccacctgaagctggctcgatcacagcgaccacttggcatttgtctgccatgtctggctcacatcaatgatccaagcatcaaggaatagcatgaccagatagcaactgatccatgattaagccagattgctgaaccgctgccgactactgaccaaggcgatgcacaagacactatgcctaactgtgatcatcaaccatatatttactccatgc

SEQ ID NO: 8608 - DNA, 513 bp, Glycine max
  Clone ID: PAT_MRT3847_107782C.1
ggctcgagcttggtacagtaatagtaaattgtcgcagcctcttttttcaccaccatcgattacatctactaaagtaaactggctcaattgggattctcatgaatgccttaaattatctggaaattgacagtatgacgactcaaatcagaacctgaagaatatgatcagtacagtcattggtcagtatggactcttacctgtttcaggagttatctccaagcttaagtctgagggacatggtcatgtttttacttctgtattctatgcacaatctggcattcaccccatgttgagtccaaaaccagtctgccagaatgagaggcctccctttcccacaagtacctactcccagtccaatcctgacagtcactgctcagatcaacctcatgactgttccaatgatgctacttgtcttgatcaaaatgtaaaggataatactgattcagatcacgcaaggcatgagtctgctgctgctgatcagagtgcttggtataatttatgccatgatgctgc

SEQ ID NO: 8609 - DNA, 647 bp, Glycine max
  Clone ID: PAT_MRT3847_107783C.1
aaaaaaaaaaaaaaaaaaaaaaaaaaaaaaaaaaaaaaaaaaaaaaaaaaaaaaaaaaaaaaaaaaaaaaaaaaaaaaaaaaaaaaaaaaaaaaaaaaaaaaaaaaaaaaaaaaaaaaaaaaaaaaaaaaaaaaaaaaggggggggccgtttaaaagaaccaaatttaacgacccgggcctggcaaggaaaaacttttttaaaagggcccccaaaataaaatcaagggcccggggtttaaaaacgggggaaggggaaaaccccgggggtacccaaattaaatcccttggaaaaaaacccccttttccccagtgggggaaaaagaaaaaagcccccccccgaccccctttccaaaaagtggcccaccctaaagggaaaagggacccccccttgaacgggcccataaacccgggggggggggggggttccccccaggggacccgttactttggcaaggccctaagcccccgcccttttggttttttccctttctttttccccaaggttggcgggtttcccccgaaaggtttaaaaggggggccccctttaagggtcccaattaagggtttaacggcccctcaccccaaaaaaatttgtttggggggagggtccccgaaggggcccacccccctaataaacggtttttcc

SEQ ID NO: 8610 - DNA, 650 bp, Glycine max
  Clone ID: PAT_MRT3847_107784C.1
cttatttttctgaaaaaaaaaaaaaaaaaaaaaaaaaaaaaaaaaaaaaaaaaaaaaaaaaaaaaaaaaaaaaaaaaaaaaaaaaaaaaaaaaaaaaaaaaaaaaaaaaaaaaaaaaaaaaaaaaaaaaaaaaaaaaaaaagggggggcccctttaaaagaacccaatttaactcccccggcctggcaaggaaaaagctttttaaaatttttttttaaataaaatcacgggcccgggttttaaaaacgggggggggggaaaaccccgggggtccccaaattaaatcccttggaaaaaaacccccttttccccaggggggaaaaaaaaaaaaagcccccccccaaccccctttccaaaaagtggcccaccctaaagggaaaagggaccccccccttaacgggccaataaaccgggggggggggggggtttcccccaaggggacccgttactttggccaggcccttagcccccgcccttttggttttttccctttcttttccccccactttcccggttttcccccgaaaagtttaaaaggggggccccctttaggggtcccaattaagggtttaagggcccctccccccaaaaaactttgtttggggggagggtccccgaaggggccctcccccctgaaaaacggttttccc

SEQ ID NO: 8611 - DNA, 435 bp, Glycine max
  Clone ID: PAT_MRT3847_107785C.1
cccgccggagggggagggggcatttggctcccatcaagggtgggggggctggctatcaacaaagctttgggaaaaaaccttatgggattcgaaaggattttaaaactgagccccaaacgggggaaaaaatcaaaaaactttggttcaacccacaaaaaccactggggctttggggaggaaaaaaaccaccgggccggaaagttattgaaacatttgaaaaaaaacttccctctaaactaatggaggggagggagtccccggctccggcccctgttccgggttgttaaaagccaactgaaaaggaggggggggaaaaaggccaatctctaaggggtacaacaaaccaatggttaaaaaatgttgaaaaaaaaaaaggggactggatgggcccaaagggagttattttggcccaaggaaacaaatttttttgggggg

SEQ ID NO: 8612 - DNA, 365 bp, Glycine max
  Clone ID: PAT_MRT3847_107786C.1
tttctccaaacaagccctaaatctctcttctctttcttcttcttcctttaaccatgagagagatcttgcacgttcagggtgggccaagctaaggcaaagcatcaaggacctcaaggagaagaataagagaacggaatatttaggtaatcgtcattaaacttaataataacatatttgttaattgttcttgaggattgaccaatggaaatgacactcacacgttacgcagcatatatagttatattacttgttgtatcgcccttatagaatttattgattcaatggaaattaaagaaacacagaatttcgatgtaaaaaaaaaaaaaccaaaaaaaacagtaaatattaacttcattatactaaaa

SEQ ID NO: 8613 - DNA, 131 bp, Glycine max
  Clone ID: PAT_MRT3847_107787C.1
cagtatttcccttcctagctactctattctaacctttgcaccgatctcctctacaagcaaaaccctccttaattcaattttgttgacattaatctctccaagttggcttgcttcttgatcatgattcatta

SEQ ID NO: 8614 - DNA, 224 bp, Glycine max
  Clone ID: PAT_MRT3847_107788C.1
aaacgactgactgaatcgcaggagtcatgcgtgcacaaagtgcaagctgtgcacattacaagctgtctgtatgcccacacggacggtcatgccacgccatttgcaaagcccgaactcattggcgtatccaacggtgcacatgctaaaggatctttggttaccaccactttcagtccctgccaactattcagattccactgctgactgcagctcaactgctatca

SEQ ID NO: 8615 - DNA, 1068 bp, Glycine max
  Clone ID: PAT_MRT3847_107789C.1
gagtattctgttaattacatatattaatatattaacgaactacatcaactgaacaatgctactatattagatcaaaaatattacaatgctagatccaaaatatttagtcgtgacagactagattatataattctgtccgttgatttactatcattactcttatcatctctctctctctctctctctctctctctctatatatatatatatatatatatatgggagctaatgagcttcatcatggttcctgttaatggcatagccaaaacaatttacacaaaatagctatgtccacaattaaacttcaggaccagatgcaaacatgcatacaaggcctctaaacacttgagctgagagttggtgtgcctgaaaaatctctccatccacattccatacactttcattgcccgaatctgtaaaagtaaatgcaggggtcttatattgcccgaagaacttataattcaacgggcgggccccttgatgtttaagtagagtcaaatgccataaatatcccccatgacttgtaagttgagtcagatgccataaataagatacatgaggacagtctctaattaatataagatgaaggaaaccatctgacaggtgtgcatcagccaccacagctcctggtcctttttcatttctgcaagagattacagcagctcctacactaagaaagcgtcctttggatcttgcccatcttgtttcttctgaattctgttgaggtgtgaggctgccaactccaacggatgcatgatttggcttttcattacaaactttgcaattaattccccggatgcgtcttcccgcttgttcccgtgtccttgtcgcctgggtctcatctccctcatcatcccttctggctgcctcattggtcccgtccgtttcaacttccagggttcctgcgtctgcctcacgtgtccgacccttccagcgttccttcgctcccgcggtgtcgacatcaccataaaatccataccctgaaaaggaagctgcatagcgcacattaggttcaacctcagatgtaggagttcttttccaccgtacaacttgagctatgtcaaggtg

SEQ ID NO: 8616 - DNA, 474 bp, Glycine max
  Clone ID: PAT_MRT3847_10778C.1
cggctgcgagaaacgacagaaggggaccctaggtcccaccgtaagcatttctgcatgtgttccagcaccttcttcttcgttcacctcctccccgtcgcaacacaaagctacgctgcagcaatccaccactgcagggttttccaagtccaatctcagttcacttctcgccagggtttaatctgaatttcttttgtgttgccactgaggttattattatttttcttgcaaaatggcgacggtgatgcaaaaaatcaaagacatcgaagatgagatggcaaggacccaaaaaaacaaggctactgctcatcatttgggcttgctgaaggctaaactagcaaagctgcggagggaactccttacaccttcatcaaaaggagctggaggtgctggtgaaggttttgatgttattaaaagtggggattcaagagttggtcttgtgggcttcccttcagtcggcaaatctactctactgaa

SEQ ID NO: 8617 - DNA, 460 bp, Glycine max
  Clone ID: PAT_MRT3847_107790C.1
cactctttaagatcccctccggacgcacgtataacacacgacctcacgaaactttaacaaacatcttcaatctaacgggaacctttactgcaattggccatctatcaaccattatcagcagcttcctctctttgacttatacaaatagttatcaccaaactaacaactaattccttctaaaatcatatcactcctgacacatctcaatacctctcaccaatactcacaacaatatgaatttctctgcctttggctacatcatcataattacccaagatcaaactattaattggatcatacatgcatcatctcgtatcatcggcattagtgaacgaatcatgcttcggcgttaaaaaacaatgttattcaatcgtttatcatattctgaaaatgttgatcttgattacactccatttcataaaaaattaacggcgcaccatttccattaaacccataacat

SEQ ID NO: 8618 - DNA, 433 bp, Glycine max
  Clone ID: PAT_MRT3847_107791C.1
gtagatcaaaactttttcctacatcatctgcacaagtgcacatcagacatctcctttgcctttatgagaatcaacttttgacttttttttttttttgttgaatcatttttttggctttctacatttttaatttatcgtggattagtcatatttaatgacttaaaactaatcttattaaaatgtaaaactaactaatgcttaaattttcaggttacatttttgcattggtttttattgaatattgtatgctcaaatactcatgtaatatcattttaaaaaaatagtaatataattcaatactttttgtttaaaggctaaacttttggtctgttacatttctaacccataaagaaaaaggctaagcctttggaaaaaaaatgagctttttataaaaaatattttgaaaagtaaaaattactttatgttttaatgt

SEQ ID NO: 8619 - DNA, 305 bp, Glycine max
  Clone ID: PAT_MRT3847_107792C.1
ataaaaaaaagagggcattacggtgattacccacccaactatccaatccatcaaccatgtaacgtaggctttaagtgatagaaattaaaaacagcaccatcttcacggcatgtcttctcttctcttctctccctccatcttcaaacttgccttttattacctctcaatgccactccctttttctcttcactctcactctctccaacattctccataccttcttattccactttgttttttccgcaactggttttaaccaaaatgccggtttatttaaattaagccctttttttttctttttgaat

SEQ ID NO: 8620 - DNA, 751 bp, Glycine max
  Clone ID: PAT_MRT3847_107793C.1
cttagatgctgtccgatttatcaagaccttctcaatgtgtgtgcttgcttgtaaatgatcttagtttttcacttttctctctttaggtgggggctgctgtccagtgatacaaggcattgccataattaacttgaaatctatgtcttgatattttatttttgctcaagtttagaatgcccctgttctggataattaacttgctgagatttaagcacttacttgcttgttggttcctctcacctactgggtgttatttcatttttacttgggtgttattcattgggcagtctatctccttgccttacgctagtcttttaggtgaatattacttcaattctttgaatattacttcaagtcttttaggtaaaatactcagattcaggttattttttctcctttgaagcttgttgtcaatttttgcttgtcaatattaacttgtgttaaaataagtcaggctctatttttttaaaaaaaaaatttaagcaggacttatctctcattccctaggacttctaactaatttttgttaaacatatagttaattttgactagattcctctctttaatcattgtactgtaacctatataaacatcttatttggcatacacttattttgtttcaatatatcctttatgtggtatataaacaagtatggcgtatgagttagttaaatattatgataatctatagcaaccttgtagtacttgtattttttttgttaatctatcatgttgaaatgcattaacatga

SEQ ID NO: 8621 - DNA, 150 bp, Glycine max
  Clone ID: PAT_MRT3847_107794C.1
ggaccaaactacccttgtcgaattaaaacatggcttcttaatctctgtgctcgttgttctcttctcttcaggaacaacacaaaacaaggatgatgtcgcagcaatggggctctccatgtggaagccaatgcaccaataaatacgctgccc

SEQ ID NO: 8622 - DNA, 105 bp, Glycine max
  Clone ID: PAT_MRT3847_107795C.1
gataccatcgggttacaaagtcactccccgtgacggccccaggcctcgggacacatgagcagtaccgctcgccatccgacatcaagcatgtgtggttgctgtgat

SEQ ID NO: 8623 - DNA, 529 bp, Glycine max
  Clone ID: PAT_MRT3847_107796C.1
aaaaaaagggaacaaatggaaaaaaccggggggcacaaaaatttttttttaaaaaaaaaacagggggccagggttccccccctttagatcccggacaccaccaactttaaacaacggggggggggggacttaacccccccaaaaaggcccttttccccaaaccgatttttagtttttttaaaagggttaaaccaccccgaaacggaattttaacatggaatttcttcaaaacggggaaccccaacaaaattttaaagaggggccaatgggggaaaaatgggggggaaaaaacttggcaggggcccgtaaaaaaaaaaccacaaattcgggaaaatttgataaaaggtttcccggaaaaaaaccctggggcaaaaaaggcggcttttaaaagaaagggtgttttataattgcaagttttgaaggggaataggcccccccccgccccccaaaggggcggcaaatcgggggccccatttaaaaacccccccccccagggggctgggaaggggaacccacccccatggggggg

SEQ ID NO: 8624 - DNA, 236 bp, Glycine max
  Clone ID: PAT_MRT3847_107797C.1
ccagtttgcacttttagcaatgaaactagagtcctaacaccagctccagaggatgagattcagaagcatggtggctctggaggcagaagtagaaatgctgagctggtaggagaacactgtgagaaaactgaatgtgattctcattggagcacgcgatctgtaatcagaccagttaatactgagctgcaaaacccatccagtattgactcatctgttctcagagcacactcacaagc

SEQ ID NO: 8625 - DNA, 849 bp, Glycine max
  Clone ID: PAT_MRT3847_107798C.1
caagcattcgatactatgttatgcccatcagttgcaaggatccgtgcgttctacccatgaggtctgcggctatactaccgatcttcgctcatagtgctactccagatgcgagcccacaaatcccaggtttttcataggcgaaattgcacccactgtggaaaatgagttcatgctctctctccttcaattatgtggaactatcaagacctggaaacgtcctcaggatttatcaactggaactcctacaagttttgggttttatgagtttgagtctgcagaaggggttctccgggccttgcgtctccttactaaactgaatattgatgggcaagaactgaaggtcaacgtgaatcaagctatgaaagaaattctggagctgtatgttaagacaaaaactgagaacttgaagaacaaagaaactcaggaagtaggtgaaaaaaatgaaggtgaacaaccttctaatgcaaacgaggatgcaaaggttgacacagaaccctcaaataaagaggctagtgaatcatcaaacaaggaatcccatgatgtggcaaactttgggattgtcacggatgaagatagagaagctgattgtgaggctttagaaaagattacaaagatgatagaggaaaggttgaagactagacctttgcctacaccacctgcacagccaactggtgatggttctgtaaatttaacttctgaacaacctgttaaagcccgagatggagactctgttgtggatacagagaagaatgaatctgctgaaaataaaaatgagaaagagacgaacaatgataacaaaccaaccagtgaacatgaaaggactgaaagccctgatagaaggcatgatag

SEQ ID NO: 8626 - DNA, 767 bp, Glycine max
  Clone ID: PAT_MRT3847_107799C.1
attgcatcatatctagggcacacacaaaacagagatcaattttcactctctcacacacaaatcccaaactttttcttcttcaatggcggattccgcctcttcccccgcaacccttcctcccaatccccaaccctcccaatccgcacccgatctactctcccaatccgcaacaccaccctcatccactcccctcgccacaaaccctaatcccaacccaacgctgcttcctccgccgcccactctccactttctggcgggcactccgccgcaggtccccggcgtcctccctccctctttccggccgctcgggcctcaggtgccgcaattctcccccgtcccggcgcccaacccggcctaccaaaaccctgctgtcccgccgcccggcgttcccggcgccaccgtggcagttccgccgccgcagatgcaggctatgatgtcgtaccaggttcagcccggtaacccggccatgcggcccttcgctccgatccctaacggctacgccgcagctccgaacgtaactcccgcgggtgggtcattcattcaatcgttcgttgttcctttgtgaatttgcattgaatttgatttaatttagtttaattcaacgctccttcgttggttgcttcaatttttatttatgactttggaattatagctattatcaatgtggtttcttactgcgctgtgaaatgtgtgaagactggttattgtggtgactgtagaagacagtcatagcgctgattgatagcttaacaggtatggttttatta

SEQ ID NO: 8627 - DNA, 556 bp, Glycine max
  Clone ID: PAT_MRT3847_10779C.1
ttagtgactatgcagaaggaaaagttgttttggaaaataatgacctaaaggtcactcctggcactgggagatacatccaaatgccacctttagttatctgtttgatggactggacaaaaaggacgccatttatctaaattcccttcaggccccagtaaagcgagccaaagccagcacttagaaaatttctgaaatccttttttagtcaaatttcaacatttgacagagtggaaaaaccaagatgttaatccagttctgtacaaataaagaaaaataaatatatttcgttttaccttttccactaatgtacaattgtatagattgtgtcaaaagcaattggagaaaaataaacaataattttagctaccacaaaaatcccagtggagggtatgtaatgtgagaacaaaatgaccactcaaagtagttatatgtaagaagatattagtatcatgaccactcaagaaggttatgtaatgtgtcagtctcgtattctaagaaaacagtaaagtatgatgatccaaagtataatagctataaaccacatggaatttattgg

SEQ ID NO: 8628 - DNA, 359 bp, Glycine max
  Clone ID: PAT_MRT3847_1077C.1
gcttagcatgataatgaagacctaacacttaatgagagcaagacaaaagaataatgagctatcgacaagaaacatattctcttaaggttatgagtggcagctagaagatctctcatggctccttcatcttccttcttcctttcatcaccttttttagctctacacatgtttatggagagctaaactcactattgttagacttggatgtactaagctaaatttcttgcactttttacgagttattaatctcagtttatgcttcattaatgtttatctgctatacttaatgtttgttatgatttgggatggtcatcaagttagtttatatgaattaaatttatgaaaataatattaataac

SEQ ID NO: 8629 - DNA, 3403 bp, Glycine max
  Clone ID: PAT_MRT3847_107800C.1
tggacgcctgcagtacccgtccgtccgcccggccaaacttttgtccgctcaatggcggattccgcctcttcccccgcaacccttcctcccaatccccaaccctcccaatccgcacccgatctactctcccaatccgcaacaccaccctcatccactcccctcgccacaaaccctaatcccaacccaacgctgcttcctccgccgcccactctccactttctggcgggcactccgccgcaggtccccggcgtcctccctccctctttccggccgctcgggcctcaggtgccgcaattctcccccgtcccggcgcccaacccggcctaccaaaaccctgctgtcccgccgcccggcgttcccggcgccaccgtggcagttccgcccacgcagatgcaggctatgatgctttaccagggtcgatttgcttatggtgtatacatattcactcataatctgctctaatatatttgcatagatgtttttctactctgtacaggaattcctcgttacccccctccttatggaactatggttcgtcctgtatttcctgcacgccctcctggagcagttaacatacctacaatatcacgcccgcctgttgcagggatccctgcagttcgcccaattattccgcctgtagtcagacctgtggtagcccctagtgttactccagctgagaagcctcaaaacacagtttacattggcaagattgcaccaactgtggaaaatgagttcatgctctctctccttcaattatgtggaactatcaagacctggaaacgtcctcaggatttatcaactggaactcctacaagttttgggttttatgagtttgagtctgcagaaggggttcttcgtgccttgcgtctccttactaaactgaatattgatgggcaagaattgaaggtcaatgtgaatcaagctatgaaagaaaatctggagcggtatgataagacaaaaactgagaacttgaagaacaaaaaaactcaggcaggagtaggtgaaaaaaacgaaggtgaacaaccttctaatgcaaacaaggatgcaaaggctgacacagaaccctcaaataaagaggttcttgaatcatcaaacaaggaatcacatgacatttcctgtggcaaactttgggattgtctgtgatgaagatagagaagctgatcgtgaggctttagaaaagattacaaagatgatagaggaaaggttgaagattagacctttgcctgcaccatctgctcagctgactggtgatggttctgtaaatttaacttcagaacaacctgttaaagcaagggatggagactctgttgtggataccgagaagaatgaatctgctgaaaataaaaatgagaaagagacaaacaatgataacaaaccaaccagtgaacatgaaaggactgaaagtcctgatagaaggcatgatagaaaaagcagagagagggaccgagatagggagctaaaacgagaaaaagatagagaacttgaaagatatgaaagagaagcagagcgggaacgtgttcggaaagagagggaacaaagacgaagggttgaggagactgagcgtcagtatgaaacatatttgaaggattgggagtatagagaacgagagaaagagaaagagcgtcagtatgaaaaagagaaggagaaggaaagggaacgtaaaaggagaaaggagatactttatgatgaagaggatgaggatgaggattctaggaagagatggcgcagaagtgtgatagaggagaagagaaagaagaggctgcgtgagaaggaagatgacctggttgaccgacaaaaagaagaggaagaaattgctgaggccaaaaagaaggctgaggaggaacaaaagcgacaaagagatgcattaaagcttttatctgagcatgtggtaaatggtggtaaggaaaatatgattactgaagagattactaatgaagttaaaagcattgttgttgaacaagatactgtagctgactatagtcgtgaagatcatattggtgacggtaattcaataaatgtcatcattgatgaatcaaccatagcatctgttgctccaactgatgcacagtcaggtggcaatgctcctacaaagaaattggggtttggtctagttggttcagggaaaagaacatctgtcccttctgttttccatgaagaggatgatgatgatgcacacaaggacaaaaaaatgaggccattggttccaattgattactcaactgaagaattgcaggctgttcaacctacagtttctgggccaacaccaccaaatttggctgctgctgcagaatttgcaaagcgtatatccagtacaaatttcaaggaagagaagctggatggagaacgggatagaagtaggcgttcaaatgagaagtctaaccaccgggacaggagtgatgaagatggcacgcacaacagagatgaaaacaaggagagaattcctggccgtgacagggatcgagatcatggatcggagaaactcaaaacttctgataataagaggcttttggatgcaaaacaattgattgatatgataccaaagaccaaggaggagttgttctcatatgagatagactgggcagtgtatgataagcatcaattacatgatagaatgagaccgtggatttcaaagaaaatcaaagagtttttgggggaagaagaaactacattgatagattatattgtttccagtacacaagaacatgtgaaagcatcacaaatgcttgagcgacttcagataattttggatgaagaggctgaaatgttcgttctgaagatgtggaggatgcttatctttgaaataaagaaggtagagtcggggctagctttgaggtcaaaatcatgatttttttaatcaatttatgttcttccttcccttttctgctggattgatattttaaccatgatccttgacatgtctttaccctaaattgtaaaatggctgcataatcataaacggttgaatgtaatttttcagtctgtattgcttcaacattcaagtagttacctggataaaaccccgttttcttcatccgcgagaatccggtggcaatttttgtcatgtgaatagtgtagaactttgttttttttttttttttaaagctgcttggagagaggtagccgacagctgcctaggtttacaacgtggaattgtaaattcaacacttcaacgtcaaatttggaatatagcatttttttgttctgaaaaagaggaggatgcttatctttgaaataaagaaggtagagtcagggctagctttgaggtcaaaatcatgatttttttattattattatatgttcttcctttcctttgctgctggattgatattttaacattgatccttgacatgtctttaccctaaattgtaaaatgtctgcataatcataaacggttgaatgtaat

SEQ ID NO: 8630 - DNA, 383 bp, Glycine max
  Clone ID: PAT_MRT3847_107801C.1
gactttcaaagttcttccttagcaacctcaatagggttccaccgttgaagtctcaatttgtgtttagggttcctcacatttgaagagttcacaccttattgtcgccattctcgcatctcaatattcattcaagtgttcacacaagagaaaccctacttcgctattcattctctccaatttcaattctcaatcgtgctcttcaccaactatgcattgatttgtctccctctttttctcttcagatgaacaaggaaatactaaaaagatccagcttacaaaaccaagtgtatttgcgatacctcatcgtgaatatatagtcataccatttgatagtcaactatgagcctatggagaagcagctacacttctttcatcagcttgtg

SEQ ID NO: 8631 - DNA, 708 bp, Glycine max
  Clone ID: PAT_MRT3847_107802C.1
ggagtggtcattgttctcccaggggggctacacaagcggcttacaacaggagaattattaattggtccagcaagagtgctgttcatggatgagatatcaactggtcttgataggtcaactacttatcaaattatcagatatcttaagcattcaacccgtgcacttgatgggaccacaattgtatcccttctcgaaccagctccagagacctatgaattgtttgatgatgttattcttttgtgcgagggtcagattgtatatcagggtccccgtgaagctgctgttgattttttcaaacaaatgggattcagttgtcctgagcgaaaaaatgtagcagatttcttacaagaagttacgtcaaagaaggaccaagagcagtactggtccattctcgatcgcccttaccgatacgtacctgttgggaagttcgcggaagcattttccttgtatcgtgagggaaggattttgtctgagaagctaaacatacctttcgatagacgctataatcatccagccgccttggcaactcttagctatggcgcgaaaaggctcgaacttctcaagactaattaccagtggcagaagcttcttatgaagcggaattcatttatttatgtttttaaatttgttcagctgcttttggttgcgttgattacaatgagtgttttcttccgaacaacgatgcaccataataccattgacgatgga

SEQ ID NO: 8632 - DNA, 327 bp, Glycine max
  unsure (1)..(327): unsure at all n locations
  Clone ID: PAT_MRT3847_107803C.1
gatgcaccacaggctaggcctaacatgaaggaggttcttgctatgctgattaagatatccaaccccaagggggactcaagttatggaccctaccttatttagtctttttgtgttaaggggattgatggatctgcgagaaaaaaaatgtgcataggttaaggtgtagcatagtttacagaaacaatgtgtcatgcacagttgactctactattgtatatacacagaaacttcattcattatgttaaagaagtcgctcaatttagttgtgtaacacgttttcctatagtgattttacattcttaaaannnnannnaaaaaaaaaaaaaa

SEQ ID NO: 8633 - DNA, 358 bp, Glycine max
  Clone ID: PAT_MRT3847_107804C.1
tttttattattttttattacaatttaaattctaaatgatttagtaaaaaacataagtccttatcgatcacttatacagttaataacattaatcaaccaggcacataacatttgagacgagatcaccacatataatatgtcagaaattaaaccatttgcaacaagcaaaaactttgattatgttacttagtaagataccaaggttactacgaccaaagcatgtccctcactcacagggagttagccggtagctagtcaggggcaaatgcagattcatacttcagaaactgaacgacttaaggggtggttccaaacaacagcaaggcgctgaatcccttaacaatggtacgaatcccaag

SEQ ID NO: 8634 - DNA, 267 bp, Glycine max
  Clone ID: PAT_MRT3847_107805C.1
ttccgggaatcaccgactttgttgttcagtccagagtaatgccataatgttttagtttaggtgtaagttttggtgtctggaataaaatcatgtgtaaaaatatcagctgcatcgtgtaataactgtagtactaactatttgatttccttggagaagtaagcttctatgtatttaatattgtcattttcctaatccctttttttcgtttttgccttctcatcagtttctgaatgcaaagcttcaacactgtggtctggcggatgtagg

SEQ ID NO: 8635 - DNA, 680 bp, Glycine max
  Clone ID: PAT_MRT3847_107806C.1
tcaggagtttgctagaaaggagatgaaggtgaagaagggttggctcgcggttcaagtggaagaagaaggtggcggtggagggtctcaaagatttgtgatcccaatttcgtatctttatcaccctctcttcaagcaccttttggataaggcttatgaggtttatggctaccacaccgagggtcctctcaaactgccatgttcagtcgatgactttcttcatctccgatggagaatcgagaaagaatccactacccatcaccaccaccaacatcatcatcatcaccatcatcgccaacttcctcacgccttgtatttccatgcttatcaattctagctcacttttatactctttctttctttttcttgcttttgcatttgcttctttcttttctttctttcttctggtttacctcgttttttcttttctgaaatagaggaaatcataaaaagaaagaaagattgacaccgctctgtaactacacacttggagagaaatattaccatgctttagagatgcttagataagtttttgtctatgctatgtgattttgcgtattgggaggatatataaaggattggagtactaacggaagaaagcggcgcgagcgcgggtcagctgtcaataataaataaaatcctttggggggggcccgaccccttcccccttaggtgattgtttc

SEQ ID NO: 8636 - DNA, 488 bp, Glycine max
  Clone ID: PAT_MRT3847_107807C.1
agaggcttaccgtctgttgctcttgacttattataccgctgcccccaaacgaccccgtcgtctgctctcttatgcatacatccgatcagagagacaatcctagacatgaacagatatttagtgattgccgctgtcgcatcggttgcggatcactatatcttaatggatcgtgcggacatgaccggtggaccggtcatggacatgccgatcatgcacgacagctgaccgttacgatgtgtacgcatgttgattccggaaagttcggcatgacaaagctgatgcaggataaacagaccatggaactggtcgccgtgaagtacatcgattggggtgataagattgatgaaaatgtcaagagggacctgatcagtcacaggtctctgaagcatgctaccagtgatagatctaaagaggaacttctaacacctactaatgtcgctatagtaaaggaatatgcatctgggggagagctctatgagaaaatctgc

SEQ ID NO: 8637 - DNA, 2464 bp, Glycine max
  unsure (1)..(2464): unsure at all n locations
  Clone ID: PAT_MRT3847_107808C.1
nnnnnnnnnnnnnnnnnnnnnnnnnnnnnnnnnnnnnnnnnnnnnnnnnnnnnncaacttcgtctttggagnccaacgccttgggctcgagctcattcgtaaacccaaacacttcgtttcgaagtgaaacgaagtgttgctatcaacggaggagcgcctccactggaaaaaaactctccggcgatagttccgccgaacctctttcgttctccggcgcgatcgtggattcaatcgcccgtttccagtttctcattctagttgatcgagttcgtagggttttatggtgcttcgttggacacacggtggcgatttgcattactcagtgggtggtggtggcacggtgaattattgagtctgattacactcgtttttaaaaatcgaagagagaaatgtcttatcagcataaaagcttttggatgccacgggatgctggctgcatggctgaagaaaatgcgggatatgaaaattcttccagaattgaacccaagcgcagtcataagtggtttatggatacaggtgaacctgaaatattcagcaacaagaaacaagcagttgaagctgttagtggcaggccaatttctggagtttcacatgcaaatgtttcccaatgggacaacaatttttcacctatcagtcacaagtcaattttctgaccgtctttttggatctgattgattgacttgctagaatttggttaatacgaatgtgccatgaattgtaagatccaatcttcacatggggaacaacgattttgagcatcaatacgataattattattctttgggattgagagcgcatcataccatagcagacacttattatgacatctattgtaagtggaaatctgaacatgggaaggaaagattttgagcatcaatatggtaatgatccttctgtgggattgtcaatatcccattccatagcagacccttcatcatgtctcaattttggtggcatcagaaaagttaaagttaatcaagtcagagattctgacaactgcatgcctgctgcatccatggggccctcctatagtagggaagataatagtacaatttcagtaggtgctggctacaataagaatgatggcgacaatatttcattgggtcctacttataacaatggatatgacaacaccattgctatggggagcagaattagtaagactgatgacaatcttctttcaatggctcacaccttcagtaaaggggatgggggttttatgttgatgggccacaattatggcaagggagatgaaagtatcttatcaatgggtcagccctttgacaagggagatggaaatttcatatcaatgggtcaatcatatgagaaggaagatggcaatttaatatctctgggcacctcatataccaagggacatgagaactttataccagttggtccaacctatggtaaatcaggagaaaatttcataactgttgctccttatgacaagggtactgatcatataatatcaatgggtccaacatatgataaggtggattcaaatattgcatcaacagttccatcatatgacagaggagattctagttccttacctgtgggtcaaaaccaccataagggtcagagcagttccatatctttcggaggttttcatgatgaccctggaccaaatatccctagcggaatcattagtggctatgatctgttgataggaagccagaactcagctcaaggtatggatagccagaacgacctgactgagacaaacactgaatcacttgtaaatagcattccaaaacccaatactaaaaatgatattgttaagaacaaagagcccaagacaaccaagaaggctcctactaacaacttcccttcaaatgtcaaaagtctactgtcaactggtatttttgatggtgttcaggtgaaatatgtttcatggtcacgggagaaaagtcttaaggggatcataaaaggaactgggtatttgtgttcatgtgacaactgcaaccagtcaaaggctcttaatgcatacgagtttgagcgtcatgctggtgccaagacaaaacatcctaacaatcacatatactttgagaatggaaaaaccatctatgctgttgttcaagagctgaaaaatactcctcaggatatgctttttgatgctattcaaaatgtgactggctctaccatcaaccaaaagaactttcgaatatggaaagcatcataccaagctgctactcgggagcttcagcgtatctatggaaaggatgatgtggtcattccgtcttgagttcccttttcttcttaaaagttcagaacagtggtagatatgtaatctgttcatagtgagtgattggcaggttaatattttaaaagactacttaaaattgaaaagttttagccaatgcttcttgtaggaacttgattgttttattaatagtaatgaagatgtctttttgtggttcagttgcattctttccactacaaacaaaaattaataaggttc

SEQ ID NO: 8638 - DNA, 511 bp, Glycine max
  Clone ID: PAT_MRT3847_107809C.1
gtgcaattcagtagtgtgtaacaaagaaacttcaaattatattgagtttaatttttatacaccgtcaatgtaaagataattagaagtaattttatgtatgactttttaagttattattataaaaattaataaatttattatatattgagaatctttaattaaatgactatgtaaaatatttttattcgttttattaaatactttatttctcttcattgtttgttccatctcagttgacatgtaaggaaataaattataaattctttttggacatcatgggaacttccctttagaatatcactgggagataacccattaatattcagaaatgcctgaatgaactaaacaggagtttgttaatgctagataatcaatctgccatacatgctaatagatacttcagttcatttgatcctataagttcagtttttataatccatcctcacaaacatatatgttcctataggtacttatttgttctgtgtactaatgacgtgctgttcttgcaatt

SEQ ID NO: 8639 - DNA, 289 bp, Glycine max
  Clone ID: PAT_MRT3847_10780C.1
gcatattcatcacttgaatgaacacggtatttattttcatcccctgttaacgaggcgggggaaaatggtttgaactgggccccatcaccactgtagaatttattatgaaattctacccacttaatactcatggcgtgaagaaaagcgctcagagtctccatcattagtcgtatataggcagttgcaaaggcaaaaacagctagccccacttacctaatgacaagattgttatacctcccagcaagttacaggactttctaattaaaaaccgcggatagatcttgggggg

SEQ ID NO: 8640 - DNA, 772 bp, Glycine max
  Clone ID: PAT_MRT3847_107810C.1
ccacgcgtccgcgaagtgttgctatcaacggaggagcgcctccaccggaacaaaactctccggcgatagttccgccaaacctctttcgttctccggcgcgatcgtggattcaatcgcccgtttccagtttctcattctagttgatcgagttcgtagggttttatggtgcttccttggacacacggtggcgatttgcattactcagtgggtggtggcacggtgaattattgagtctgatcatactcgtttttaaaaatcagagagaaatgtcttatcagcataaaagcttttggatgccacgggatgctggctgcatggctgaagaaaatgcgggatatgaaaattcttccagaattgaacccaagcgcagtcatcagtggtttatggatacaggtgaacctgaaatattcagcaacaagaaacaagcagttgaagctgttagtggcaggccaatttctggagtttcacatgcaaatgtttcccaatgggacaccaattcaggatttcactcagtcacaagtcaattttctgaccgtctttttggatctgatcttgctaggactgtgaatttggttgataagaatgtgccatctattgtaagtggaaatctgaacatgggaaggaaagattttgagcatcaatatggtaatgatccttctgtgggattgtcaatatcccattccatagcagacccttcatcatgtctcaatttttggtggcatcagaaaaagttaaaggtaatcaagtcagagattctgacaactgcatgcct

SEQ ID NO: 8641 - DNA, 685 bp, Glycine max
  Clone ID: PAT_MRT3847_107811C.1
atttttgaaggtgtccaggtaaaatatgtttggggtcccgggagaaaagttttaagggaataataaaaggaacctgggtatttgtgttcatgtgccaactgcaaccagtcaaaggctctttatgctaccgagtttgagcgtcatgctggtgctaagacaaaacatcctaacaatcacatatactttgagaatggaaaaaccatctatgctgttgttcaagagctgaaaaatactaatcaggatatgctttttgatgctattcaaaatgtgactggctctaccatcaaccaaaagaactttcgaatatggaaaggtaacaagaattttcagtttgcttggtcatgtctttgcttcagttgtccatgcttagatatacaaaacaacacaaattcttcaatcttttctacttctaatctgtttccccccttatcagcatcataccaagctgctactcgggagcttcagcgtatctatggaaaggatgaagtggtcattccttcatgagttccattttcttcttgaaagttcagaacagtggtagatatgtaatctgttcatagtgagtgattggcaggctaatattttaaaagactatttaaaattgaaaagttttagccaatgcttcttgtaggaactcgattgttttatttatggtaatgaagatgtctcttttgtgattcagttg

SEQ ID NO: 8642 - DNA, 1471 bp, Glycine max
  Clone ID: PAT_MRT3847_107812C.1
gggaatccctgaggacgaaatggctgctttagaaagacaattagccccagcagttgacaatacagtgacaaaagataggaaggttgggtttgtgagtgctggagtggaatctcagcttgatagaggggtaaaaactagtgcaaatcatgaggatattgagttaccagaagaaagtgattctgatgatgatgatgataagattgaaattgcacaaaaagatgttccttctgctgtgtttggtggtttgattagaaagagagatgagaatgaaaataatggagaagtagatgctgcaaaagataaggataatggaatacggcttggtgctcttgagagaatgaagaggctaaaacaaaattaaatttttggtctgagtattcccaatgaaattttgattgcagtgaaattagttttggtttgtgttatgtactatcagtctatccagagataatgaagaagacactttcggacgatgctaaatcgggaaaaaacggcctctatttttcctgcaatgtgcaacaagttatctgatcacagtgaagtacaaaacagggtacatggttgctgatgtagatttgtcaaaaatagaaaaaacgaattgttgcaatttaattatgcagccaggatttgaacccacaaattcaacattaggaattaacgagtgtgctactgtatatgtcacaccattgctgatactgagcaaatggcagagtataacatccaagagctctaatcgggagcaaaaaaattgagtatgtcattatcaggtctgtttcatcaaattgcacaatcctaatatgtaatttaaatatggatcaatatccatattcctaaacttttgtttagactttctccctgatgtatattggcttgaaaccttgaaacgtgaaaagcgttttcttgttacatggagaaaacaatgccttgcaatcttattctataaattatcctagtaggacatgttttcttgttctgagttggcactgttgaaatttgatgcatgcagcatcagggagtaattcactaggagaatgttacatgatgcattatttttacatgaaaactgggttgttggtttagttttccagttttgaaatttcccactcattattttttctgtatgcatcctgtgtgttattttgttggttgagttatatgtggttttctgaaatgtttgactttactcgtttctttactttaatggttgaaaactgcgagtgggatcagatggaaaaatggatcgagacccaggatgtgaagtcatggtttggcttggaatctggaatgacgtaaaaaatttgttatcatattcatgtctggtcttacgggattctttattcgggtcgaggaaattcagctcatgtgtatatttaagttatgatgaattgtggtgttagtggctgggaggatttgcttaggttctgttgcgatatgttcaaattttatgagaatagaacaatagttggctctg

SEQ ID NO: 8643 - DNA, 677 bp, Glycine max
  Clone ID: PAT_MRT3847_107813C.1
acgagggaagaacggctcttcatgtatccgtgattgataatattcaatgtgaacaagtggaattgttgatgtctgtgtcatcaattgatttgaacatttgtgatgctgatgggatgacccctttggatcttttaaagcaaagggcgcgatccgcatcatctgatattctgatcaagcaaatgatttccgctggaggggtctctaaatgtctggatgctgtggcaggaaatgccctttgcactcatcacaaagcccatgtcattggaggcagtcctgggacttcatttagaataccagatgcagagatattcttgtacactggcattgagaattcatcagataccaccaattatgatcaagcaagtgtggaatcatattcctgctcaaacgaactaagcaattctgactcagccaattccccacataacaagaagtctaattctgtcaatgtaaggcgctcaaagtttcgtctccactggcctaggagaagagagacaaaagcagctgcctcagaattggaagatgatgattctcttgaccctttcagttcaagtagaaacttggaagagtttccaatcccgttgcggcaaagatactcacaaccatgctcccatccaaacaacaaaagaacacaacctatgaggacttctcttccaagttcatcctcgaatgtgaaa

SEQ ID NO: 8644 - DNA, 315 bp, Glycine max
  unsure (1)..(315): unsure at all n locations
  Clone ID: PAT_MRT3847_107814C.1
cangctgcgtacgtaagctcggaattcggctcgagnngnttctctctctctctctcnaattcatgntctcttattctnnattgattctcntctantccgattcgantgnnctatngnaccgcagntncannncanncnggaccccgcgccggangttnttagcngtggcngnggggatncgganaagtcgcatgtnannnntgtcnccgaggtncgcgacgttnacatggcgcangnaaacngcgcttgntgccctntcgttttgaaacggaagcgcggtcncccggccaaggganaccgcattccgatngggat

SEQ ID NO: 8645 - DNA, 464 bp, Glycine max
  Clone ID: PAT_MRT3847_107815C.1
cggctcgagggggatttcatattcggaaacgccgcggcagtgttccaaaactgtaacatctatcctcgccttccaatgagtggccaattcaacgccatcaccgcacagggacgaaccgacccaaatcaaaacacgggcacttccattcacaactgcacgatccgaccagccgatgatttggctacgaacatcgatgccgctgaaacttatctcggaaggccctggaaaaattactcccggacggttttcatgcagagctttatggacattgtcatcaattctgctgggtggcgcgaatgggacggtgattttgcttttagcactttgtattatgcggagtttaacaacactggacctggttctagcactgtcaacagagtcacgtggccgggttaccacgtcattaatgccactgatgctgctaattttacggtctctaacttcttgcttggtgataactggct

SEQ ID NO: 8646 - DNA, 550 bp, Glycine max
  Clone ID: PAT_MRT3847_107816C.1
caaaaatcaagccaatgtttgttgttgttgttgttcccaacttgattaagcatgaaccgtttgattgaatcacttggacttgaagggaatggccctgtattacgacctggtgattcaatcaaacggttcatgcttaatcaatggaccacacacaaaatcaagccaatgtttgtgggttttggtttcatttcattaagatgatctgtttatctcttttcttctttttaaaatttaaagtctttgtatttgtatgtaaagatgtaaaattatgattattaggtggtgcatgtgtcgcgtcatgggccaatgttatcctctgcttttaagttggaagaggcccaactcatgtgtgatgtacggctgtgattgtgtaatttaatttgcaaaatcaaaaataacaccagagtcatatatatgcatctctttattttctctggcccccaccaaaaaaaaaaaaaaaaaaaaaaaaaaaaaaaaaaaaaaaaaaaaaaaaaaaaaaataaaaaaaaaaaaaaaaaaaaagggggggggctcgaatttgaaccccccc

SEQ ID NO: 8647 - DNA, 424 bp, Glycine max
  Clone ID: PAT_MRT3847_107817C.1
ggtttattatagactaactgtgactgtctctgaacacacagaaatgggagcttacatacatgtgtttgtagctcttgaaccgtaaggaatatcttgttccaaagagatctgaagaactcaaattaatcttgctgtcatatctgcacactatgattccaacctcagtattctaacaaccaggatgctcttctaaatgcagatctttaagaataaatatattatcaaaatgacaacaatacgaaatagaagagagcctttaatattcacgctttaaaaattcatccttgaccttccttttacaagggacaaaaatttcactttcatgatattatataacatcatcagttactttataatattttcaatgccattattgaaaatgcgcggtatatggagaacgatacaataggattataactgttag

SEQ ID NO: 8648 - DNA, 1298 bp, Glycine max
  Clone ID: PAT_MRT3847_107818C.1
gccacacgctgtcacatctctgctcaagcttttcccttgctttcctctctaacacagcctgtcatgcctaattattaaccctttgaatctcatgtttttaaatcttagctgtttcttttgataggtttgtctaactatactgatgtgccaagagatccattgctgcgttcattatgcgttgtttctatgaggttttcacctagttccgtcttgaagtgcacactaacttggattgatccttcctttaactttcctttgcgaagcatgacttaaggagagccatggagaattggcctcttgttttgttactattggttttaatttagcgatagtaatctatgggaaaaaatgctggcatgagggaggaagatgctcaatgaacttcatcacagaaagctgcaattttggtacttccttacaacaggcatgggaactaataattgaatattcccataaatcttctagcatcctcagtagacagcaacaacttcattgtgggtggtgtggatgtctgggagcattttcagaacaaaggagagactaacaaacattgtactattggagtgaataaattgcaagatccaatggataggatgctagacagaaacaacatcatggaccaccaaaaagacaatgcagatgcatgaagaaatctaaaaaaactacatctttcatacagtatgcaaaagaacttcatggattatcccaaattcaaaagatgacaacagatgacctaggaccacataaataacataaaagtaagccatccacattccattaaacagcaacatcaaacaacacagatttcacaccagcctgatttccatgttcaaaatttgagaggaagaggttttgatcttgaaaggcctgctgaggaagacatttttattcgagcacgtggcttcgatgaaggcgaggcagggcctagctcccacactgcattccagagatgtaaaacaagtactagtggatatgatgaagaaatggaagtggatttgacactaagtataggaggtagccaagttaagaactctcatttaccacaattagcatgctcaaactcaaccaataatgggaaaattaggaagctgaattcatctgcctccttcaaatcagatagaacaggagaatgcagtgaccccacaaccccaatgagtagctccactgtgacatttactcaggaaagaaaggggccacattggctttctcaaggtctaaagcttaaatagcactataacttgtttgtatcctttcaactctacatggaccaccgaatttgtatggttcatcctttcgaa

SEQ ID NO: 8649 - DNA, 425 bp, Glycine max
  Clone ID: PAT_MRT3847_107819C.1
cttttagacatttacaattacatcggatgtggtattgatgatactgaaagtagaggtggaagagggaaacataactcttgcattaatatcgagtctatgggttattctgaccactgcaatggataatcgcatagcttatgatccatatatggatgaaataattgatatacaacaggtacatcaagtgctgcaaggtaaagtttgagagttgggaccgtatgattaccactcctactgacctgcttttactgtgtagaagctacttcaataacagacttgggctctgctgcaatacttggatcaattaatggtgaatgagcagtagtgtgaactctaattctatatgacataattactgacttgaagccaacacttaatgatccgaaggctatgcttgatgcaatgaatctatattctgaccctct

SEQ ID NO: 8650 - DNA, 509 bp, Glycine max
  Clone ID: PAT_MRT3847_10781C.1
aataacaggagctgagtctatatacgctattgcaaactgatttcacaaagttggcgattcacaagagcattatatattggatactcactgattacaaccatatgactgatccgtctattaatgggactgactgacacttatgtctaaatccatatctgagacgtactttttccaccacaatatatcatgtcatgggcaatagacggaccatcaagctcaactgcaaagtgcacagagagattggggtcgatttccctccaccttgatcaggtacaacttaatcttgaagatatgggggagcctttctggacgagctctggataaaacagtttgtcccaaggactaaataatgagttggtatacctagagccgttgcccatgaaacctcaattgaaccatctgagggccccctttcaacgtgataccctgaatctatggaactctgccttgacatggtgaagcctcatgggttatcgctactacacggctcactttctggatcaggacac

SEQ ID NO: 8651 - DNA, 248 bp, Glycine max
  unsure (1)..(248): unsure at all n locations
  Clone ID: PAT_MRT3847_107820C.1
ggaacaggaaaatcggggacatgtaactttatacaagattctttctcgactaaatancctcgatcccaccaatagcaacaaacatattaattgcatccgtatacacgatcccattttacataatcacatcaacaacaggtcttacttgtaccagcagatcacatttactatcatattactacaaaactttcaattgcatacaccagattcatcatctaagctttctattaccacaaaggcacatctca

SEQ ID NO: 8652 - DNA, 593 bp, Glycine max
  Clone ID: PAT_MRT3847_107821C.1
ccccaaaaaattcattaaccccaaacccggcccccaacgggaaaaaaaaaacccttggggccagccaaaaaccctaaaccccttttaaccaaaaaaaaaccctttcgggaaacaatttatcccaaaaaaggggggggggcccccccaggaaacccaaagttttgggaaaaaatggcaaaggaaggggcccggggcccaaattacccaacaaaacaaaaggggtttccccccagcggggccccaggggccccaaggggaaaaacacgggaatttcccccccccagggccaaactgggttttatggcccccaattgggggccggggaaaacctcaaatccccaggggggtttcccctgggattggggggaaaaaccccggcaaaaaaaacaattccttcaggggggccttggaaggaaccccgggttttcccccccccggggacaaaggccccaactagtgggccgggaaaaaggggcccccccagaaggaaaaccccaaaattggggcccacccggggggccaaaacccaaagggaacggggctgggccaacccccctttgggggccctaaaaaaaaacccccttggggggggg

SEQ ID NO: 8653 - DNA, 266 bp, Glycine max
  Clone ID: PAT_MRT3847_107822C.1
acattatccatccgaatcgtgttaaattaaccaacccaccaaaccccaatcattcactcccacctatctacaactctaaacccaatatacccacttaccacatccctttacactataatccaaactacactctcattttcattcctataatcatcaccctttccaatcatattcactactaccaatatcttaatctaatccctaaccacacctaaaccaaaccatcatcataattcataaccttttatataatctcccaaaattaa

SEQ ID NO: 8654 - DNA, 630 bp, Glycine max
  Clone ID: PAT_MRT3847_107823C.1
cccaaatttgctcctcccaacagcatgaaaaatttgggttaaggatgttcgtttctctcgccacaaccttttccccgccgcatactccgtcatcctcctccattccagattcgttcctccgtgccaccttcgccagtgctgttggcagcaataacatttgggaatacagatctgcccggcagcgatggaggaagcgccagatctgaaatatgcataacagtattgaacgacactggtgccgaaaagcttattacgattgtactatattgtatattgcatatagggaaatagattcaagatacaattcgattttccagcattttgggaatttattttgctttgttgactatccttaccccttaggtgacgaaagattagtctaattgagttggagcatgtgtggcaaatttccccatctggggttcttttacaaaatatttccccagatggggtctttttaaaaaaatttcctcaagggggcacttttctacgtggttgcatgcatggtgcaagcaaaccgccagtgggactggcgggtttgctgctgctgcctggagtcgccactgacagcagcgacttgcacatgcacaggaacaaatcgcccttgccattggcgatatagctggaaga

SEQ ID NO: 8655 - DNA, 1594 bp, Glycine max
  Clone ID: PAT_MRT3847_107824C.1
gacgcaacctcaaattacacaaagaaactattgttctaagtttcaccagtaaattttgcttcacttgcaagattccaactcaccccgttatgatgggtatctcacattttcttgcaataccttacccaatcctagggcacatgaacccccttcttcagttctcccaggttttggccaaatatggctgcaaaatcaccctcttgagttcagatgagaactacgaaaaactgaagagtgcaagtggtggtgggaatgacaaagtcatcatggactcacacataaagttggtgtctctccctgatggtgtggaccctgaagatgacagaaaggaccaggccaaggttatttccaccaccataaacaccatgcgtgctaagcttcccaagctcatagaagatgtgaatgatgctgaggacagtgacaacaagatttcttgtattatcgtcactaagaatatggggtgggccttggaagttggacaccaactgggaattaaaggggctctattctggccagcctcagctacttctttggcatcctttaattccattcagaggcttattgatgagggtgccatagattccaaaaatggactcccaacccgaaagcaggaaattcagctttcctctaatttgcctatgatggaggcaggctgccatgccatggtactgcttggataatgccttcttcttccttcacatgaagcaagaaatgcaaaacctgaatttagctgaaaggtggctttgtaacaccacttttgatcttgaagctggagcattctccacatcacaaaagctcctaccaattggtccattgatggcaaatgagcacaacataatatcaatattgcaagaagacagaacctgcctagagtggttggatcagcaaccacctcaatctgtcatatatgcttcatttggcagcatggtgtcaacgaaaccaaaccaattcaatgagttagcccttggacttgatctcctcaaaaggccttttctttgggttgtgcgtgaagacaatggttacaacattgcatacccagatgaatttcggggaagtcaaggtaaaattgttggttgggccccacagaagaagattttggaacaccctgccatagcatgtttcattagccattgtggctggaactcaaccattgaaggtttatataatggggtgcccttcttgtgctggccattctgcagtgaccagcttatgaacaagatatatatttgtgatgtgtggaaggttggacttgaatttcacagggatgaaaatgggataatattaagggaagagattaaaaagaaggtggagcaactacttggtgatgaagaaataaaaggaagggcttccaagttaatggaaaaggtcatcaagaacaaagcacaaggtgatcagaatctcatcaagtttatcaattgggccaaggaataagaatgctcttaattaatgtcttgttttatgcttcaataaaataattaatggaattaaacgtcaaaaattaatatttaacaactaagtttatactcctataaaagaatgaaaaatagagaaaatgaaatcagaatgaaagaaaaataaaaaagggtggaaatta

SEQ ID NO: 8656 - DNA, 685 bp, Glycine max
  unsure (1)..(685): unsure at all n locations
  Clone ID: PAT_MRT3847_107825C.1
tcctctagagcggccgcttttttttttttttttttttttttttttttggcaatttgtcaaataaaaaggaaagaaaaattgtaaatgaaatataagagaaaagatgacgaaatcataactataaagttaaaaaaaaaagggaaagaagaaggcaacacatcagcaaaaggtatatatatacaggctagaaaagcacatttacaaactctaattgatcccacttacttacgctaaacaaacaactgcaagcaggggaaatcctaatgttaaaacctcttctccattgacgaccataccttaaaaacacaatttaaggtaagctttcacgttttgaggaattatgaaacaaaaaatgtcttgatgctgtgttgaaactgaaagcgaagggttgtctaacgctgatcgagttaggccaccataagtccctcccatttggggcaccaaggcataacttgccgcgtctcactcaatcaaagaagcaaccaaagtaattcaagtgctccacttcggagggaacctaactaggccatcccttttcttaaggcccaaacaccccccccctgttactattaccacacccaacccaaccgtccaattttcactatcccgcgtaagttccacctcttttctatcttaatttcctgcctttactcnttcttcacattgcttccacttttatgtacat

SEQ ID NO: 8657 - DNA, 517 bp, Glycine max
  Clone ID: PAT_MRT3847_107826C.1
gagaccaaaccatgacattgttcattggataatgaatcatcaacacaggcattcaattgataatagcattcactggaaacagtgtacttttaacgatcaatggagagaattacaatatttcagttagcaatcaaatatcaatcttttggttagagcttccatctctactttcataccaatcagccctagctattttgcatgacaaattatagtacaagtgggaagaaaatcaatctaacagaacacaaaaccaatatcaagttaccagacgggcactttagtgtcatacagaagcctctatccttggctcaaatgaaaaggcagacatgaactccatgagttctccattcaagcaacatttcggcaactctgtccatttgttggtcaccaaatcacacagaacataagcacatagctcaggggagttcaagcatatgaatatccgatcgccagctccaacacagttaatatctgccttctttccataccactcttgagacattgctgcaggcattgc

SEQ ID NO: 8658 - DNA, 323 bp, Glycine max
  Clone ID: PAT_MRT3847_107827C.1
ctcgcgctgcatataacatgtccaagatcgatcaaataatgttacgctttcgccttatcgcccccaaacccctcccctccgccgccgccctttccgacgctttctcctcggaaaacaccggggtctccatgcggaaggataacactggcaacaagcggtgcagtcgagggatgcgcaggaggagaaactctgctcatccacgtcctcctccgcttcaggcggtgacactcccgctgctaccgaagactccacatctgatgaaaaccaccttcgtcctaatgacccgtcaagtaccggtgtgcctgagcttacgattaagcttc

SEQ ID NO: 8659 - DNA, 492 bp, Glycine max
  Clone ID: PAT_MRT3847_107828C.1
tttttccaagggaagtaaacttagttgagaggtttattgctgtagggtacatgtacgtgtctcctttcaatttgtgtcttgacatgcacgcaatgcctagttgccacgtaggtgaaaaatgtaactgtttataccccagctgaaagggacaaaacattgcatgcttcattgcacttattgcagtaactctatgtttctattcagtgcttttgctataagtgtggaggaatatgcattccatttatgacatacacaattctatatactataatgcaatcctttttcacttagtaaaatgttggatcattctatattgcctctggcttgcgtgtcttttgtcttctgcatgaagctccaaatccaatatggttggctgacacagagtgacccaacaattcacaaagtaaaaggaaatatgcttccttttgcattgaggggtggtttgatttgtaaaaaaaatatttagcttttacacttttaacttagatatgc

SEQ ID NO: 8660 - DNA, 1854 bp, Glycine max
  Clone ID: PAT_MRT3847_107829C.1
gcacgagcgacaactcgccgtgtgactacggggaagaagtagagtttggctccctcctcgagggggattctcgttaaacgtggcagaaggtcagttggaggcaagccgtggagctgagttccatccccagtatatggacagtgtagtgaaattttcaggcggccgagtgccggctggtcaggttgtagggtttccagttagccctggatttaagcttgggaatggttctgttataaaggccagagtttatttgatagccagaacataaagtttttctgaggggaaattctttttgcaccactttatttctctggttccaccctctcacttatttttcattccataaattagtttctagaatactagagactaatttccaaaatgggaaagaagaaaaaaacgaagaagaagaggtggcggcggccgcgatggggtggcgtcggtgagggaggtagtggcaccgtacgaggcggtggtggaggagctgtggaaggaggtgaaggtgaaggatttggaggtgaagaatctgagggagaagcttgatagtgctgttgctctcactactaatggaagtgctgaaaagaagcctgggaggtctctgtctaagaggaaactgggaattcaagcaatggcagcagtaccaacccctgaactctttgaagcaacgatgatgcaagtgagagaatcctcaaagtctttcacatctctgcttctgtctctcatgcacaatgcacattgggacataacagctgcagttcgttccattgaagctgctaccgcctccactgataaattccataacacttcttcaaccacatccattgtctcggcttaccatgccaagtatgcccttgaatcctacatatccaggaaaatcttccaagggtttgaccacgagactttctacatggacggaagcctctcctcgctcctcaaccccgaccagtttcgccgcgattgcttcactcagtaccaacacatgaagtccatggatccaactgagcttctgtgagtcaagcctacatgtcattttggcaaattctactctctgtcgtacccaatgcacattgatacatagatgctgcagtccttgtttgggaacttggagcagcccaatcatgtccaagtaggaaaccaccccaggagtgagttctacaatgagtttctaggggtggccaaggcagtgtggttgcttcatttactggcattctcgttgaaccctgcaccaagtcagtttgaggcaagccgtggagctgagttccatccccagtatatggacagtgtagtgaaattttcaggcgggcgagtgccggctggtcaggttgtagggtttccagttagccctggatttaagcttgggaatggctctgttataaaggccagagtttatttgatagccagaacataaagtttttctgaggggaaattctttttgcaccattttcttttctggttccaccctatcacttgttttacattccataaattagtttctagaatactagaaactaatttccgaaatgtagaaaaagagaaaaaaagaagggggtgtgaagagaataaagagggtgcaaatagaattactttttagtgagtcttgtattaaagaaactgattagagtgatccaaatattttcctagcaggattactgggctgttgatgtaatatgaaaaatccttaggctggctgggttattgatttccaggtgattgagtctgaccttggaagtcattctgatatagctcattcccaaacctacattagcaagctattattttcttctctgaattattgacttacaaatgagaggaaggagaactgttataatcccaaagtccaagattatctgggat

SEQ ID NO: 8661 - DNA, 375 bp, Glycine max
  Clone ID: PAT_MRT3847_10782C.1
ggttgttggcttgtgctctgctcgtgcctctagggttatcatatctccattgcgattctcctcgctctcagtttccatgaatctgaagctaagggaaagtctcatccaaccgtgagcgctgattaccataaggccgtgtagaatgcgaagaagaagctcagaagcttcatggcggagaagagatgcgctcctctaatgcacagtttggcatcgcactctgctggaacttacgacatgagcgcaaagatcggtggtcccatcagaaccataaagtaactctccaaagtcactcacggtgctaacaaccgtcttgacatccctgtgaggcgtttggacccactctaagcggagtatctgacattgagctacgccgat

SEQ ID NO: 8662 - DNA, 350 bp, Glycine max
  Clone ID: PAT_MRT3847_107830C.1
gctgcgtcctcctactatacttggagtcagagaacatgtgttcactggcagggtctcatctacagcgtcatttatgtgcaaccaagaaactaggtttgtgactttggggcagcgagtcttagcacatccattgaaggtccgcatgcactatggccataccggtgtttgcgctagactattgcacataacccgtggtggtatcaggatggctttccgtgtgatcaacattagtgaggatatgtatccaggattcaacatcaaccttacgtcacggaaatatcacacgatatggatatcttcaggttggaaagggatgagatgctgcgctcaatcagatggcactatttgaa

SEQ ID NO: 8663 - DNA, 833 bp, Glycine max
  unsure (1)..(833): unsure at all n locations
  Clone ID: PAT_MRT3847_107831C.1
aggcaaatactaccncagatatggatcggttagcagctttggaaaggggtatgaaaacatgggctaattgggtggacaataatattgataaaagcanaatcagggtgtctttcaggccatttctcccacacactacaacccaaatgaatggaatgtgggtcagacaactgtgatgacaacaaagaactgctatggtgaaactgccccaatcagtggcacaacataccctggagcataccctgagcagatgagggttgttgatatggtcataagagaaatgaaaaaccctgcatatcttttggacatcacaatgttatcagcattgaggaaggatggtcacccttcaatttacagtggtgaattgagtcctcaaaagagagctaaccctaatcgagctgattgcagccattggtgtcttcctggattgcctgatacttggaatgaactattctacactgctttgttctactaaattatgtatttactagctaattaacactgttcactcactgtatttttatttttattttttgttttgtttctgccaccaaattatctttagtaggtggtgcattaattgagggttgcataattattgcaactcgttgcaactgtgaagttatgtatgctaaggaaatgaaaaagtttctttgttgctctattaatgtaaagtgtgaattacactattatagtataaattctatcaaaggtatcaattgaatttgaaaggtttcactgttttaaaagaaggataataaaagaactcttatctttattattgagttcattacatgatgctgactttaattaaaatgaccctggggatcatatat

SEQ ID NO: 8664 - DNA, 2299 bp, Glycine max
  Clone ID: PAT_MRT3847_107832C.1
atcaatcttctgagagtgtttggttgaaagtagcaaagatgtttcctttcgggcaaaagggtcaaaagataaaggggactatggtggttatgcagaagaatgtgttggatatcaacagcatcaccagtgttggagggatcgttgaccaaggcttaggcttcataggcagtgcagtcgatgcacttacttttgcagccaccaaaatctccatccagttgattagtgctaccaaggctgatggtgggaaaggaaaaattggaaagagtacaaatttaagaggaaagataacattaccaaccttgggagctggcgaacaagcatacgatgttaattttgaatgggacagtgacttcggaattcccggtgcattttatattaagaacttcatgcaaaatgagttctacctcaagtctctaattctcgaagacattccaaaccacggaaccattcacttcgtatgcaactcctgggtttacaattcaaaaaactacaagactgatcgcattttctttgccaacaatacatatcttccaagcgagacaccagctccacttttgaagtacagagaagaagaattgaagaatgtaagaggggatggaactggagagcgcaaggaatgggataggatctatgattatgatgtctacaatgacttgggcaacccggatagcggtgataaatatgcacgccccgttcttggtggttcagccttaccttaccctcgcagaggaagaaccggaagaggaaaaactagaaaagatcccaacagtgagaagccgagcgattttgtttaccttccaagagatgaagcatttggtcacttgaagtcatcagattttctcgcttatggaatcaaatctgtatcccaagatgtcttgcctgtcttgactgatgcattcgatggaaatattttgagccttgagtttgataattttgctgaagtgcacaaactctatgaaggtggagttacactacctacaaactttcttagcaagatcgcccctataccagttatcaaggaaatttttcgaactgatggcgaacagttcctcaagtatccaccacctaaagtgatgcaggtggataagtctgcatggatgactgatgaagaatttgcaagagaaacgattgctggtttaaatccaaatgtcattaagattatagaggagttcccactaagtagcaagctagatactcaagcctatggtgatcatacctgtataatagcaaaagaacatttggagcctaacttaggtgggctcactgttgagcaggctatccaaaacaagaagttgttcatcttagatcaccatgactatctcattccttatttgaggaaaataaatgcaaataccacaaagacttatgctacaagaaccatatttttcttgaaagatgatggaactttgacaccattggccattgagttaagtaagccacatcctcagggtgaagaatatggtcctgttagcgaagtctacgtgcctgccagcgaaggagtggaagcttatatttggttactggcaaaggcttatgttgttgtgaatgatgcatgctaccatcaaatcattagccattggctaagcactcatgcaattgttgagccatttgtcatagcaacaaacaggcaactgagtgtggttcaccctatttacaaacttctgtttcctcactaccgtgacaccatgaatattaattcacttgcccggaaagccctggtcaatgcaggtttaatcctaaacaggccaactattagcaggagattcatgcctgaaaaggggtctcctgaatatgatgcgttggctaagaaccctgagaaggagtttttgaagactattactggcaagaaggagaccctcattgaccttacagttatagaaatcttgtcaaggcacgcatctgatgagttctaccttgggcagagagatggtggtgactactggacttctgatgccggtccattagaggcatttaagaggtttggaaagaagcttgaagagattgaaaagaagcttatagagaagaacaaagatgagacattgagaaaccgctatgggccagctaaaatgccttacactctgctctatccttctagtgaggagggattgactttcagaggaattcccaacagtatctctatctaaggaccctatggttgcttaagtactgttcctggttttaaataaatgtgaaattgaaggaaccagattccttaatcagttgtgtatgcttaagtcatgtatttggagtggctgaatgtatttgtatttgtcattaataaagagagttgtgttagtat

SEQ ID NO: 8665 - DNA, 663 bp, Glycine max
  Clone ID: PAT_MRT3847_107833C.1
cctaaagtgatgcaggtggataagtctgcatggatgactgatgaagaatttgcaagagaaacgattgctggtttaaatccaaatgtcattaagattatagaggctatccaaaacaagaagttgttcatcttagatcaccatgactatctcattccttatttgaggaaaataaatgcaaataccacaaagacttatgctacaagaaccatatttttcttgaaagatgatggaactttgacaccattggccattgagttaagtaagccacatcctcagggtgaagaatatggtcctgttagcgaagtctacgtgcctgccagcgaaggagtggaagcttatatttggttactggcaaaggcttatgttgttgtgaatgatgcatgctaccatcaaatcattagccattggtaccatattatgaattggaaattagatccatgcaattaaatttgataatgtatttatgaataaatgatttaacatattaacatggatggcaggctaagcactcatgcattgttgagccatttgtcatagcaacaaacaggcaactgagtgtggttcaccctatttacaaacttctgtttcctcactaccgtgacaccatgaatattaattcacttgcccggaaagccctggtcaatgcagatggtattatagaga

SEQ ID NO: 8666 - DNA, 1586 bp, Glycine max
  Clone ID: PAT_MRT3847_107834C.1
atttgaaattaacaagtagcaaagatgtttggaatcatcggaggaaacaagggtcacaagataaaggggaacttggtgattatgcgaaagaatgtgttggatatcaacagcattaccagtgttaagggtgtcatcggaaccggcattaacatcattggaggagtcgtcgacaccgttactgctttggcgtcccacatctccatccagctcattccatatttgaggaaaataaatgcaactaccacaaagacttacgctacaagaaccatatttttcttgaaaagtgatggaaccttgacgccattggccattgagttaagtaagccgcatcctcagggtgaaggatatggtcctgttagcgaagtctacgtgccttcgagcgagggagttgaagcttacatttggttactggcaaaggcttatgttgttgtgaatgattcgtgctaccatcaactcgtcagccactggctaaacactcatgcggttgttgagccattcgtcatagcaacaaacaggcatctgagcgtggttcaccctatttacaaacttttgtttcctcactatcgtgacaccatgaacattaattcacttgcccgcaaatccttggtcaatgcagacggtattatagagaaaacattcttgtggggtaggtactctttggaaatgtctgctgttatttacaaggatccatctgctccccatggagttcggcttttgattgaggactatccttatgcttctgatgggctagagatatgggatgccatcaagtcctgggtgcatgaatatgtctcattctactacaagtcagatgcagcaattcaacaagatcccgagctccaagcttggtggaaagaacttgtccaagtgggtcatggtgatttgaaagataagccatggtggcaaaagatgcaaactcgtgaagagttgattgaagcctcggctaccctcgtatggatcgcttcagcccttcatgcagctgttaactttggacagtatccatatggaggtttaatcctaaacaggccaaccattagcaggagattcatgcctgagaaagggtctgctgagtatgcagctttggctaagaaccctgagaaggagtttttgaagactattactggcaagaaggagaccctcattgaccttacaattatagaaatcttgtcaaggcacacatctgatgagttctaccttggggagagagatggtggtgactattggacttctgatgctggtccactagaggccttcaagaggtttggaaagaagcttcaagagattgaacaaaagtttatacagaagaacaaggacgagacgttgagaaaccgcagtgggccggctaaaatgccttacactttgctctatccttctagtgaggagggattgactttcagaggaattcccaacagtatctccatctaggggctctatggttgttgcagtactttccctggttttcaataaaagtgaatagaaggaatatgattccttcatctacctatgtatggttaagttatgtatttggggtgattgaatgttctcgtgtttgctgttaagtgttaatgaagaaattctgtttgtat

SEQ ID NO: 8667 - DNA, 1619 bp, Glycine max
  unsure (1)..(1619): unsure at all n locations
  Clone ID: PAT_MRT3847_107835C.1
acagagatgaaaatactcaaaaagatagactaatttccggggtttcggttatagcataaacttcactttatttcttttttataaaaagaaaaccatagattatcgctatcttatatcttattccgggtctcaggattcaactgtgaggaagaaaaaggtctccaaacacatagaagcacgtgtatgtatgtattgtgcaagtcatagtattcaacgttaacaccactgactcacttataaaaggcgctttaacaccaaacggagtctctctatcaaaaaaagctacctagagcttgcacctattggtatcttctacaatatcctaaagtgtttttcttcttcttcatcaccatgtctttactttcagacctcatcaacctcaatctctcagaatccacagaaaagatcattgctgagtacatatgggttggtggatctggtatggacctcagaagcaaagccaggactcttcctgggccagtgagtgaccctgcaaaacttccgaagtggaactatgatgggtctagcacagatcaagctccaggggatgacagtgaagtcattctatacccacaagctattttcaaggacccctttaggagaggaaacaatattcttgtcatttgtgatgtgtacaccccagctggtgagccacttccaaccaacaagaggtatggtgctgccaaaattttcagtcaccctgatgttgctgctgaggaaccatggtatggtattgagcaagagtataccttattgcagaaagatgtaaattggccacttgggtggccccttggtgggtttcctggaccacagatgcacattacaaagcttgtatttatgctggcattaacattagtggcatcaatggagaggttatgcctggccagtgggaatttcaagttggtccttctgttggtatctctgctggagatgaggtgtgggctgctcgctacattttgcagaccattacggagatagctggagcaattgtttcggttgatcccaagcctattccgggagcccggcctgaaaaaaaagctcgcgctaactacagcatttttaaaaaccccccccaaaaaagtgggtggggggggagaaaaaaaaaaaacccttttttttttattttatgaagagaaacccccccccggnngttctttttttcctctcctgggaaaaaaaaaaatttgaaaaattacaccctttttttttgggggggtggtggccaaacggtggaagctccattagagttgaaagagccncagagaanaatggcaaaggttactttgaggacagaaggcctgcttctaatatggatccatatgtagtcacctccatgatcgcagagactaccatcctctggaaaccatgaaaaacagtcatatagtctctagatttggaccactaaaaattgtgttcaatagtcatttgatctaaaaatttatatttgcaaggtgatgtttagttaggaatttctaagtggtctttttgagcctccatgtgccatgtctatggttgagaataatttcgtcattaataacaagaatttcccataaaaaaaaaaaaaaaaaaaaaaaaagagaaaaaaaaaaagtaaaacaaaaaatgaaagcgtcgggagc

SEQ ID NO: 8668 - DNA, 4096 bp, Glycine max
  Clone ID: PAT_MRT3847_107836C.1
ctcgagccgaatcggctcgaggtttggttgacagtagcaaagatgtctcctttcgggcaaaagggtcaaaagataaaggggactatggtggttatgcagaagaatgtgttggatatcaacagcatcaccagtgttggagggatcgttgaccaaggcttaggcttcataggcagtgcagtcgatgcacttacttttgcagccaccaaaatctccatccagttgattagtgctaccaaggctgatggtgggaaaggaaaaattggaaagagtacaaatttaagaggaaagataacattaccaaccttgggagctggcgaacaagcatacgatgttaattttgaatgggacagtgacttcggaattcccggtgcattttatattaagaacttcatgcaaaatgagttctacctcaagtctctaattctcgaagacattccaaaccacggaaccattcacttcgtatgcaactcctgggtttacaattcaaaaaactacaagactgatcgcattttctttgccaacaatacatatcttccaagcgagacaccagctccacttttgaagtacagagaagaagaattgaagaatgtaagaggggatggaactggagagcgcaaggaatgggataggatctatgattatgatgtctacaatgacttgggcaacccggatagcggtgataaatatgcacgccccgttcttggtggttcagccttaccttaccctcgcagaggaagaaccggaagaggaaaaactagaaaagatcccaacagtgagaagccgagcgattttgtttaccttccaagagatgaagcatttggtcacttgaagtcatcagattttctcgcttatggaatcaaatctgtatcccaagatgtcttgcctgtcttgactgatgcattcgatggaaatattttgagccttgagtttgataattttgctgaagtgcacaaactctatgaaggtggagttacactacctacaaactttcttagcaagatcgcccctataccagtgatcaaggaaatttttcgaactgatggcgaacagttcctcaagtatccaccacctaaagtgatgcaggtggataagtctgcatggatgactgatgaagaatttgcaagagaaacgattgctggtttaaatccaaatgtcattaagattatagaggagttcccactaagtagcaagctagatactcaagcctatggtgatcatacctgtataatagcaaaagaacatttggagcctaacttaggtgggctcactgttgagcaggctatccaaaacaagaagttgttcatcttagatcaccatgactatctcattccttatttgaggaaaataaatgcaaataccacaaagacttatgctacaagaaccatatttttcttgaaagatgatggaactttgacaccattggccattgagttaagtaagccacatcctcagggtgaagaatatggtcctgttagcgaagtctacgtgcctgccagcgaaggagtggaagcttatatttggttactggcaaaggcttatgttgttgtgaatgatgcatgctaccatcaaatcattagccattggctaagcactcatgcaattgttgagccatttgtcatagcaacaaacaggcaactgagtgtggttcaccctatttacaaacttctgtttcctcactaccgtgacaccatgaatattaattcacttgcccggaaagccctggtcaatgcagatggtattatagagaaaacattcttgtggggtaggtactctatggaaatgtccgctgtcatttacaaggactgggttttcactgatcaagcattacctaatgatcttgtaaagagaggagttgctgttaaggacccatctgctccccatggagttcgtcttttgattgaggactatccttatgcttctgatgggctagagatatgggatgccatcaagtcctgggtgcaagaatatgtctcattctactacaagtcagatgaggaactccaaaaagaccctgaactccaagcttggtggaaagaacttgtagaggtgggtcatggtgatttgaaagataagccatggtggcaaaagatgcaaactcgtgaagagttggttgaagcttccgctatcctcatatggattgcttcagcccttcatgctgctgttaactttggacagtatccatatggaggtttaatcctaaacaggccaactattagcaggagattcatgcctgaaaaggggtctcctgaatatgatgcgttggctaagaaccctgagaaggagtttttgaagactattactggcaagaaggagaccctcattgaccttacagttatagaaatcttgtcaaggcacgcatctgatgagttctaccttgggcagagagatggtggtgactactggacttctgatgccggtccattagaggcatttaagaggtttggaaagaagcttgaagagattgaaaagaagcttatagagaagaacaaagatgagacattgagaaaccgctatgggccagctaaaatgccttacactctgctctatccttctagtgaggagggattgactttcagaggaattcccaacagtatctctatctaaggaccctatggttgcttaagtctgatgaatcccctaatgattttggtaaaaatcattaagttaaggtggatacacatcttgtcatatgatcaaatggtttcgcgaaaaatcaataatcagacaacaagatgtgcgaactcgatattttacacgactctctttaccaattctgccccgaattacacttaaaacgactcaacagcttaacgttggcttgccacgcattacttgactgtaaaactctcactcttaccgaacttggccgtaacctgccaaccaaagcgagaacaaaacataacatcaaacgaatcgaccgattgttaggtaatcgtcacctccacaaagagcgactcgctgtataccgttggcatgctagctttatctgttcgggcaatacgatgcccattgtacttgttgactggtctgatattcgtgagcaaaaacgacttatggtattgcgagcttcagtcgcactacacggtcgttctgttactctttatgagaaagcgttcccgctttcagagcaatgttcaaagaaagctcatgaccaatttctagccgaccttgcgagcattctaccgagtaacaccacaccgctcattgtcagtgatgctggctttaaagtgccatggtataaatccgttgagaagctgggttggtactggttaagtcgagtaagaggaaaagtacaatatgcagaccttaggagcggaaaactggaaacctatcagcaacttacatgatatgtcatctagtcactcaaagactttaggctataagaggctgactaaaagcaatccaatctcatgccaaattctattgtataaatctcgctctaaaggccgaaaaaatcagcgctcgacacggactcattgtcaccacccgtcacctaaaatctactcagcgtcggcaaaggagccatgggttctagcaactaacttacctgttgaaattcgaacacccaaacaacttgttaatatctattcgaagcgaatgcagattgaagaaaccttccgagacttgaaaagtcctgcctacggactaggcctacgccatagccgaacgagcagctcagagcgttttgatatcatgctgctaatcgccctgatgcttcaactaacatgttggcttgcgggcgttcatgctcagaaacaaggttgggacaagcacttccaggctaacacagtcagaaatcgaaacgtactctcaacagttcgcttaggcatggaagttttgcggcattctggctacacaataacaagggaagacttactcgtggctgcaaccctactagctcaaaatttattcacacatggttacgctttggggaaattatgaggggatctctcagtgcttaagtactgttcctggttttaaataaatgtgaaattgaaggaaccagattccttaatcagttgtgtatgcttaagtcatgtatttggagtggctgaatgtatttgtatttgtcattaataaagagagttgtgttagt

SEQ ID NO: 8669 - DNA, 1411 bp, Glycine max
  Clone ID: PAT_MRT3847_107837C.1
tctgtagcgtagggttgtctcccacgtgaagaaagctacctagagcttgcacctattggtatcttctacaatatcctctcatagtgctcttcttcttcttcattttcattatcaagatgtctttgctttcggatctcatcaacctcaatctctcagaatccacagaaaagatcgttgctgagtacatatgggttggtggatctggtatggacctcagaagcaaagccaggactcttcctgggccagtgagtgaccctgcaaagcttccaaagtggaactacgatggctctagcacagaccaagctccaggggatgacagtgaagtcattctatacccacaagctattttcaaggacccctttaggagaggcaacaatattcttgtgatttgtgatgtgtacacccccgctggtgagccacttccaaccaacaagaggtatgatgctgccaaaattttcagccaccctgacgttgctgctgaggaaccatggtatggtattgagcaagaatataccttgttgcagaaagatgtaaattggccacttgggtggccacttggtgggtttcctggaccacagggcccatactactgtggaactggtgctgataaagcatatggccgtgatattgtagatgcacattacaaagcttgtatttatgctggcatcaatattagtggcatcaatggagaggttatgcctggtcagtgggaatttcaagttggtccttctgttggtatatctgctggagatgaggtgtgggcagctcggtacattttggagaggattacagagatggccggagtaattgtttcatttgatcccaagcctattccgggagattggaatggagctggagctcactcaaactacagcaccaagtccatgagagatgagggtggttatgaggtgattaagaaggccattgaaaagcttggattgaggcacaaggagcacattgcagcatatggagaaggcaacgagagacgtctcactggaagacatgaaactgcagacatcaacaccttctcttggggtgtggcaaaccgtggaagctccattagagttggaagagacacagagaaaaatggcaaaggttactttgaggacagaaggcctgcttctaatatggatccatactatgtagtcacctccatgatcgcagagactaccatcctctggaaaccatgaaaaacagtcatatagtctctagatttggaccactaaaaattgtgttcaatagtcatttgatctaaaaatttatatttgcaaggtgatgtttagttaggaatttctaagtggtctttttgagcctccatgtgccatgtgtatggttgagaataatttcgtcattaataacaagaattgcttcttgatttcacttttttcccataaaaaaaaaaaaaaataaa

SEQ ID NO: 8670 - DNA, 2996 bp, Glycine max
  Clone ID: PAT_MRT3847_107838C.1
gacctgtccggatttcccgtttcgttccacgcgcccgccctcttcgagaagacgacagaaggggacaacaatctaagagtgagttttgtttatttgaaattaacaagtagcaaagatgtttggaatcatcggaggaaacaagggtcacaagataaaggggaacttggtgattatgcgaaagaatgtgttggatatcaacagcattaccagtgttaagggtgtcatcggaaccggcattaacatcattggaggagtcgtcgacaccgttactgctttggcgtcccacatctccatccagctcattagtgccaccaaggctgatggacatgggaaaggaaaagttggaaaggctacaaatttaagaggacaagtgtcgttaccaaccttgggagctggcgaagatgcatacgatgttcattttgaatgggacagtgacttcggaattcccggtgcattttacattaagaacttcatgcaagttgagttctatctcaagtctctaactctcgaagacattccaaaccacggaaccattcacttcgtatgcaactcctgggtttacaactcaaaatcctaccattctgatcgcattttctttgccaacaatacatatcttccaagcgagacaccggctccacttgtcaagtacagagaagaagaattgaagaatgtaagaggggatggaactggtgagcgcaaggaatgggataggatctatgattatgatgtctacaatgacttgggcgatccagataagggtgaaaagtatgcacgccccgttcttggaggttctgccttaccttaccctcgcagaggaagaaccggaagaggaaaaactagaaaagatcccaacagtgagaagcccagtgattttgtttaccttccgagagatgaagcatttggtcacttgaagtcatcagattttctcgtttatggaatcaaatcagtggctcaagacgtcttgcccgtgttgactgatgcgtttgatggcaatcttttgagccttgagtttgataactttgctgaagtgcgcaaactctatgaaggtggagttacactacctacaaactttcttagcaagatcgcccctataccagtggtcaaggaaatttttcgaactgatggcgaacagttcctcaagtatccaccacctaaagtgatgcaggtggataagtctgcatggatgactgatgaagaatttgctagagaaacgattgctggtgttaatccaaatgtcattaagattcttgaggagttcccaccacgtagcaagctagattctcaagcctacggtgatcatacctctataataacaaaacaacacttggagcctaacttgggtgggctcaccgttgagcaggctatccagagcaagaagttgttcatcttagatcaccatgactatctcattccatatttgaggaaaataaatgcaactaccacaaagacttacgctacaagaaccatatttttcttgaaaagtgatggaaccttgacgccattggccattgagttaagtaagccgcatcctcagggtgaaggatatggtcctgttagcgaagtctacgtgccttcgagcgagggagttgaagcttacatttggttactggcaaaggcttatgttgttgtgaatgattcgtgctaccatcaactcgtcagccactggctaaacactcatgcggttgttgagccattcgtcatagcaacaaacaggcatctgagcgtggttcaccctatttacaaacttttgtttcctcactatcgtgacaccatgaacattaattcacttgcccgcaaatccttggtcaatgcagacggtattatagagaaaacattcttgtggggtaggtactctttggaaatgtctgctgttatttacaaggactgggttttcactgatcaagcattgcctaatgatcttgtcaagagaggagttgcggttaaggatccatctgctccccatggagttcggcttttgattgaggactatccttatgcttctgatgggctagagatatgggatgccatcaagtcctgggtgcatgaatatgtctcattctactacaagtcagatgcagcaattcaacaagatcccgagctccaagcttggtggaaagaacttgtccaagtgggtcatggtgatttgaaagataagccatggtggcaaaagatgcaaactcgtgaagagttgattgaagcctcggctaccctcgtatggatcgcttcagcccttcatgcagctgttaactttggacagtatccatatggaggtttaatcctaaacaggccaaccattagcaggagattcatgcctgagaaagggtctgctgagtatgcagctttggctaagaaccctgagaaggagtttttgaagactattactggcaagaaggagaccctcattgaccttacaattatagaaatcttgtcaaggcacacatctgatgagttctaccttggggagagagatggtggtgactattggacttctgatgctggtccactagaggccttcaagaggtttggaaagaagcttcaagagattgaacaaaagcttatacagaagaacaaggacgagacgttgagaaaccgcagtgggccggctaaaatgccttacactttgctctatccttctagtgaggagggattgactttcagaggaattcccaacagtatctccatctaggggctctatggttgttgcagtactttccctggttttcaataaaagtgaatagaaggaatatgattccttcatctacctatgtatggttaagttatgtatttggggtgattgaatgttctcgtgtttgctgttaagtgttaatgaagaaattctgtttgtataaattgctgttaagtgttctcgcgcatgtttcaacaatgatagctggcatggcaaagtgcaaactagaataaatcatcatcttatgtaaacgatttccattacagcaagggttgtccttaaaatttcattgcccgtgtattcatatttt

SEQ ID NO: 8671 - DNA, 4087 bp, Glycine max
  unsure (1)..(4087): unsure at all n locations
  Clone ID: PAT_MRT3847_107839C.1
ggtacacccgaggtaccggtccggaatccgggtcgaccacgcgtccgaaaaaacacaatctaagtaagtgttgaagagaagacgtgcgtttgtttgtttgaaattaagaagtagtaaagatgtttggaatcatcggaggaaacaagggtcacaagataaaggggaacttggtgattatgcgaaagaatgtgttggatatcaacagcatcaccagtgttaagggtgtcattggaaccggcattaacatcattggaggtgtcgtcgacaccgttactgctttggcgtcccacatctccatccagctcatcagtgccaccaaggctgatggacatgggaaaggtaaagttggaaaggctacaaatttaagaggacaagtgtcgttgccaaccttgggagctggcgaagatgcatacgatgttaattttgaatgggacagtgacttcggaattcccggtgcattttacataaagaacttcatgcaagttgagttctatctcaagtctctaactctcgaagacattccaaaccacggaaccattcacttcgtatgcaactcctgggtttacaattcaaaaaactacaagactgatcgcattttctttgccaacaatacatatcttccaagcgagacaccagctccacttttgaagtacagagaagaagaattgaagaatgtaagaggggatggaactggagagcgcaaggaatgggataggatctatgattatgatgtctacaatgacttgggcaacccggatagcggtgataaatatgcacgccccgttcttggtggttcagccttaccttaccctcgcagaggaagaaccggaagaggaaaaactagaaaagatcccaacagtgagaagccgagcgattttgtttaccttccaagagatgaagcatttggtcacttgaagtcatcagattttctcgcttttggaatcaaatctgtatcccaagatgtcttgcctgtcttgactgatgcattcgatggaaatattttgagccttgagtttgataattttgctgaagtgcgcaaactctatgaaggtggagttacactacctacaaactttcttagcaagatcgcccctataccagtgatcaaggaaatttttcgaactgatggcgaacagttcctcaagtatccaccacctaaagtgatgcaggtggataagtctgcatggatgactgatgaagaatttgctagagaaacgattgctggtgtaaatccaaacgtcattaagattcttgaggagttcccaccacgtagcaagctagatacacaagcctacggtgatcatacctgtataataacaaaacaacatttggaacctaacttgggtgggctcactgttgagcaggctatccagagcaagaagctgttcatcttagatcaccatgactatctcattccatatttgaggaaaataaatgcaactaccacaaagacttatgctaccagaaccatatttttcttgaaaagtgatggaactttgacgccattggccattgagttaagtaagccgcatcctcaaggtgaagaatatggtcctgttagcgaagtctacgtgccttcgagcgaaggagttgaagcttatatttggttattggcaaaggcttatgttgttgtaaatgactcgtgctaccatcaactcgttagccattggctaaacactcatgcggttgttgagccattcgtcatagcaacaaataggcatctgagtgtggttcaccctatttacaaacttttgtttcctcactatcgtgacaccatgaatattaattcacttgcccgcaaatccttggtcaatgcagacggtattatagagaaaacatttttgtggggtaggtacgctttggaaatgtctgctgttgtttacaaggactgggttttcactgatcaagcactgcccaatgatcttgtcaagagaggagttgccgttaaggatccatctgctccccatggagttcggcttttgattgaggactatccttatgcttctgatgggctagagatatgggatgccatcaagtcctgggtgcaagaatatgtgtcattctactacaagtcagatgcagcaattcaacaagaccccgaactccaagcttggtggaaagaacttgtccaagtgggtcatggtgatttgaaagataagccatggtggcaaaagatgcaaacttgtgaagagttgattgaagcctcggccaccctcatatggatcgcttcagcccttcatgcagctgttaactttggacagtatccatatggaggtttaatcttgaacaggccaaccattagcaggagattcatgcctgagaaagggtctgctgagtatgctgctttggctaagaaccctgagaaggagtttttgaaaactattactggcaagaaggagaccctcattgaccttacaattatagaaatcctgtcaaggcacgcatctgatgagttctaccttggggagagagatggtggtgacttctggacttctgatgctggtccactagaggccttcaagaggtttggaaagaagcttcaagagattgaacataagcttatacagaagaacaaggatgagacgttgagaaaccgcactgggccagctaaaatgccttacactctgctctatccttctagtgaggagggattgactttcagaggaattcccaacagtatctctatctaagggctctctcattgaggttgctgtactactctgcctgtttttcaataatgtgaaataggaggaatatgattccttcatctacctacgtatggtcaagttacatttggggtggttgaatgttctcgtgtttgctgttgaagtgttaataaagaaattctgtttttataacagatcgaagagaaagcaataaaggcaatcacgcatgtttcaacaatgatagctggcatgacaaagtgcaaactagaataaattatcatcctatctaaacgatttccattacagcaagggttgtcattaaaattttattgcccgtgtattcatattttgcattgcctcaaagctaccacttcctcaacttagtatttatttcaaaaatccatttgcaatccatttcaaaaatcacattctgcagtcctatttccgtgatccagtgcatggattgcagcaaaccaagcgtctcaccttcgttgacttgctgcactgaatttatcatcacaaggtaggaggaaaaggtgataaaattaacaacatggatttaagaattaatactatattttcgtacctcttttgcatttttaattttttttcttcttaaaaataccatctcttttcattaactcttttttgaaacatattttgatatttgtaaatatttttaaatttagtttctgaattaatattaaaaatatcctggaaattatcaacgtttatttcttcttttcttttctctttttcattattacaacaattactagttactagtgtgtgcagaaaaaggtagattgatgtattatgtgttaaaacttttaggaatacattgaaatgtttttatgtattctgaaaattggttttttaaatatataatttctgtaaaagtgtatttcaaaaactagttctcaataaacctgcaaaactagaaaggaaaaaaaatgataaatggcgccactcaccaccgaagacaatggggagagtgaaggagagggtgttaaacagggatgcaaatagagacagaaagggagtgcgatgactgagaacttttcgtgggggatggatggaatgaagaaggttttagaataatgttttacaaaaaaaagaaaaagatcaaaggttggtgcaataagtaaaaaaacgcaaaggaacaccctactttttactagtctctggtttgggccaattgctttatagagttagcctaatcgggccgagagaagaatattcatataaattttggcattgccattggtccctgcatcactttgttggattatacaaaaatactctntcccattgaagtatgattccgttgtacaaggaaatcatacttctattgtaataaatagggtgccaaaaaaaataatacaaaaaatgggattctatatatattatattgaagtttg

SEQ ID NO: 8672 - DNA, 123 bp, Glycine max
  Clone ID: PAT_MRT3847_10783C.1
gccaaacgagaagtatccatcgatgactacaaaccgtgcagctatccgtctttggtgtgcatgacttgactacccggatgtgggagccaaggttagtctcattaccaagcgctcatacacgga

SEQ ID NO: 8673 - DNA, 3233 bp, Glycine max
  unsure (1)..(3233): unsure at all n locations
  Clone ID: PAT_MRT3847_107840C.1
aattctgctcgaggtgctgtttatttgaaattaacaagtagcaaagatgtttggaatcatcggaggaaaacaagggtcacaagataaaggggaacttggtgattatgcgaaagaatgtgttggatatcaacagcattaccagtgttaagggtgtcatcggaaccggcattaacatcattggaggagtcgtcgacaccgttactgctttggcgtcccacatctccatccagctcattagtgccaccaaggctgatggacatgggaaaggaaaagttggaaaggctacaaatttaagaggacaangtgtcgttaccaaccttgggagctggcgaagatgcatacgatgttcattttgaatgggacagtgacttcggaattcccggtgcattttacattaagaacttcatgcaangttgagttctatctcaagtctctaactctcgaagacattccaaaccacggaaccattcactttcgtatgcaacntcctgngtttacaactcaaaatcctacncattctgatcgcattttctttgccaacaatgtaagctacttaaatactgttatacattgtctaacatcttgttagagtcttgcatgatgtgtaccgtttattggttggtgnttgaactttaccacatggcatggatgcanaaaagtgttatacacataaattataatgcagacatatcttccaagcgagacaccggctccacttgtcaagtacagagaagaagaattgaagaatgtaagaggggatggaactggtgagcgcaaggaatgggataggatctatgattatgatgtctacaatgacttgggcgatccagataagggtgaaaagtatgcacgccccgttcttggaggttctgccttaccttaccctcgcagaggaagaaccggaagaggaaaaactagaaaagatcccaacagtgagaagcccagtgattttgtttaccttccgagagatgaagcatttggtcacttgaagtcatcagattttctagcttatggaatcaaatctgtggcccaagatgtcttgcctgtgttgactgatgcattcgatggaaatcttttgagccttgagttcgataattttgctgaagtgcgcaaactctatgaaggtggagttacattgcctacaaactttcttagcaagatcactcctataccaataattaaggaactttttcgaactgatggcgaacagttcctcaagtatccaccacctaaagtgatgcaggtcgacaagtctgcatggatgactgatgaagaatttgcaagagaaacaattgctggtttgaatccaaatgtcatcaagattattgaggagttcccactaagtagcaagctagatactcaagcctatggtgatcatacctgtataataacaaaagagcatttggagcctaacttaggtggtctcactgttgagcaggctatccaaaacaagaagttgttcatcttagatcaccatgactatctcattccatatttgaggaaaataaatgcaaataccacaaagacttatgctacaagaaccatatttttcttgaaaaatgatggaactttgacgccattggccattgagttaagtaagccacatcctcagggtgaagcatatggtcctgttagtgaagtctacgtgccttcgagtgaaggagttgaagcttacatttggttactggcaaaggcttacgttgttgtgaatgatgcttgctaccatcaaatcattagccattggctaaacactcatgcggttgtggagccattcgtcatagcgacaaacaggcatctgagcgtggttcaccctatttacaaacttctgtttcctcactatcgtgacaccatgaacattaattcacttgcccgcaaatccttggtcaatgccgacggtattatagagaaaacattcttgtggggtaggtactctttggaaatgtctgctgttatttacaaggattgggttttcaccgatcaagcattgcctaatgatcttgtcaagagaggagttgctgttaaggatccatctgctccccatggagttcgacttttgatcgaggactatccttatgcttctgatgggctagagatatgggatgctatcaagtcttgggtggaagaatatgtctcattctactacaagtcagatgaggaacttcaaaaagaccccgagctccaagcttggtggaaagaacttgtagaggtgggtcatggggatttgaaggataagccatggtggcaaaagatgcaaactcgtgaagagttggttgaagcttccgctaccctcatatggattgcttcagctcttcatgctgctgttaactttggacagtatccatatggaggtttaatcctgaataggccaactattagcaggagattcatgcctgagaaagggtctcctgaatatgatgcgttagctaagaaccctgagaaggagtttttgaagactattactggcaagaaagagaccctcattgaccttacaattatagaaattttatcaaggcacgcatctgatgagttctaccttgggcagagagatggcggtgactactggacttctgatgccgggccattagaggcctttaagaggtttggaaagaatcttgaagagattgaaaagaagcttatagagaagaacaataatgagacattgagaaaccgctatgggccggctaaaatgccttacactttgctctatccttctagtgaggagggattgactttcagaggaattcccaacagtatctctatctaagggctctatggttgctgaagtactgtccctggctttaaataaatgtgaaatagaaggaatctgattccttcatcagttgtgtatgtttaagttatgtatttggagtggctgaatgtacttgtatttgtcattaataaaccatgtttgtgtaatggaaaccaaaataataaatgcaatcatgcaggtttgaactttttaacaatgctgctgtgaagtgcaaactagaagaaaacatcatcttatttgagtcacgatttcaattgcagcaagcgttagttgttgaaattgatttgtccatgtattcaagatatcatttttcctgccaagtcagggcagtgtaggacatttatataaccacaacatatgtcactttttctagtcgttggtagtttagctttgagccttgtagggctttacttattggaaaccttagtcaaaattaaagaaagaccgcaagggcggccccttt

SEQ ID NO: 8674 - DNA, 258 bp, Glycine max
  Clone ID: PAT_MRT3847_107841C.1
gggagaaaagctgctaaacaaatctaaatttttttcccgcacactccaaattgggctgtatttataacaaagggggccccaaatcaattaaatttaatataatctattaaacattcaaaccctgttaaaacggtcaccacaacagtttacacaataccaaacagccatcttgtccatatagattcctaaacatcatcacctaatagacattcacaatgagactaaatatgtccaaaaatagacgtcatgcagcttatt

SEQ ID NO: 8675 - DNA, 649 bp, Glycine max
  Clone ID: PAT_MRT3847_107842C.1
gcactatatttgaaaactcaaagatgtcataaggtcactcaaggtatcatcaataggcatagttatattaatgtgtgatgtgttagaggatatgcgcattggtgaagattgaaattagaagcaagaatgaggagggcatgcaggaaaatatggcgatcggtgccttgcacgagcaggaaaagcttgcgaaatgactctaggaaggacatggaggagattctgagggctaagctttcaactattaaggaagagccagaattgtgtgatgagaacttagcatcaccaagacatgtgtgtatggccaagaaacaagggaagaaggttcaaggaaaagataaaacaggacggtgtttagtaccacatgttaatctgaagcaatcttatgtcctatttattacaggatttgcatccaaaggtgcctttgctgggtttcttcaacgctaacttgtacctccttagtccttactctattccaataagaacatgaagaagtctcttcttggcaaagaccagattgcacggttggctaatttcaattaatgatgtaatgttgtgtactacttagctatttttaactattttatgtgtgcaatatgtacagttttatttccttccggtaatgtaaaatcactgaatgttggcttgtagt

SEQ ID NO: 8676 - DNA, 433 bp, Glycine max
  unsure (1)..(433): unsure at all n locations
  Clone ID: PAT_MRT3847_107843C.1
tgattcgagaaggagattattattgagagagagagagagataaatcgggggtgtgaaacagacagaaaacgtctgtctgaagccttatttgagaggtgagactgagatctatcatctttcttacttanattgtccancttatagagataataggagaagaaacccgtggtggatgaggcccttctacagatctaatcctttcgaacccgatgcagctgtgtcaattcatggatcgcaatgcattacttcaccctcatttctgctaccttggcgaccttggccttcttcagttcaaagatctcaatgcacataagagtccttttcagcggacctattcagcttatattataagaacttggaagatggctctcatattgcgttttttaaggagcaaatgttcaaagctgttttttaccaaaatattccacaacac

SEQ ID NO: 8677 - DNA, 232 bp, Glycine max
  unsure (1)..(232): unsure at all n locations
  Clone ID: PAT_MRT3847_107844C.1
ctcttggggaatctcncaagattttgaaattnctggncnatactctnatagccagctntttctgtnccacaggcnactgccagatcttctgaaaatgcggaatccttngncatgatctgggaatntatgngtnctgtncgctnatnccnnttgnttacttcaataaaggaaattaggntgacccttcttgttgagtatgctctgcctatttgncaatttcnncacctctttt

SEQ ID NO: 8678 - DNA, 304 bp, Glycine max
  Clone ID: PAT_MRT3847_107845C.1
cactaagtagaaagggtgtagatagcactattagcagatgaatgagagaaaagaaagaatttatggaaagaaaagctgacaaattagagcagaaccaaggattacaaaagggtgcactaaactaaatttatacatgtcttttccaattaactctaagtggatgctttattaggtgaaagtatcccttgctatgactcttccccaagtgtactaaactaaattatgtataaaaggttctctcaaatttatacgtgtcatacttgtttgtgtttcaaaaagagaagataaagcttaatttgttatt

SEQ ID NO: 8679 - DNA, 1416 bp, Glycine max
  Clone ID: PAT_MRT3847_107846C.1
ttctgcgctccctctccctttcctcgcaaatggattcagcaagaacagctcctcccccgtggcaggagctggacttggacagcctcaaacccctcaaagtcctaggaaaaggcggcatgggtactgtcttcctcgtacaggccgccaacaatacccgcttcgccctcaaagtggtggacaaaacgtgcgttcacgcgaagctggacgcggagcggcgcgcgcgttgggaaatccaagtcctctcaactctatcccaccctttcctcccttccctcatgggaacgttcgagtccccacagttccttgcgtgggccctaccctactgccccggcggcgacctcaacgtcctccgctaccgccaaaccgaccgcgccttctcccctgccgtcatccgcttctacgtcgccgaaatcctctgcgctctcgaccacctccattccatgggcatagcctaccgcgacctaaaacccgaaaatgtcctcgtccaaaacaccggccacgtcaccctcaccgatttcgacctctcccgaaagctcaatcccaaacctaaacctaatcctaaccctgtcatcgttccttcaatccccttgccaaattccaacgttccccaacctcgccgcaagcaccgccggaatttatcccggtggatctccttcttcccgccggacgggactaacaacaacaacaaaaacggtctcaagaaggccaagtccgcgcaagtcagcccggtgagtcggagaaaaccgagtttctccagcggcgaacgatccaactcgttcgtcggcactgaagaatacgtctcgccagaggtcgtccgaggcgacggacatgagttcgccgtcgattggtgggcgcttggaatactaatctacgaaatgctctacggtaagacgccgttcaagggaaggaatcgtaaggaaacgtttcggaacgttatcatgaagccgccggagttcgtcggaaaacgaacggcgttaaccaaccttattgaaaggttgttggagaaggatccgacgaagcgtttgggttacacgcgcggtgccgcggagatcaaggagcacgagtttttccgaggggttcagtgggagcttttgacggaggtggtgcgcccgccgttcattccgacgcgggacgacggcgccggagattcgacggataggatttccgaccggaattgtggcttcgatattaggggttactttctgaatcttaaatcgtcgccgtcgttgccgggttcgccgttgccatcgccgtcgtgcaggtttaagaagaatgtttcgctaacagaattctaacgcatgtgcagtattgcacgtgcgagagttagttgttgttttttttagtaatattgtaattttgtgcatatagaataacggtagatagtgaaaaacgggattagcaatgttagttggtaca

SEQ ID NO: 8680 - DNA, 536 bp, Glycine max
  unsure (1)..(536): unsure at all n locations
  Clone ID: PAT_MRT3847_107847C.1
gctatctcgatcgaactgtccaaggtcctgtcacactggcgcgtacgaggttggttaagtttgcgcacggtgtgctaaaccccgggtacgctagaagaatgtttgcgaagcgcgtatgacgaaacgattaaacgagcaggaggcggataggagcggatagccggcgatggcgagagatagagtgggcgtttatgtgggcgaaaagataaggccccatatgatgacctaggcccaacaaaccggtgggatagggagacgggcgctaaagacagaggctaatgattgggcgagaaggtgagggtgcaccaagtaaggataagggataacccagcgcttagggatcgtagaaccaggaaccacccagaaacccattaaggctgggccaagagttatgtaggataacgtagcgagcataatatagacgaagagcagcgcacngggggaggtacgccctaatgcctacagtcccggggtttgcgtatggggcgagaaggaggtctcaacaagggagcacgttaaaaggagccgggaagagg

SEQ ID NO: 8681 - DNA, 424 bp, Glycine max
  Clone ID: PAT_MRT3847_107848C.1
acaatgacgaacgatacatattgcacaaagacagcatcagtacaaatctactatatcgatggaccgagcctgacctatctgactcaggttgacaggatgccttaacattccctagctatccacgaactgaatgaacgcacctggaaatttcaatcaagacctggagtagcgaccagctacggcatgaccctaacttactgggccgaagcacttgatcggaagggacaatgaacggtatggtctttttcaatgaaccaggaattgaggattacggtacccttaccaattaggggctggcaatgtgcgctacaagggctctgatctgagctagacactgaatgtgcttgggactccaactatgaacaaagaggcggattcatgcatctaacagctgaccctagtattgctttaacgcctgaatcat

SEQ ID NO: 8682 - DNA, 251 bp, Glycine max
  Clone ID: PAT_MRT3847_107849C.1
agttgtaagaacacgtccgagggggcatgagatgaatgctacaagctacatcaggtagggaatggtccttgtaacttatggatcataaaaaggcttcaattgcaacctcatgatccttcgacgtctgaagttaagatatacctgtgaagctctatgtatcattcacgtgaatatcaagctaatcgtatagtgtggacgttaatgattctacaactagttgtcaggatatgaatcttatgacactcaattgc

SEQ ID NO: 8683 - DNA, 386 bp, Glycine max
  Clone ID: PAT_MRT3847_10784C.1
gcttctaagaggatgaagctgcaccaaaaatcacgtactcgctgcatctccgttctgcactgaatcactgatcagagatcgcttacgaactcgaaaaggttaatgaacgagcacgtcattgcgcttctactactcttccactttaccttccttcgcagataaaccgtgttgcatattcgcgctgcttcctctctagggtttcttcaacctcatggcttcccctactcatttcgacgatgacttcgatttcggtgacggatttggcggaaggcattcaggtaataagaggtcatctcctgattacgacgatgaggattatgacaacgatccttttgcaccgaagaagtctaaaacaaaggctgaagaagcttctggtgtaacaacag

SEQ ID NO: 8684 - DNA, 1666 bp, Glycine max
  Clone ID: PAT_MRT3847_107850C.1
ctcgagccgctcgagccgctcgagccgctcagttacaagaaatagatcatacgagaggaaagaacgcagtgatggttctatcttctgaagatgaagaagaagaagaagaagaagacagcgattgcgaagaaagcgattgcgatgaagcgtccgaatccgatgacggtgacgttgatgattcctccctctccaacaaagtcgtcgccctccttcgagaaggaaaagatatcgaatctttgaaattaaacgaatgcaaagcgtatctacggaatcacggcttgaggatcgcaggaaatagagatgtttgtgttgccaggataaaggagcattggaggttaaaacatggaagtggctacacgctatacccgagatcgtcctttaccattaattgtactggtgatgtctgcatgggagatgttgttctgttcagacagaaagtttatgaaaagtttgataaagtgactcggcatggaaaaactctaggaaacagaactgttgctgggagggttgtgaaggagagctatggtgcagctaaacaacagcatacctttactgttgaggtgttgtggagtagtggggttaggaaattgcctccactatctcctttgcttgtaaagggccggaatctctataaacagaaaacttacagacagagatggaaaaatgaagctgatagaatcgaggtgcttcgtgagaagcacggacgtggtgcagcagcgagatctataagatcattgaagcgaaaaaataaaagctgttatgcaaatgaatctaaaggttcaaaacggcagcatgaaatccatactaaaaaacaatcaaaaataggaagatccaatgtagtagacaaggttaggcaccaagatggctccaaaagagcaaacaactttcaacctcgagaggtcacttcatcaagtcaagcaacacagaaggagaaagcatcttcaagagcctccagatacacaaggggaaggcacaattcggctgaatttgaccgctaccaagttccagtttatccattacacaattatccacagtacacaccaagcaggaatgagccaagtgagttcttttatcacatcagagacctaattccaaatatgacagaattcccaccttccaggcctcgtgttggtgaattcgcatctagatcccaacttccagtatccaacgatatttgtcatgctcgtacaaacctatacgactttgaaatgaggaattatggatggaggaaatacgatatatgatgtgaattgtgatctatttttcattaagaagactcaagagtactgagttttgtttcgccttttcacaatggcatggtctgggcttctcatttgcgcttttccagtctgttctagtgagaacgttcacattcccaatggatggaatgttagcattctttttttcaaatgtggtctcgggtagaatgtataaatacaacatcgattgatgatgttttttggttgagattgtttttcagttgatgtcagctagagtttttttcagccaatgttggttggacttattttttggtcaatgtcatctagagttttttcggctgatgttgactgatgattttttcgacagatgtcgattgtgactatttttcagtcaataccagttagggttttttgcactcaacatcaatcgatactattttttggct

SEQ ID NO: 8685 - DNA, 210 bp, Glycine max
  Clone ID: PAT_MRT3847_107851C.1
tttctccatttcaaacactctctgtaaataggtgttgggtttttaatttttgtcttgtgttgcatttttctacttattatttctgcaaattggagacattttttgtggaagatcattatgcgagcggtttgttcgactggcatggcggacacaaatggtgaacttggtgggaagagttaggggctttccgggaagcttaagaacgaaaat

SEQ ID NO: 8686 - DNA, 783 bp, Glycine max
  unsure (1)..(783): unsure at all n locations
  Clone ID: PAT_MRT3847_107852C.1
gttacaagaaatagatcatacgagaggaaagaacgcagtgatggttctatcttctgaagatgaagaagaagaagaagaagaagacagcgattgcgaagaaagcgattgcgatgaagcgtccgaatccgatgacggtgacgttgatgattcctccctctccaacaaagtcgtcgccctccttcgaggttttaattttactaacgaagttgataacgctgtgtgttaatgatcagagccgttgaatttctatgtttttagtttgtatttgccagaaggaaaagatatcgaatctttgaaattaaacgaatgcaaagcgtatctacggaatcacggcttgaggatcgcaggaaatagagatgtttgtgttgccaggataaaggagcattggaggttaaaacatggaagtggctacacgctatacccgagatcgtcctttaccattaattgtactggtgatgtctgcatgggagatgttgttctgttcagacagaaagtttatgaaaagtttgataaagtgactcggcatggaaaaactctaggaaacagaactgttgctgggagggttgtgaaggagagctatggtgcagctaaacaacagcatacctttactgttgaggtgttgtggagtagtggggttaggaaattgcctccactatctcctttgcttgtaaagggccggaatctctataaacaganaacttacagacaggtattaatcagtgcgtacaagcctttatctctgggttcttttctatcctctgnatgntacagttttctttctta

SEQ ID NO: 8687 - DNA, 451 bp, Glycine max
  Clone ID: PAT_MRT3847_107853C.1
aaagaacgtcacaaccaacatttgtcatgttcttatcctctccctccctctttgcagctgtgtactccacatattcagtaccccatttccatgcactgccactttcactttcttcttcttactttctaattaatgttactacccttcacccatcatgtcctcgtctctgatcataatcacaaattgagatcaaatttcttcattatcatctttcttcttgtatcacatatttttagatgccattatcatcaatgtttaactttctttattccattgcaccactttatctaattgcttattcttctttttaattccagatttattgtttttcttttttctctctgattttttttcctttacttttttctttatttactttcttatatttatctttatttttttttattttatgtttctttttttctattaattttttatattattccatttt

SEQ ID NO: 8688 - DNA, 509 bp, Glycine max
  Clone ID: PAT_MRT3847_107854C.1
cttggctatgcatttcggctgttttgggtgaaaaaatgtgttttcgtcaagaaaatccaagctgaggtgcttccgtaacactttcgtaagcgattatgtggaaatccttcattgttcttcaccgttcttcgtttgttcttcgtcgttcttaaatcttcaattggaattacagaagcattgggcttgaatccagaattgggcttggacttgaagagggcagactaatttattctataaaattagatcttatcttatcttatcttatctagatattatttagatttgatctcatctagatattatttcatctagatcttatcttatcttatctagatttgatttgattttacttatgggcttggatttaaaacagatttgtaagctttggggctgaaaaactatataacagcaccaaggttctagtttagctctctcctctctctcttctatttttcattttgagttttagtctctctctttttctctttgaatttcgtttttacaattcc

SEQ ID NO: 8689 - DNA, 197 bp, Glycine max
  Clone ID: PAT_MRT3847_107855C.1
aagtcagtgccgctctcacgttcagttagcagtgaggatagatgttgttctgctacttaaatacatccatgttgatgtggtttgtagcctcaagaggaagcctgtcttgattagagtggctgatagaaatccagagtacagctctggggatcgatgttgtaaaagtaagggtttagagctaggcattgaagaagtcc

SEQ ID NO: 8690 - DNA, 581 bp, Glycine max
  Clone ID: PAT_MRT3847_107856C.1
aaaaaaaaaaaaaaaaaaaaaaaaaaaaaaaaaaaaaaaaaaaaaaaaaaaaaaaaaaaaaaaaaaaaaaaaaaaaaaaaaaaaaagataaaaaataaaaaaaaaaaaaaaaaataaaatgaaaaaaaaagggggggcctttttaatgttacaagctttaggttcccttctttgaaacccttttttttttatttgggttatctaaaattaaattttttgaccgtgttttaacaccgagctaattggaaaaacttttgctttcccaattttaaaaaattggcggaaattccccttttttaaaattggtgaaatatgaaaaatgcccgcagggtgcccttttcaaaagatttatcaaccctgattggtaattggaatcccccctttactttctctttaatcgcggcggttttgggggttactctctaggtttccgtttcttttttcagccccctatattcccgttttttgggttttttttcttaaatttttccttattttggtgggttttcccgttgacccttaaaatgggggcctccttttaggtttccaatttaggggtttacgttccgtatcccccaaaa

SEQ ID NO: 8691 - DNA, 455 bp, Glycine max
  Clone ID: PAT_MRT3847_107857C.1
tcgccgtagtgataaatgaatgcctctttctatagggggaggagctggtgcaaagaatgctattatcatgaatatgccaaatgctgatctttcactgtggagatattttgttggagatctcgactttgaagtttctaagatgacttcttcctacattaaatgtacagtctttatcttcatagcattgggaaatctggctgatgacaccattaattttgaggcttttactcacaagttggtgcagtttgtagagattcacgaaacagttgtattgaaattttcacaagaagaatttcttacaggttggttaactcaagtgcgttctgcagcaactctgttggatgatgggtgttcatatttgtatgctatggtacatgatagctgagtgcctacaataccaggtgattttgtcatcgctgctaagatgacaaccataaacactatgtgtgcatatg

SEQ ID NO: 8692 - DNA, 624 bp, Glycine max
  unsure (1)..(624): unsure at all n locations
  Clone ID: PAT_MRT3847_107858C.1
agatttgatccaaattttgacgaaaaagaatctctgcttcaagataagcttcaaaatgcagttgattttcagaccgagtgtcctcagacatctaaaactggtcagtctccaattacacccaattccaatgaagaacaatttagcagtgtcaatgagttagcaaatatatgtcagaagcaaaagcgtcaactagagaagggttctaattttactagtcctaaaaaatcaaggaatgatgaacaaggcatggctgttgctctctgtgagatggcagctgtagtttcaactgtgtctgcaaaaaagatcgatacctcaatatcaatagagaatgtcatagaagcagtgcaagcattgcctgatatggatgatgagctggttttggatgcttgcgatttcttggaggatgaaagaaaagctaaaacatttcttgcattggatgccaagcttaggaagaaatggttgattaggaaacttcgcatacagatgtagcctatgcccactttcatttttctttaatttcttattggttattggttntgatccatattattttagaaagattagctgattagatttatatgggtgggggattctaagcagatttgtgcaactaatcattctgag

SEQ ID NO: 8693 - DNA, 255 bp, Glycine max
  unsure (1)..(255): unsure at all n locations
  Clone ID: PAT_MRT3847_107859C.1
cnggaaagcaagctctcattatattcttnggtggagtgtntcagtgaatgggggaattgcccctccantaaatttttcactccttccaaagccaccaccaaaggagaaagatgcatcatcttttccttgggtcaaggttgcagttgccatgttgtctgctttgacatttaccttgttgtgcctgtngtttattntgacacgctacaagagatacatgatatttganacccttgaggactgggagcttgattgtcc

SEQ ID NO: 8694 - DNA, 436 bp, Glycine max
  Clone ID: PAT_MRT3847_10785C.1
ctctggtgccacccatgtctcaccttcttcctctttagacaccgacttcccaaacatgaatcgttctgccaatgatcgtctctgtacatgtattttttaaggttcgaagcaggtagttccatggaagtgttaaaaactgaatgaagataaatgggagtggactgatgttctaagtttattttcatggacagtatcgtctgtacataaatttataatccactgattctgggccatattcttttacttaataagatgacattgatttccttatttatagaaggcgtgtcagacagaaagcctaggttttttgttttactgtctagtgcaaaactttgagttaactagttcattcttgctttgctaccttggatggctgaaggtagtacagcttatttatttcatgctcgctagaatattggctcttaattgatgtgaa

SEQ ID NO: 8695 - DNA, 243 bp, Glycine max
  Clone ID: PAT_MRT3847_107860C.1
cttgtgcacaactgactctgctttataaatacactgagtgagtgtaataattatccccacaggatgatctctggtgggcgatggacagaactctcctcattatgtgataggggagtatgcgcaagatgattgactcctagatcatgatgatgattataacatactactactcctggaggagaattaattctagcatataaaatatcatggcggcatgtcaaccaattatctttgatgggatgg

SEQ ID NO: 8696 - DNA, 388 bp, Glycine max
  Clone ID: PAT_MRT3847_107861C.1
cccaacgcgttcgcgatcgtcttgggcatctgtctgagtcgatatctgaatagactagctcatatgactgcccctactatcgccaatgctaccttgaagggtacggatatgattattgaaatcacacttggattaactcttggctgagctggctgagatgcgccgcaagattcaccactggaatgaccagaccatatccaataccttgtacaatgtactgaaaactggtgagactactgatcatgcaaaagaacattgaaaaggtgcctgtgctgtcgactatgctctccatttataggctgttatatcccgtggtatattcaattggctctgaacctgcatacgatccgacttactatgagattgtactgaatctgtttcttggcct

SEQ ID NO: 8697 - DNA, 300 bp, Glycine max
  Clone ID: PAT_MRT3847_107862C.1
aagctgagacgcctgcaggaccgggccggaacccccggggcgttccacgcgcgcgccatacgcgccactttcacgcgaacgcaaacggggagcaaagaacacaggggccacgatgcctgctcttgaggtcagggactcggcaagctgcacctggcgtttgtgaaggagctctcaccacagacacaaaggctggatacgggcatactgtcagtgcgtgagaatttcaaggcatgcagagatcggcacagctcttaagacgctttttgattacggcgaggagaagacagaggactgatggaa

SEQ ID NO: 8698 - DNA, 139 bp, Glycine max
  unsure (1)..(139): unsure at all n locations
  Clone ID: PAT_MRT3847_107863C.1
aattcggctcgagctctttgggagtaatgctccaaacaatataaacgatgttggtnttcatatggttttgctaaaatggaatgttttttatatagaatgtacatggaaatggtattgcctgagcaaagtttgctagttg

SEQ ID NO: 8699 - DNA, 469 bp, Glycine max
  Clone ID: PAT_MRT3847_107864C.1
caccagggaaaggggccaaccaaccccccccgaataatgaaccatcccttcaattcaattggggccccggggaaagcgagagcctccccaaaatgattattaaattaacttggaaaaaaacttgggggtcattaaccctccaaccaaaaaacaacggcccccgttttaacgggaaaaaaaaccccaggggggggaacccctcccccaaaaaaaattccggaaaaattcaaaaatcccccctttttttttttaataataaaatttccccccttaaaaaacaagggggggaaacttcccggggggggggctgaaaaaaacaaccctctagataagccccaaaattccccctcccatgaaaggcccggcccaaaaaaaccagggggggggccagggccactttaaaaaaggaggcccaaatttaccaacagggttcatgggtgttccggaaaaagcccctcccaacccgccc

SEQ ID NO: 8700 - DNA, 422 bp, Glycine max
  unsure (1)..(422): unsure at all n locations
  Clone ID: PAT_MRT3847_107865C.1
gggggggggggctttcccaaaaaaaactttttgttctttggaactaaaaactatggccctggcccgaataggaggaacccccaacaaaaaaaaaaaaaaactttttttttttttaaatcccccggggccggtacctactttttttggtttataaacaaagggattcggttccccccccccccaccggggttccaaaaatggggaaaaacaccccccccccccttgattctaaaatcccccaaggtggggctcaacaannnnttccgggcccttccccaatttttaaggagagaaacccccgggtccaaataaaattcccaaaaccaaccctttttttaaaacaaaaagctggacgcgttttttatccccttaccctaggaattgaaaaacctcccaaaaaaaaaaaaaaaccctttcatttg

SEQ ID NO: 8701 - DNA, 235 bp, Glycine max
  Clone ID: PAT_MRT3847_107866C.1
catagagcaattatgtccattactttttttttttaataggcaccacctagttctgataacctcataatggctgaaaatccggggggttaaacctgataggaaaaacctttttgggacaaaaagagccttatacattttactcggaaaacaccgcccccttttgaacaaaataaaacggaaactggctgctccctggatttaacagacctttttccaacacttttcttctattgga

SEQ ID NO: 8702 - DNA, 911 bp, Glycine max
  Clone ID: PAT_MRT3847_107867C.1
gtggctgcaagcctacaaaagaagatcttaaaagatgcttcatgttggattttgatagatctgcattcataattgcttcaactgcaactgaggaagaaatgcttcaatggtatcgtgaacgcattgtgtggaccgacaaagcactcttcatgaaacttatgaggaaaggcatcttgactcgtatttatgctcccatgattattattcaaagtctgaaggaatctggtgtttttagctctctgattgcaaaagctgctcaaacaaagttatccaaagacaattttttacaatctgttgagagtagcaattctaccaggaattccagatcagaaattatatcttctagaaaaattgatgctggtggattatcccaagcaactgctagaagaattttggaagttatagatgactcactcccatctgcaatcccaccattatctccacccagccttgatcatgctgaccttattatatcctagtttttttactgactccttgccgttgccagaatttattttgaagataatccaattcttgacttttggggaaaacttactcaagacatatcatagaagctcttctggctgtcatgatgggcattccagtttttggattcttagggtttttcccgatcattacccaagcgcttatgtaaatttcaggtatagatcctaggtttagtgtagaaatcatacagaggagattttgctagcattttcattattcttttttacctctaatctgttcttatttcttccttttgggcacattggctgccattgtaatggaaaatagtggcggattgtatttttttttatacacattgagagagacagtgttatacaagattaagattttctccccaagttggaagtagaaatggttcatgcaatgaaaaaattgttttgcct

SEQ ID NO: 8703 - DNA, 398 bp, Glycine max
  unsure (1)..(398): unsure at all n locations
  Clone ID: PAT_MRT3847_107868C.1
aaaccattcaaaatatctcccctgaaatcactgttcaaaatatattgttcaatatacaataacaaatagaaaggcagctccatgccttaccaactaaggctgttcctataactagaatccgtgaccaccaccaagtcacaggcatcaaacatccctttgacatcttgagaggagaggagaggagaggagaaaaaggagaacttctctaccattttctccatacctgacttggcatgtcaaaataactatacaccataaaacagaactatactttatacagtcagcagttactgtgcaatgtagtagactatacccaccacanagattaaaagaccctatctaaaaatcctatctgccatccagcaacccaaaatgtctcttaccaagcacataaaaag

SEQ ID NO: 8704 - DNA, 188 bp, Glycine max
  Clone ID: PAT_MRT3847_107869C.1
ccttctttcttctaattgcagccgtacccttttgtcatcttctcccagacaaacccttttgttgttttctcaaaaccgtacccttttgtcggattcttgcacccgaacccttttttaatcttctttcatccgaacccttctgttgtcttttcaaaaccaaacccttttgtcgttttttcacaaccgta

SEQ ID NO: 8705 - DNA, 488 bp, Glycine max
  Clone ID: PAT_MRT3847_10786C.1
cttaatcttaaggtaacttttgtatggagtaataatgattggctcattacgtagtctaattgccaaattcccactgttagtctgtttgtattttggatattttaagagtatgcaggttacacagcttagaagcaaaattcagaaacctaagcatgagtatgatacacttttggctgaagtaaagtcccttggattgtgggaagaaaatgataatgtagctgatgtacctcttgcgatctagcttccattctttgtttaaaaatattatcaaaaacttattttaggaatgatatactcaatgttgaagaattcctgctcctacaaaatgcggtagggcataatgtatgtgtttgaatcaagaagtatttatattaaattaattaattgatgttaaagcttgctactgagtttccacactgcataccttaggtcttccgaattcgaagttaatttgcaagatggctaaggaaaaggctcagatcaacatt

SEQ ID NO: 8706 - DNA, 2375 bp, Glycine max
  Clone ID: PAT_MRT3847_107870C.1
gtcccattatcaggctgcattaaggttaacccccagaattaagcagcaaacgggggtttagagcgattatagagccaaatgaagggagtggatcctgatgcacctaaagaagatgaagacaatgatgttgaagatgcagacggagatcaagacgagactgaacttctgtgagtaccagtgtccagagcaagtctattgtgatgaaatcagtaacgtgggaatagtttaatgttgagatggcattagaagtagggttggtgctctacaatctgggctcaggtttggattaactactgctagagttcacatcagagagcaaagcatttaatactgttgcagcacgtggtcaaaccctgaggctgtataaaatatggaatgtatggattggatggtgaaatttcctctccaggttggggtggattggactttggccaggtggttgtgttcctctttgtaaggccaaagatgtctcagctggaagcttgtgttatcttcattataaaaaaatttgttcttggttgtaaaagctatgatgatgatgagtcatgttaaaactgtagagtcgtctttcattctctgtaaccctgtaaaacaactgcctatttaattttcttcacatgtcaaaaggtgattcttgaggttatcacagctttagcagaacttgggtctactgcaaaggacatcatttcattgattcctcagactctgaatagaagtggtagagctccatttgatcacactgactcaagtcgttggcttcaacgctatgttgaagctcaatgttgcatggcttcaaatgattataaaggtggattggaactctttgcagatcttttacagcgcttccctaataatatacacataatacttgagatggcaaaggttgaagctattattggaaagaatgaagaggccattatgaattttgaaaaggcccgatcaattgatccatacatcgtaacatatatggatgagtatgcaatgcttctaaagctaaaatctgattatccaaagctgaacaagttagtgcatgatttattgaatattgatcctgcaaggcctgaggtttttgtagctttgtctgttttatgggaaaggaaagatgagaaaaaagcattacaatatgctgagcagagtattcggatcgatgagaggcacataccagggtatataatgaagggaaatttattattgacgatgaaacgggcagaagcagctgtgcctgccttcagagcagctcaagaattgagacctgatattcgctcatatcaaggtttggtccatacatatttggctctctctaaaaacaaagaggctctgtatgcttcaagagaagctatgaaagcaatgcctcagacggcaaaagctttaaaattagtaggtgatgtgcatgccagtaattctagtggcagggaaaaggctaaaaaattctacgagtctgcactaagactggaacctggttaccttggagctgcactagctttggctgagctccatgttatcgagggccgaaatggagatgctgtgtctctgcttgagcgatatcttaaagactgggctgatgattctcttcatgtaaaacttgcacaagtttttgcagccactaacatgctgcaggaggctttgtcacattatcaggctgcattaaggcaggttaaacccccagaatgaagcagcaaaacggggtttagagcgattagagaagcaaatgaagggagtggatcctgatgcacctgaagaagatgaagacaatgatgttgaagatgcagatggagatcaagacgagactgaacttctgtgagtagcagtgtccagagcaagtctatttatgatgagaacaaacgtggaaatagtttaatgttgcacggcattagcagtagggttggtgccctacaatctgggctcaagtttggcttaactgctgctagagttcacatcagaaaaacaaagcatttcacactgttgcatctggtggtcaaaccctgaggctgtataaatatagaatgtacggattggatggtgaaggggggtggattggactttggccaggttgttgagttcgattttgtaaggccaaagatgtatcagctagaagcttgtgttatcttcattgtaaaaaaaaaattattcttggttgtaaaagctatgatgatatgagtggtaaaataactagtcatgtgaaaactgtagacagtagtctttcattttctgtaaccctctaaaacgactgcccgtttaattattttcttcaggaatcaaaaggtgagattccatgtaagctcttctctttattctttattgtctagccaggtaagattaatatgttctacaactcatgtgggttcctttttatcatttgcaacccttgcttcttc

SEQ ID NO: 8707 - DNA, 261 bp, Glycine max
  unsure (1)..(261): unsure at all n locations
  Clone ID: PAT_MRT3847_107871C.1
gncggtttcatcctaaatcgtccaactctaaccagaagattgnctcccagnggcaaggnaacnaangatnnggttgacgttcngcagtnatcatcananggctnatttgagcaacaattacaggngngnctgnngcccttgtggactaacagtgatagngntattgtcaaggcatgcttctgatgaggtctaccttgganagagggncaatccanatgggactgntggnacanaggnnattcaagcctttaagnngnttgg

SEQ ID NO: 8708 - DNA, 263 bp, Glycine max
  Clone ID: PAT_MRT3847_107872C.1
actgggatgaccacaattagtcttcatttattataatagtgttttactgtgtaatgtcgcgtcttggatgaccacactaagcctttatttataatgagcaaataggatcagtgttgattatgttataattatgtgtatctttagaatagattattgtatctgttttagcttatagtagaagacagcagtgtgtcctgtcttatcaaagctttcaagcttctctctcttctctttgtatatatatatctatgttatttgaatga

SEQ ID NO: 8709 - DNA, 409 bp, Glycine max
  Clone ID: PAT_MRT3847_107873C.1
ccacgctttcgtactcacctgcctttgcctcacccatttgaaaatctctctatattgggacaagacagcgccataagatttctcagatcatatgaaggcctggccagtcttctttgagagacttgatggcatagacatgccgtaactatattcccaaattacaggattggcgcgaggaaattgagattcaaacgatcgctccatacttgccatgaaattactataaaggaaggcctggcagaccttaagcagagccagtcatgaactgtatggcctctttacatataccagtcatagtggctgtaggtccataaaccgaactggggataccaatatcctatacaagcgctcgcataagacctatacccttctgattgtcgggaccccctttcctcacaaagatgagcat

SEQ ID NO: 8710 - DNA, 684 bp, Glycine max
  Clone ID: PAT_MRT3847_107874C.1
tacggttgcgaaaagaacgacgaaaggggagtgattttctatttttatatcctctgctatttgtaactttccctcttattgcaaaaccaattgaacaactgaacataaaatttctcttttcaacctggaatttgctagtcttgttccacttcgattcagttcaccgatcttcattgcttcctcttttggatccgcttcattcgcgttcaaaccaacgactaatcataactcttctaccggatccctcattttttccctttcctttctgcgtttaattcatatcggagaaggagagagagaaactgcgacatgaacaaagcgactcttccgttgacgttaattggcgatggagacggtgaccgaaaggtgactaaggtggcggagcccggtgacctcgtcattgcgcttcacgtcctcaacaccatcactggtttctctctctttctctcgcttctctctctctctctctctctaacgtttttcttaatctgaattggtgactgcaacagaaattcactcaattagggttttatacatcggttcattaattatctcaatttttaaaattattgtgattattattcgaaatttgaagtgaccatatgtattcatggcatcaagtttctttaacactaatgaagagttcaggaatctgcacaggtatcaaattacgcatttatcatc

SEQ ID NO: 8711 - DNA, 769 bp, Glycine max
  unsure (1)..(769): unsure at all n locations
  Clone ID: PAT_MRT3847_107875C.1
cttattttgttggggaagatagcgtctctctctctctctctctctctccttttttcttctgcttctgccagcatcttgcgtctctctctctctgacacaaactccattgatttgcaacttgtaagcaaccgaaattgataaaaacaatagcggcgtttcttgagcattccgaggatatctctctaccttcttttctattgactttaaattccaacattccttcactctcttctcttcgcaccatagggacgacttatgggttccacagagaatgaattatcgctcgctgaagaggctcttcttcaggatgatgaaagcaaacaatacacaggagatggatcggttgactttaaagggaggcctgttcttaaacggaatactggcaattggaaggcttgcccatttatcttaggcaatgagtgctgtgaacgtttggcgtactatggcattgcgacaaatctcgttacctatcttacccagaagcttcatgaaggaaatgtctctgctgcaagaaatgtcaccacctggcaaggcacttgctatcttgcacctctcattggagctgttttggcagatgcttattgnggacgatactggacaattgccattttctccaccatttatttcataggaatgggtacattgactctttctgcatcggttcctgctttgaagcctgcagagtgtttgggtactgcatgtcctccagctactcctgcacaatatgctgtgttcttctttggcctctacctgattgcacttgggactg

SEQ ID NO: 8712 - DNA, 1776 bp, Glycine max
  Clone ID: PAT_MRT3847_107876C.1
gcggctcgaggtggaataaagatgttctgcagttatgtacgtttctttcatttacatgcagaagcgatcacggcattgacagagggaaatatcaaaatgtcgcttcagcctgatcctttttcaactggttttacttttctatcaacataggtgcccttgttatccagcacttttattgtttgtattcaagaaaatgctgtttggggtattggattttgcatgactgctttattattggccttagtaatgggatcaatcttttttggcacgccctattacagggttgaaaaagcttggggaagccctattacgagattgtactctgttgtggtagcatttctctagtcgccaaatctggtcgtctctgaggaaaatggactcctatatgagacatcaactaagaattattcatggcttgcgatgtgtaatcattttctttggttttaatgaaggtgtcttgatagagcggctgtagtgtctgatgctgagagcaaaagtggtgattattctaaccagtggagactttgcaccgtgacacaagtagaggaattgaaaatcttgattcgaatgtttccagtttgggctactgggattgtttttgctgctgtttatgctcagatgtcaacattgtttgtggaacaaggaacgatgatgaacacaaattttggttccttcaggattcctccagcttccctctcgagttttgatgtgataagtgttattttctgggtccctgtctatgacaggattattgttcccattgcaaggaaatttacaggcaaggagaggggcttttcagagttgcaaagaatgggaattggcctttttatttcagtcctgtgcatgtcagcagctgctatagtggagattgtgcgcctgaaggttgcaaaagagcatggccttgttgatgaacctgttcctgtaccccttaatatattttggcaaatccctcagtatttcttattgggggcagcagaagtattcacattcgtcgggcagcttgagttcttctatgaccaatctccagatgccatgcgtagtttatgtagtgctttgtcgctgttgactacttcacttgggaattacttgagctctttcattctcactgtagtgacttacttcactacacaaggtggaaatcctggatggattccggataacttgaacaagggtcatcttgattactttttctggcttttagccggacttagcttcttaaatacctttgtgtacatagttgctgccaaaaggtacaagcagaagaagtctgcttaagatttttcaggcattttatttggactggaaggacgacattctgctatttccttctgtcaatgtcgtgattgttctgcatgtggaataaagatgttctgcagttatgtacgtttctttcatttacaaagtatggttcaaaacagccctgtctctgccctctctcatgaagcctgaaattgatgagatgagattgcctgctaccatttaggctaaacatgggcagttaatgttcaatttctctacattgcttgctaccatttgtaactattgatgtagaaaatgttgatactctttttatgtgcaccatcgtttcagattgtagtgtttgatcaacgaaaagcagagagctagaagaatgcactacgggataaaagtagcatttgcttattaaccctgaaataatcaaacatagacactaccctggtgatttgacaaaggttgattataatggataacatatgaatgcaaaaagtgaaccgaataaattttccccgcttctgg

SEQ ID NO: 8713 - DNA, 449 bp, Glycine max
  Clone ID: PAT_MRT3847_107877C.1
agccaccagaaaacaaacacacaattcactcatccaaacgcaaaatgaaccagaagcatagaggaacggttctctccccccctctgaccgaaaccatagagcacacaacataagcgcgcaaaacactaaatacctttacttgaagggggaactacactgcagagttggggggagccatcaaaaatgaaatcccaggatctttccagcgggacgctgaaaacaacctgagaaaagccacagaggggacttagcagacagcacacataacaacaaaaatgggggagaacacacctttggaaaacgcacatttcacaccaaacaaaaaggggtatatatggaacgcaggactgcctgatcaacaaggacacatgaggaggcggccaagttgacaccaaactgcaaagacaagccgagaacggtaaacgtacaacagatgcctctccactgag

SEQ ID NO: 8714 - DNA, 154 bp, Glycine max
  Clone ID: PAT_MRT3847_107878C.1
accgctgcgaaaagaccacagaacggggcacgaggtcaactaattatgggatagacataggctcccaccgtacgataagggactctcttctaagggctcaaggaacaccctaattcattaagggccgcgacatatattctagccatgctcttta

SEQ ID NO: 8715 - DNA, 2165 bp, Glycine max
  Clone ID: PAT_MRT3847_107879C.1
gccttgtgctctctcgggttgctcaccttatccggctggggaagatagcggctctctctctctatctctctctccttttttcttctgcttctgccagcatcttgcgtctctatatctctgacacaaactccattgatttgcaacttgtaagcaaccgaaaatgataaaaacaatagcggcgtttcttgagcattgcgaggatatctatatacctcctgttctattgtctctaaattccaacatgcctacactctattctcttcgcaccataggaaccttcagccagcaacttgcgtctctatccattgatttgcaacttgcaaacaacacgaaacaattgcggtgttttttgagcattccgaggatatattttttctctgtaattaattatcctttaaattcccaatattcctcgctctattctcttctcttcgtactaccataggaaggaaggaaggagagagagttatgggttccccagaaaatcaattgtcgctcgcagaagaggctcttcttcaggatgatgagagcaaacaatacacaggagatggatcggttgactttaaagggaggcctgttcttaagcggaatactggcaactggaaagcttgcccatttatcttaggcaacgagtgctgcgaacgtttggcgtactatggcattgcgacaaatcttgttacctatcttacccagaagctgcacgaaggaaatgtctctgctgctagaaatgtcaccacctggcaaggcacttgctatcttgcacctctcattggagctgttttggcagatgcttattggggacgatactggacaattgccattttctccaccatttatttcattgtgtcttgatagagcagctgtagcatccgctgctgagagcaaaagtggtgattattctaacaagtggagactttgcacggtgacacaagtagaggagttgaaaatcttgattcgcatgtttccagtttgggctactgtgatcgtttttgctgctgtttatgcacagatgtcaacactgtttgtggaacaaggaacgatgatgaacacaaatgttggttccttcaagattcctcctgcttccctctcaagttttgatgtgataagtgttattgtctgggtccctgtctatgacaggattattgttcccattgcaaggaaatttacaggcaatgaaaggggcttttcagagttgcaaagaatgggaattggcctttttatttcagtcctgtgcatgtcagcagctgctatagtggagattgtgcgtctgcagcttgcgaaagagcatggccttgttgatgaacctgttcctgtaccacttaatatattttggcaaattcctcagtatttcttattgggggcagcagaagtattcacattcatcgggcagctggagttcttctatgaccaatctccagatgccatgcggagtttatgtagtgctttggcacttttgactacttcacttgggaattacttgagctctttcattctcactgtaatgacttacttcactacacaaggtggaaatcctggatggattccagataacttgaacaagggtcatcttgattacttcctctggcttttagctggacttagcttcttaaatatgtttgtgtacatagttgctgccaaaagatacaaggaaaagaagtctgcttaagattttccaggcatttctttggactggaaggatgttctgccatttccctgtcaatgtggcgattgttctgcatgtggaataaagatgctctgcaattatgtacgctttttatttacaaaggaaaatctgttatttatgccggttcaaaacagccttgtctctgccctctcccacgaagcctaaaattgataagattgcttgctaccatttaggctaaatatgggcagttaagattgcttgcaacatttacatgtgtaactattgatgtagaaaaggttgatactccttttatgtgcaccgtcgtttcagattgtagtgtttgattaacgagaagcaaatagctaggagaatgcactacgggataaaagtagcattcgcttattaacacggaaatactcaaacatagacactacactggtgatttgacaaggttgattgtaatgaatacatatgaatgctatagtgagcagaataattcgcatgttctgatattgcgaca

SEQ ID NO: 8716 - DNA, 474 bp, Glycine max
  unsure (1)..(474): unsure at all n locations
  Clone ID: PAT_MRT3847_10787C.1
cggaccggcagtcctgggtcgacttactcgaccgcggacgtgcgggcgcaagagggagaaaccgcgaacgcaggangtttttccgtagaaccggcaacattttcaaccgaaactagatgggaggaatctctcaaggtctggctactgcttcgagctcgagtcctaaagggaaagaaaatgactccctgtgctgggcacagacttcgcgaatcacatgctgtgccactctcggtgaacactggtgaacactctactatccgatataagactgcgcgtcagattaaaacttcttctgtaggttgctcaggactcgggtgaatatcagagccaagcgggtgaaatggaggattagtgctccgactctcctataagggataggactactggggtagacttttcgatctatatggattgtttcactctctggccctcactgagccgcattgacgtgcaaagtggcctaaactgggaaac

SEQ ID NO: 8717 - DNA, 569 bp, Glycine max
  Clone ID: PAT_MRT3847_107880C.1
ctttcttttttacaaatatttgtttatcctacccgcacgaagaaacaaatacaggtatgtacacattgtgagtatacaatatgcatttactagctgcaacatcaatttagttcagcaaatgaaccagagaaatgcagccaatggcacaaccaagtagatacttttagtttcattaagaagtcttcttagcctcattaaaaatgaaaggaaaaacaatcactgcattaacaaatcttcttagtctcattatctacgtgcatgtaatttgtagttaaatactttatatggttcgcttaccaatggttaacaagttggtgcaccccagcatcatcggcacacacatgagctttggcaagctgccacttccaatttgtagttgcatccacaggaggagtaactacacgttttcatccgaaacttggtccgaggctaagctctataccaataggcttgagagtgccaagcggtatcaaacaaaaatatgggggcgggtagcatatgattttctcccataaaggggcattgatcccgtcaagaaatggaacattgaacttcgcgtttcctttacc

SEQ ID NO: 8718 - DNA, 425 bp, Glycine max
  unsure (1)..(425): unsure at all n locations
  Clone ID: PAT_MRT3847_107881C.1
ctttcgcttggtcacaagccccacgaagccaccgggacgcttttctagaagcgagccggggccggcgccaccaaggcnccaacaagcaaaggacagggcggacacggaacaccagggccccaccccaaacgacccaggcgccgaggcgagagaaacggacgcccccggagcaaaggaggaagcgcatacccgcaagcagcagaggaaggggaagaagagncagaccacagcgcaagggccgaagaaggagcncagctacgagaagagccacaaggaccccaagaaggaggncggcagcaacggaaccgaggcgcacgacaaggagcccggcaagaacaaccaactccaaggcgaccagcgaaagaacgacacccactttctcgttcaggctggccttgtcaagaaggaccaaaatcaagattcat

SEQ ID NO: 8719 - DNA, 176 bp, Glycine max
  unsure (1)..(176): unsure at all n locations
  Clone ID: PAT_MRT3847_107882C.1
gaatgggttctaagggggngaactaaggttcatcattagtcattctnnaaactctaagagggtggaggtgcanagaggagtgggacaggttcttcaaacttagcggagattccttcgatgtggtacgccgaatggcccaacctcagggaccgactgcgcaccctgctcaaaacacg

SEQ ID NO: 8720 - DNA, 255 bp, Glycine max
  Clone ID: PAT_MRT3847_107883C.1
tgaataatcacccttttcttatatgcctctggagagtcattctagttttgtgaaaatagaacatcaaactgggatgatcggtaggtttttgatgggaagacggctggtaatacttgcctagaactctgtgatggaaaggggccatctcagggatccatagaaagtgtgaatctgccacatgcgaaccacgtattcagcttttctagccaagctgaaagtatggctgaagtatgactttagtgttagacaatgggt

SEQ ID NO: 8721 - DNA, 267 bp, Glycine max
  Clone ID: PAT_MRT3847_107884C.1
gaatacccgctgaacttaagcatatcaataagcggaggaaaagaaaataacaatgattcctctagtaactgcgagtgaagagggaaaagctcaaattttaaatctgttaggtttacctaaccgagttgtaatttgaagaagcgttttctgcgaatttggttagtccaaatcctttggaataaggtatcatggagggtgagaatcccgttcggttaaccaaagcgctttacgatacgctttcaaagagtcaagttgtttgggattgca

SEQ ID NO: 8722 - DNA, 221 bp, Glycine max
  Clone ID: PAT_MRT3847_107886C.1
ccataaatatattttaaggacagagatgacgggtgagaaaattaacttaaaagaaaaaaatgacacactaaagggaaaaacaccacagaggaagggccaaagcggtccccctgtcatgaaaaagactttaatctacgcttatcgccagtcttgaagacgtaagcgagaggggcaaagaaacgtagcaaaacacaagccaaagagcattcccaattattatt

SEQ ID NO: 8723 - DNA, 525 bp, Glycine max
  Clone ID: PAT_MRT3847_107887C.1
ttccggaatttcacgtgcagcagactgtgggaaactactaaacatgggaaatatgaaaaaaccatccagaagttcctcaagtttctttgataggtttaaaaaagtaaatgctaagggtttacaaagtaatgacagatctccacaggaagaagctaccttggagaaagatcgataccctttactttttaaatttaacgagggctttactaatgcagtgaaaaggcctgttcgtattcgtgaatttctatcctaatgtgtttaacaagtaatgttctttctttgacatgattgccttagaattatcgatttatcaagggctccatttgttccctttagattaactttgttgtatgcttcagaatcaaagttcttaccaattttagtcatgatctttattgttgtgtatcatttacactttccaacaagaagagaatgtagtggcagatatgtcaaccaagctaaattgtctatggttacagtttactcatctaaaactaatttgttcagcaaaagaaaatttacaat

SEQ ID NO: 8724 - DNA, 430 bp, Glycine max
  Clone ID: PAT_MRT3847_107888C.1
tgctcccaaacgacatggccgcggaattagcgcggacgtctgtttaagaacaaaaagaaaaaacaaattatggcgtgccttaaatataaacgggcgaccctatttaaggatccaatcttactgctcaatcacacaaactaatgacatcttatatcattaagctaaatttaatatactggcctgcaatataacaataccactgctgctaaaacctctgcatatgccaaacttactcagacttaatcgcattcggctttttcactttgtactcatagatattaggccctaacgcacacccatatgaaacatcttaattcacatatggactaaagcaaatctacctatgacaaggacctaatatctatgactagctctattatactactcatgacctctacacttggtctagccctatcttccattactttag

SEQ ID NO: 8725 - DNA, 404 bp, Glycine max
  Clone ID: PAT_MRT3847_107889C.1
aagacgacagaagggatttattttattgtaagttttctgctaatgacgtgtacattctccctgtttcttacccagatgtagcacttgtcacatctttgagggatggaatgaatcttgtaagttacgaatttgtggcctgtcaagataaaaagaaaggggttctcattctcagtgaagtaattactgaaactttatagtgtatttgtctacttttaatttctcaaatcaggctatgttaatgttgaataattaagaaagaaaagattcaaaagctagtagttggaactttcctcctacagtctgttttcctgtggtcatcgcacctgtgataaattgagtaaccgaccaaaagttcatgaattcggtgcccgaaacaaccctcccttcttataaacatatgccct

SEQ ID NO: 8726 - DNA, 520 bp, Glycine max
  Clone ID: PAT_MRT3847_10788C.1
atcccccttatcagcccagaaggtgagcaggttgtccccttggttaaatgggtgaatttcgtggttaaaaaggagtgccctgcagaagtgtttgatgtagaattgttcaggtatccaaacatagaggaagaaatggtggtgatgctacaaatagggatggcttgtgctgcaagaatcccggatcagagaccaaaaatgcctgacttggtgagaatgataaaggagatttgtcgagtaaatacgccaaatcccccatccactgagtttagatcagaagtttttaccccaacccctcgtgcagttgacattccttctacctttgttcaacaatgagatttttttgttttgctcaatagttgttaagatgtaatcaattcaatcatattcataacaggagaaatgaaaccaatctaatggacttatggtccttggaagttagtaaaaacaaattggtgctgagtagttaagctaccagatttagctgattgggtatcaaattgggtccctttgcaagtgattt

SEQ ID NO: 8727 - DNA, 322 bp, Glycine max
  Clone ID: PAT_MRT3847_107890C.1
ggttgacccgctcactcgacgtcggacgcccttgccgctcttcttttttttttttgtttcgcccaaaaaaaaacgatttaatcaatcacgacccgaggttattaaactatttcacacacagaatgccaagaggaatttgttttttatgacaatcatgccaccctgtactaagggcacatcgaacagacaccccctgtacacaaccttaccctagttatcaccctatctattggatgtgattgcgacctacaactacctattgagaactaatcaaatctcccccaaacactttatgagagccttcctggttgactgcatatgt

SEQ ID NO: 8728 - DNA, 284 bp, Glycine max
  unsure (1)..(284): unsure at all n locations
  Clone ID: PAT_MRT3847_107891C.1
cacttggtcaaggagtacatgcttcacagaatgctgtttctcagccacccaaggacaagtttgagacaaaattcgacagtttgggcagacacacttagcagggggttggttaatttgaatatatctggacctaaaataaaccctttagcagatattggagttgactttgatgccattaataggngggaaaagaggatggagangcccaccacgnacancggnancgtcaantgtaacaatgggtanagctatgggntctggttcaggtatgggccgggctgntt

SEQ ID NO: 8729 - DNA, 248 bp, Glycine max
  Clone ID: PAT_MRT3847_107892C.1
ggctcgagtacacgacagaagggggaccaacacctgtgcagccattctctgtcaccaaatttgatctttctagctctctttctttggcgcgcatgtcagcaactggggtatcttataattttcaagggcttaatactggcgacgtgtactagtgcattcatcggttccagtttcatcctgtaagataagggtcttaatcgtgctgtctgcacacggtactcgtgcatgattcgactggctatactcat

SEQ ID NO: 8730 - DNA, 454 bp, Glycine max
  Clone ID: PAT_MRT3847_107893C.1
tcccatcaccaacttgcacatcgatttcataagagataaaatgcatttgagagatgtgagaagaacgatgagaatgaaaagatatttttgaaaggatgagaatgaaaagatagatagagaagataaaaaatttaaatatcaaattctcgtcaataacttcaagatgaacgcaattggagtcactgataaataaaaaatataaaaaaaaaaaatgaacgcaattggagcttctttcgggtcaatttaaaaagcaagcatcacaactcaatttttttcttaacctactacgtgggcgcatatattattggtagaatgggaaaaaacttagtggagcacaacgggacttatttacatatataatcatctaaactacctgggctaatataaaaaacaagaatcacatctaaccatagtagtaattttattatgatatatttttctctcaagacccttt

SEQ ID NO: 8731 - DNA, 721 bp, Glycine max
  Clone ID: PAT_MRT3847_107894C.1
ggctcgcgtcccccaaaaagaaaattttccatttaccattcttatgcaatcccaccctccaatcccacatttgtgcatttgttccattccaatttctaacttcccatgtacaatatccacctagcatagctataacatacacatcatttatcacccaacaacatcattcacatatctatacacaagatcgagagagagagagagaagcaaaaaaaacaacaaccttaatttgaattttcctatatcctataatatttttctctccgaccaggccttttttgaggatggaatattcaaaggaaattcatagcaatggcaatgcaaatggttcattgaatctttgcaatggtagcacggacccacttaactggggcatggctgcggaagctttgaaaggtagccaccttgatgaggtgaagcgaatggtggaggactaccgtaaccccgtggtgaagttgggtggcaagagcctcaccgtgtctcaggtggcggcggttgccacccggcaccacggcggagttacggtggagctggccaaggagacccgccacggtgtcaaggccagcagtgactgggtcatggatagcatggttaagggcactgatagttacggagtcaccacagggttcggtgcaacctcacatagaagaaccaaacaaggtgctgccctccaaaacgaactcatcagatttttgaatgctggcattttttgtaatggcac

SEQ ID NO: 8732 - DNA, 406 bp, Glycine max
  Clone ID: PAT_MRT3847_107895C.1
tggctcccaagggtttaacctttctggcagcgttaatacgcgtttgatcactgtcactgagtgcctatgatgcgggggaagggcaaaataatggcctggttatgaacttctacaaggaatcatgccctcatgctgaagacatcaccctagcaaaaatggagagtatcttactcttcttctcatcattgaagttcgcactctcagtattacttatactacacttacctttttactctgctcagatcatgcaaggctttagtacgcttggactgaggttgtacagaaagattcgcatatgaactttgggttgagagatctcctgttcattgagaccatcaaagacactttggcacgagaatgccctggagatgatacatgtgctgatattcaacacttcgacacttta

SEQ ID NO: 8733 - DNA, 386 bp, Glycine max
  Clone ID: PAT_MRT3847_107896C.1
aagctcttaattcggctcgagaataattcacatccaaattttatccaccgccgaatccgacagtcccgagggggcattttaaagccttttgccgtttcacccccagaggagcaccctccggatccccgaaccatctttcaatcccaaaccaacaaccctaaaatcagccaacgcaaaggcgcgctccacttgcaccggacctctacccactccgctgcctattctcttctctggaggctcgcgcgccccaacaacctattcttccacgacttcattccctctacaacagcaaaatagaaacgactgcggatgaatacaaccggccttatacatctcagttggagacacaaagacaataacatgaatcctcactagcggagacaaaa

SEQ ID NO: 8734 - DNA, 292 bp, Glycine max
  Clone ID: PAT_MRT3847_107897C.1
agcagcaaaagggggtccaaagggggaattgttaggagtgggacacgggcctcctcctttggtggtccggtgttggggttggtttttcccctaacgggaagaggccttgatctgggggaaatggtggttccggaaccacgggaaggtcaggaaacggtaggggaggcggaaaaagttaccaagacttgacacaacatgaattcaacaacaaccacaacacttggccatggaattggaactggtaaggcgcaaatttaaggttgctaaaatggttgtgccgattaaaaacaat

SEQ ID NO: 8735 - DNA, 468 bp, Glycine max
  Clone ID: PAT_MRT3847_107898C.1
agaaaaaatttttgggattaattttttggcaataaaaggctctaaagaaaggggggggtaaaaccactgttttaagaggagggttgggagaaaaataggaaccaaaaaggggtgggtgctaccaaatgctaaggaaagagtgatccaaataagctctgagcacagggcttgggggatgacgcgaccaagcgggaacaagaaaactacaaagggatgattccgggggaaaacattaaccctaaatacattagtattccagggggacaaaaccgggggttttaaaactaactgcgggaaaatttggtttgttttttccgaaaaaaacatgggggtccgggggggcacaacaacttctgggggatacctgctgagaaacttaagaagcctcattggaactgcgagaacttcaagctcagggttggaaaagtcaaaaaaatagcttggaaaggaaaatcccccagcacaaag

SEQ ID NO: 8736 - DNA, 617 bp, Glycine max
  Clone ID: PAT_MRT3847_107899C.1
gggatgctgagcgtgttaacgtatgtgcttctgctttgcctttgctgttctttgcggggtctgatgattctatattttctgaatctgataatagctgggtgaattttactaagttcttgactggagcctcaactgtgggaggtattgccattccaagcatattaaagcatgctggggttatcggttggggagcctttgcaatggaactctcttcctactttgtgtttggaatggccataatatgttacctttggatgagtggtgatgatgattacagtatcctatgagataagactttagccgggcttgcttcgtcagtgtaaaaatggatttattcctttcatgtgctattgatttttcttgcttttgtgagctttaccacagcatatttcttttcccgtttagaatactggctacctcaagtaatagcgtttaacaacgaatcattgatgtaccaattgtagaggaggtttcagccaagtatacgggaattgtatgtaatagacgatcttgtgtctgttcaggaatgaggcagctttgttgcgccttcttattgtgattgtaagtttgattttcattaagctatttgataccattgggtggagttcttcctgtag

SEQ ID NO: 8737 - DNA, 563 bp, Glycine max
  Clone ID: PAT_MRT3847_10789C.1
ctctaacacagaaacgccgagaaaaaaagcccccggggggccaggggggaaaaaaaaacctggccaaaaaaacaaaagcaactaccaaggcaaaagcccaaacctggatacaacaaacagagaaaaagggctcgcaacgccgcccccctcccacagaaaccctgagaacggaatttagcctaccgacgccccccaagcaaaaaaacacccccactaaacccccagggccttagacgggggacgcccagacaccaccccaacagacaccagggtacccccccaaaaaaccaaggccccgcccccaaaaacaaaaacaccttcaaccacaccggggcttagaccaaatagaacccccagacaagccccccccccgaccagcccaacggggaaccggggaagaacttccccaaaaaaaaccccccacgaagctttaagaaaacccccccaacaccgggacgcccccccgaccagccacgacaccccccggaggccccacaaaacccccccccaacagaaaaatgggggggacaggaaaaatataccccccgccccccccgaggggg

SEQ ID NO: 8738 - DNA, 435 bp, Glycine max
  Clone ID: PAT_MRT3847_1078C.1
tttgtttttgcagcagaaatgggtgatcctgaggcacagtatgcattgggttgtcatctaagagttgtgaatgactatgtccagtctgatcaacaagctttttattatttggagaaagctgtggaccagttgcatccaggtgctctttaccttttgggtgctgtatatttgacaggcgactgtgtcaagaaagatattgcttttgcattgtggtgtttccacagagcattcggaaaagggccatgctggggctgctatagcatatggatctcttcttcttaaaggtgttgaggttccagaatcggtaataaagtttagtttgaccagaggtgctgcatcttatacacgggggaggaataagggagcttttgcaattgatccagtataaatggcaagagaaaagttttagattgcggaaaaagcagggtgtgagct

SEQ ID NO: 8739 - DNA, 1269 bp, Glycine max
  unsure (1)..(1269): unsure at all n locations
  Clone ID: PAT_MRT3847_107900C.1
ccgggaagttgagtggcagatccgcgccgatggtgtgacctgctggtggttacaaaatacaaaatctaaaatcgaaataaaacgttattggggcagaaatcaaaaccatagattttgcttcagttattactccctataacatgtggcagtgatttgaagatggcagacttaccagggtatcttcatgcctgtttgaacacagggaagcttgcctccttggcaattttggtgtctggaggaatcgtcttgcaaattttggtctggattgcattttatgttcttgttttattagtgcataaatagatgacaacttcttggtaaaaataccactgtttatttacatctgtcatctgtgttgtgtcaggcatgtgccttgtataataactggtggccgatgctgagtggtgagttagagcaccactgaaatttgaatccaatttccagtacatatgtttttattcttttcattgatgagatttttatgggacaagaacatcctggtaattgttntctcttgcagtgttaacgtatgtgcttcttccaatgcctttgctgttctttgcggggtctgatgattctatattttctgaatctgataataggtaaattgttatgcttgagtctaaattaaaaagtaagatcattcaacttgttaaattagtttgatattcattcaagttagatttgaattttatttgaaaagaaactcaagacgggggggattaatctttcaacattttgttttgtggtcttgtaaatgatggagcagctgggtgaattttactaagttcttgactggagcctcaactgtgggaggtattgccattccaagcatattaaagcatgctggggttatcggttggggagcctttgcaatggaactctcttcctactttgtgtttggaatggccataatatgttacccttggatgagtggtgatgatgattacagtatcctatgagattagactttagccgggcttgcttcgtcagtgtaaaaatggatttattcctttcatgtgctattgatttttcttgcttttgtgagctttaccacagcatatttcttttcccgtttagaatactggctacctcaagtaatagcgtttaacaacgaatcattgatgtaccaattgtagaggaggtttcagccaagtatacgggaattgtatgtaatagacgatcttgtgtctgttcaggaatgaggcagctttgttgcgccttcttattgtgattgtaagtttgattttcattaagctatttgatacc

SEQ ID NO: 8740 - DNA, 485 bp, Glycine max
  Clone ID: PAT_MRT3847_107901C.1
gttgaatgattgctaaaagttccccattttctatgtccttgtgtgtcaattgcatgtgtttcagaaacctcgcttgatatttgtttgttgaatcactcatcattctgtcatgagtaattgtgattcatagttatacttctcattttcttcaggtttgttctgtcgtgatagcatttcacatgacacatggatcaatcctttcttacgaatataaatatttggtgaatggatggatttgcgattcacttttttctagctgagatcaagaaggattttgcacccaaaattatatatcctgtttgagttgcattttcttgtcttggaaattaaaacaaaagcccttatttgcgattgttcataattctgaacctcgggaaaaaccttaaatataaaatcaagaaaagaagcatgaatcttggatttgtcatatacatatactgtaggtggaaagggccaattactattagctaagcttctgtataata

SEQ ID NO: 8741 - DNA, 483 bp, Glycine max
  Clone ID: PAT_MRT3847_107902C.1
gattggactatttgcttttcctttccaatacttatcaaatggagcacacaatgactacaatgaattatttaaagaaacagatttcaagatgaagacatcctgaatgtaaaacattttgcattcttagtggataagaattaatccttctataaatggcgttcacatttttttttcttttgtgcaatttcgctccccaatctgttatattcctccaaatccaaaagaatggcacaaacggtttcttctaataaccaaacaaattgcattgctttttacaccatagccatcctttcttgtttggttttgatgatctcttcctctctctcattcaagaaattgcaacaataatttgagaccctctttcaatgtaccttgctgcctcttctgcatcatattaagatccttaaaatacgtatgctgaaaataaaccttgacaaaaattttgatacattttgcatcttctctgatacaaattttaatttt

SEQ ID NO: 8742 - DNA, 233 bp, Glycine max
  Clone ID: PAT_MRT3847_107903C.1
tgagaatttaacttttcaatgccactaatactatgtgtgaacggggtatgaaaagcatttaaccggaccacccttaacagtggtcgtgtaacaaaatgaaagggagcatatattgcactactccatgtgtatatatctataatatagagggtgggagcacaaatagaagcatttgtcacgataattgttattaatgtgacaaataatttagctaccgtactgctcttcttaat

SEQ ID NO: 8743 - DNA, 290 bp, Glycine max
  Clone ID: PAT_MRT3847_107904C.1
ggcttcgagaaccctaattctccccagcaattcaatcttctattcaatttccagtcaccttgattgcggcttcttggacttttctatcgtgggtcggcgggttatctcctactcttatctctgacagttctgataggatcgaggaaggcaggatccaacgaccgagatcttagctacttactccgttactcggagacttcgatagggatgacctcctctctctgaatattcgcactgacctaccgacaaactcgactatgaggtcggcacccgagacaagtgcggctctg

SEQ ID NO: 8744 - DNA, 130 bp, Glycine max
  Clone ID: PAT_MRT3847_107905C.1
ccggggagactccagcgtccgccccgcgtccgtacgctggaggagacagagggggcctattttagctccaaccctacactactcttcctattcgatcatcacctctccattagggagagtataggaacat

SEQ ID NO: 8745 - DNA, 326 bp, Glycine max
  Clone ID: PAT_MRT3847_107906C.1
gatttccggggcatttgggtggcaaagaccacctaagccttaaaagggcacttcggttgtggaatcccggtggttggccgttaggaaacactttttttttccttaatggaaccgcccccgccggatctgttcctccttcctttaaaatttggctgcatggggcaggaaagggttggtttcaaggttggatcgcaggttcgaaaggaaggtccattttttttccaaggggaaggaggctgttccctcctggggtccccaaaagttttttcctaagaaaaggaaaaggggctaccaccaagggcggcggaccaatttgagggctttta

SEQ ID NO: 8746 - DNA, 335 bp, Glycine max
  Clone ID: PAT_MRT3847_107907C.1
cctaatttctcatcattttttttgtaaaatgggggcactttttacccattaataccaacacagcaccaacaaaaaaagtacaaagaaaacacacacacgagccctgtaccacatcgttattattagtattttttttttaaccttatcactaatgactataccctcttcccctgttttctctgttcttgctcctctggctattgggtacctttgttttgcatttttgagaggttttttggggtgcccatttggtgaatttgagtctgaggggttgtttgggcattgcattattgtgttgttgaggaaagttgaagacttttttggtggggtgggtt

SEQ ID NO: 8747 - DNA, 381 bp, Glycine max
  Clone ID: PAT_MRT3847_107908C.1
tcgaggcaggcgtacgcgcacgcttcctacaaaataaaaaaatcattgactttcttacgttgaatgaccaacaacacacgtggtgtgactgtgtatacactacgggctgttagtatccttcctactttaccaccacctgatggccataccactgctgaagatctgccttgcctaaacaacgatcctgtttataccactaccatgggctgtggactatggaccggaccatgcacagaacttcgctatagtggatgttacattcactgtgggcaagggcacttatccggctgaacatccttacaacttatcacagctagctcgtgaaacatcactttggtattgaagtggcggcctcagcataatatgaatgtgaagttagca

SEQ ID NO: 8748 - DNA, 921 bp, Glycine max
  unsure (1)..(921): unsure at all n locations
  Clone ID: PAT_MRT3847_107909C.1
atacggctgcgagaagacgacagaaggggagagacagagtgtatctgtaactgaaacgcgctggaatcaaatcttagcaaatcctaaatcaaactcaaaggatcgaactttggtttgagatttcatcactgattgtgattctcttctcctacaaaacttggcacccgatctctctctataatcaaatatcattcaacaataatcctcatttgttattccctattttctagtgagaagagatattcatgagagatgttgagcatttgcatctggtgaaatccatttgaagattctggcgtgattttttagggtacttccgaaatcgctcttcgaattgaatcggaggatttaaaagaagtgtttttttttttgtttgcttttattttcttccttttgttgttgtttgtttgttgtcaacacaacatacaagagaaagttgttgatagatatagctttgtgaggggtttgcaagttggaaattgcagcatcatggaccagcttcctgttgaagtgattgggaacattctgtcacacttgagggctgcaagagatgtggtgatagcttctgcaacatgcaggaaatggcgactagcgtgctgcaagcaccttcatacactctccttcaactccaaagattggcccatttaccgggatttgacaactacccgccttgagattttgatcacacaaaccattttccagacctcagggttgcagtccctatccattttgatggaagatgtggatgaattctcccggctttaacctactgcttgtcttgtacaccagggaaactctcaagcaattgcattataatgtcaagactacgcctaatgttaacattcttgaaatatgtggcaggcacaagctggaaaatactggatctggctcataattncattgtggggggttgagccctat

SEQ ID NO: 8749 - DNA, 358 bp, Glycine max
  Clone ID: PAT_MRT3847_10790C.1
gcattttcttctttctttgttttcacaactgccctctgctttcaaacatagatacactcattctgcttcttcctctctccatcaaacatcaaacatcaaacatcaaacattttgggatcaacattagactctcatggcttcagggtctggaaaggacggtcctggcgtcccaaggaagcctaaatttaaaccaagagccccacctcgtcgagtgataaagcaagaagttaaagctgaagtggttgatgatgctgatgcagaacaggctgctaaggagaatctgctgaagcgtttcaatgagagggagagtgccatgaaagcaaagtacaagggtgagaaaaaagtgtagcttcacaaa

SEQ ID NO: 8750 - DNA, 176 bp, Glycine max
  Clone ID: PAT_MRT3847_107910C.1
ttgtccagtccatattcatgtatcatgtatagccatcatgatactataaatcgatccacaacacgcagagagtccagtttgtgcatggatctctaacgcgaataacagtgtaacatttgagtgacactataaatctttgttttacgcttgttggttaattcccaaaaggaccccgc

SEQ ID NO: 8751 - DNA, 264 bp, Glycine max
  unsure (1)..(264): unsure at all n locations
  Clone ID: PAT_MRT3847_107911C.1
tanccctcagactccgtttcactctgagaggnagtgctgcagancacacncccaaaacagtgngaggnncaggtgtgtgaggnntagagtgcganttggnagcagacncgtttgcnagggctgnnncnttgcnnatttaacaccagagnngccgtctgtgatttctcttcttttatctttttgtttgcgtcggaagacgncacacacccttcatctgcgaactnagtttgtgatcattgngnanttncagaanggantgnctct

SEQ ID NO: 8752 - DNA, 330 bp, Glycine max
  Clone ID: PAT_MRT3847_107912C.1
ttgttcgctggcgaatccggtagcggcaaaaggggtcattttcctcagtttgtggtgtaagctgcggatatagtaaccactgattaacgtaggaagatgatgattgcgagcactcagactcgtacagtggctgaaatgcctgtctccaggctctgtggctgaggagatggatgtgagtgttggagaagaggtcggctacaagataaggtttgcagatagcacttacgccctgacaggtttacagtatctgaatgacggcatgcttctgagagaggcaataccggaccccatttctgagggttccacagtaatcatagccgatgatggacc

SEQ ID NO: 8753 - DNA, 378 bp, Glycine max
  Clone ID: PAT_MRT3847_107913C.1
cccggggggggggttttgtttttagtttctttcttttggtattctgggggacgacaaccgacggcgggagggttttgttttccttcggaatgacacgcaaaaatatgcacattcagccgaccgcccctgagttgtgtccctttgttcaaccaccagaccacagccggccgaaccagccctgccatcagcataatgaaaagggtgtttgatgatgtcccattgttgaaccgccacgccaatctaatgtccgaggaaggaaacccgaaggtgatggatgaccacaaaacacccgagaacccggggccgctgcccctactgccggaagtcggggtccggagcaactgccgcgcgggctttggctaccgcaaccgtgtgggg

SEQ ID NO: 8754 - DNA, 661 bp, Glycine max
  unsure (1)..(661): unsure at all n locations
  Clone ID: PAT_MRT3847_107914C.1
aatgaaagngcancnttgagttgagaacattttcccattcaaagcccaatcaccaatgggtcattcatttaaagcccacgattcaatatcaacccaatggagaaaattgaaagaaatgcagattacaccaaagacctgaacaggaaaacaagagaatccgagggacaaaacttagatacataaccaatagacaatgctgatattattctctaattaaaacagatattttacctcgataattgttactttgataatcgacgatctcgcaaagatttatgacattaattcattccccctgttaattgttacttcacccccttgttaatcgttactttgatgattattatcgagataaaatatcaatttaaattggaaaataacatcatcaatgctacattattgcatctaggttttttctttttgtacatttggaaatgtaatatgagagcactaagcactgccacttaactattactgggggaatgtgagtgttgctcttcttctcgctgttgttgttgttctttgatctcttgagggggttcctccggtggcgattcctcgccggagttgtgttccggcggtggcggaggacgtggtcgtggcggcggaggggcgattctgccgtcgacgcaggaggagcatttggtttcgacccaggttt

SEQ ID NO: 8755 - DNA, 1457 bp, Glycine max
  unsure (1)..(1457): unsure at all n locations
  Clone ID: PAT_MRT3847_107915C.1
tttttttttttttttttttttttaaataaaaacaattggggaatttttattaccaggacaataactaaccaagtatccgcccgcacaagtcatattgtataaaccgtttctacactcaacacatgcttacactctcgtcctcccccttccttttttgctggttcagtgtatacatatatcattacaatttccacaacaaagagataatctaacgtttaatcataatctaagaatgctataacatacaaactaatcattctttcctcgatattgtataacccacaattcattcggataagaaatctcttctatttgtatttagaggatgcgcagctgcagcaattttctcccgcaggttgaatttctttgcaattagtggccggacatcatcaacaccaaccaagctctccaagaacggaagtaacaaaagcaattcttgatctgaacgatcatcaaaccaactctcgattggtattccattatccacttggaatccaaatgcctgtggggaattgtcaattattataacatgtgccaaatcacgaccaagcactggtaaatctttgaggtaattcccctccacataaacacaggactcacggtatacacggtggcgaaatatcttccgctttggatcaagcacatttagaagttgctcggcataaatactttgactagcagtaaatataataatctcaaaaagaccagaaactctctcaaggaaatctttgaggtgagggcggcagcgtacatagacagtgcgctcctcactattgaaattaacaggaaaagtgaagtctacatcctcacaaggttccagggtagaatgcaccaaagtttcatcaaagtccaggacaagagtagtagaagggcaactacgaatcaagagctttgacaacaagttattttgagtaacagaaaagcaaaatgagactaaaataatagaagattggtacatcgaagaagaattaaagcacttttcactataaaaacatgtttctacctccaggctccagcattcattttcacacggtatcataattcaggacacaacaccaatttaattaaggcagcacagccatgagctagaacccacaaggtcacaaagcagcaacattaagattgcaccaaggctgatggttcacccccacataactaatttaatataggttctatgaaactatactagctgatgatgtgtgatgacattaaattaaagcatctaagtaatgaatgataagtggtatgagcagagcgagagcatagccatcatattaataaaatgtcaataagaaaaattagaaagatgaaactaaaaataactgcataacaataaattaatgacgaccccaaaaaaaatgagggganaaaggacacggaacagaggccatcaaaacagaaatcaacaggacactagcatcaagttctgttgtagcaaacaggccatccatatacct

SEQ ID NO: 8756 - DNA, 547 bp, Glycine max
  Clone ID: PAT_MRT3847_107916C.1
taatttgcatatatagagaaaataatttgttttaattcaattccttttttcctataagtgcttattaataaatttaaagttagtaactgataaaaaaagggagtaaatgctgaaaagtctttctaaaagaagatttttttattaaatactaaaattacgttatttataattatttttatatttatttttatcatctttatgattttttttaattttttaatcaatatcctaattattaagatccttcaaagtttaatgatcatgtaaacaaaaaaaaattacacaattaatcaatcaaaaatcataattaatataattttttaaactttctgtataaaatactttagggtgcaaagttactttacacggtaaaggcttaagcctattctgttgtaagcatttctaaaacaaactctttatggtctcctaataacgtaaggtttttagtataatgaatcgatggcataggaaagtgatgaaaataaaggaaaagggggttgaatttttatgttttaccaacgaagtctgtggcaagtcttccattgct

SEQ ID NO: 8757 - DNA, 489 bp, Glycine max
  Clone ID: PAT_MRT3847_107917C.1
ggaaaaaattaaataatttttggggaataccggggcattgactgcccccatagactttgttcataagggatcccaacctagcaatagcatggttaacattaggcaaaggccacacccagcttttttgttgcttttttaaataaaaaaaaacccttttacacaataataatatctcaaaaatattatttgtctattcatatggaattggcagccacaatcgaccctttaaaaaataaacgcacaatcttttaaaaatctttttatctggcttttgcaaggccgccttaacctttgcatccacagaaaacgcttcctgatattccaaaacatttatggtaaggagtaaccattaatttcattcgaaaaaccaaaaaaaacaagcttaatgcaagacaaggaaaatgacctggaccaaatttcgctgaataatacggccaataaaaaacaagaaaaggtcataggggaattccggggggccttggatgccaa

SEQ ID NO: 8758 - DNA, 405 bp, Glycine max
  Clone ID: PAT_MRT3847_107918C.1
tttcttcgaccaacgtaaacatttttggcaaacgcttccccagatgctcgtctttcataaatccaaaaatttcacctctgactatgaaatacaaatgcccccaactgcccctgttcatcatttactccgatcccgaaggccaccatccataggaccagcaatcctggggcgttatccactgctatcggctcccgagggtaggctggttttgacccctctaattctttaaaagcaaaagcactgcaggaacaacccgcccagttaaggccagaaccgcatctcggcaaaaaggaccaagccaacccgtgcaacacccgtaggcggcccgatgacccaaccccaaggtccaactacaatcctttttaactgcaccaacttaaatatcccctattggagctgaaatta

SEQ ID NO: 8759 - DNA, 138 bp, Glycine max
  Clone ID: PAT_MRT3847_107919C.1
gaagatgcgagtgccactgaatggaacatgaccatatatatggatacccggaacattatcgacttcactataatctataaaggcctcagaccctctatgtgaatttattcgaaatagcgtaaccatcgaaaaggtata

SEQ ID NO: 8760 - DNA, 1916 bp, Glycine max
  Clone ID: PAT_MRT3847_10791C.1
ccacgcgtccgcgttagtggccaaaacccctcttgcgaagataggccaggaagtaaggaagcgtacgtaattccactcacactcggtttagcgaagcgaggaaagccccaatttgcttcattatcagcaaaacgaaaaagtgcaatgggtgcagtttacttttctcaatcatgttacaaacctaggcaaattttcaatttggagagagaaagcactttggtgggaagatgtcctgttgttcagattagatgccggagggttgtgagtgcgtgtcttaacgtggatgttgatgcacctaatacagggaatacaacatcggagaagaagaaaactaaggatgtgatcgagatggaagggatgtatttggttgggacatatgcaagaacaccagtggtacttgagaggggggaaggttgtaagttgtatgatgttgaagggaatgaatatttagatttgagtgctgggattgctgtcaatgcactaggccatggggatgcagactggttgaaagctgttgttgagcaagccggcacccttactcataccagcaatatattccacacaattcctcaggtagaacttgcaaagcgtcttgtggcttcttcttttgctgatcgtgtattctttgcaaattctggaactgaggcaaatgaagcagctatcaaatttgcaagaaagtatcagaggcacacaacttctaacgggaaagttccagcaacagagttcatagcttttagtaactgcttccatggaagaaccctgggtgcacttgctttgactagtaaagtgcaatacagaatgccttttgaacctgttatgcctggagtgacctttttagagtatggaaatgctcaggctgcagttgaattaattaagcagggcaagattgctgcagtttttgttgagcccattcaaggagaaggtggaatttacagtgccacaaaagaatttctacagtctctacgtagtgcttgtgatgaaactggggcacttcttgtttttgatgaggttcaatgtggtttaggtagatcagggtttctttgggcccatgaggcatatggtgtcttcccggatatgatgacccttgcgaagcctcttgctggaggcctacctattggagcactcttagtgactgagagagttgcttctgctataaattatggtgatcatggaagcacttttgctggaagccctctagtttgtagtgctgctcttgctgttttggataaaatatcaaaacctgatttcctgtcatctgtatctaagaaaggcctctacttcaaagaactacttagggaaaagttaggagaaaaccggcatgtgaaagaaattcgtggtgttgggctaatcataggaatagatttagatgtacctgcatcacccctcgtagatgcatgccggagttctggcctcctagtgttaactgctggaaaaggaaatgttgtcaggctagtcccgccattgatcataacagagaaggagctagagcaagcggctggcattttgtgccaaactttaccagttcttgataactaggagtgtaggagaaagagtattggccttactttgctagcgaaatagaacatatttggtggtgtattgttgagtagctgagtcacagatggtgttgcctaacttaccagattctgtggataaaataaggcttctaataatatagcagctaaggaatcatcaatatcatcacctaagtcacatgaattcccagtagggttatatattatattgaacttgtgtcttaccctctagctaggcatataactatagtatgacttcaaatatcttgagaggttctaggggaatggataagaccagttcaaaatgtcttaccgaacaataatatcaaaatgaaaactctaactgaaagagaccgaataataaatatgaaaacttcagtt

SEQ ID NO: 8761 - DNA, 610 bp, Glycine max
  Clone ID: PAT_MRT3847_107920C.1
gcattccaacattggcaagaatttctctccatctatcttaactgtaaatgatacgtcctcaggatatggtacatggccatcatctaataatacaaatggtttagtgagacccaatagtagtgttgaaagggtgggtgttcagaataacaacatgctgatggatatattagagcaccaacaaagccagcagcaccagcaaaagcaacagctgcagcagcagtcactgatacatgatcaaagttgttcaatcaatgttcaaccatcttgcatggggggtccctctcaatcctctgacactttccaggcagtaaatagtcctgcttctgtcaaccaggatttcagttttgccaggaatgccattattgattatagtctattgtcacaaaaatcaaagaattcatttagtgcatctcaatttcctggtggggacacaaaagctcgaggtgttctctatgggtattctacaccctccacttgttcaacaagctccagcaatggcaatagacaacagcttcaaaactccactttaacatttggtgctgcaagacctttgcctagtcttttgcccatgtctgacagaaaagatccctatggtttaaatcaggtgatt

SEQ ID NO: 8762 - DNA, 318 bp, Glycine max
  Clone ID: PAT_MRT3847_107921C.1
cttggcaatcaaaaattacaacacttgatgacaagaagttcttcttaccaaaacaaaagataaaacgttctattccccaaaaaaagtataaagtttttgggtgaattgttgagaaacgaatgttcccaatgcaatttttgcatcctctagaatataatggcgcttgcgcatccgtggagctttgtgccaaattgtagtttgctaaaccttgggggtattaacttatgaaggtctttattactgagtgggcagggcagctaatttgaagtagagcccgttttcccctaattattcacatggatataaagttaaataggt

SEQ ID NO: 8763 - DNA, 223 bp, Glycine max
  Clone ID: PAT_MRT3847_107922C.1
aaagtctctcgatacacccgatatgaaccctcattttgattcgattgtgacgtggcagatgacgaatctgaagtccatggagaaggttgagaaagatgtgaggtatactgacatttctccattggatggtcaaccttgtgctgatcatgatatagttagtggtgagggagctcagcctccataatacactctcatcatcatggaggtggttgctcctttatcc

SEQ ID NO: 8764 - DNA, 427 bp, Glycine max
  Clone ID: PAT_MRT3847_107923C.1
cttttcttacggttcacaccgttacgactacagttcccagatcgtacagcgcggtatgtctatcttaaaacgcgtaaacaacgggcaagttatggactccaaaccaggccccgaatccggagccggaagagtgaattctcaaagcgggagaaaaggcaaatgatgtgtggtggaatgaaccacgatggaagggcatcaagcgcccgcattctgctcacgaggtacactccactcggtgaactgtgaatcaggaatacccaagaaccaccatggcaaaaaagctattcggacttttaaaagaacggtccgagcaaggacagtcgggacatacaatgggagccattgatcctgtgcaggtcactcaacagggtgcgaatcaagaagttctttatgttagcagatgggcttgttcgagtgtgcttacgag

SEQ ID NO: 8765 - DNA, 1182 bp, Glycine max
  unsure (1)..(1182): unsure at all n locations
  Clone ID: PAT_MRT3847_107924C.1
atcttttacatcattatttatttattttccttgcctgtcagggaaaataaataaataatgatgtaaaagatgtgcaccatacgtatatacgacattatttatttattttccctgacagaataagtttggtatttcacatcatctcgaacgaacgggggacctctcttctttcggattcgccaagctgttgtttgtgattgtttcagttcattattaaactctcgctctataaatacacttccaaacctctttcgagatctgaaaaacactcccatggaccgtcgtaaagagaaaaatgctccatggttatcggtgccgcaatttggggactgggatcagaagggccaagtgccggactactcacttgatttctcaaagatccgggaaactaggaagcagaacaagacaaatatttccagggcaagccttggcaatgaagaagaattcatggattcaacaacctccagcagcgtcaacactgcccacagcagtgagcaccctcaaccccactaccatcaaacccactctccaactgcaaggaagagcttcctcagctacttcaattgttgtgtgaaagcctaatattcaagggcaagtgcaatctttctcttgttttctgaagattctggataggaacagcttgcttgtctgttcgtttggtgataaatacttattagctattgatcttaatttaaaaacaaaccttttgttttcagtcctaatctacctttggctatgatcctctctgttacttcttatggtagctaaaaatttggttaatcaaactacaggtaaagatggtaaccattaaacggcgctcatgagttttgaccaaaaaacttgtaaaaacacgataaatattttccattttatcactcttacaatcttattcttaaattaaatttcgtctgacacttgctttgaaaatccttatttttttaatattaagcaagtttggaacctgtagctcaatattaaagagtacataagtattcaaaaattgtggttggtaatattttcatnnttttcttctacaatttcatcagtaattcgcttccagtttaatagaagagtncncggccgtaaccaaagaggaagtgtatttagagttagacatttgtgactcattggttttatnttttctgaaccttggtagcataaccaatcctacaatttgctagg

SEQ ID NO: 8766 - DNA, 695 bp, Glycine max
  unsure (1)..(695): unsure at all n locations
  Clone ID: PAT_MRT3847_107925C.1
tatttgaacatttaacatgtcaagcttaaaaagtttatgaacagctcaacccatttacagccttattatcttcattccttacaaatatgaaggtgaattgcccttacaaaactctcaaaaaatatttttagcatcatttagttctacaatctttaacaacgacagcaaccaagccttttcaagttttcatattaggatcggctacatgaattaaatgacgtcataatattctattgagtcatgttaatatacaaaccattgacctctaaatccttattgagtttgcctatttttttctcggactcttctacctctaacacaatagggttaccctccatctgatctactttcgttactagggattctacaggtcttttctacacagactcaaaccaaaaaaagaatttagaaatgaaatgctttcaaagatataaaccaatataaccaactcatcctccactgataatacttcgagctagtcttgttagtaaatgctccatctcttgagatatatcatgtagcnnnctccttttctaagggtatttatttttttaatcttttactataattgatggtattagtttactgagaaaactggtaacttctaagtgttacttttgtccttcaaactcagaaattgatttccttgacttcttggaccaacactttcaacaaatttagcaagcacaaaatag

SEQ ID NO: 8767 - DNA, 295 bp, Glycine max
  unsure (1)..(295): unsure at all n locations
  Clone ID: PAT_MRT3847_107926C.1
cttacctgctgtgtgtctcctgactaacgagggcattattccacagattagtaaaattgcaagtaaatggggaagaggacacttaacatccatctctggcacgggaatccaagagatgaggaggaggggtgttggaagggatgagaggaggagaaaagaaaaattttgttttatcggaggaggcaaggaccanagccgaggcggggttcaaggcccacccaaagagcaggggggaagtgacaggagaggcacggggagctaaaaagaatcagaagaggaaggagaagtagaagaa

SEQ ID NO: 8768 - DNA, 561 bp, Glycine max
  Clone ID: PAT_MRT3847_107927C.1
ctaaatttattctaaaaagaatagtatcttttgcgctcctaatttgcatttttctcatcgttttaagccgttttaaatctgagcaattttgagtttgggcccttaaaaacttctttattttttatgggacaagtaaaggaagcgatacccacccaaaatggaaatgtcgacttcatttcttgactctttgcctggattttctgttgtagattttaatggaagtcatgagaaaagaacttgtgttcctggttagtgtaaaaaatttaaaaagttgtgattcgcttttctttaggtgaacaattattttcagtctcaagtggatatcatgcgggaaatggctgttatgaatttcatggttcaatatgtgcttctcttgcaggatttttgcacgtttattcacttagagattcgcaaaacaccgagacaaacattgtcgaagtgagacgcaacattgacgagagatgcaatgtgctgccgtcacagggaaagatagtcacttgcacgggtgaatctgaaattctaatatacatagttctaatttcgattttgattactagcata

SEQ ID NO: 8769 - DNA, 399 bp, Glycine max
  Clone ID: PAT_MRT3847_107928C.1
gggccggtattaacccccgcgcgcgtccatctgcctggttgtcggccccccttttttccggggtgtgtgggtgctggtgtcctgtgctgtctctgggcccttgccatccgttggaacttcatgcttttctggaatgacctgcacttgtttggctgattatctttgcgggattgcggggtccgggtgcattttttttttcccctcttcgctgtgctgttttgggggagtaatgttttgactcctattcttattcccctgctatgcggcggggagcacttcgagatcctcatactttggacggtttccgctaccttcgttactcgtctttcttgggcgctcgccggttttgcctttgcctgtggaatcttggtcttttgcccccctttcccggttgcctgg

SEQ ID NO: 8770 - DNA, 308 bp, Glycine max
  Clone ID: PAT_MRT3847_107929C.1
ggtagactctaaaaactctttccattaccacaattttatgtttaccacctgccacccaactcgtccggggattattataaacttagtccccttaatcatactcgcttaccctaatcatctctattcgctacaactttcttcctcataaacctcatataacatcttatttataagtgataggtcatgacaaaagatgaactcactatacgcacttcaatgtgtaagtaaacaacaacaccatcatttcatacttactggcactaaaaaaaaaatgacgctccttgtgaaagcacttaataatgatcttt

SEQ ID NO: 8771 - DNA, 1084 bp, Glycine max
  Clone ID: PAT_MRT3847_10792C.1
gatagctgcagtttttgtagaacccattcaaggagaaggtggaatttacagtgccacaaaagaatttctacagtctctgcatagtgcttgtgatgaagctggggcacttctcgtttttgatgaggttcaatgtggtttaggtagatcagggtttctttgggcccatgaggcatttggtgtcttcccggatatgatgacccttgcaaagcctcttgctggaggcctacctattggagcagtcctagtgactgagagagttgcttcttctataaattatggtgaccatggaagcacttttgctggaaaccctcttgtttgtagtgctgcccttgctgtttttgataaaatatcaaaacctgatttcctgtcgtctgtatctaagaaaggcctctacttcaaagaattactcaagcagaagttaggaggaaaccaacatgtgaaagaaattcgtggtgttgggctaatcataggaatagatttagatgtacctgcctcaccctttgtcgatgcatgccgaaattctggccttttagtattaactgctggaaaaggaaatgttgtcaggcttgtcccaccattgatcataacagagaaagagctcgagctagcggccgacattttgtgcaaaactttaccagttcttgataactaggagtgtaagagaaagaggtttggctttacaagcaaaatagaaaacttaattggttgtgtattgttgagtagcttttagatgccaaaacttcatggtttccctttcatttaagatgtctcgatggtaagaatatttcagaaatattgtagcatttctttgattatgcgtcccggatcagatggtttacatggtctattctctttctgcaagagatttatttgggtattttttgtcatataaagtgtaataataactacaaggtcttctgagttcccctcataaccgtagataaactatcttcttttggtagatggctgttgttcagattcttctttctccgttggaaaaacttctaaaaaagtctacctagttttgtggtacattgacttgttttgaattttcttatttgaaatgaacttgtgttgtgttgct

SEQ ID NO: 8772 - DNA, 445 bp, Glycine max
  Clone ID: PAT_MRT3847_107930C.1
ccccggactgacccactcgtaccgaccgttgcgagaagacaccaaacggatattacataatctttacaacataggatcatatctgataatgtgcgagcttctcatattcgaatagccttcttatgtctacattctatcacagaaatccgatacatgtatcctcatcatgattcgttcaaatcattccttcagattattatttgtataaacaatggttagtactctacgttcatgaacttatcaatacattctactgcatctcagttaatacctaatatcatctcaataccttactctctaagatctctatctctccttctataccttaaaaccatactttcaacactagtgatctgctatgtatagacacactgaaagaatacacgttcttgtcatgttcaagccaaagaactcactctcctaatgctagatgtcaattcatact

SEQ ID NO: 8773 - DNA, 296 bp, Glycine max
  unsure (1)..(296): unsure at all n locations
  Clone ID: PAT_MRT3847_107931C.1
ggttgcgngcncgagtacgcncccncggnnngccggcnggcgancnngtctgnantgcncggcngnggtggngtcttangnncaccannnnatncnanntcncggnnnagcaagcngcaccaannnnannncntnngnaanagcnnttgnnaaagtcnggcnnantganannnannancgangntcgctncacggatnaccnnnggccacaccnncgnngnncanncnaagngnnaccatggncacannnncancctacnncnatnnngnnancgannnngnngnggggtagcncc

SEQ ID NO: 8774 - DNA, 157 bp, Glycine max
  unsure (1)..(157): unsure at all n locations
  Clone ID: PAT_MRT3847_107932C.1
gcagcaacaccanaaacnacnaaggcaatatgggcanggctccttgctgcgacaaagcaaacgtgcagaaaggtccatggtccancaagaagaagtgctaagctcnaatcctacatagnaaagcatggcncnggtggtaactggantgnttgcctca

SEQ ID NO: 8775 - DNA, 601 bp, Glycine max
  unsure (1)..(601): unsure at all n locations
  Clone ID: PAT_MRT3847_107933C.1
tnnnattctttgatgtaaaaatgctgatgaattccagtcttcgagttacattttttattcctttcaaacttcatgattcagcagtgtgatgctggtgatgcttcctttgaaaaggtagaagatcggctatacataagttcgtaatggaagatcagcttatgggtatctttggctgactttggatgccattgtttaattttggaagtgtcgcacagttctactattggtatctctgcagcctactgctcgcatagacaaatagcacatgagcaaaatatttcatttaaagtggttattaaaacacggttgagctaatgagtcagtttattatgatggatgagctgcttcattccccagggaggagctatgcatctttactgttgcagcagtggaacaattttgaatatcagctaaggaaaaggaccagcatgatgagaaaccgtgctgcataggagaggatgaagctgtacttgaactgcatgctcaattttggggatgtagtggtgggagaggtggaggtgaccnnggatttgagcttgannntgnntncnnnctcgcacagcnnctgttactgtnntagttgatggcaanngnnagnntt

SEQ ID NO: 8776 - DNA, 1004 bp, Glycine max
  Clone ID: PAT_MRT3847_107934C.1
ttcagctgctaggccccttgtttatgtggctgctggttgcaatgaagtttctctttggaatgcagagaatgcgagctgccaccaggtcctaaggacggccaattatgacagcgatgccgaaatgtctgatctgccctgggccttggccagaccttctagtaagccaacttcccaatcagatctaagacgaaatggtaatcgtaagtatggagttgatgagctaaatgaacctcctcctcgtcttcctggtattcgttcattacttcccttgcctgggggtgatttattgactggaggtactgatttaaagatacgtcgatgggatcattacagtcctgacagaagttactgtatttgtggaccaaacttaaaaggaataggaaatgatgatttttatgaaacaaaatctagttttggggtgcaagttgtacaggagaccaaaagacgtcctcttacaatcaagctgacagcaaaggcaattcttgcagctgctgccactgattctgctggttgccatagggattctattgtttctttggcttctatcaagttaaaccagagacttttactttcaagtggtagagatggggcaatcaaggtttggaagtaaacttctatagttcatttttgggtatttttgtacataattagtgtcaaatcctagtattgttaaaattgtacataaattaagttataggtactaacccaccaggtagtcattagagccccctccctatttctctctgatacttttccatttttgtgtacacctgatctgtaccagcaggtattatgaacaggggaattattggtagtttcgttgacatgatctttttaatttagcccttgagtgttaacggaacaagcagttggtgagattatgtctgtatagtgtatacttaacaagcagatttcgtctaacaattgaatacgtttatgtgatattgataatattatgtaccaacgttgtccacaagataaaaacaaataaaggcccctaaggc

SEQ ID NO: 8777 - DNA, 349 bp, Glycine max
  Clone ID: PAT_MRT3847_107935C.1
aaagaaaaggaaaacaaacccatgcttttatggaaattagcagttacagaaactttcccattttacaccatggggacaattttacaagaagccccctgggggacccaaaataaatcactttatgaagtaattaacttggatactcttgggcaaagaaaaactcatgaacccactttccgattttttatttcctttaccaccccaagaaagtctaaaaagtataccctccttccctccaaaggtaaccgtttttaaactgctttgaaaaacgttttttagccatttttcaaacaagctggtggtaaaataaccacacccaacacccacatcctgaatcaccctcttattt

SEQ ID NO: 8778 - DNA, 378 bp, Glycine max
  Clone ID: PAT_MRT3847_107936C.1
atttcatgcttctattccaacaaccttattttttttcctacctatgatactctcctttggagtgtgttataaactaggggggggcgggattatttaatgctaaacacgttccaatcacaattttcaaaaatttcaacttaatttccctaattatgatgccccccttacccttttagatatctaagatctacctttattttcaaattatctaaatttaattatcataatttcattattatcaccaaatttttgattacttctattatcttaacaatctcatcccttacccaattttatttatattacacccctttaaatacaaaatcacaatacttaataacactttaactctcttatctatcatcctttctttaaatt

SEQ ID NO: 8779 - DNA, 498 bp, Glycine max
  Clone ID: PAT_MRT3847_107937C.1
tgttttttttattttttttttttttttttttttttttttttttaaaaaaaaggaaaacaaacccctgcttttatggaaattagcagttacagaaactatcccattttacaccatggggacaattttacaaaaaagccccctgaggtacccaaagggggggcactctatgaagtaattaacttggatactcttgggcaaaaaaaaactcatgaacccactatccgattttttatctcctttacccccccaaaaaagtctaaaaagtatcccctccttccctccaaaggtaaccgtttttaaactggtttgaaaaacgtttttcaaccttttttaaaacaagctggtgggaaaaaaaccacacccaacacccacattcttaataacccttttatttacacttaaattctccaaacattttttcccataaaccttttaaaaagactttttgaacttacacaaaaacaactttgccatttttttgtccttaaatggatttgg

SEQ ID NO: 8780 - DNA, 485 bp, Glycine max
  unsure (1)..(485): unsure at all n locations
  Clone ID: PAT_MRT3847_107938C.1
cgtagctggaatccttatggaggggcggncctttttttttatanttttcttttaaaaatggacaagtacatgcaattttaattaaaatgatatatttattacataacaaaatattttatctacttataatacacataaatataaaatattatatgtgaataaatatttaaatttttggtggaaacaaaattatattagcttttttttatattttattttcaccaaaaatattcttcaatcgacagttaagtctaattcttttttaaccacaaagatcacaacggtaagttttatctctttcaagaaattttatactccataatgtttgggttaaggttaaacttggaaatcgaatgtgttttgaaagagccaataagatttgttgggaaaaaaaaatcttctcacattgaaatttttttggggtcacctttcgaccatgggtgatgggcgcgcacctcaaaataaccccaggacgtacatttgca

SEQ ID NO: 8781 - DNA, 210 bp, Glycine max
  Clone ID: PAT_MRT3847_107939C.1
ggaattccggttgaggagggatggctaaaggaccaccattggccaacccattttaacccaaattcattccattccaaggatgggggtttgacctttttaaaatggcccggattcaggaccctaaacacacccggattccttggttttttccttaaaccgggaacaacattcctggagttggcccttttaagtttcctttggtcaaccctt

SEQ ID NO: 8782 - DNA, 860 bp, Glycine max
  unsure (1)..(860): unsure at all n locations
  Clone ID: PAT_MRT3847_10793C.1
ctaattttaagcattcccttctcttttccattgcagctagcaaagaagcgaagacccctttttctggttattaacagagtcataaaaaaccaaagttttctattctctgtagctcacatggtgggctaagaatatctgactttggggtggaaagtatggttggcaaggagagtttgagaactgaggtcttgaacttgagctttgagaagcttatgatggttgaatgtggtggaaatagtgggaaaggagtgaacattaaagctggtgtgatcacggagtggaaggatattccagttgagcttttgatgcaaattttgtcacttgtggatgatcaaacggttatcatagcttctgaagtgtgtcgtgggtggagagaggcaatttgctttggccttactcggttatcactctcatggtgtagcaagaacatgaataatttggtcctatccctagctcctaaattcacaaaattacagactttaatccttcgtcaagacaagcctcaactagaggacaatgctgttgaaactatttcaaatttttgtcatgacctccaaatcttggacctcagcaaaagtttcaagcttaccgatcattcgttgtatgccatagcccttggttgtcaggatcttacaaaactgaacatcagtggttgttcagcctttagtgacaatgctctggcttacctggccagtttttgtagaaagctgaaagttttgaatctctgtggatgtgttaaagctgcatctgatactgcgttacaggcaattgggcattactgcaatcagttacagttttttgaaccttggatggtgtgaaaatgtcagcgatgntggagtgatgagtttagcatatggctg

SEQ ID NO: 8783 - DNA, 234 bp, Glycine max
  Clone ID: PAT_MRT3847_107940C.1
atcaaaaatcccatttcttgttcctcttcactttactgatttttcaaggtctatttctctctttttattattcttttttttcttgttatgtgcccatctttgttttttctggtgaagaattttttggttttgagaaaaataaattacttgggagttttgtggtatggtattgaatctataacaagagggcttcttgtgttaggtaaggcaggcagacttgaattgctgatggtt

SEQ ID NO: 8784 - DNA, 456 bp, Glycine max
  Clone ID: PAT_MRT3847_107941C.1
agcacaccgaaaactttccattcccaaaagagcatgggtaaggagattataaatttatctacttaaccactaaaagaaggctattcctggtctcatactatggataaaaacctctttgtgaagattgctaatggctcggcactctatactcgctattcttggggagccaactgtctgaactcacggcgtcaaaagattaatgttaaacaggacatggggggaaaaaaaccaactcactttgctaataactaatactttacactattgtattgccttactgataacgcgcaccagttacctgatcacaaaaacaaaagctgtttttgcattttcagccataaatactcttgtttcagataaacagatcactgcgcttgaaacaattatgaatgctaccacctctgaaagggaaaacactgatatccaggggttctgtgtgcactttacattgcataa

SEQ ID NO: 8785 - DNA, 462 bp, Glycine max
  Clone ID: PAT_MRT3847_107942C.1
aggtcatgaattgttgggagttctgaattaagatggtcacacagaaacaccttttttttaacatatatttggtatagtttgtgtttgctaaatttcgtagttgtccttatattctagggctgaaatctgattgctagattttatatggtattattgttagcttctgtgagaatgctaggttttgaaagggtagttattattacagtattactattactatttactagtattagagttcttgtaagacttgtaagataactacatgtaacatgtatgtatgcacgagttaacaaaatggtgccatgttttatgactaaatctcctcccagaagatttaagcaattgaaatttaaagattcaaagtaccaaattattgtgctgaacgtttttaccaactctacctataagggttgaaacaaggtttttttttcaattatttattattcaattccttttatcccc

SEQ ID NO: 8786 - DNA, 145 bp, Glycine max
  Clone ID: PAT_MRT3847_107943C.1
ctctctctcgctccaataagtttggtaggtgaaatcattatataaataacccactctcattaaacgcaaaaaaggcccaaggagtgactcaccataaatacataaaaaccataatatcatagcatagccctcaaaaagggaccta

SEQ ID NO: 8787 - DNA, 218 bp, Glycine max
  Clone ID: PAT_MRT3847_107944C.1
gaagagaaactcttttttttattaaaaaagtttaagtacacggaacctatatctatcatactgtacttggatcgaaggctcaatacctatcaattaatgtttgctataaatagaaacattcttgattcataatatcacctgcaatcacctacgacctttcaaaaatgaattgaaagaattgctctttatatcacccccctttccatttgaattgtatg

SEQ ID NO: 8788 - DNA, 485 bp, Glycine max
  Clone ID: PAT_MRT3847_107945C.1
tacggcgagaagacgacagaagggtacggctgcgagaagacgacagaagggtacggctgcgagaagacgacagaagggtacggctgcgagaagacgacagaagggcctcttgcatctgttttagcatcttgatataggtcttatggagacttttcattttctctagctgcggggtatgctctgtttattgttgtatcattttgaatttaatataatttacatttttctcaaaaagaaaaacagatagagaattataaatctttatcttctttagtcattggctattctgcatctctttctatgagttctacggatatgaaaaggacaattagggttaaagtacacatctgttcaaactcctatggagttatatattcattcttcttctttttttgttattttatgtttttctatgtctagctaaatacttctttgttagggttaggttaatttctatgtatgtattctataaatatttaaattgg

SEQ ID NO: 8789 - DNA, 243 bp, Glycine max
  Clone ID: PAT_MRT3847_107946C.1
atcagcccaataaatttataggaccttcataaaaaaacccccctaataaaaaatgggttttgggggttaaaaaaataagcccgcattaaacccccatcaaaccccacctaaaaagggccattttggccatttttttttacctaacccgaataaaaaaaaaggcaaacataggttattactcagggaggatgggccttttttataaaaggtataactaggaaggggagggaggggcttcaaccc

SEQ ID NO: 8790 - DNA, 274 bp, Glycine max
  Clone ID: PAT_MRT3847_107947C.1
ataaattccactacctcaacttactataaggctaactttgagcaaatttttaaaaatctctctgcctacataaacaatgttgtctacaacccatacaatattccatttccacccacctctaattttctcattctctacactattaataggtccagcatacttgactagttcaacacacctactctccttattgctctttacctactctatataaccattagcccctcatacacaccactcaaactctcatttcacaaactctacaacatttttg

SEQ ID NO: 8791 - DNA, 303 bp, Glycine max
  Clone ID: PAT_MRT3847_107948C.1
cagcaagcagttcatattctaatgaggggtccacagatgagcaaggtcttaattgttcttggagagcgataaagattgataggacatatgacaagggtcatgaaaacaggtatgttaagttcttggtttggtttgcaacgggagtgggaggacttgaacttctgtgcgcatttgtggtttggttttttctggtgagaacaacggagcaacaagattctggtgcagatgggcgggtctacgctctggccggttttagaaaattcagttattctgagctgaaacaagccaccaaagggtttagtc

SEQ ID NO: 8792 - DNA, 353 bp, Glycine max
  Clone ID: PAT_MRT3847_107949C.1
cctttgtttcctgggacgcttgggataaagtctccgctcctcatgcacaggatgtcagcggatcaaccttcgagtctgatctctttggagccgcatcacctgctccaggagaaatggctggatgagttgatcaatgcaatgcccaggaagattgtggcctggcttgctacaccgaatgatatcctgaatacaaagcgtgttcatgcttagaaaggtaacactatttggtacattgcctctagatgatgtacgaaacacctatcggttccatgtccagatctgaaaatttctcaatccaaaatggctgttcaccaatagcacacatggtagaaccttcatgcgtaacgaaccat

SEQ ID NO: 8793 - DNA, 297 bp, Glycine max
  Clone ID: PAT_MRT3847_10794C.1
gagttttggttgctccctttttttcggatattcatataaattgagtttggattttcatctcatcacaacttcttcaatcaacacgttgggctttaataagctcctttggattgtggatttatggtttcctatcatttcagcgctcgctagctgagatactgagatcgtgcatcgactagaatactatttactctggaatatgatggcatattaacccactcgaatgatctacatatcctctttaattatgaactcgaaatattatcttacgattgagttggttaacttagcattgcc

SEQ ID NO: 8794 - DNA, 634 bp, Glycine max
  Clone ID: PAT_MRT3847_107950C.1
gggaaatctgggatatttcgaatgtgatattgacaaactaatgttctaaaacggatacaaaaaaaatatagtagtagaagttacatggccattaaaaacaatgtcaaccctgtatcgaaagagaagttcttccatttccaatctcatacactcaaattcttgatagtgggaagcatagctgttataccaaggagaatgccatgcagctactaaccaaggggttacactacggtctacactttgcagatctttcttcagccaagcaaactgtgcaccagtgctattggaatcaacatatgctcccaacatgataaagtgtatgcccccagcatcaaaagagtagtagaagttacttttagagccactttcttcagcaggaactgcaaatcgtgtcaggtatgatttgaatgtgattccaccagcttgagggtctatctcatgattcccttcaataaccatcataggaatttctgagggcaaagggtccataaaccttccccacccatcccatgggggttgatatgtctctctaataggagcatctggaaattcacatgaataacatgaagcctcctttccaccagttgtaagatattgattcgcatatgtgtaatctccaccattaagaatcatt

SEQ ID NO: 8795 - DNA, 347 bp, Glycine max
  Clone ID: PAT_MRT3847_107951C.1
aattcggctcgagcgattagtgtcccaacgaacagcaagaatgtagaattttttaaaaagaagtggtctcggtattggacgctctaggagggatgcgagactaaatgcatctatgttctagttataaaagatggattgtctcagcaacctctaattactccgaacactttaagagagagttgctcaagattgcgccgatacctcatcatcttttgaggagatccgcaaatctatattatccaagcctggctgcttcgataaatgtcactgatgatctgataaaccttgctacgacagaataagttctgagcgtatttgtagatctgtattcctactagctctcccat

SEQ ID NO: 8796 - DNA, 176 bp, Glycine max
  Clone ID: PAT_MRT3847_107952C.1
gaaatcttaagacttccttttgcgctgatcaatcaaggtcttctcaggcaaatgatgttcgcaagcaaatcgatggcagcgctgttccagtacatacagaacgttagttatcgccgcggatacgtactcatcatgctggtgggagtatactttgttacaaacttgatccttgctgt

SEQ ID NO: 8797 - DNA, 301 bp, Glycine max
  Clone ID: PAT_MRT3847_107953C.1
atcctctagagcgggcgtctgtgacgctatcaaatccctgctctgcctttctggattcacagagattcgtgcggataaccttcctgctacttatcctgtgtgcgcggatctctcatcgctgaatttgagctatactcattttcacactcatcaactaacgtcacctatccatcactgtcataagcctgagatatcttttggtacttcattctatacgtgattaggggcttcacgctgtcgctttaacttgcaatgactttcgcgaacttccggtatttactgttgatgcaacgcacgagac

SEQ ID NO: 8798 - DNA, 367 bp, Glycine max
  Clone ID: PAT_MRT3847_107954C.1
aggtcgcgtctactgtgtcccttgccgtgctggttttgagacctcagctaccacctacattgccggtgctgagattatgttgcaatgcaagagcaaggttagcaacgaagttgtgtactcctagaaagggtactctgtctcatctggagctttctctatgttcgtggtcgaagatctcgctgatctaatatgcagtgcctatcttgttatcatccctcaccctctatgcttggatgtctccccaggccgcgacgaatccgtcgttattctcacccgctacttcggcattgcattcaatgattggttcgcctttgccatgggcgttatgtctcatgatgtcgcttttagcctgtgctgtagtctcatg

SEQ ID NO: 8799 - DNA, 294 bp, Glycine max
  Clone ID: PAT_MRT3847_107955C.1
atattatttattccatttatttcgcggctggtgtggggtacctgagtttttgactttaaagtccccttgatattgctccctcaaacatcgctaaaaggcgctttcgtcaatttctccccatctttcttctcttaaacttcacaattattgtcgtcactattacttactcaaagggaactctctagtctctagtacgtactcttatactcacagctactctatcactttcccctttatcttcttcttctgctcaatatagccactcatttttacggagctgagtcttttttaaga

SEQ ID NO: 8800 - DNA, 332 bp, Glycine max
  Clone ID: PAT_MRT3847_107956C.1
ccccttccttaacttcgaatttcggttcgggaaaaaatttaaaaaaaaaaaaaaaaaaaaaaagggcgggataaaatataaaaaaggggaataaaaaataaaattaaaacatggatgcataaaaaattaaaaatataaccgtgtcctgtaaaatattcgctctttttcatccatttacgatgtctatggtttccaattcatatcgcgttcacactttcgcacgactttctgcacatataccttaaaagctacaacattcttttgctcttcaatatgatagccaaaattccctatttttgtctttagtgaccttttttcaattgccattacct

SEQ ID NO: 8801 - DNA, 268 bp, Glycine max
  Clone ID: PAT_MRT3847_107957C.1
aacaaataaaaaatattcccttagctttttcaaccatcaagaccccctctgctattggccaattaggatccactggtgagactgctctcaaacacctcaatgagttcgtactgaataccgctagcaccggcaaatgacctactaacatgcgccacaccgtcaagagtgctcctcagagcatttcttatggtcctgaccgtcccaagaacttggctccattctctacatcaattccataatacctgacctcagaattctctggtgacta

SEQ ID NO: 8802 - DNA, 324 bp, Glycine max
  unsure (1)..(324): unsure at all n locations
  Clone ID: PAT_MRT3847_107958C.1
cgcacgcncgcnnacgtnngncgtantgcggctctagcnacatgcnatgnggtggtgngcgcgtgnncctcgtcgcnctcgtctcngtgngtggctgnctgntctgcggtnnggtcnctcagnggcgngtggtnnggcccgagngggtggacagttccggtnncntnngtagcgctcgtgnttnngcntcnttntncngngangntgtcnnccnggaccngtgngtgcgcntcttgtccggnttcggntngngganggntggnnnctngntggntagtggatccgnnnttgggttncgntcacctngnctgcnggctngggtgn

SEQ ID NO: 8803 - DNA, 2465 bp, Glycine max
  Clone ID: PAT_MRT3847_107959C.1
acggctgcgagaagacgacagaaggggaatcatacaataatttcttcatgatgttgtagttgcagacgggttttcgaagccttgatcgtggtacataaattttggaaaggtttatatgaaaatagagataggaaaattacttgagagaattcaataaagcaatgcatttatggtggtcaaatggtgtgagtgagtttgaagtaaggaaaggttgattgagtagtactcacttgagaaatttcaaattttattgtgcagcgtacgtccgctcttcctcacctaggaaaaaccgtttccaactttaccattttcccaccaaccctcctctctcttcctcaaaacaatcgttaatctcttctacattgtgaactctgatattctccaagtacacaacacaaacacacctcaatttatagcacccatttttcttttccccctcaaattcagctccattttgttacacgttcaaataataagccaagcagccaccatgatctcgtcaatgaaatgcacagcctcatctctcacatgttctgctttctcaaacagaaagattcccattgcaaggccacaacttgtcacattaccaaccattaacaacgttgaacaaaacatgggtctctctcagttgtgttcacagaaaccgctctacctttcatccactgagaacttggcattggtgaagagaaggagggagactgagtgccaggcctatgaagccgataggtcacggcctctggagattaacattgagctgccgggcgaagaggcggcgcagaggttcaagattgggctgtattttgctacatggtgggctttgaatgtggtgttcaacatttacaacaagaaggttttgaatgcttttccttacccatggctcacctccactttgtcccttgctgctggctccctcatgatgttagtctcctgggccaccagggttgctgaggtcccaaaagttaacttggacttctggaaggccttgtttcctgttgcggtggcacacacaattgggcatgttgctgcaactgtgagcatgtccaaggttgctgtttcattcactcacatcatcaagagtggagagccagctttcagtgttcttgtgtcaaggttcttgctcggagaagcattcccaatgccggtatatctgtcactgctgccaattattggtggttgtgcattagctgcagtgactgagctcaatttcaatatgattggctttatgggggctatgatatcaaatttggcattcgtcttccgcaatatattctcaaagaaagggatgaagggaatgtctgttagtggaatgaactactatgcttgtctttccataatgtcactactaattctcacaccttttgccattgctgttgagggccccaaggtttggattgcaggctggcaaacagctgtgtctcagattggtcccaattttgtatggtgggtagctgcccagagtgtcttctaccacttgtacaatcaagtctcatacatgtctcttgatcagatttctcccttaacattcagcattggaaacacaatgaagaggatttcggtcattgtctcttccatccttatctttcacacgcctgttcagcccatcaatgctcttggtgctgccattgcaattcttggcaccttcctctattcacaggctaaacagtaagttgataattttgaagctgttaagtaacacacgcgaacaatgactcatggctggagctcaaagtgtcactaatgaggactacggcattaattagctagttttgttgtcaataggaatttaagtttatttcttttgggccatagcaggagcatttctaatcacgtttcgatctgtgtaaattagctttagaagaatggaatgcactaagccgtacttgatctttaggatgtaggtatatcaattctcgaaaaaaaaaatcgttgtaaagtcatgtaaatcagtacttattattttattggtttgttacttattaaaaaaaaaaaaaaaaaaaaactattattaaaaaactaaacaattagtgatacatgaatacatgaaaaataatcatatatatagatagaacccaactgacaaatttccattgattgtgtgaacaggctaaacagtaagttgataattttgaagctgttaagtaacacacgcgaacaatgactcatggctggagctcaaagtgtcactaatgaggactacggcattaattagctagttttgttgtcaataggaatttaagtttatttcttttgggccatagcaggagcatttctaatcacgtttcgatctgtgtaaattagctttagaagaatggaatgcactaagccgtacttgatctttaggatgtaggtatatcaattctcgaaaaaaaaaatcgttgtaaagtcatgtaaatcagtacttattattttattggtttgttacttattattgtgcagactaacttgaaagctcaatattgattatt

SEQ ID NO: 8804 - DNA, 199 bp, Glycine max
  Clone ID: PAT_MRT3847_10795C.1
atggcacatcaggaaggactggcttttggagcaggagagcacgcaactgctgtggcgagtgcacatagcaaggctcaggctactggaatgcatgacgagctatcgaaatgatcataggcagatgacgaggtgccgtctgcagcaaagcaggaccaaggctggaggaagagactaagcataccaacccagaaaatgcaga

SEQ ID NO: 8805 - DNA, 381 bp, Glycine max
  Clone ID: PAT_MRT3847_107960C.1
aaaaaagaataaagcgtggaactttttaacattcccccccaaaaagggggcaccttaaacccaagggggtaatttcccccctaataataacccagcctccaggtcaaaaatttaatttccctaaacaaaatttgttaaaaatgaaacccttagcaaaaaatatagtaccggttccaggaaaacattttggggaccccttatcccctcctagaaaaatttttttgcctatcatcacaggtgaagcaggggtaatgcctttccccccccaaagatggaaaagagtaatcgcttcctccccgtgggaaagggttttctgtttttcctaacttccttaaacccatttacttttttaagggtttccccatgggatttaaatttttt

SEQ ID NO: 8806 - DNA, 1296 bp, Glycine max
  Clone ID: PAT_MRT3847_107961C.1
ttcctttcacgagctataaaactccctgcacgtgctctgaaactttgatgtatcacttgcgcgctcgagccgctattatcgttcttcttcttcactaagaatccaaaaaaaaatgaacgatcttatgacgaaatccttcaccagctacgtggagctgaagaaggtcgcaatgaaagaagacgttgatttggaagccggtggtcctggtgatcgcaaggtggaactgagctcttccacgacccacttggacacagacatgggcctcttcctagaagaggccgagaaggtgaaggccgagatggggtccctccgagacatcctgggccggctccagcaggccaacgaggagagcaagtccctccacaagcctgaagcccacaaggccctcagaagccgaatcaacgctgaaatccttgccgtactcaagaaggcccgggccatccggacccagctggaggagatggaccgcgccaatgccgccaacaggcgcctctccgccctcaaggacgggacccccgccatctaccggacccggattgctgtcaccaatggcctcaggaagaagctgaaggagctcatgatggactttcaggatctgaggcagaggatgatgactgagtacaaggatactgtgtgtagaaggtacttcacagttactggggagcacccagatgaggatgtgattgagaagatcatcgccaacgggaacgaggaagaggttcttgctaaggccatagaggaacacgggagagggaaggttctggataccgtgctggaaattcaggacaggcatgatgctgccaaggaggttgagaagagtctgcttgagctgcaccaggtgtttcttgacatggctgtcatggtggaggcacagggtgagaagatggacgacatcgagcatcacgtcttccacgcttcccactatgtcaaggatggaaccaagagtctccagagtgcaaaggagtaccagaagaggagcaggaagtggatgtgcattgggatcattcttctgctcattcttattctggttattgttattcctattgtcaccagtttaagcagttcttgagcttagtaaggaggagactttggatgatgatgatgatgattcttcttgactcatcgtgtttagagtgcttgatgggagataatgattcatctttttttcttttcctgcagatttgtttaattgttgttaaggtgttaccttaaccatgatttttctatctttgcgaaattgaaatataattcaatcatgttttagtgaaaaatcatggttaaggtaacaccttaaca

SEQ ID NO: 8807 - DNA, 648 bp, Glycine max
  Clone ID: PAT_MRT3847_107962C.1
agtgactggggagcacccagatgaggaagtgattgagaagatcatcgccaacgggaacgaggaagaggttctggggaaggccatacaggaacacgggagagggaaggttctggaaacagtggttgagattcaggacaggcatgatgctgccaaggaggtggagaagagtctactggagctgcaccaggtgtttcttgacatggctgtgatggtggaggcacagggtgagaagatggatgacattgagcatcacgtgctgcatgcttctcactatgtcaaggatgggaccaagaatctccagagtgcaaaggagtaccagaagaagagcaggaagtggatgtgcattgggatcattctgttgctcattcttattctgtttattgttattcctgttgtcaccagtttaagcagttcttgagtttttgttttttaaagaaggcctttgaggaggaaaggagggaaggatttggagagtttggatgatgatgattcttcttgactcatcgtgtttagagtgcttgatgggagatgatgattcatctttttttttttcccgcaaatttgtttaattgttaaggttaccttaaccatgtgatttttctatcttcgcaacaaaagtgaaatataattgaatcatgttttagtgaa

SEQ ID NO: 8808 - DNA, 394 bp, Glycine max
  Clone ID: PAT_MRT3847_107963C.1
acggctgcgagaagacgacagaaggggcccattgcctccgggctatctcctcttggaactccacattctcctcgtccctcagttggactcgcctctctctaaggaatgaccagcctttgatggcctcaaactgttgctggtgttccgcactctggaaccggtgtctatcaaagtccatctctgcctgcagggacacactagaaccctctcaagtggcatccttcctagacctcttggccgggagtttctttggagccatctcctgcgaggacacatttgtaaagttagtttactagcaacaacaacttatcacaatataagccaaatcaagcaaaaatggcgtacacttcttttcaacaaataccaaattgtcaatgtgaatttagagaatgaa

SEQ ID NO: 8809 - DNA, 555 bp, Glycine max
  Clone ID: PAT_MRT3847_107964C.1
ggagagtggaagctgttttcttgtgtgttaagaaatgacaaattaaatccgcctgcgagaagacgacagaaggggatatgttctctgtcaacacccttccctcccagttccctccgccatccccatgccgtcgccattgccgtctcaccgtcgtctgctcctccttccgccgccgcagtcgaagccgcagacgtcacaacaaagtatctcttcccaccaccacctccacctcttcatttgaaccgaagctcgaagccgttatcgacctcactcccctaaccgctttccaatctgaacttcgacggttcctatcttccggcaaagacgcttaccgagatttgcaaaccttggtcactctcgaccacaaccggaggcttgtcgtttcgtgtcgcccttccaccttgcatttcctcggaacttcggcggctttgaccttcctcgccttttctgttttcacggttttggctcaattgatttctagggtttcgtcttggcgtcgtaacgcggctagccataagcctgttgtggtgcggagggaccgaagtctcggcggaa

SEQ ID NO: 8810 - DNA, 261 bp, Glycine max
  unsure (1)..(261): unsure at all n locations
  Clone ID: PAT_MRT3847_107965C.1
ggtataggcttcgtatggaaagtcattttgaatccaaacaaaaactncgggaagtttgaaggatgaatgatggctgatgatggaatgaacaacttctaaaccgctggacattccaacattgtacaattttttggtttcaaaagagatgctgactgaatctcatacatatagaatgtttccatcttgcttcgattgagaaacataataatgactaagggtggaggaagtcgtggcaagttctgaagatagaagagagcttng

SEQ ID NO: 8811 - DNA, 426 bp, Glycine max
  Clone ID: PAT_MRT3847_107966C.1
aaaaaatgaagtggccaatcagctttttattgataaaacaaaatttccaagtttcagaacaaaacttactatataatagagaataaacaaatcccgaatgccctaattgtatcggcaaaaaccaaagtgaattgaatgaccaaaaattttaggccttgaagttataaactattaacaatctgacgtccaaagcttcggccagacaaacactcaaatgtagagacaatttccgttatttatttcataactctattcaacgaactgaagcacaaagggactggtggttgcccaattctgggactccatttgggaacttttgcctgtctttcccccttttggagacaactataaacccttgaccatctccattctttttttcaggaacacctaattttttttggctataactatcacctgaaatgaggc

SEQ ID NO: 8812 - DNA, 501 bp, Glycine max
  Clone ID: PAT_MRT3847_107967C.1
ggggtttgttttttttttttttttttttttttttttttttttttttttttaaaaagcaaaagcaattcactttataaaaaatgggcccaagaaaaatttgggagagcatctgttacaattctttacaaacccctaagccaaaaatataaaaagattcctccctctaggggggatcaagaatgggaatccccaactttaataaccctctaaaaacttttgatctttaaagagggagtaattttgttcatcaaaataagcaatgattttcatgggacaaatgagtttgaccccccagatcatcatttaggggagtaaaattttcagattctgccacggggggaacaaatagttcgtttggaacgggggacatgtcacctacatatgactgggcccaaaagttatcgactggggccttttcgtatgaatcgaaaaagccaccaaagtcttttttcacaacaatactttcgctggttgattgatgcggaaaatcaagggggttgt

SEQ ID NO: 8813 - DNA, 549 bp, Glycine max
  Clone ID: PAT_MRT3847_107968C.1
ggcattcactagattgtgatcggcattgaaaggtgttagaatcatggatatcgatgggtcccattttcaactaattaatcccaatattccgatcgattctcaaacaggttatcatagggtagatactgatccttgccagtaccttatgcccccgtctcggattgtctagactactaatccgattgctaattgatttccagaaatgggctgaactcatcaatgccaaattcaatctgacttatactaaggctcattgattgatggtccacttcagtacggctgattgctggacttgtaccaccgcctactgagctgcttgaaaggttaccatcaatcccattatatcacggtttagaactaatgctctcctttttgctaatgaccgccatctgaaagctgatggatgaattttacagctgcaccaccgtagtggttctactgacttttgagtgtgacttctatgtatgggtataactggatgcttggaatgaacaggtggtgcctccgttgcccccagcatctaatccgtcatcccacttgggtatgtcg

SEQ ID NO: 8814 - DNA, 459 bp, Glycine max
  Clone ID: PAT_MRT3847_107969C.1
tagtgcttagaagacgacagaagggggtgacacagaataacatgaatatgtcccatctgtattaatctggaaaatactgtcccttcagtctctagggacaaatcttatagtaaacacatcatactctttgcgacaagattgctcatatagactatgctaccaaatgaagcactttcgtcaaagaatgcggatgctccacagttgaacaagagaaagcttgaagcgagtcaaccttatgatgaccatttattaccggggcaggatccattaaacctatttagccctattgaccgagcccatacattgatagggcaagcagcccaacgctaactggcagcacacactcgctaactggaacaatgtattgcaaggattagctcaacctgatcagctagttaccattatacagggcattctgaaaatagcatgatggctaaaagtgtattcccgcattatgaa

SEQ ID NO: 8815 - DNA, 1488 bp, Glycine max
  Clone ID: PAT_MRT3847_10796C.1
aatcattcagggaagttcccttgatgtaaggaaggttctcgagatcttaattgagaaaatcaataccaaaattcaagtggggaaagatagatatcaatattttcgtattttgtcacaagtggcttatttagaagacatggtcaacaactgggcttattcattgctaagtctggagcaggattcccctgagcataaaacaaaggttataccagaaagtggtgggccattaaacagtcatctcacgcgggaaaatcaccaaactgaagatgaggactgtcatttagttgttcctgtggatggtaatgatttggagacattggagggaagtcagaaggaaattccttctgaaacaactggatgtcttgcctctgatgacaacaatgataatgcagacatttttgattgtgatgatggaaatgctagttctgaaggacatctacagaaccattctttttcagataataagaatatcaacaacactattgctgcaagccaaccactttatccatccacaagtcaggagaatgggactttatttggacaatctgaacctgtaactgctggaaataatgaagagatggatggagaactagagatttcagaaggcttgaacaaatccacgtgcactcaccctgtggtcccttctgaaaatggacttcacactgcttgtgatccagagacacagaatgtcgagattggtaacttaattaccatctctgatcagccttttagcttgtccgctgtagagactgctactaaatcaagtgatggtaaatctgataaacaggagaatgctacagataacaatgtctcttcaagtaatggcagtggccctgctgaatctggggttatttgcttgtatcaatgttgccctgcatgcctccacagtctccatcacttgacaaagaaaatacttgttgaaaaatggggtttaaacagtgagcagtggacggcagaagatgtccatgatgctgttgcatcattatctgtggatcttatttcagcagttagaaaatgctctatgcctcaagatttcattgattcatcaaataaaacctcaagaaatgaaaagcatggaacatctctcgactgtttgaagctgagaacgtgtaataatggaaaccaaggcaaggatgttgtgccagctgaatgtttttctcacgcagcaagccaacatgcaactgcaatggaagatatggcactgaatgaagaatcgacgaagcttgatcttaaatttgttttcagagatggtgtactagttcatatggacccagataaggatgtcaaagttccctgtaaatttgagaatttgtgcctttgttctttaagagagttgatagtaatgaaaaagcgcccttttgattaggctatattgtttcatagcttggagtgcttagcaattttttggtgctgatgcggcatttgtatataactttttttgagattgaaatatagttctgaccaggaaagtacgaagtttcaagtttc

SEQ ID NO: 8816 - DNA, 189 bp, Glycine max
  Clone ID: PAT_MRT3847_107970C.1
acagggtcttgggtctgtgattattaaaccacttcttcgttttcttgcatcaaaaaaaggggggggggggtgtatccccatgctggcgaacccaaagaaagacttgttaattcgaaccgagttccttttcctataggtgacaccccctcccacataggtcttcttatggcacagactggagtgccccgt

SEQ ID NO: 8817 - DNA, 284 bp, Glycine max
  unsure (1)..(284): unsure at all n locations
  Clone ID: PAT_MRT3847_107971C.1
tctaaacaactctttctcttcttccttctctctttgttctccctcacgtanatcgacaatagcgganagctaaactttaactttccaccctcatatcaaccatctcctcattctcatcatcaacaccttctactccaacaactatattttccttctttaactcatcatcaactcctcctatactttttacaacattctattttatagttttacacataatatcaatctctattctcatccacattatttcattcatattatttcacacaatactatcaatacac

SEQ ID NO: 8818 - DNA, 410 bp, Glycine max
  Clone ID: PAT_MRT3847_107972C.1
aattcggctcgagtcttaattccccccttccttcgtgtagttgttgtagcttttgttattgctgagatgctggttagctccagtcttcttgctatcgttggagctggtgatcaggttccgtactatactgtacttgggctcgggctcgggctctgactgtgtattgttttgactgatacatgatgcacatgcagccatctttgtcccctcgccgtctttgtttattcaatacaaccactggagctgctcttagagaattgaattttctaacttccatacttgctgttcgcatgaatagacaaagactcattgtcattttacaagacaaagcatatgtatatgaaataaatagtctcacaatcttggatactattgacacagtgccaaatattaaaggactttgtgctttt

SEQ ID NO: 8819 - DNA, 345 bp, Glycine max
  Clone ID: PAT_MRT3847_107973C.1
gacgcacaccacgtcgcggcgtttatatattgttcattgcgcatctcttcgctatcatatcgattggtgttcaaaatggcacatctaatccaagaaactgtcttgtggtggagcccatgtagaaaagcatgtgacgggctctaaaaattgttgcgggagtgctgctgcttcactgacgagatcgtccatcctgcagaaggatcgacacattctgcagcggataaaaaacagaatggatggaaggggaaactgcagaaaactgcattcccatattttaaaggcgcactgggtacaaccggtgtgaagagggaatacactggggatacaagaccatccatattaagg

SEQ ID NO: 8820 - DNA, 412 bp, Glycine max
  Clone ID: PAT_MRT3847_107974C.1
ccgacgcatcctcccattcgaccttccatacgacctatgcgaacagcccgcgcgtccgtattctaaaaccatttttcagtacttcactaaatgataaaaaactgctaattcttcatttgaaaaaaacaaaaaacaaacactacaaaaacaataactacacaaacaactacacatatactaatcaaaaactgaactcacagtctagataatccaactttacaaaccctgacatgcaacactttaacactcttatacttctacctaacaccaacaaactggccgccatatcaacaaatactcaactacaaaaccatgactgtacccaactataatcccttacaatacatatcactttaccacattcacgtacacctaaaaaggccaagaccgatcaaccttcccaacaatttca

SEQ ID NO: 8821 - DNA, 513 bp, Glycine max
  unsure (1)..(513): unsure at all n locations
  Clone ID: PAT_MRT3847_107975C.1
ttttttttttttttttttttttttttttttttttttttttttttttttttttttttttttttttttttttttttttttttttttttttttttttttttttttttttttttttttatttttttttggttttatttggcccttgcaaaaaaaggcccatttattttcaatttaaagggaagggaaaaaagaaaaaaaaaaaaaattggggctaaaaaaaaaaaaagaaaaaaaaaaaaaaaaaaaaaaaaaaaaaaaaaaaaaaaaaaaaaaaaaaaaaaacagaaaataaaaagaccttgatcaccccacccgggaggggccagaccaccccataaggaccaaaaaatgtttccccccgatgataaaaaaaaaaaaaagcattgggacaaccggaanctgtccgaaagcaagtagagaacctacctttagaaaacagctttagttaaaaaacccccactattagggaacagataccgacccggggaaattccaatgggaaaaaaaatttgactt

SEQ ID NO: 8822 - DNA, 534 bp, Glycine max
  Clone ID: PAT_MRT3847_107976C.1
caccaaccccccctttttttccaaaaaaaataaccccccgcccccaagtttaaaaaaacaacgttttttcccaaaaaaaattcttgggccccaaaggaagcaaaaataggggaaaaatttaggggggggaaagccccccccactggaaaaacctttcctttcacagtttttaggccggaaagggggggaaacccggaacagggttgcccttgggggggtgggcaaaaaaaaaaggccccctccttttttaaaacatggaaaaaggggggtttttaccatttttaacgaccccggcgaagcccgggaaaaaacccgctagggttgtttgcaaaaaaaaaaaccctagggaggctccggggcatttttttttccccctcccaaagggggggggctgataatcccgccccctcacgtaaattttttttttgcccggggcggaaaaaaaaaaaaacctttccgggttgtactcgaggggggcatcccagaaattgggacccctaccaagggcccatggggtaaaaaaaataggggaat

SEQ ID NO: 8823 - DNA, 469 bp, Glycine max
  Clone ID: PAT_MRT3847_107977C.1
tggacgcgtgggggcgaccacccgttgacgcgccaacaaaccggatccatactcgattgctactagatttgagaatctttctacttttttgtgctcgattgcttacgggtacgaaagggactctatgtgcctctctgagacggccacaaacatcgtgatttacattcttagccaatctgaggaactctgttgtacactatataagacgatatgggacatttagacttattcagactctttctgagttttttgcagaactctgagtaaaagcaggtgaaagctggggaaagcgcacatactctcttacactgtattagacggcatgggacgacttgggtagacctctccattcttttactctcttctactcactgatccgcactgacccgcaaagcggtcttaagtgaaaaacactggaacacacttgcacatgtgtgctaatgtaagcttctctggagacatctggaga

SEQ ID NO: 8824 - DNA, 322 bp, Glycine max
  Clone ID: PAT_MRT3847_107978C.1
tggggaaaaaaaagatgaataaaaaagagaggttgcggatttaacgcactataattgcaacttcatcaattgcttatactctcatcctacactctgcctcatgaaactacatattcattctctatcattataacttcgagatcgtaatcattctcgacaaaggacctctaaataagttctatgctatttattctaaacactgaaactatctttctctaaacattcaaacattcattatcaactatcataaagccaaatctcttttaatttgcaaggaccactgtgatactcattacagtaaatgcagctacattggacattc

SEQ ID NO: 8825 - DNA, 834 bp, Glycine max
  Clone ID: PAT_MRT3847_107979C.1
ctggagtactgtgggttggtttcggacagcgttggatactccgtacaccgcggaggcagtagtgaaatctttggtagtttttcaatacctcttcctttccccgtctgctcttcggcattcgttttcactatttacttcaagctttgaaagctgggttccgacatcttgtctttgaggataactatgacactggaactggtgatcattaataaagtgagcagatatgtgatcaatcttatattagaggtggggggcacaattgctttaaagacagtgatgaagctaggatcaggtcaaggaggaagaaattctgggagaaagcagtcgataattgaagaactctgtggtccagatgaagcatggtggggagttagaggctttatgcgggataactttaatcatagtaataagccaatatcttatgctcaacatttccagaatagccgatatattgaatctattcttgatgtttactgggagctccctccagttgctggtccttccctcacccatcaaaccagatatgatcctgctcgtgcacccagtcctattgttgaagatgggcggtatggcttgttccgaaggctaggtttggccaaccttgacaattctgtatttaatggatacactcagatggtttatttacagatatctgaacaataagttagagtttcttagacaagggtatgtagtagaaagaagttttgtacctgtattatgtatgcattgtttcttctgcctgatttggcttaagatgtagtttttttattcttcttggccgtttccttttgaaattcaagctaagttatctttagtcaatgctgaattctttct

SEQ ID NO: 8826 - DNA, 376 bp, Glycine max
  Clone ID: PAT_MRT3847_10797C.1
ggctcgaggtctgccatttttttgcatacctacagtcgatgcctctgtgcttaattgtatcactcagttcagctgcggggctgtccaagccaaaggcggatcctgcagtcgtgatatgaatatcttctgaagaaggatgtgagagctaatgatcccgaggatgaggctactgcccaggaaatattggcatagatgggtgatggctcatatgcatgaggggctgtggatctgtgtactgtggaagactaccgtagtgcagggtgaaggattctgatacatgcgtgcatgcgtatggatgtaagcaagatggacttgactacaacggttaggggctaaaaaatatcaatgcctatgatgattgcttcaacagccatgc

SEQ ID NO: 8827 - DNA, 421 bp, Glycine max
  unsure (1)..(421): unsure at all n locations
  Clone ID: PAT_MRT3847_107980C.1
ccacgcgtccggtttcttgatgtaatgggtttctcctctcccttttatataaaaaaagttaaaaaaaaaattaaggcagaagtactctttatcctaaaaaacttactgtgggacttaatgagtttctttccacaattataattataattttttttaatttcatttcatagtgttttatgatcatcttcggtaagagaaattttgtttatagttgaatattttttggtcatggactagagattacgggtgtcccaacctattaagttagaaactaacctcgctcgcagtgacggttgcttatctaagagaattttgcacacggtgaaaatggtagacaagttctctcactaaatagatcattttcatacatgtgaacgcagtcaaatcttatatcattgcgtcaaccgtttgtgttgnttta

SEQ ID NO: 8828 - DNA, 191 bp, Glycine max
  unsure (1)..(191): unsure at all n locations
  Clone ID: PAT_MRT3847_107981C.1
agagcccaccaaacggcaacgacaggcgcgagaagcaaacagagggaacagcggacaacnccggcncgacagggaaggaccgagcccnaggcggcnggcaacnccaaccagagcaccancagagccccaggcgcccaagggcacaacngaggaaaagcccaccccnggagaccgacccgagcaagaagcac

SEQ ID NO: 8829 - DNA, 501 bp, Glycine max
  Clone ID: PAT_MRT3847_107982C.1
ggctcgagtatagattctggtcctgattctgattatgagcatgaagatgaagagtatgcccggagctctagacctgacttgaatcacgatcctctcatatgcattagtgtgtctagggcacaaaatgatgcgacggattcatctgatggtggcgagactctcagctcaaggggcttgacactgcatgccataggcaaaagactgagtatcatcactgaatatggggatccgagtgatgtgggtagagtggcgcagtccaatcacgatgtaagctaaatatcgatgatggagctgctatcaatgccctgtggctctaagggtactgtgaacacgagatattctagatgtggaataatcggagacatcaagccgctagagatgacgcatgcatggcaatacttgcttcagagatggattgatcggccaatgctagcggatctagtgtcacatcatcagcatgaggcgatgaatgtaactgatgaggctccctgtgatcatgct

SEQ ID NO: 8830 - DNA, 512 bp, Glycine max
  Clone ID: PAT_MRT3847_107983C.1
tgagctaggcctttactctcccccttctgccagaatggaggtagacaaataatgagcaggattggcatgactgcctgctctctttcttctgcagctgaagcttcagattttgaatgtgatgcgatccatgatgatgtcaaagcagcagagaaagataatgcactttgcttggctgtctcgcagcttgctagcgagtttagcaaggaatctatgttatctctgcagaagatttttggtgtacgccgtgctcatgtgatatctacaggctccttgaagcttgatctagctctgggaattggtggactaccaaagggcaggattgtggaaatttatggacgagaagcagctggtaagactacacttgcaattcaaattattaaagaagctcaaaagcttggaggatattgtgcatatcttgatgtagaaaatgcattggacttctcacttatggaatcgatgggcatagatactgaaaaccttcttatatcacatcctgattgtgctgaaaatta

SEQ ID NO: 8831 - DNA, 598 bp, Glycine max
  Clone ID: PAT_MRT3847_107984C.1
ctgcaaaggaagcctcttgcaattcaaacttttctccaacatcttcatatgattgcaagcaaaatattaataatagttttcaacgagatgggaaatcgaaaaagttggggaacgaagttcttattgaggacttgcagaaggaccttaatgctagactccaaagagaagctgcattagaagcagctctatctgtgaaagttgaaatagaagatgacctaagaagtacacttgatgaaataaaacaccaaaaacaagatttggaatatgagcttacaaacatgcggatgctggtgtcaaagatgaaaaagtctgggattaatgttgaggacaagtcaactaatgatgtgcaaaccaaggttaaaaatgggcatccaacatctaatggttactctcatagaaaacaatacaaagagggtgaaattttagggagcatggaagatatgattgcattagaagaactgagggctaattatcaaagagaaagaagaagatgcaaagaactagaaagtcatatttctatattgaagggtgaagatattgctggtctggatgttatggcccttgaagaacttcaaaaccttcatattgaggcaataac

SEQ ID NO: 8832 - DNA, 561 bp, Glycine max
  Clone ID: PAT_MRT3847_107985C.1
cccatcgatcacaaggaatcagaaaacccagaaatccacacacacaggctttagcaagccgtgtgtgaaggtgtgtctggtctgtgatcgttattaattccttcactagacctcctagttaaattaaccttttaataaatgtcacactcgctcaaggttttttttgttttcactctcttgttccttgctgtggttgaagctaaacacaaaaagaagcacaaacacaaaatccgccatggtcctaaaccatttcttcccctgatcccaccctttggttctgatgagcttccacccgttccccagctcccgcccattttcgagcccccatccaatattccccagctcccaccctttcccttgaagcaaggtggagaagaaggacaaggggttgaaaatactcagcaagatgcaaaagaagggattgaaaataaacttttcgaagtaacgtccattggacactgggagataatttctgaaaatgcaggtgtgtcagccatgcacatcaacttgttacccacaaacaagatcattgtctacgatgccaaagtttaccgcacctca

SEQ ID NO: 8833 - DNA, 1018 bp, Glycine max
  Clone ID: PAT_MRT3847_107986C.1
ccaagtattctgccctgccaccaacatcccaatccctcctccataaccatattgaagaataagataaatataacaaaacctagagatggaagaagcacaggtgcaggtatgggaagggtatgtagattggaggaacaggccaaccataaaaggacgtcatggtggcatgcttgctgcctcctttgttttggccgctgaggtattggagaacctagcatttcttgccaatgcaagcaaccttgttttatatctgtccaagtttatgcacttttcaccatccacctctgccaacattgtcactaacttcatgggaactgccttcctccttgctattcttggtggatttctagctgatgcgtttatcaccacttactccctctatctcataagtgccggaatagaattcatgggtttattaatgctcacaatacaagctcacaagccgtcactcaaaccaccaaactgcgtaattggaaacaccgacagtccatgcgataaaattcatggtgcggacgccgttatgctatttgcaggcctctatcttgtggctctgggcgtaggaggtataaaaggttcacttcctcctcatggagctgagcagtttgatgagaatacaccagagggaaggaagcagagatctgcatttttcaattactttgttttcagcctgtcatgtggagcattaattgcagtaacttttgtggtatggattgaagacaacaagggatggaagtggggtttagtagtctcaactgcatcaatacttctctccattccagtttttcttcttggctctcacaagtacaggaccaagattccagcaggaagccccatcacatccatgttcaaggttcttgttgcagcaatttgcaacaactgcaaagccaagaattcaagcaatgctgtcataagcatgactacaggtccatctcatgcaactgaaaggaaagatggagaggaacaaagtaagactagaaaagaggttgttccaggccaaactctaaccgacaaccttaaa

SEQ ID NO: 8834 - DNA, 762 bp, Glycine max
  Clone ID: PAT_MRT3847_107987C.1
cacgcgtccgatttccggtttcgcaccgtattcaggttcacttactaaggcatatgctgcaattgcaacattgaatcacagattttggcatcagttttttctggaaaaaggtattgtgccttcctttgcattgtaacctgttcaagggtttgtgatcgaccaaagtaaagtgagacaatgcaagctctgttgctgaggcataggctttccaattccaacaccaagtctcttttcagactttcatcctattttcattcttcttcttgttctccgcgaccattcattccgtcaccgccttctgcttcctccatcgctaccaacttgttcacctctccatggtctgcctctcaatgtcgcggaatcaaagtatctggttctgatattaaagtcggaaatatcattggaaaacaagggcacttttacgaggttcttaaagtagatcactctcatgaaggaagaggaaaagccacaatcaaggcagaacttcgtgacattgaccagggaaacaaggtaacacaaagaatgggtaccgatgaggatgttgaaagggtctacgttcaggaaaagactttcatgtttatgtgcatggatagtgatggaactgttgtattgatggaccctgacacattggatcaaattgaagtttccaaggacttgttcaacaaggattgcttatatctacgagatgaaatgaaagttaaggtacatttttatgacgacaaacctttatctgcatcagttccaaaacgcgtaacgtgtatt

SEQ ID NO: 8835 - DNA, 278 bp, Glycine max
  unsure (1)..(278): unsure at all n locations
  Clone ID: PAT_MRT3847_107988C.1
gggcggnannccgacaaganggaanngttatcccaaattggattnntccnccgaaccntggaccctcacctaaacaatcagaacccaggatttggtgaaacgntgnnaaatggtangnaattggngttgccttggactnttccaanggaagcngantcgcnctgaaatgggctataacatcttatcngcaacggtggcctctctacatcgtcnacaccagcctncngnggantgaatcnggaatcttctctggtcnaccangnttcgccnctgttcnt

SEQ ID NO: 8836 - DNA, 172 bp, Glycine max
  Clone ID: PAT_MRT3847_107989C.1
taggctgcggccgacctaaaacaatttatttaccttcacatatgaacatcttggccttcttcatgtttgcaagcgaaggacaggaatgagtctatgaaaatccaaaaacttgactccggctctcgggagagcacattaagagtccaaataagagctattgctacttcaacat

SEQ ID NO: 8837 - DNA, 190 bp, Glycine max
  Clone ID: PAT_MRT3847_10798C.1
cccacgcgtccgacggctgcgagaagacgacagaaggggaccaacagttttgtgagtgaagcctttccagtgtgcagctgcatctgcagccggttcaatcattcaaaattgtcaagttgtttggtttggagcaatcatcattgtccaaattgcaattttttcagaaggatagcaagaatttgggaagttg

SEQ ID NO: 8838 - DNA, 279 bp, Glycine max
  Clone ID: PAT_MRT3847_107990C.1
aatcaaaggtcttaccattgaaaacaacttagccagtccatataggaaaactaacgaaaaagaaaaaagaaaaggaatagttcccaactggggtttgcaaacaaaagaaaaaacattacaaaacgggtccgggtttgaggggtactacgagggggcgagcattatcctccattccaacgcgtgaatcttaaagtcgaaacccctgacgtcctctgaaaaacacaaccccgcaaaacaagcccaataccttaccaccaacaattatccctccaacccttt

SEQ ID NO: 8839 - DNA, 341 bp, Glycine max
  Clone ID: PAT_MRT3847_107991C.1
agcgccgccagcttccaccacgaggaggatggatcaagcgatgagcaggcaccgcagagctcacctgtgcggaactgctctcaccatggaggaggagctcgacaggcaaatcctgtacagcttacatcgggctcctgcaccaatttcttcttcaatgctgggtttggagactgttacacgaagtgttgatcactctggttctgaagatggtctaatgacccccgagagtcaaagacctatcggccattagacatgcatcatgggatggaagctcgccttgtgtcatctaagggaccacagttccccagatttatataaccaaatctgactggatttctagg

SEQ ID NO: 8840 - DNA, 506 bp, Glycine max
  unsure (1)..(506): unsure at all n locations
  Clone ID: PAT_MRT3847_107993C.1
gattcttcagggtatatacacagtggcaatggccaacttctgtcatgttatgtccaatagaggagaatgatcttgggtttcctgtttggcatcctggaaaaaaatccttgtgacagatcccatcatatgtcaatcattacccctgcctatccctatatgaattctagttttaatgattctatgagcacacttcgtgtaatgatgtagcagtttcaatatggcaacaaaatttgtggggaaatataattgagtaaagcttgttggaaggctctgtttgaaaagtacagtgtctttgaaagctataaaaactacttgcaagttgatgctgatgacttgcacaattggaaaggttgggtggaatcatgccttcaccaactaactttgatggtgtaaaacagatgttagtcaactgttttttattggcaagattattttacnttgactgaactaanagaaaggttgggtttaggaaatgggaagaatcttgatcttgaacaatgctcttg

SEQ ID NO: 8841 - DNA, 309 bp, Glycine max
  unsure (1)..(309): unsure at all n locations
  Clone ID: PAT_MRT3847_107994C.1
cagtgagaatatatagnggagtttttctctgataaagaccccctacctttgcggtnaaaagatcgtggggaggaagaacccccccacacacattttactctctttttacaaactcgcctattatctgttttgggagctggccacacaacattgcaaaccacctcggtatgatcatgctataagtgttgaaatgggaaataaaaacataaagcttgagtacttcgaataggcgctcactacacaaaattagatagttcgcatttataaagtgaaaccccctcaaaacacgtggtgactccaaaaaaacaa

SEQ ID NO: 8842 - DNA, 204 bp, Glycine max
  Clone ID: PAT_MRT3847_107995C.1
ttcttccggtagagagaaagagagggagctagtgggtcaaggaaagaaaactaaagaaacaaacctaacacaacagatattcttgaaacgacgacagatatggacgtttcgagctcgcacatgcgtttcacctttgagtgccgatgcgatgccgatttcatcgcccgcacggccaggcttcagacagcctgcgtcgtcgaaact

SEQ ID NO: 8843 - DNA, 519 bp, Glycine max
  Clone ID: PAT_MRT3847_107996C.1
tcgaatatgcttatcatataagtatttatgtatcaattatttttataattaaatagaaaattaaattaaattgttttcacataaatcacttatgaacatattaaaagttatttttatactttctttcaaatactttcacaagtattttatgctataagtttaagtaaattgtaaaaaaaaaatccaaacatactctaaatagtgtttttttataataaaaaaaacttgtttaaaaacttttttcatactccatcattgaaaattatttgtttagttttttatgaattattttaaaatataaagttaattattaacattttgttggttcgagtaaagtctgaatctcaacttcgagttttatagataaaaaacctgattggaatgtaagactccaataaaattagtttgttagccagattcttgaacaaaaattagttattgaaaaaaatcaataataattcacatcaatgactactatcaatggataattcccgtccttaacttgttattacaagtatt

SEQ ID NO: 8844 - DNA, 268 bp, Glycine max
  Clone ID: PAT_MRT3847_107997C.1
ggactgactaggctgctggcctgcggtcgtcctttttttttttttttgtacactaaccgccgctttgggttcattcgtggaagcgtccagaacaaggccttgatcaatgtcccatatttaccttgtggcacacctttgtatccctaggaaattagcccttttaccaggattgatttgtagacatcccttgttcctggcaaattgttttatggatgccctcacatttgtacaaagagcctgtactatagataaagcaaatttattctac

SEQ ID NO: 8845 - DNA, 434 bp, Glycine max
  Clone ID: PAT_MRT3847_107998C.1
gggttttaggtcaaaggcctacttaaacagtggcaaactctcttaataaattaatgtgatttccacatgaaatggaatctcatcgtatataataatgatgaccaaacgagagtatcatattttatagatgaaaaattataagtacatgaccatttcctgtttcaactcagaatacttgttcaaaaataggtcatatgccagactgaagtatgaacaaaatttgtgagggtaacaacacaaaaatgactcaataccaacattggatgtaacgaggggagcaaaggatggggagcgtatcagtatcataatcctgcaactgacaatagaatcaacttggctcatccagcaattgaatcgatttctcaacacaatgggatgttagtcaagccctccaaaaggtgtcaaaaccacttttgtcataagcaaatgatttt

SEQ ID NO: 8846 - DNA, 306 bp, Glycine max
  Clone ID: PAT_MRT3847_107999C.1
atggcatgtctgtctgcgatggttcaccttgaactagctcatggttgtatcctctcaaacatggaccttgtgacatcggagaacgatcgtgaagattttttggatccagagtgcagctttttactggctgacttgcatcaccggatgggtcctcactatgcatcgctgaatactgctttgattgaattggtacataggtagaccatgggtagttctatgccattacacttaacgaaggaaagaagtacacactatgtactggcccaagttgacaactgcattcaatatcgagaagatgcagatgtg

SEQ ID NO: 8847 - DNA, 742 bp, Glycine max
  Clone ID: PAT_MRT3847_10799C.1
aaaaagcagttttatgattttataatgtgtttgtctaaactgtttttacttaaaataaacaattttctgcttttttaataagcaaatcctatctgctttttataaaaatgcttcttttaaagttgcttgttttaagttaaaacaaactcacctaatttttagaaataatcacttatgtttcaaaagctttattaaaagttgattatttaagctattgggttggtttgtttaaatttaaagaaaacaatttttaaataagcagataagatttgcttctcaaaataagcagaatacaacttttttttagtaaaaacagtttagacaaacacactaagaaaacagaaaactgcttattttattaaaataagtgtttttttcaagaactaagttttaacaagctcacccattatttctctaaaataagctaagcaaaatgtgcactaatttactctaaaaaactatactctaagagaaaacacaatgaagcaaagcctgcccaatccatcaatccctatgcatagccatatctgttaaggaaatctccttaagtgactttgtgctttacactaattagcagatctgttaaggaattcccccagaaatgataattgtgattcatatttgttgataattagaataggatcagaataagatcagtttcatattgtctttactatcatatcagaataatgggaacaatatctcctataattaattgtattgattgtaattaatctatata

SEQ ID NO: 8848 - DNA, 472 bp, Glycine max
  unsure (1)..(472): unsure at all n locations
  Clone ID: PAT_MRT3847_1079C.1
aataattataaaatatttgatgactgctgctcttaaattagagcaactgattttaaaaatttgaaactattataattgatgttggtttacagtttgtttatttgtcttatgtaaaactaccgtgaattatctcccttatttatatcttatgctgaattaaaggattgctttactaatcctttaaaccctcttagtctcatacaaagaaaaagcatttaatgttagtgttggtcaattcttttgctgcttgtattgacacctatgttgaaaaactgttaatagcttggagattgttagtctcttnacacacacacacacacacacatatatattctttttttaaagaaaaactatgcatgtgaatacatagtcaatcttttgctgcttttcttgagtatctaccaatgacaactttgttgctgaaatctccacagctcggattttcttggcaccaacttcacaatttatgaca

SEQ ID NO: 8849 - DNA, 292 bp, Glycine max
  Clone ID: PAT_MRT3847_107C.1
ttcggctcgagagaaatttgagtgaggagctagagaatgatgatgaagtctgctatgtgtgcagtcgtggttgtaggacttcttctactggcggaggtggcgcccatggctgatgctgtgacatgcaccccaacagagttgagtccgtgtcttccagcaatcacttccggtgctaaaccttccagtgcttgttgcgcgaagctgaagcagcaaaaaccatgcttatgtggctacctgcaaaaacgctagcttgacgcagtgtgttaggtctgctaatgcccgaaaaaccgtt

SEQ ID NO: 8850 - DNA, 169 bp, Glycine max
  Clone ID: PAT_MRT3847_108000C.1
gcgacaggtactgaggagaccttacgtcatgcggggctacccgctgagtttaagcaaaaaaaaaaaaaagcggacgatctaaaaggcggccgctttagaagatccaagtttacctacgcatgcatgcgatggcataactttaatataatgtaacctaaattcaattaaa

SEQ ID NO: 8851 - DNA, 618 bp, Glycine max
  unsure (1)..(618): unsure at all n locations
  Clone ID: PAT_MRT3847_108001C.1
tcctctagagcggncgctacccgtttttttttttttttttttgtagagaattactccatagttctaatcacagagaaaaggtaaaactctaataaacatattcaaaagataaccatttatacgtcgatataagaggacccatataaatatatgtagaccgactaatagtgtggggactaagccaataagacagatagtacttttaaaatactaatgattatttgtgtttaaaggatactcgtaatttgaattgtggaatacgttgctccatctgatattctaagctattactttgaggactgagtcgattgagctgttaataattaggttgcagtttgattcaaatctaacataatttttttacactactacaaaaaatatatttaacatcggcatattaatatcggtttttgacaaaaccgatgttaacaaaaatgtggtggcatttttgtaaataaaataaatttattaacatcgtttttttttaaaaccgatgttaacatgcactttttaacatcggttttttcaaaaaaccgattttgagtgacttaattataaaccaaaattggactgcccacgcactctcgctctcactcttgcaacaccacgctgaccacc

SEQ ID NO: 8852 - DNA, 514 bp, Glycine max
  Clone ID: PAT_MRT3847_108002C.1
agcggaaggtagctgggggatatagctcacctgaatatcagacaaaatgccctcagacagagaacataaaccaagaaaaagaattttaccagctaccaatagtaaatacagatcagcatggagaacttgaggtttcagaaaatggaaaccagcaagaatgtagaagtaatccagttatacaaaacgctgctgccaagtcacaagacgattttccaagtcctacttttcaacctaagtcacctattttaagtttttttcctgactcaacaccgaaaacaggccaaaaggaagatgatgttaatagtccagcatcaactgaaaggacattttctctgggaagcattcatacccaggcttcagagccagacttcaatgggctaggagaacaaatgcaactttctgatatggaagagctcaagtcttttattcccagaaaagacaaatcttctgacacagagaaaaaagagcagggaggtggttcatctgatccatcatctgaagagcacaactttca

SEQ ID NO: 8853 - DNA, 1235 bp, Glycine max
  Clone ID: PAT_MRT3847_108003C.1
gatgcaatagaggggcgtttccacttcttgtttgaggggcgtttccacttcttgttagaggcggcttctttctcgttggatgagctggttgatattttgaacgtgccagtggccttgatgatagccgactcggcgtgctccaagagccaccggatggtcttgccgtcgaacttgtggtcgatctcttgggtcagctggaagatccgggcgacgcaggcgttggtctacggcattggtctctccgaggagagacatggccaagctgcaggtcggcgtctccttggtctggtgcgagggcaaccgttgtgtgacgacggacaactcttctctgccatggtggttcgcaagccgttgggcactggatcgttaacaaaggcaaacttcaattggaaaataacttgggcctcaaagcttgagaagtgttattgcatcgttgttctaccacaaaatgagttggaagtgaaagcagaagacacaacatacactataccatgccttctgctccttccaaactctacgcaggttctctgcattctctcaatcccttattcactatatatgcagggtccgatgttttgggcgatgatgatatcagagcagaaggtggctcatttggcattgaagccgttggggaggaacaatgcaattgatggaacgtgtggagttggaacgaaagaaccccagcttattttcgcttctgcagacagtgagtcttatattgtatacttaggatcacattctcatggcccaaacccttcagcaagtgatcttgagtctgcaacgaattcccattacaaattattaggctcacacttggggaaggagtggaatgcttcggggcctatgcacgtggatttgctagagggtgccttgcaacgccaaacatcagttgaactccaaactaatctctggtctccctggctttccaaggatggaagtcttgtactgagcgtccaaaaccaccttgtgagttcaaattgaatattgaatttcattttcttttacacattggacatttatttctcaagaaaacgagggctctgttatctgttggtagtgtctggtattttacatgtttctttttacttataatttcttgcagcactacctgaaaagtcatggggttatatcccagggctatagctctccctggtattttacatgtttctttttacttataatttcttgttgatgatgggcatacagagtaaatattttatattattatttgatca

SEQ ID NO: 8854 - DNA, 144 bp, Glycine max
  Clone ID: PAT_MRT3847_108004C.1
gtttaatatctgatatgtggaccattggttcacacgatattaaattacttttttaaaggggagagtccaaaacagtagcttgctactgggcctctcatgtgtcgcccttgcgttgcactatagcgtgggcctggcacaccctac

SEQ ID NO: 8855 - DNA, 1887 bp, Glycine max
  Clone ID: PAT_MRT3847_108005C.1
ccacgcgcagcagctaaaccgcgatctctcgaactcttgaggggcgtttccacttcttgtttgaggggcgtttccacttcttgttagaggcggcttctttctcgttggatgagctggttgatattttgaacgtgccagtggccttgatgatagccgactcggcgtgctccaagagccaccggatggtcttgccgtcgaacttgtggtcgatctcttgggtcagctggaagatccgggcgacgcaggcgttggtctacggcattggtctctccgaggagagacatggccaagctgcaggtcggcgtctccttggtctggtgcgagggcaaccgttgtgtgacgacggacaactcttctctgccatggtggttcgcaagccgttgggcactgaattgttaacaaaggcaaacttcaattggaaaataacttgggcctcaaagcttgagaagtgttattgcatcgttgttctaccacaaaatgagttggaagtgaaagcagaagacacaacatacactataccatgccttctgctccttccaaactctacgcaggttctctgcattctctcaatcccttattcactatatatgcagggtccgatgttttgggcgatgatgatatcagagcagaaggtggctcatttggcattgaagccgttggggaggaacaatgcaattgatggaacgtgtggagttggaacgaaagaaccccagcttattttcgcttctgcagacagtgaggaaattgttgatgattaaacttacttttaaattagcaagatatatagcttttcttttctttctgtttggtccctacttaattatgattttaatttatttgggcttagaacaagtttattaattgtttgggcttacaaatgtgcccgttacaaataccaagtgagcaatctatttcccaaaactgtttgagctatatttacaacaataatttgcatcatacatgcgtactcccatgataaggttattactttaatatctgaaaattaaatttattattttctaattatttactttgaagatttagtcatcatgaagagtgattttgaaagtttgtttccctacatgattgattgattgtgttcgatgttgctttcataatgaagtccaattctatcacattgttgacttatcacttcaagaacaagtgaaactatatgcaggtgaaagcatagcttcaagttgacacatcacatagaggaactgaggaacatataatgggtttctctgttttacaccttatttcattgttgcttctttggtattttttgcttgtgccagttatgcttataaatttcagtggttttttaagttttgtcttttctttgttgcagtcttatattgtatacttaggatcacattctcatggcccaaacccttcagcaagtgatcttgagtctgcaacgaattcccattacaaattattaggctcacacttggggaaggagtggaatgcttcggggcctatgcacgtggatttgctagagggtgccttgcaacgccaaacatcagttgaactccaaactaatctctggtctccctggctttccaaggatggaagtcttgtactgagcgtccaaaaccaccttgtgagttcaaattgaatattgaatttcattttcttttacacattggacatttatttctcaagaaaacgagggctctgttatctgttggtagtgtctggtattttacatgtttctttttacttataatttcttgcagcactacctgaaaagtcatggggttatatcccagggctatagctctccctggtattttacatgtttctttttacttataatttcttgttgatgatgggcatacagagtaaatattttatattattatttgatcatcaattatcagt

SEQ ID NO: 8856 - DNA, 403 bp, Glycine max
  Clone ID: PAT_MRT3847_108006C.1
aatcattgtacccggatcgggcctgctctcacgtcagaggaacttgtgttgatcccgcgagttctcggttcgtgagaacatgctaactgagtcgacaatcacgattgattccatcatgtcaaatgacatgagtagtctgccgaccctctttctatgatagcgttcacggaatcctaatctgatgaaatcgcgacagcgccttgacacgtatggaggagttgtgacaacctgtggagaatcatggtgaggttcacgttgtagaaggtgttgatcattggatcaagatactagacgaatcaaggtaatatgttgattacaagtcatccatatcaacactacatatcacttctcttaagtcccacaatacgatggaggctaccttgggcaaaaaactctccacaaa

SEQ ID NO: 8857 - DNA, 277 bp, Glycine max
  unsure (1)..(277): unsure at all n locations
  Clone ID: PAT_MRT3847_108007C.1
tagagaagngattaagtagagaaatacaacacatgaagagagagtgtgtnagaagancagattgtgaaacaaagtcannttgttgagaaaaaacgtctttgncgtgagagtgttataatttcttgtaatcattaagtagggtactcgggtttgtagagtgatccgctatttggggtggattataatattgtaatcatttttgtgatagtaaactncctttttgagtcggttcctggatgtagataagtnagtgtcgaattacgttanatttttatgt

SEQ ID NO: 8858 - DNA, 375 bp, Glycine max
  Clone ID: PAT_MRT3847_108008C.1
ataaaacactcatacacacacaaacacttaaacatcatcaatatcgtatattcttgttgtgttgcttaaggtgtcaaataatggctggggcttgggttttcaagaacggtgtggtgaggctggcggagaaccctgccggtgaggcagtggatggaagccgtggaggaagaaggaaggtgcttgttcatacagcaagcaacgagggtatcacctcttatgcggagttagagccaaaactgaatttacttgggtagggagcgttactatgactaccctgttcttgttcaattctcacaacgctccaccgtgcaccttattttcctcccaaaaaacttcaacaagctcatgcccatgcgcatgtatgacataggggct

SEQ ID NO: 8859 - DNA, 157 bp, Glycine max
  Clone ID: PAT_MRT3847_10800C.1
cccacgcgtccgtctatcttcacatatctttacctttctcaaacagcatatgctagctcgggaaccggtgacttccatagggaaactgttatttttgtgcacgctctcatcgatcatcattatttacatagctcatccggctttcataccaaatgca

SEQ ID NO: 8860 - DNA, 831 bp, Glycine max
  Clone ID: PAT_MRT3847_108010C.1
atgggcttaccagctagtcccggtgcagcaacaagaaaagtagtcttctctgctgaagaagcaaaacttcaagctgaaaatggtaataaagtagagttaatgcgaccggaaacatcacctgaagatattgaagggatggtagcaagtgaagcactcgtaacaactcatggtgatggctcagctggtgatttatatttaagagcaattgaaacagtcaatgctgaacatagtgaagagttcgatcaatttttgacttggtctgaagagattgcaagactgcaagctagaatgaatgctgaaacaccacaagatataaaagctggatataattttggttctaaaagaataggtttagttcgtactgagcacatgttctttggccctgaacgtttaatagaaatgcgccgttttatcttagcttcaaatcatgacgaacgtgtacaagctttagaaaaaattaaaacataccaagtagaagattttgaaacaattttcagattatctcaagatagacctacgattgttcgtttacttgatccaccgttacatgagttcttaccatcatctgaagaagatataaacaatgtttctcaacagctgaatgtatcttcagagttcttacgcaagcgaatcgttgacttaaatgaggtcaatccaatgcttggtcatcgtggttgtcgtttggctgtgacttatccagagttatatgagatgcaagttgaagctatcattgaaagtgttattaagcttcaaaaagagggcataacgtgcctaccagaaattatgattcctctcgtgtcaacagtagaagaatttacaactttaaaatga

SEQ ID NO: 8861 - DNA, 596 bp, Glycine max
  unsure (1)..(596): unsure at all n locations
  Clone ID: PAT_MRT3847_108011C.1
caaattgttcgttgattttctccaaaacttagaggttgatacggatcctaataaaggcttagtgagtcacactatccataatgattttcagtatcatagccccaggctcacaacactagataggaactctgatagcacagaatctgagccaagggaaactggcaacagggttgtcaatgtgtccagcatacttgtgaccgaaggtgatcttctgcagcctgaaaggatccataatgggattgtgtttaatgttgtcaagaaagaagacttgtcacccttaagtagtagcagtcatggttttgaaaattacaacattgaagttgctgaatgtgtccaagatgagtgtccagggaaggagatagatgctgctagctctgcatctgaacacggagatgatgaagaatccatgccagccaggtccttaactgacatgccagattacaattccattgatcatcattcgggcacagattcgggtatggatcaaagcattngtgacagttagtgtcaagtatcagttcttttccagtgacattttaatatnnttgttcctattggcctccttattgtaaatagtactcattctagacttggag

SEQ ID NO: 8862 - DNA, 446 bp, Glycine max
  Clone ID: PAT_MRT3847_108012C.1
ttttacatttttttttttttttttttggataatgaaatcttataggttatagagtcaataacaaacaaaaaattacatcaaactagactccccaaagtgcggaggggttaacagaccctacaaatattatatttgcgagtgatttaagtgtatttattctccataccttctttttatcttgaggacgactggtatgcttatgaaatcgcatttggcctttaaaaaaaatacggggatgagaaagctaaacaaacagggggaattaaaaacacttgggttttttttgcaacggccattccaaagggttcatccatatcaaaatcctcaggtttcatcttattggggagtccccaataaaaatgaaagtgtaataactcttatggaagcgtagtgctagccaatccaaatgtgatgcctggacacattctccttcctggcccaaaagg

SEQ ID NO: 8863 - DNA, 348 bp, Glycine max
  unsure (1)..(348): unsure at all n locations
  Clone ID: PAT_MRT3847_108013C.1
ccccttcctacaagttacaaacttctataaaactaatgaacctaaatttcttgacttgagaggagctgatgctgcaatttgcttgttaagtagcccattaattttgtgacaagttgcaatgaatcatctaaaagttatactggaagtctgatctcttccactgcaaaagttatgtttgaagtcatcttccatgtaattgtagagtgccntctggnatttgaaacttgaagtattgatgcatttactaatgaaagatcttcatttttacacccgaagtactataaaataatttggattgatgggtatcaggatcttgatcaatacacaataaacactgtcactctgatt

SEQ ID NO: 8864 - DNA, 281 bp, Glycine max
  Clone ID: PAT_MRT3847_108014C.1
atacaaactttcttcaccttttattcttaacaaaatttcccaaaaaaaaaaaaaaaaaccttttccactttatttctaccccctccatatatccctccttcttaaatattcacatatatcttagtcccttaaacaaaacctatttcgacccataaaatatgtctcccttatattcccctattaaccccccatttcccactttactttatgccacacgcaaaatcacccttcaaccaaaaacccactcccccccattttaatattcaaaacccgcttacccc

SEQ ID NO: 8865 - DNA, 413 bp, Glycine max
  Clone ID: PAT_MRT3847_108015C.1
cccacgcatgcgcccacgcgttcgaccacgcgtgcgtgttattgtaactctgggttcttccggtgtggggcagtgttagtatctcactttactctctcctgaaaatgatttgctgtgttggtcactgacgcctcggtaactaactgcaagtgcggcaacagctaccatacgctgcaagatgtacccaaacttgagcatctctgagataaccaccaccaataccttggtcatggtagtggtacctgttaaagcacaattactggatgctgaaatggatattccccattagaactatggttgcaaaagtagaccaaactgatgctgcaacccctgcacttgcatgtgaggtgttgggagaccaagctttacccatatatagcccttaattaggaattatgataaactattaatgt

SEQ ID NO: 8866 - DNA, 394 bp, Glycine max
  Clone ID: PAT_MRT3847_108016C.1
cgttcccctcttagctggtggatcaccaacgctgagtgcccgtacaccttgagtagcttgacattggagtcaatcgccgcctggacggccagggcacatgcttcatactcagccatattgttggtgcaatcaaaccccagcctggctatgataggcatacattgattgtctggagagaccaatactgctccaatgccatggcctagaatgtttgacgctccatcaaaccatacggtccatttgtcccggtcctcatctagtttttcctcaaacaaggccatgatgtcgtcatccgggaattcgggatgcatgggctgatagtcgttgagaggctgctaagccaaataatctgctaagatgcacgagaaatgcaatatgtattgggtatatatat

SEQ ID NO: 8867 - DNA, 174 bp, Glycine max
  Clone ID: PAT_MRT3847_108017C.1
aatcgcataaataaacacaaagccttattcacaggacgggggggtctttctagaaaacaaacatacctttcctttcccgggggacaggtttgaccctttggccacatatgctcttatagccccccatgggggaaattataatcttgcacaacatattccccaaaaaattttaaa

SEQ ID NO: 8868 - DNA, 248 bp, Glycine max
  Clone ID: PAT_MRT3847_108018C.1
cggattcccggtcgacccacgcgtccgaagcttcagaatccaccgaagggtcatcataaggctaataatcatgtttttcagggtggtgctctgtgctttaattctttcttcttctttcgattgtaccattttctatattgctttctgttcttctctatttttggcttttatctttcttcccctaactatggatgcatgatcctttagttcttccggaacccttaaaacacgatcactggaccctcttt

SEQ ID NO: 8869 - DNA, 251 bp, Glycine max
  Clone ID: PAT_MRT3847_108019C.1
tacaggtgtgcagaccacgagtgagggcacgacgtatgtgcgacttgctattacaacgaaaggggatgggataatacaggaggaggggatgcgaggtcgacttaagggtatatgctatatcaagagtggatgcgcacttctatgcactggtatgcatagttgcgggccctcacttactaatcgtgacgacataggtatataacacacatctttctcatgcggagagcactgcataatcattacttgctcat

SEQ ID NO: 8870 - DNA, 2602 bp, Glycine max
  Clone ID: PAT_MRT3847_10801C.1
taccctcacatttttttttctctctctaaaacattcttttcttttcttttcactgatccttgaatctggtaagactcaacttcaaccataactgtttcaactttgatcttcctccatatcacagtcccaaaaggagattttttttttatttttaaaaaagacccaccttaaaaaaaaaaaaaaagaaacagtggtcttattttctttgactgcaccacaaattgtggggtgtcttcaaaatcattgctttctcacttttgtctgccaaagttagggtctttagaattagcgtttgcaaagcccagcttttggagatttatgattagggttttggaggggagagggattttgggggtgtttggatggtgagaaattagaaattgagggaaaatgtggttggtgctagttgggggagtaaatgagaaattttgagagatggggtgtgcgtttgggagagaggcttcgagggaggagaggagagaggaagtgagagaggcaaaagctgaggaggagggtagaggagaggttgttgagaatgagaacattgagaaggagggtggaagagaggagaggaggacaagggcaaggggagagaggaggcgatcttcgaagccgaatccgaggttgagcaatcctcctaaccatgttcatggtgagcaggttgcagcagggtggccctcttggctctctaagacagctggggaggctatcaatggattgacccctcggagggccgacacttttgagaagattgataagattgggcaaggtacatacagcaatgtttacaaagctagggatactttaacggggaaaattgttgctctaaagaaggtccgttttgacaatttagagcctgagagtgtcaagttcatggccagagagattttgattctccggcgtctggatcatcccaatgtcatcaaactggaaggcttagtgacttctagaatgtcatgcagtttatatcttgtgtttgaatacatggtgcatgatttggctggacttgccacaaacccagcaatcaagttcacagagtctcaggttaaaatgttacatgcatcagttattttctggactggaacactgtcacaaccgtcatgtgctgcatcgtgatataaaggggtcgaaccttcttattgacaatgatggaattctcaagattggtgattttggattagcttccttctttgatcctaatcacaagcaccctatgaccagtagagtggttactttatggtatcgacctccagaacttcttcttggggccactgaatatagtgtaggagtggatctctggagtgctggctgcattcttgctgaattgttggctggaaagcctattatgcctggtcgaacagaggtggagcagctacacaagatattcaaactatgtggttctccttctgatgaatattggaaaaagtcaaagttgcctcatgctaccatttttaagccccaacaatcatacaagcgatgcattgcagagacatataaagattttcctccatcatctctgccacttatggatacccttctcgcaatcaatccagatgaacgtttgactgccactgctgcattgcatagtgaattcttcacaacaaaaccatatgcttgtgagccctctagccttccaaaatatcctcccagcaaggagatggatgcaaagctacgggatgaagaagctaggagattgagagcagctggtaaagctaatgctgatggtgtcaagaaatctcgtccacgtgagcgagttgggaggggaattgcagttccagaggccaatgccgaactgcaagcaaatattgatagacgacggctgatcacacattcaaatgctaagagcaagagtgagaagtttcctcctccccaccaagatggagctctaggctatcctttgggttcttcacatcacatggacccagtttttgatccccctgatgttccatttagttctacaaacttctcacaacctaaagcaaatatccaaacctggtccggcccattggtagatccttctggtgtgggcgtgccgaggagaaagaagaaacatggcaagtgatgagcatcatatacaatcaaattcatcaaaggaggactcaaaaaagataggaatgagtcgggagtcaaagaaatattcttgtagtataacaccaatcaatttttttgaagtattcatgatgaagctgcaaatgttgctgagttgatgtctgtcctctagttgctaaaggcattggaggtaaaccaaattgtattttcctgcttccatttctttctcaatgatcaaaggtttattctctatcttgtatatcttattttttttttcttcttgaactacaaagtttaattaggttagatgaatatctaataaataggttttgggaacagtattggcaatttatatttctccctaatttttttcccatttaatttctactttccagaagcctgtgaactgtgcagtacttatacacagcattcttttaaattttttggtttattcataaaattctctattatccttttttgtgcattagtttaaagaaagccttgtgattgtcatttgacgatgaatagtgatatggttcctggttgcactggt

SEQ ID NO: 8871 - DNA, 223 bp, Glycine max
  Clone ID: PAT_MRT3847_108020C.1
cgcctcaaccaccccatacctaccttaagccatggctgattaccagctcgaaaacgaaggtaaccctgttgaaaatggaggcacataacatatgccgtcagacataacagcactatgtgggataacaccagcaccagcggaagatgaaagacgccctctaactgtggcgcaatatgacagtgagctcgacaaaggtataggacacaatctcctatccccatat

SEQ ID NO: 8872 - DNA, 422 bp, Glycine max
  Clone ID: PAT_MRT3847_108021C.1
gacttcatctcttcacacaaaaaaaaagagaggaggatgtttttgaagaacaacattctcgttctcaacgtgtcatacgtgctacttttccttgttgcgagttctactagtgcctacttgaagctgaatatacttgacctgctcatgaaaagtgatcatcattaacactcaaatgatgatgagtcttcaaaaccatgctgcgatcaataagcatgcacaaagttaaaccctcctcaatgcatctaactaacattttatgctgcattcatgcccctcaaaaagtaagagcttttattttcttacgctcaccaaacagtttagtcttcatttttttactaccatctacttttttttcaaacctttttaatttctataatattttaaaaaaacctaataacttttttatattgaccaaaccccct

SEQ ID NO: 8873 - DNA, 460 bp, Glycine max
  Clone ID: PAT_MRT3847_108022C.1
caaagaaggaaaaaaaatggatcctgttgagcaaatttctgaagagtggagttctcttagtggattctacacagctgaggaagctaactttatgagccagttgcttggtaactgctcactccctgagaacctgtgtggaaatttcaatttgggaattccatctgcaatatggcctggccatgaatccactatagtgagcgtgacaggaatcaatgaaagtccatattttcatgcaaatggtgataacaataataataattatttatgtttttcacaaggaagtagctccactgctgatagtagcaatatttttcctactacaagtggtaatagttacactttgaatgatccagtggccaacattggctacatgtccacggattttgccaatttaggcccatgtaatgttcaagggagtgacagccaacagttaaatgaaaacacccatgaagagttaggt

SEQ ID NO: 8874 - DNA, 343 bp, Glycine max
  Clone ID: PAT_MRT3847_108023C.1
gcgggaaaatacccacccaaccatggctgcaacccttcctttttctttgattatgaactgcgcgccttttaaacttgcaacacctttcgctcccaaaaccttcaactttaatattgttctccctcttaaaccacgcatgttggtctctaatacctgtgctgacaacaactaaaatgctggcaacaaaacaacagttcttaattttgataggtaagctccaacaatgtagcagacctttgacttttttcattatctttttaacttattttatgaacaatttcttcttattcatggaaaccttcttattgaggcatgaatatttatttacctaaattacttaaat

SEQ ID NO: 8875 - DNA, 232 bp, Glycine max
  Clone ID: PAT_MRT3847_108024C.1
cgcctaatgattaggaactttgtattgagcaaagcccaagatcagtctttgctttcccctttcaaccacacgcactcaaatcccttgtaatgggtctgtttgggcggtaatgtgggctgcaatcgggatctacctctctttcgtaggcgtggtcggatctctaatcaaatcctccaatccagatgcatggttacagtctgctggaccgtgcagcgcgggcatcaccgtctac

SEQ ID NO: 8876 - DNA, 377 bp, Glycine max
  Clone ID: PAT_MRT3847_108025C.1
cctacgcttccgcccacgcgtacggccacgcggggggaaattttgataaacggcgcttacaggacgccggacgttaaaacagctacctcaaccaccggcttcctgctcccacgagatgctgaattccttacagcggtcgctggggcggatcgtctcaagggaaagaaacgtcattctctgtggtggccacagacttcgggaatcattttcttttccactcttagcttatttgctacacgctatgataccagagataggatttggggccacagcggaaccttcggtgcctctttatcagctttctgcttaatagtaagttgaagctggtgaaaacttggattagcactcccactctcctatctggggtaggatttcgt

SEQ ID NO: 8877 - DNA, 451 bp, Glycine max
  Clone ID: PAT_MRT3847_108026C.1
tgaggctgaagctggagcattaatttttaatcatgtggagtggacaggggaagctattttcattttgggagagattctatggtagggattcaggggaaaaccatacaaaaagacaaagacaaatacgtgtaacttctcttctctttatttattcattcatttaaatacctcacctactatacaatacaatatcactcatctttccccacaagttagtaccagtgctatgttttaaatttaatatttaatgccttaaaagcattataattatttaataggattctatttacaatattataaatactaactgatatcctaacaacatttgttaagaaatttaaatcatttttttattgagaagttcaattatctcttgtgttttacataataaatatatttttcttttatttttttaatcaatgttgtgtcatactagttaataacatcctta

SEQ ID NO: 8878 - DNA, 486 bp, Glycine max
  Clone ID: PAT_MRT3847_108027C.1
ggctcgagatggtctgcggatcacacactctgttcaatttctaaggggtagctattgctttgacgacgtgccccctttcttacaaaagacaacgccttctctctggatcctacgtatctattctatgcgtttggctattgggtgatagaaggcattcacagtgaaattcgttgctgtatcataatcgatttatctaaccaggactgagtgacctaatggagtctaaaggtgggaaaacgaagtgtagtacaagtcataggaaagcaatttttgacgaagctgccctacgatacagcattggggactttagacccaaccgtggaatcaagaaatacagatctgctggttactctaactgtcatcgcataccatactgatacacatccggatggagagtagcagcgcatgcaaccataagtatattaggaatgcttcttgttaggtttcaaatagggatggtggcagcgctccttaaaactccatctt

SEQ ID NO: 8879 - DNA, 142 bp, Glycine max
  Clone ID: PAT_MRT3847_108028C.1
ggcccggcgctttatgatttatgttcatgccaagatgatgatagttgatgatgaatacataatctttcgatctggctacataaaccagacatccatggatggtgccccacattctgatattgccatgggcgcttattcaccc

SEQ ID NO: 8880 - DNA, 1125 bp, Glycine max
  Clone ID: PAT_MRT3847_108029C.1
ccacgcgacacacaacatttacatttctctctcttccagtatggcttcttctcacaatgagttttatgcacttatgctagtggtggtggttggctccatggtggcttcctgtggtgctaacttcaaccaagactttgatctaacatggggtgatcaccgtgctaagatattcaatggtggtcagcttctatctctttccctggacaaagtctctggctctggcttccaatccaagaaagagtacttatttggaaggatcgatatgcaactcaagctcgttgctggcaactctgccggcactgtcactgcttactacttgtcgtctcaagggccaactcatgatgagattgattttgaattcttgggaaacgtgagcggtgacccttacattctccacacaaacgtgtttaccaaaggccaagggaacagagagcaacagttctatctctggttcgaccccaccagaaacttccacacttactccatcatctggaagccccaacacatcatattcttggtggataacattcccataagggtgttcaagaatgctgagactattggcgttcctttcccgaagaaccaacccatgagaatctattctagcttgtggaacgctgatgactgggccaccagaggtggtttggtgaaaactgattggtcaaaagcaccctttacagcatactaccgcaatttcaaagccacagagttctccacctcttcttccaattccttctctgatgctgcatggcagagcaacgagcttgatgcctatggcagaagaaaactgagatgggctcagaagtacttcatgatctataactactgcaacgatcttaagcgattcccacaaggcattcccgctgagtgcaggcgctgagaaatactatgttatattattatgtgtcagtcggtcttatgattctttaattttatgtcttcctcggagctatttttcttttctctaagtttctcctttattcatcatcaaaataaatcaattaaattcgttgtaccactttcttataagttttatggtgagttttcacgtcgtggagtcaaattcttaaattctgtaaatcccatttccaaagtcagggccaatttcccaaacccaagcaaccc

SEQ ID NO: 8881 - DNA, 446 bp, Glycine max
  Clone ID: PAT_MRT3847_10802C.1
ggctcgaggggaattgctcaaggagatggttgatgatgcagggatacagccggatgtggtgtcttataacatactcattgatgggtgtatactggtggatgacagtgctggggctctttccttctttaatgagatgagagcaagaggaatagctcccaccaagattagttacactactttgatgaaggctttcgcatactcgggtcagccgaagcttgctcacagagtgtttaacgagatggacagtgaccctcgggtgaaggtggatttgatcgcgtggaacatgttggtggaaggatattgcaggttgcgattgctggaagaggctaataaagtggttcacaagatgaaggagagtggatttcaccctgatgtgggcactgatggcagattagccaacggaattgcattggcaacgaacccggagaggcacttgtgctttggaa

SEQ ID NO: 8882 - DNA, 130 bp, Glycine max
  unsure (1)..(130): unsure at all n locations
  Clone ID: PAT_MRT3847_108030C.1
anaagtgcgnatgaagntcntgantanggtctcggangnnggcagnnnatatctaccgngggttaaancatttagcatatgtgctganggggtancctntgtagancactanannactatcncntaatat

SEQ ID NO: 8883 - DNA, 688 bp, Glycine max
  Clone ID: PAT_MRT3847_108031C.1
aattctacctctggttcgaccccaccagaaacttccacacttactccatattcggctcgccccaacacatcatattcttggtggataacattcccataagggtgttcaagaatggtgagactattggcgttcctttcccaaagaagcaacccatgagaatttattctagcctgtggaacgctgatgactgggccaccagaggtggtttggtgaaaactgattggtccaaggcaccctttacagcctactaccgcaatttcaaagccacagagttctccaccaattccttctctgatgctgcatggcagagcaacgagcttgatgcctatggcagaagaaaactgagatgggttcagaagtacttcatgatctataactactgcaacgatcttaagcgattcccacaaggcattcctgttgagtgcaggcgctgagacctcagacctatttttcttttctccttctgctttattcatcatcaaaataaatcaaattcgttgtaccactttcttgatttttaaaaaatatgttttctggccgtacaataaaaagttgtggttgcactgtaatcaacctgcaaactcaatagtctcgaactctgtttgtctctctatattcttatattctgtaattccaatttccaaagtcagggccaatttcacaaacacaagataaatttgttctcttg

SEQ ID NO: 8884 - DNA, 681 bp, Glycine max
  Clone ID: PAT_MRT3847_108032C.1
aacgagtgaaatatgatacatgtaaagtgaaaagacattttgttagaaaaaaggtagagattaaccataagtgtaacatttataaccgttgtatgaacacccttttgtatatatacactttatactttatacacaaaaagtacgaagagtagccccataagaacgagctcactgtgaccttgtattcgatccatcctctgcagatttcttcagagttagccctggcttgctttgacctccctgaatgattaaaatcaagaccagaaattacattttgcaaaagaaacataacatataaaaaataaaaataaaaatgagcgtagctttaaagaaacaaaagttatagcattctcagcagtcaaactacaactttctgggttcaaaaatttgaaatgcgatatacataactcatctcatatcccttgatgctaaagaaaccaacttccaaacatcagaactacagagggtcagaggggttatctgcaacttaacgctactcacataggcattaaaggaaacactcttacagagaaagagcaatttaatctctgaacagtgtcaaatgaatcacctttgcaggtcatctgatggcctgattagtgtgctgttttgtggcacaaacatcttgcgtcaatacattacacttaagaacaacaatctgcatactgcatgcatgcttgc

SEQ ID NO: 8885 - DNA, 468 bp, Glycine max
  Clone ID: PAT_MRT3847_108033C.1
cgttcgaccaagagcagaagaagcaaaaatggctgactttgacaaacacgctgcccagcgcgaggcggagtctctccgcactttggccttcttcggcgtgtgcctgtccaccgtggccacggttatcgctgtgctttccgtgccgttcgcctaccagcacttccaacagattggcacccaaatgcagaacgaagtggacttctgcaaaatgcgctccggcaacatgtggcgcgaggtcacccgcacccaggcctactccaaggtgtcgcacgacagccgtcacaagcgtcaggcaggcggttgctgtggctgcggagtgtcgcccccgggcccgcccggaccccctggcccatcgggacaacccggcggagacggacaacccggaggctcaggacagcccggagcaccagcgatggcacctgctcgaccggtcccgctaaacggcggatgcgtgcccagttgtatgct

SEQ ID NO: 8886 - DNA, 383 bp, Glycine max
  Clone ID: PAT_MRT3847_108034C.1
aaagtgaattggaaaattttctagagcactactgatgctcgatcatttcacactgacacatgggtcaagggctccaatatgttaaaaagcccacaccccaattccaataattccaaatcaggctaacaaaaatttaattttttttaccaggttttgttaactttccaaaggccctttgggaaaaaaattttaaaatttggccgcaaaataataagcccatgttttttttccccattattttggggggcaaaatgggggggttgggcaatttccaaaaatttgccaattttttggggtttttgcctccaaaccccagggtgaaaaccaaaatttccttttaaaaaactttgggggttttttttggtccccccaccttttttggc

SEQ ID NO: 8887 - DNA, 182 bp, Glycine max
  Clone ID: PAT_MRT3847_108035C.1
agaagctatagagcgtccgcatgacaccgcgtcacgataagcctgtggtatccctcctagcagcggcgccccctgttttttttttgtttttttttttttaagactagcatctttctcattaatctaattactgaaacagggaacagattctttcaatacctaattttacactgcaccaaaat

SEQ ID NO: 8888 - DNA, 1000 bp, Glycine max
  Clone ID: PAT_MRT3847_108036C.1
cccacgcgtccgcccacgcgtccgacggctgcgagaagacgacagaaggggaagcctaaaaataaaatatcttgtcattcaattccactcacattcgccatatcgtcttctcccatggccgccaccgatgaatccctccgcaaatccctcgccgagaagcacgccgcggtggaagcccaaggcaacgccgtccgcgccctcaaggccgccaaagccgccaaacccgaaatcgacgccgcaatcgaagccctaaacgcgctgaagctcgaaaaaagctccatcgagcactccctcctcggcggctccgacagccgcaaggccttccgtcagtccgtggtgaacacccttgaacggcgcctcttctacatcccctccttcaagatctaccgcggcgtcgccggcctattcgactacggccctcccggctgctccgtcaagtccaacgtgctctcgttctggcgccaacacttcgtcctggaagagaacatggtcgaagtcgattgcccctgcgtcactcctgaaatcgttctcaaggcctcacggtggtgggtttcgtagaggaagagtccatgacgaggaaggcaactcagatctgagtggaagaagaagagatgagagagaaaataaacgagggacaagtctggaggagatgcgcgagggtgtgaacacgtggcgcattgtggaagcggaggaagaaccagagtccctgctgctgcgacgatggaggtgccgcccccgccgctgggcttccgagaggccgagagtgattcgccgcctcgctggcggaaaccaccggacctacggcggcggcttcctcgccgtctccgctgtattgagggaagttgtttgaattggaatgtgagagaaagattagggacaaatctggaaagacagaaaagaagaaaagaaaaaatataaaaaggaaaaaaaatctaagctgtccatttaatctaacgtatatattgatcctttcacacggtgcgtaaaaagtttacgtacg

SEQ ID NO: 8889 - DNA, 600 bp, Glycine max
  Clone ID: PAT_MRT3847_108037C.1
tttggtgtatatgaagcattatagcgatttcttgcaggtggccatgatacctcaggactgggtagaggttctattatgcttgctggaggtgtggatggagctgctttctggctcatggtttacccaactgatgttgttaagagtgtgattcaagtagatgattacaaaaacccgaagttctttggttcaattgatgctttcagaagaatttcagcttctgaggggatcaagggcctttataagggttttggtcctgcgatggcccgaagtgttcctgccaatgcagcttgcttcttggcttatgagatgacaagatcagctctgggatgaataattcatatagcaggtctgataggagggatgccattgagtgcacatgtttccttttctttttaattccaaaaacattttcatttcatgcattgcgattgcaatattgccacaaaggcttaacttgttattgcttcaaggaatcattctttcacccattgtaatacacatccagcctttttatttcagtgttatgtgtttttatcttcatgcttgaaatattgcttacgcacaacattaagatggaatcatttgaaattgcaagaatta

SEQ ID NO: 8890 - DNA, 665 bp, Glycine max
  unsure (1)..(665): unsure at all n locations
  Clone ID: PAT_MRT3847_108038C.1
cccacgcgtccgcccacgcgtccgcgtaaccaatcttcactgaaccgcaccgcttccatttcatggcgttcgttcactacttgctctcagttcccaacaaacccatcgctctcgtcgacgatttcctcacactgtttaaacctctctcccactctccgccccaaaactcactattctccaggctccgcagaatcgctcacaaaggtaaaaaatatatatacgtagccgctaattttctgcatttgctttgaattcagctaaggcgaagccgcaggagctggcagtaactgtggcgagtgatgcgtttacgcaattcaagcatctgcttctgcctattacggataggaatccctatctctctgagagtacaagacaagctatagcaaccacctctgctttagctaaaaagtatggagctgacattactgttgttgttattgacgaacagcagaaggagtcactgcctgagcatgagacccaactacccagtatccgttggcatctatctgaaggtttgtaataactattttctttgtttcacttattgcattttatctgttgagacccttcaaagtacaataccataatatgttttcttattctgtgagcatcccttcacagcatgagcattntctttgaatggttttgtatggcaagttttcatg

SEQ ID NO: 8891 - DNA, 233 bp, Glycine max
  unsure (1)..(233): unsure at all n locations
  Clone ID: PAT_MRT3847_108039C.1
acaatattgaggattaanagaagaaaaaaaatgaaaaccaaacatgcacccccaacaaccgcagagcactagagaagagagaggtgtctagataagcaatagaaatgatattattcaatgtccatgatcatgataggtaagagacactatatatacacaaacattttcactggcgtggcttccagcaccaccaacgtcaaaaaaaccagtcacaggtcacaaataatttcgca

SEQ ID NO: 8892 - DNA, 3861 bp, Glycine max
  Clone ID: PAT_MRT3847_10803C.1
atgaataacaacggtggtttttcatccaatatcttggttcttgatggaaagaactgggataggtggagtgctttgatgaagtctctctttggtgcgcaagaagtgagtgatcttgtgcagaatggctatgaggatttgggtgcgaatcctactgaagcacaaagactggtgttcaaagaagcaaagaagaaagattgtaaggctctgttttacattcagcagaatgtagattcttatcattttgagaagattgcaaaggccacaagatccaaagaagcgtgggatattcttgaaaaatatcatgatggtggtgaaaaggtgaagcaagtgaagcttcagtcattcagaaggaagtatgagatgatgcagatggaggaaggtcagaaaattggggattatttctcaaaactgacatctttagtgaaccagatgcagacttgtggtgaagtcattactgatcaaatggtggtggaaaaggtattaagatccttgacctctaaatttgatttcatagttgtagctattcaagaagcaaaagatgtgaaagccatgaagattgaggagctgcagaattcattagaagcacatgagctcatggtaattgatagaggtactgagagatcagtacaacaagcactgcaagcacaaatttcaaagaaggaaggaaattcaaagaactccaagaagaagggaaaaggcaaaggaaattggtctaataatgggaaggccaagactgatgacaaagctgaatcttctaaaagaggaggctctgacagaggtcataacaagaagaaggagtttgataagagtaaagtgcagtgctacaactgtgagaagtatggacattttgctgatgagtgttggttcaagaaggatcggcagaataatgaagaagctaatgtggctcagggtaaagatcctcatactgtgttgatgatggctacaacttgtgaagataaggtgcagaatgaagaatggtatcttgattctggatgttccaatcatatgactgcacatagagaatggttaacaagctttgataatagcaagaaaactagtatcaagcttgctgacaatagaaagcttgcagctgaaggaattggaaatattgtcatcagagggaatgatgggaagagggtaataattgaaaaagtcttgtatgttccagaaatgaattgcaacttgatgagcataggtcaactggtggagaagggtttttcagtaaccatggatggtgattcactgaaactgtttgatgcagagaagaatctggtactgaagtctaatctgtcaaagaacaggacctacaagtgcagcatctctagtgataagatgatgtgcatgtctggagttacaagtgaagaaactgaggctttgtggcatatgagaagggaaatctgtgaaatttgtgtgaagagcaagcagagtaggctaccatttgtgcctgaagcgcctaagagagccagtgctgcattacaagtggtacactctgacacctgtggtccctttgaagtgccctccttaggtggcagcaagtactttatcacttttatagatgagtttactcggatgttgtggttgtatactctaaagctgaagagtgaagctttggatgtgttcaagaggtttaaggttttaattgagaaggagagtgataagtcaataaaaatcttaagaacagatggtggaggtgaatatacttcaaaagattttgaagcattctgcacaagtcatggtattgtgcatgaggtgacaaccccatatacaccacagcataatgggcttgctgagagaagaaacagaactttacttggcatggccagaagcatgatcaagcagaagaaattgccacatcagttttggggtgaagcaattaccacagctgcatacatcctcaataagtgtcccacaaagaagctggagaaggttccagaggaagcttggtgtggaaggaagcctagtgtacaacatctgagagtttttggctcattgtgttacaagcatgtgccagatgtcagaagaagtaagctagaggataagagtgagatcatgatacttataggttaccacccaactggtgcttataagctatatgatcctacaactcagagggtgcatattagcagagatgtgatagtgagtgaatctgaaagctggaaatggcaggtgacaccagtgtacagcagtgagattcaacaaggcttcatataccctgattcgagtgatgaatcagaagatgaaggtgataatgaagtggatggtaatgtaccacaggaggatgaagcttctgtgaggcctcagaggattagacaagctcctaggaggctggatgattgtgaaagagcactggacaatgcagtgagtgatgagggtgatctcattcattttgcattgttagcagatgctgagcctgttgagtacagagatgctttgaagaacaaagtctggaagaaggcaatgatggaagaactcagttcaattgagaagaatcagacctgggagctagtaaaactaccagagaataagaaaacaattgatctgaagtgggtgttcaaaaccaaattgaatccagatggaagtgtgtcaaagcacaaggcaaggctggttgcaagagggtttcttcagaagcaaggaattgattataacgaagtatttgcacctgtagccagacatgagacagtgaggctagtagtggcactagcaaacttgaggaattggcctttataccatttagatgtgaaatctgcattcctaaatggtcctttagaagaaacagtgtttgtaactcaaccaccagggtttgagatagctggaaaggagggtatggtgtacaggttgcataaggccttatatggtttgaagcaggcacccagagcctggaataagaggattgatgaattcctaattcaattggggtttaagaagtgtacagttgaatatggtgtatatgtgatgaattcaaaggattcaggaatgttgatcatctgtttgtatgtagatgatttgctgataacaggaagtgatcctgaagaaataaaggaattcaagcttaccctaaaccaagaatttgagatgactgatctaggtgaattgtcatacttcttgggtctggagtttgtgaagacaaagaaagggatgatcatgcatcaacagaagtatgtgcttgagatactggacagatttgggttgattgagtgtaagtcaatctcaaatccttgtgaaactagttcaaaactggaagaatgtagtgaagaggagaaagctgatgcaaccatgtacaaacaactggtaggttcactcagatacttatgcaatagcagacctgacatttgctatgcagtaggtgtcatcagtagatttatgaatgagcctagaaaatcacatctgatagctgccaagaggattttgagatatgtgaagggcactgcaaactatggtttggtatttcctgcaaacagaggtgaggatcagctggatcttattggttactcagactctgattggtgtggtgacagagtagacagaagaagcacatctggatatgtgttcatgcttaatggtgtagccatatgttggtcatcaaagaagcaaccagtgacaacattatcatcatgtgaggctgagtacattgcaggaacttatgcagcttgtcagctgccaagaatccagtgtcacatggaaggtcaaaacataacaaggtttcatttcataagagaacaggtgatgagtgggaggattgaattggtgtattgccctactcaggatcagcttgcagatggttttacaaaagctctgaagctggacagatttgaagaactcagaaggaagctgggtctgactggtgtagagattatggattag

SEQ ID NO: 8893 - DNA, 453 bp, Glycine max
  Clone ID: PAT_MRT3847_108040C.1
cccacgcgtccgcccacgcgtccgcccaatcttcactgaaccgcaccgcttccatttcatggcgttcgttcactacttgctctcagttcccaacaaacccatcgctctcgtcgacgatttcctcacactgtttaaacctctctcccactctccgccccaaaactcactattctccaggctccgcagaatcgctcacaaagctaaggcgaagccgcaggagctggaagtaactgtggcgagtgatgcgtttacgcaattcaagcatctgcttctgcctattacggataggaatccctatctctctgagagtacaagacaagctatagcaaccacctctgctttagctaaaaagtatggagctgacattactgttgtgtgtattgacgaacagcagaaggagtcactgcctgagcatgagacccaactatccagtatccggtggcatctatctga

SEQ ID NO: 8894 - DNA, 713 bp, Glycine max
  unsure (1)..(713): unsure at all n locations
  Clone ID: PAT_MRT3847_108041C.1
gtccggaattcccgcgtcgaccctgcgtccggcccttcagtggcatattcgagccaaggctcgaagtcggctagattgtgatggggaatttcatgtgtctcccccacggtttaagagacatgttcatgatcagtttggggttgtcggctctcaatgagtatgggagtggagttattgacattctcactaggagtgtatgctacattggatggtgtatagttgggaggcaagccatatggtaggaaggcattcttgttttgactttgtgcataatgggggccgcccgtacttcccaaatcttgcctaccatagctgaggttggatgattcatttggttgaggccagatcggggcatcgggttcaccttagcaagagtgctggtagcggcaattgtaaccgcattggcatccattatcttcttcatgctcatcatgaccttcatcatcgtggccattttctctttcatggcctccatgtcggccttcaccttttcttgcacctcctctgctttacccattactctagctctagcacaggttccggtaagggcgccgtaaagcatgnnngtttttttntcttttttatacaatgatttaattctttttttttcaaggaaagaatgccatgagcaatgcaaccaatgaacaacatgggntggatgccaatgatgcccagnttgaagtattgcaaaattttacactggatatggggtt

SEQ ID NO: 8895 - DNA, 1010 bp, Glycine max
  Clone ID: PAT_MRT3847_108042C.1
tttatgttgttgtcgtcgcctccttttttctggaagcaaccccaatcttcactgatccgcgcacttagcaccgcttccatttgatggcgttcgctcactacttgctcgcagttcccgttgagccctctcccaacttcccgacaaaccctcccaaaccaaacccatcgctgtcgtcgtcgtcgtcgtcgtcgatttcctcacactgtttcaacctctcttcgtctctccgccccaaacactcgctattctccaggttccgcaggatctgtcacaaagctaaggctaagccgcaggaacctgaagtgactgtggcgagtgatgcatttacgcaattcaagcatctgcttctgcctattacggataggaatccctatctctctgagggtacaagacaagctatagcaaccacctctgctttagctaaaaagtatggagctgacattactgttgtagttattgatgcacagcagaaagagtcactgcctgagcatgagacccaactatccagcatccgttggcatctatctgaaggtgggttgaaggactataacttgctagagcggcttggtgatggcaacaagccaacagcaattattggtgatgttgctgatgaccttaatttggatttggtagttattagcatggaagcaattcatacgaagcatatagatgcaaatttgcttgctgagttcattccctgtcctgtcatgcttttgccattgtagtttgcatatttttaaagataggaaacggtttttgtttcatctgctctgtcttctctgatgcaatttgatattccatcatgttgtttttagcatttgctactccagtgtcagggatgttttgttaaaaatgtacaagtgtgcctgactaaggtggggtgtgtgtatatatgtatgctgaagaatgactcatttttatgcctggaaaggaaccatgttagatttttattttggacactattttttctaaaatgataaatatgagaggaatttggatcctttcatctg

SEQ ID NO: 8896 - DNA, 131 bp, Glycine max
  Clone ID: PAT_MRT3847_108043C.1
ataaccctttggttaaacttaggtaggggcctggttgcaaagggttaattggtaactttaacaacttaaaagaccgttggtaaaaacaatgcgaaccgccaataacaatcactgacaaattagggattcct

SEQ ID NO: 8897 - DNA, 839 bp, Glycine max
  Clone ID: PAT_MRT3847_108044C.1
aatacagaagaaaataaagttttatgtcgaattaaatcttttgccttcacaaatagtatggaatcatttatagacaaacaataacattcaatacagtatggtttgattagcaattgtataataaaaggacacaaacacaatatgccaagtgaccaagcaaagagaaatgcagcctatacaatatacaaaagcacgctccacacagagaacaccccctaggcaaacttcaaagttggggaatcagaatttcagaaatacaagcacatgagattgtttacaccacttctgtcacgctgttttcttcagtggtccgagcttccatattttctttgcctccctttggagtgctaacttctttaacatcagatttctttccctgcctctttatcatgcccttttccttatttggttcttgcttgcttggcttctcagattttttaaccaacctattattcctgttgtctagagcaggccttggagttgtggtgtttgtgctgagattccctctcaacctggatccaggattactcttttgacttgtctccttctttgctgactctgtcgaaggtgtgagttgagtagaatcagtgtttaagcactttggtttcagttttctagtccccatggtagaagaagagctacgcacatcatcatcggaagaccgagttccctcttctggcacatgtgaaattgtctcagacacctgcaactgctccatgctttctgagatgttatagctctcaaacaatgctttcacagtttcttcaaggccatcaagctgatgtctccccacatatgattttagcccttcttgcattggcccgagaggctcacatccc

SEQ ID NO: 8898 - DNA, 388 bp, Glycine max
  Clone ID: PAT_MRT3847_108045C.1
ccggggcgtgagagctgtccccgtctagccattgattgggaaaagaccacgcttcaaagatgagtaagcttcagagtgatgctcttagagaagctatcttaagaatcatgactgatttcaaggcaaagaacatgaaatttgaggagaccattgaactacaaattgggctgaaaaactatgatccccataaggacacggcgcgtagtggctctgttaaatctgctgagattgctcgacccaagaagaagacatggctgcttggggaggcccaacacgtttgagaggctgagaagatatgattggactacatgggacttgcggcctttgagaagcttaacacaaacaagaaattggtgagagaactaggcaaaaaatatcatgccttttt

SEQ ID NO: 8899 - DNA, 470 bp, Glycine max
  Clone ID: PAT_MRT3847_108046C.1
ttctcgtccgagtttaatttgatagtggaaaagccctcttttaggatacaatgggggctggatcacattcttcataagattttcctgaaaaagaagatcaagaaaaacccataaagattgatgctcagatttgagacatagaattgatcctgtatacattgaggttcaggctcagatggaaacaaatttgttcaaattgtctcttgatgatgctgaaacttctaaaggttccatgttggatcttaaaatttctcaatctaaaattgtacttcctaaaatcacagttggtggaaccattctgtgtagtgatctattggcaaagtttttgacagagggcatttttagagcaagtgttgatttgtagcgcactcattgaattaaaggaatgattaaaatggtggccacagctgtgattcctgagaatacaggcatattattggcctgtgctatgaatagttcttttagggggc

SEQ ID NO: 8900 - DNA, 2262 bp, Glycine max
  unsure (1)..(2262): unsure at all n locations
  Clone ID: PAT_MRT3847_108047C.1
accaagaatttcttcttggaattcaaggatctttaaacggggtaaaaaaannattaaaattggaataattcttattaatctttaaaaaggtattattcattccaaattgaagttaatttaaaaataatttttacaaactcagggttaaaaagaagtggtactttatggggggtaaaattcaatccccaaggtgattaggaacagaattcttggggccagcattcaaggcatctgtggcactttttctttcttcagctggatctctgggtaagtttccggccagaaatctttcttggaaaagacaaatcaaccttcacatttgttaagggatgggccttccctggttttgcttacacaataaagtcactgactacatggaagtttcataacactcagttcatttcgaaaccaaagcttctgcttttgtgatggaactagagagctgagaggcctaaacctctgtttgctctctcaccctttttggtgcagatcttgaacttgagctgcattttcatagaaaaccagcaccaagaaatggaacataccatgttacctgccattggatctgttttccctcgtggtgtctttgccgcactcttgctcatgttactgttttctttctccacattcacttctatagaagcctatgatccacttgatcctaccggaaatataacaatcaagtgggatgtcattagctggactccagatggctatgttgctgttgtcacaatgtacaactttcaacaatatcgccacattcaggcccccggatggtcattagggtggacatgggctaaaaaggaagtgatttggagcatgatgggagcccaaaccacagagcaaggggactgttcaaagttcaaagcaggcattccacattgttgtaagaaggaccctacagttgtggatttactgccagggactccttacaaccagcagattgcaaattgttgcaaagggggtgtcctaaattcatggggtcaggaccccagcaatgcagtaagttctttccagtttagtgttggttctgccggaacaacaaacaaaaccgtcaaaatgcctaaaaattttaccctcaaagcaccgggacctggctatacttgtggtcctgccaaagttgtgaaaccaactgtatttattaccaatgacaagaggagaaccacccaagccatgatgacctggaatattacctgcacttattctcaattcctggctcaaaaggcaccaagttgctgtgtttccctctcatccttctataatgacacagtagtaaactgcccaacctgcacctgtggttgccgaaacaaaacagaacctggcagctgtgtagatccaaattcgccacatttagcttcagttgtatcagcatcaggcaaaacggcaaacacgccactagtccagtgtaccagccatatgtgtcctattcgagtgcattggcatgtgaagctcaattacaaagagtactggagggtcaagatcacaatcacaaatttcaattacagaatgaactactctcaatggaaccttgttgtgcagcatcctaatttagataatattacccagctcttcagttttaattacaagtcactaaatccctatgagggcttgaatgatacaagtatgctgtggggagtcaagttctacaatgattttctttcttcagctggatctcttggtaatgttcagtcagaaatcttacttagaaaagacaaatcaaccttcacatttgataagggatgggccttccctagaagaatttatttcaatggggataactgtgttatgcctcctccagatgcctacccctggcttccaaatgcaagttctaaactagttttctctttactcagtacagtcatagccactttagcttctttgttaatcttattgaatcaatcatagaaaatataaagatgccatctactctttcggagtattgtacctttctcttctgcaccagcttgttaaagctgaagtcaaccccattgtcaagaatgcatagaagctgctactgaagcaataaaaagtgccacagatgcatgaatgcatgccacaagaattctgtccttattcaccttggggatagaattttaccccccatatatgtaacacatctttttagcctgagttgtataattattttaaattactcaattggatgattatacttttaagattatagaatatccaatttgattgttttaccgttaaaaataaaaatcaaagaagaaattttaggtagcccttttgctggttttg

SEQ ID NO: 8901 - DNA, 169 bp, Glycine max
  Clone ID: PAT_MRT3847_108048C.1
cgatccacaccagaagtcgctaaattaaccccgggggtcccattcatccgagctctcatttaaaggaacatatcgctcttcttaaatgctggactcctctagggaaactaatctgctggttttgcattcactccttctttatacaccatagaaaggctgggggcctctt

SEQ ID NO: 8902 - DNA, 436 bp, Glycine max
  Clone ID: PAT_MRT3847_108049C.1
cccacgcgtccggaagacgacagaagggaatccatgatcatcttgtgcataaaagtcactgtcataatttcctatttttattttgaaaatgttacgcttaaatgaaatttactggttcctgggttaaatgtttacttattgccatcagttacgtgcattgggtaaaatggtgtggtgataatttagttttagtaggggttataaggttggcttggtggtgaggggggagagattgtgggttcgaatcccccactaacaaaaaactaacaattacttttaagcctgtttgagtaagcccatctatcaattgttgtcggttactttttcctatttttttaatttcttttaaactgctttttttatcttttatgcctgtttgattaagcccaccttttgctctctttttcctattgtatttggagggggaggtcgtggg

SEQ ID NO: 8903 - DNA, 3879 bp, Glycine max
  Clone ID: PAT_MRT3847_10804C.1
atgaataacaacggtggtttttcatccaatatcttggttcttgatggaaagaactgggataggtggagtgctttgatgaagtctctctttggtgcgcaagaagtgagtgatcttgtgcagaatggctatgaggatttgggtgcgaatcctactgaagcacaaagactggtgttcaaagaagcaaagaagaaagattgtaaggctctgttttacattcagcagaatgtagattcttatcattttgagaagattgcaaaggccacaagatccaaagaagcgtgggatattcttgaaaaatatcatgatggtggtgaaaaggtgaagcaagtgaagcttcagtcattcagaaggaagtatgagatgatgcagatggaggaaggtcagaaaattggggattatttctcaaaactgacatctttagtgaaccagatgcagacttgtggtgaagtcattactgatcaaatggtggtggaaaaggtattaagatccttgacctctaaatttgatttcatagttgtagctattcaagaagcaaaagatgtgaaagccatgaagattgaggagctgcagaattcattagaagcacatgagctcatggtaattgatagaggtactgagagatcagtacaacaagcactgcaagcacaaatttcaaagaaggaaggaaattcaaagaactccaagaagaagggaaaaggcaaaggaaattggtctaataatgggaaggccaagactgatgacaaagctgaatcttctaaaagaggaggctctgacagaggtcataacaagaagaaggagtttgataagagtaaagtgcagtgctacaactgtgagaagtatggacattttgctgatgagtgttggttcaagaaggatcggcagaataatgaagaagctaatgtggctcagggtaaagatcctcatactgtgttgatgatggctacaacttgtgaagataaggtgcagaatgaagaatggtatcttgattctggatgttccaatcatatgactgcacatagagaatggttaacaagctttgataatagcaagaaaactagtatcaagcttgctgacaatagaaagcttgcagctgaaggaattggaaatattgtcatcagagggaatgatgggaagagggtaataattgaaaaagtcttgtatgttccagaaatgaattgcaacttgatgagcataggtcaactggtggagaagggtttttcagtaaccatggatggtgattcactgaaactgtttgatgcagagaagaatctggtactgaagtctaatctgtcaaagaacaggacctacaagtgcagcatctctagtgataagatgatgtgcatgtctggagttacaagtgaagaaactgaggctttgtggcatatgaggtatggtcatctaaactttagaagtctgagtgaattgaattctaaagatttagtttatggcctgcctaagttgaacgctagaagggaaatctgtgaaatttgtgtgaagagcaagcagagtaggctaccatttgtgactgaagcacctaagagagccagtgctgcattacaagtggtacactctgacacctgtggtccctttgaagtgccctccttaggtggcagcaagtactttatcacttttatagatgagtttactcggatgttgtggttgtatactctaaagctgaagagtgaagctttggatgtgttcaagaggtttaaggttttaattgagaaggagagtgataagtcaataaaaatcttaagaacagatggtggaggtgaatatacttcaaaagattttgaagcattctgcacaagtcatggtattgtgcatgaggtgacaaccccatatacaccacagcataatgggcttgctgagagaagaaacagaactttacttggcatggccagaagcatgatcaagcagaagaaattgccacatcagttttggggtgaagcaattaccacagctgcatacatcctcaataagtgtcccacaaagaagctggagaaggttccagaggaagcttggtgtggaaggaagcctagtgtacaacatctgagagtttttggctcattgtgttacaagcatgtgccagatgtcagaagaagtaagctagaggataagagtgagatcatgatacttataggttaccacccaactggtgcttataagctatatgatcctacaactcagagggtgcatattagcagagatgtgatagtgagtgaatctgaaagctggaaatggcaggtgacaccagtgtacagcagtgagattcaacaaggcttcatataccctgattcgagtgatgaatcagaagatgaaggtgataatgaagtggatggtaatgtaccacaggaggatgaagcttctgtgaggcctcagaggattagacaagctcctaggaggctggatgattgtgaaagagcactggacaatgcagtgagtgatgagggtgatctcattcattttgcattgttagcagatgctgagcctgttgagtacagagatgctttgaagaacaaagtctggaagaaggcaatgatggaagaactcagttcaattgagaagaatcagacctgggagctagtaaaactaccagagaataagaaaacaattgatctgaagtgggtgttcaaaaccaaattgaatccagatggaagtgtgtcaaagcacaaggcaaggctggttgcaagagggtttcttcagaagcaaggaattgattataacgaagtatttgcacctgtagccagacatgagacagtgaggctagtagtggcactagcaaacttgaggaattggcctttataccatttagatgtgaaatctgcattcctaaatggtcctttagaagaaacagtgtttgtaactcaaccaccagggtttgagatagctggaaaggagggtatggtgtacaggttgcataaggccttatatggtttgaagcaggcacccagagcctggaataagaggattgatgaattcctaattcaattggggtttaagaagtgtacagttgaatatggtgtatatgtgatgaattcaaaggattcaggaatgttgatcatctgtttgtatgtagatgatttgctgataacaggaagtgatcctgaagaaataaaggaattcaagcttaccctaaaccaagaatttgagatgactgatctaggtgaattgtcatacttcttgggtctggagtttgtgaagacaaagaaagggatgatcatgcatcaacagaagtatgtgcttgagatactggacagatttgggttgattgagtgtaagtcaatctcaaatccttgtgaaactagttcaaaactggaagaatgtagtgaagaggagaaagctgatgcaaccatgtacaaacaactggtaggttcactcagatacttatgcaatagcagacctgacatttgctatgcagtaggtgtcatcagtagatttatgaatgagcctagaaaatcacatctgatagctgccaagaggattttgagatatgtgaagggcactgcaaactatggtttggtatttcctgcaaacagaggtgaggatcagctggatcttattggttactcagactctgattggtgtggtgacagagtagacagaagaagcacatctggatatgtgttcatgcttaatggtgtagccatatgttggtcatcaaagaagcaaccagtgacaacattatcatcatgtgaggctgagtacattgcaggaacttatgcagcttgtcagctggtgatgagtgggaggattgaattggtgtattgccctactcaggatcagcttgcagatggttttacaaaagctctgaagctggacagatttgaagaactcagaaggaagctgggtctgactggtgtagagattatggattag

SEQ ID NO: 8904 - DNA, 332 bp, Glycine max
  Clone ID: PAT_MRT3847_108050C.1
ccgaatcttacccttcaatggaggtgctccctaagaagaataacaaaggctggcgaaaccccgtgaccagggtgcgaatttagttgaacatcatgctccaaagccagggacctgctgtgagcgatatccctctatgacgattccgtttagaacaacacccacctcatccagcaccactttatcgcccttctttacctctgctccaactccatcgccgaccccttccttaagcccactgcccttgactacggattccgctgcctttcgcacacatgtccgcactctccgtcctccccaacaaggccactcgtacctgcgatgcgcgcctcact

SEQ ID NO: 8905 - DNA, 372 bp, Glycine max
  unsure (1)..(372): unsure at all n locations
  Clone ID: PAT_MRT3847_108051C.1
tgaacaagctatagctcattatttttacttagtttctaaatacccactacttgctacgnacgggatccttctactcagattgagtgactcaattaactatcatatgaaattgtaagcaaaccctaatgaatcaacgttgaacaaggcatacatgaaactcacaaatagggtatctgagacatatataaattcatgagtgatctatattaaactggcacatctgatatggatttagtgagaacaaagaaagtgaaatcatttgtaggattatacatctcaccatttggctaccatttcaatcaatagattttatcacttctagtagtgcttctactaatacacattagatactgctcagttgtacatttaaag

SEQ ID NO: 8906 - DNA, 109 bp, Glycine max
  Clone ID: PAT_MRT3847_108052C.1
ttcttgcgattgtctgcatggaaaaagaataatagactgggttccgattataccgacttggagttcttgaaggagatcggcttgggctcctgcaacatgtggtcttaca

SEQ ID NO: 8907 - DNA, 384 bp, Glycine max
  Clone ID: PAT_MRT3847_108053C.1
cttttccttcttttatgcttaaattatcaccatgaacgactcattaatttcagctgcgcaagtcggtgacatagacttgctctacaaattaattcagatgcaaccatatgtgttggagcaaacagatttcatgccatttgttgatacacctttgcatgttgcagctgctgctggccatgcaagtttcgccactgagatcatgagactcaagccttcatttgcatggaagctgaatccgtgtggacttagccccatgcaccttgctttgcagaacaagcattacagaatggtgtgtcgctttgtggacatcaacaaaaaccttgttagagtcaaaaggagggggggtcttactcctttgcatttgcaactcaaaccgggagaact

SEQ ID NO: 8908 - DNA, 783 bp, Glycine max
  unsure (1)..(783): unsure at all n locations
  Clone ID: PAT_MRT3847_108054C.1
gcggcggccatgtttgtggcgcgcagcatcgcggcggaccacaaggacctcatccacgatgtgtctttcgacttcacgggcgccggatggccacctgctccagcgatcagagcgtcaaggtgtgggataagagcgagagcggagactggcattgtacagctagctggaagacacatagtggatctgtatggcgtgtgacgtgggctcatcctgaatttggacaagttttggcttcctgttcttttgaccgaacagcagctgtatgggaagaaatagtgggagaatcaaacgataaacttcgaggacagagtcactgggtgaagaggacaactctagtggacagcagaacctctgttactgatgtgaaatttgctcccaaacatatgggtctgatgttggccacctgttcagcagatggtatagtaagggtctacgaggctcccgatgtgatgaacctcagccagtggtctctgcagcacgaggtctcgtgtaagctgtgctgcagctgcatttcctggaacccttccagctctcgtgctcatccccccatgatcgctgtgggaagtgatgatagcagtccaaattcaatggccaaggttcagatttttgaatacaatgaaaataccaggaaatatgcgaaagctgagactcttatgacagtcacagaccctgtccatgatatcgcgtttgctccaaatttgggaagatctttccacantcctggcagtagcaaccaaagatgtaagaattttcacatttaaaacctctgaggaaagaacttac

SEQ ID NO: 8909 - DNA, 254 bp, Glycine max
  Clone ID: PAT_MRT3847_108055C.1
ggccacccaatcgtcacttaggggaatcaaaagggggaattctaattcttagtaatacacactactgccaaacatgggacccacgatatgttatcaaaacaaaaatttcataaaaactgttaccaacgcctaaagcaaaaagtttaatttcagaactgaacaatcggaaaaaaaaaaactagaacaaagttatattatatttcctaaactctaaatcctatgttaatcctccttactctagccctgtccaactt

SEQ ID NO: 8910 - DNA, 591 bp, Glycine max
  Clone ID: PAT_MRT3847_108056C.1
catgactagcagactagctgtcgtaccgtatgtaccagagttccatagtcctgtcacgactatataaatggctgagactacgaactgagaatgtagggcacctgtgcgcacaaggcacaaagcctgaaacagcggcaccggtaacactaaccaccacacgatgtgcttaaacatgattagcatttgttgttactattgggcggtcatttacaccactgtatatacgccgttggtgagacactttgtagtctgcacggtagactaatttggtgtggttgggagcgtatgcgctgtattaggaggcctgataaaacctacatgcagataatccgaccgcctattcatgcgcagccccggcctaggggccctagtctggcccttgggccgcctagcagtggtagttggcgggatgctattcttccgagggtaccaccatatagaaatttcctccgcataggtcccggcggttgaccatctaaccgcgtcggcagaaccctcggcagcgatagccgcctatacgcgcttccgctgagtgcgccgatgccaggccttaacgcggttaaaacctagatgataataccgagccacgcc

SEQ ID NO: 8911 - DNA, 131 bp, Glycine max
  unsure (1)..(131): unsure at all n locations
  Clone ID: PAT_MRT3847_108057C.1
nagagangtgggtagtgttcaccttaatgggatgtgttngatttctgctttacaaaagctaacagatatgaatttacaatccttcaaagatcgcgaacctttgagtgtgtatgccggcgatcaattaatta

SEQ ID NO: 8912 - DNA, 1705 bp, Glycine max
  Clone ID: PAT_MRT3847_108058C.1
aaaagaaatgtattctatacttctcttcatttaaaaataaataaatagagataattacaaaataaatgagtcaaagaaatcaataaccctccaaagtaatcataatgatttattacaaacagtaacgctaacgcatatttctcaaagcctaaacacgtgctacgaatggataacaaagaagagaaaagctcctaaaaactccggcaaatcccagttaaatccaaatcaaggcttcaccagaaacaatccatctccgtggtccattcagtatcctgtggggaattcgcagttaccatacttagggggctgagtgacgacataagcagtgccaccaaaatcgcacgtgccggatgcacgtgccttcttctgatagtaactgttgaaggcgtaggaagcatgtgcctccaaggtgttaggattgtaacacgtggcacctggttgaattggagtgcaatcagccccaccctctccgcaagcgtagttaagagcgttctgcagcttcttctccgaagaaccgccactagctacgcaccatgtctggcccttagacgtcgtcgttgacacctcaccactcaccggaacctggctcttccctactcctgacggcggcgcctccttgatttcctccgccgtgagcggaatatcgtaaaccttcttctcagtggggtagaacagcccgtagtttctctccgacgtgggacccgttttctggttctcattgaaaagcgcgaagaggaaaacatcgagtgactcattttgcttcaagggggtcccactcccactcaacacgcgtttaaccaagtttccgttatacgacgccgcattgtcggggctggctccaatctcgttagagtccccagcagaaggccaacccgtttccgaaaccgcgatcttaacgtcgtcgtatttgagtgctgacatggcagcgaaaaacggcgtcgatttgagcgtcgaataagttcgtgtattttaaaccattaccggaatcaaccacgccggggttttccttgaatagcgcgtagtctaaagagattttatcagagtttgcagcgtaagcgaaaaacggatacgcattcaccattaagtaggaaccggtttggcggagcaggtcgagcatgggtttgataaccggttcgacgagttcggttttgaaggaaccggatgaggcggggaacgagttctggagcgcggagagtgcgatgggtgaggagattttaatgtttttgtcgaggttgtactttgttagagaagcgtggacgttcttcatggcgggtacgaggaactttgttgtgttgttggggtcgacgaagacttcgtttccgacggctatggcttcgatttgcgtggcggggtagtaggtggagatgttggcttggacccacgcatcggtgaaggactggtccgcggcggcgttggcaagaagctcgtttggcatggcaactacgaccttgattcccgagtttgcaaacgcggttaagacggtggcgtcggtgtcgtagagcttcacacggttcagaccttgtgccttcagaagctccaccactttcgctggtgtaggtaggtcgttcgcaacccttccatagtttattccaacggatcccgcttcagatgatgaagaaaagaatgtgataaggatgaagaagaaggaaaatgcgagaggagccatgctcagtttgcagagcatgcagactaatagagagaaatt

SEQ ID NO: 8913 - DNA, 124 bp, Glycine max
  Clone ID: PAT_MRT3847_108059C.1
agggcgacaggataaataagattgataaggaaatccatgagaccggaggaaccactaggtatagagcggacgacaccggggtggagctgcagcatatgttccatataatgagggataatagcgc

SEQ ID NO: 8914 - DNA, 3912 bp, Glycine max
  Clone ID: PAT_MRT3847_10805C.1
atgaataacaacggtggtttttcatccaatatcttggttcttgatggaaagaactgggataggtggagtgctttgatgaagtctctctttggtgcgcaagaagtgagtgatcttgtgcagaatggctatgaggatttgggtgcgaatcctactgaagcacaaagactggtgttcaaagaagcaaagaagaaagattgtaaggctctgttttacattcagcagaatgtagattcttatcattttgagaagattgcaaaggccacaagatccaaagaagcgtgggatattcttgaaaaatatcatgatggtggtgaaaaggtgaagcaagtgaagcttcagtcattcagaaggaagtatgagatgatgcagatggaggaaggtcagaaaattggggattatttctcaaaactgacatctttagtgaaccagatgcagacttgtggtgaagtcattactgatcaaatggtggtggaaaaggtattaagatccttgacctctaaatttgatttcatagttgtagctattcaagaagcaaaagatgtgaaagccatgaagattgaggagctgcagaattcattagaagcacatgagctcatggtaattgatagaggtactgagagatcagtacaacaagcactgcaagcacaaatttcaaagaaggaaggaaattcaaagaactccaagaagaagggaaaaggcaaaggaaattggtctaataatgggaaggccaagactgatgacaaagctgaatcttctaaaagaggaggctctgacagaggtcataacaagaagaaggagtttgataagagtaaagtgcagtgctacaactgtgagaagtatggacattttgctgatgagtgttggttcaagaaggatcggcagaataatgaagaagctaatgtggctcagggtaaagatcctcatactgtgttgatgatggctacaacttgtgaagataaggtgcagaatgaagaatggtatcttgattctggatgttccaatcatatgactgcacatagagaatggttaacaagctttgataatagcaagaaaactagtatcaagcttgctgacaatagaaagcttgcagctgaaggaattggaaatattgtcatcagagggaatgatgggaagagggtaataattgaaaaagtcttgtatgttccagaaatgaattgcaacttgatgagcataggtcaactggtggagaagggtttttcagtaaccatggatggtgattcactgaaactgtttgatgcagagaagaatctggtactgaagtctaatctgtcaaagaacaggacctacaagtgcagcatctctagtgataagatgatgtgcatgtctggagttacaagtgaagaaactgaggctttgtggcatatgaggtatggtcatctaaactttagaagtctgagtgaattgaattctaaagatttagtttatggcctgcctaagttgaacgctagaagggaaatctgtgaaatttgtgtgaagagcaagcagagtaggctaccatttgtgactgaagcacctaagagagccagtgctgcattacaagtggtacactctgacacctgtggtccctttgaagtgccctccttaggtggcagcaagtactttatcacttttatagatgagtttactcggatgttgtggttgtatactctaaagctgaagagtgaagctttggatgtgttcaagaggtttaaggttttaattgagaaggagagtgataagtcaataaaaatcttaagaacagatggtggaggtgaatatacttcaaaagattttgaagcattctgcacaagtcatggtattgtgcatgaggtgacaaccccatatacaccacagcataatgggcttgctgagagaagaaacagaactttacttggcatggccagaagcatgatcaagcagaagaaattgccacatcagttttggggtgaagcaattaccacagctgcatacatcctcaataagtgtcccacaaagaagctggagaaggttccagaggaagcttggtgtggaaggaagcctagtgtacaacatctgagagtttttggctcattgtgttacaagcatgtgccagatgtcagaagaagtaagctagaggataagagtgagatcatgatacttataggttaccacccaactggtgcttataagctatatgatcctacaactcagagggtgcatattagcagagatgtgatagtgagtgaatctgaaagctggaaatggcaggtgacaccagtgtacagcagtgagattcaacaaggcttcatataccctgattcgagtgatgaatcagaagatgaaggtgataatgaagtggatggtaatgtaccacaggaggatgaagcttctgtgaggcctcagaggattagacaagctcctaggaggctggatgattgtgaaagagcactggacaatgcagtgagtgatgagggtgatctcattcattttgcattgttagcagatgctgagcctgttgagtacagagatgctttgaagaacaaagtctggaagaaggcaatgatggaagaactcagttcaattgagaagaatcagacctgggagctagtaaaactaccagagaataagaaaacaattgatctgaagtgggtgttcaaaaccaaattgaatccagatggaagtgtgtcaaagcacaaggcaaggctggttgcaagagggtttcttcagaagcaaggaattgattataacgaagtatttgcacctgtagccagacatgagacagtgaggctagtagtggcactagcaaacttgaggaattggcctttataccatttagatgtgaaatctgcattcctaaatggtcctttagaagaaacagtgtttgtaactcaaccaccagggtttgagatagctggaaaggagggtatggtgtacaggttgcataaggccttatatggtttgaagcaggcacccagagcctggaataagaggattgatgaattcctaattcaattggggtttaagaagtgtacagttgaatatggtgtatatgtgatgaattcaaaggattcaggaatgttgatcatctgtttgtatgtagatgatttgctgataacaggaagtgatcctgaagaaataaaggaattcaagcttaccctaaaccaagaatttgagatgactgatctaggtgaattgtcatacttcttgggtctggagtttgtgaagacaaagaaagggatgatcatgcatcaacagaagtatgtgcttgagatactggacagatttgggttgattgagtgtaagtcaatctcaaatccttgtgaaactagttcaaaactggaagaatgtagtgaagaggagaaagctgatgcaaccatgtacaaacaactggtaggttcactcagatacttatgcaatagcagacctgacatttgctatgcagtaggtgtcatcagtagatttatgaatgagcctagaaaatcacatctgatagctgccaagaggattttgagatatgtgaagggcactgcaaactatggtttggtatttcctgcaaacagaggtgaggatcagctggatcttattggttactcagactctgattggtgtggtgacagagtagacagaagaagcacatctggatatgtgttcatgcttaatggtgtagccatatgttggtcatcaaagaagcaaccagtgacaacattatcatcatgtgaggctgagtacattgcaggaacttatgcagcttgtcagctggtatggttagaatcattatgcttggagttgaagtgtaagttgcagaagcctcaaaagttgttaattgataacagatctgcaatcaatctagccaagaatccagtgtcacatggaaggtcaaaacataacaaggtttcatttcataagagaacaggtgatgagtgggaggattga

SEQ ID NO: 8915 - DNA, 1744 bp, Glycine max
  Clone ID: PAT_MRT3847_108060C.1
tccgccacgctgaagcagagcatggctcctctcacattctccttcttcttcatccttatctcttacatttcttcatcatcaggtaaaaacatctcccacttctcttctttgagtttgtatttgaatttcgtcttaccaacatgaactctagttgtaattagaaaataacacttatgaaactgcatgtaaattttgttgcttcatctcattttgcatttgaaagttgtcaactttctgacgggctttgcagaagcgggatcaatcggaataaactatggaagaattgcgaacgacctacctacaccggcgaaagtggtggagcttcttaagagtcaggggctgaaccgtgtgaagctctacgacaccgacgccaccgtcttaaccgcgtttgccaactcaggaatcccacgcgtccgcccacgcgtccgtacggctgcgagaagacgacagaagggcgccatgaagaacgttcacgcttctctagccaaatacagcctggacaaaaacattaaaatctcctcacccatcgcactctcggcgctccaaaactcgttccccgcctcatccggttccttcaaaaccgaactcctcgaaccggttatcaagcccatgctcgacttcctccgccaaaccggttcctacctaatggtgaatgcctatccgttcttcgcttacgctgcaaactctgataaaatctctttagactacgcgctgttcaaggaaaaccctggcgtggttgattcgggtaatggtttaaaatacaccaacttgttcgacgctcaaatcgacgccgtttttgctgccatgtcagcagtcaaatacgacgacgttaagattgcagtttcggaaactggttggccttctgctggggactctaatgagattggagccagccccgacaatgcggcgtcgtataacggaaacttggttaagcgcgtcttgagtgggagtgggacacccttgaagcccaatgagtcactcgacgttttcctcttcgcgcttttcaatgagaaccagaaaacgggtcccacatcggagaggaactacggcttgttttatccaagtcagaagaaggtttatgatattcagctcacggcggaggcgccaccgtccggagttgggaagagccaggttccggtgagcggtgacgtgacgacgtcgtctaagggccagacgtggtgcgtggcgaatggcggttcttcggagaagaaactgcagaacgctcttaactacgcttgcggagagggtggggctgattgcactcccattcagccaggtgccacgtgttacgatcctaacactttggaggcacatgcttcctacgctttcaacagttactatcagaagatggcacgtgcatccggcacgtgctattttggtggcactgcttatgtcgtcactcagcctcccaagtatggtaactgcgaatttcccacgggatactgaaatgatggagatggagtgtttttggtgaaaccttaattgatttggatttatctggatttcgcgggagtttttaggagcttttccattggtagcacgtgtttaggctttgagaaatatgcgttagcgttactgtttgtaataaatcattatgatgattactttgtggggttattgatttccttgactcatttatttgtaattatctctattttttaatgaagaataatatagaatacatttcttttgaaaaaggctggagttacccaacttaaatagccttgtaaaaaatacccctttt

SEQ ID NO: 8916 - DNA, 389 bp, Glycine max
  Clone ID: PAT_MRT3847_108061C.1
gcaaccgacaacacactgcggcctcaacacacacgatatcaataagcaccgctaagaagcctcttcacgtacacaccaaacccagctacgagcgcgcgtggctcacactcgccgcagacaacaaaaaagaatcctccaccgacggacacaagatcctacccgactggggctacagacacgtctacaccgacgagagcgtgaactgcacctacccggaacccataaacgcccacaacttcggagagaagctcgcactcttcgcctccaccgacaggggcggcgacgccagcttcaacaccactgaaagaatcgaagctctcacggaacaaccttgcaccctagagacaaccttgtgctccaagaagcaccaaaacgattacttggactga

SEQ ID NO: 8917 - DNA, 485 bp, Glycine max
  Clone ID: PAT_MRT3847_108062C.1
ggggaaaccaaactgttttggatcagtatcttgattaaatatagacagggatctcccatattatttgggttcagctagacattggagcatgcgtgatctcagttgtctatgtaaataggcacctcgggtatgaatccttttctactctcattcttgttcattcttctcttactgatttaggcatcaaggtgtttgcgcaccacaagtcccacatcgacattgggtggttaaccaacatgaaaaatgcttatataataggtcactcccttataaaccgatttttaaaaggatctttcggatgtctttagtgcactttaacaacagacgctaaactctgccgcgggatatcaagatctgaatcagatctctgtctcggaaccaaatctcagccaacgaaactcactttatctctgacccaaagtttccaattaaaataaaattgaattacttccaagtataggatatccattcatgtctttgttggc

SEQ ID NO: 8918 - DNA, 265 bp, Glycine max
  Clone ID: PAT_MRT3847_108063C.1
cataactccagtgagaagaaccaaagaaagaaaggagaaagatggttagttttttttatcaaccaggaaatcgaatctgcgaatttttcctctatctcttttgattgtatcacccaatcaatcttataacctcaactttaaaagggcttgtttctacctatttaagcgctgcttcctttgccccccattgcgctggctaacacttatttttaggttatttgagcttctcatattctcacatggggcttttccctcatatgctttg

SEQ ID NO: 8919 - DNA, 695 bp, Glycine max
  unsure (1)..(695): unsure at all n locations
  Clone ID: PAT_MRT3847_108064C.1
ccagcgtccgcccactcgtccgatcaggatatctttttatttaccaaattgttaatttggtattatgagtcgaagtttacattaacatttgtaaaagaatttcatcacccattctgggttagtgggtttagcatagagcttcttcagttaacttaattgtgtacacttctatatgaatcaatgttctgaaatttattttactcagccgtacaagagttctatgattttatcttcagctctggtctttatgggtttttgttaggatttttcatatttgaagatattttttattgccaatgcagtactccaatagtcaacttactgtgttggggtatcatgtgctggctgtgctaatctcatttattgatggacccaggtttagttagatcgtgaaggttcttgattgtggttattgaattaaaactgctcggtattacagtcttgccagttgctaccgctccttgtctctctgtctgttcctcattttttaaaaggattcccccncaccccctatatttgaaacattttctttnaagataccaggttccaacagtgtgtttattggatagtacatccctacaggctcgtggtgtcctggaaaccttgtaagtgcattgactcctattnatcattcnaaaggggcagctattgaaagttatcccacctctgatgaacactgattaactttctagaag

SEQ ID NO: 8920 - DNA, 442 bp, Glycine max
  Clone ID: PAT_MRT3847_108065C.1
ttattaaaaaaaaaaaaaaaaaaaaaaaaaaaaaagaaaaaaaaaaaaaaaaaaaaaaaaaaaaaaaaaaaaaaaaaaaaaaaaaaaaaaggggggcggcccttttggaggctccattcttccccccgcgtgcttgcgacttaattctttttttttggggccacctaaatttaatccgctggccgttttttaacaacgtggtggctggaaaacccctggcgccccccaaattaacctttttgcacatcatccttttttcggctggtggtgtaataaagaggaggcccccaccggtcgttcttaccaatagttccccctccttggtgactagggggcccccccttgtggcgcatcattaaccgcggggggtgtggtgtctccccgcagggtgacctctatttttgccggcgttctggcgcccgcttttttcgctttcctccct

SEQ ID NO: 8921 - DNA, 180 bp, Glycine max
  unsure (1)..(180): unsure at all n locations
  Clone ID: PAT_MRT3847_108066C.1
ggaantcggcncgaggagattttggatcggaanntnnttntgcnggngtagantggggagagtnnaacnnttggnaatnncnatttacnaaaantanggtccnggttntcgtacttgtgagtgtgtgggaatccacatggattgatcaggaagtatggtttatgtctgnaggnagtgctt

SEQ ID NO: 8922 - DNA, 377 bp, Glycine max
  Clone ID: PAT_MRT3847_108067C.1
cttctttgcctgccgaattggggggccttgctagcttagttgaccttgatcttagtgagaattctttcgttggtggtggattgcctcctgatttcacccgattgaggaacttgaggaggatgatacttgccaacagcatgctcactggagctctgccggggagattgtttagtgattcgttgcagttcctagtgctgaggcaaaacaactttagtggttctctgcctgttgagttgtggtctctgccaagattgagcttcctcgatgtctctgccaataacttcagtggtctgcttcctaattcgacttctgctgctaataatgctactgctgcggtgctcaatatttcgcataataagttttatggaggcctcact

SEQ ID NO: 8923 - DNA, 217 bp, Glycine max
  unsure (1)..(217): unsure at all n locations
  Clone ID: PAT_MRT3847_108068C.1
ggggactccaaatagcacatatgttgtgaaagctaacgtacttgaaggatttaaggttcttgttcaaccaagttcattggctttcaagacaattggagaaaagaagagctttcgtgttattcttgagggaaccagttggcctagtcatggttttncagtatttgggaacttgtcttgtacagatggtaatcacacagtaaccagtcctattgtaatc

SEQ ID NO: 8924 - DNA, 741 bp, Glycine max
  Clone ID: PAT_MRT3847_108069C.1
aattttctacgtattgaatctcctgactctagcagacattttgctgctctctctttaaggaggtccgtacgtctccgtacatgacgctgatctccgatctcatcctctcgcctctacacacactcactggaagggtgatgctctaacaccttcgacatcgtcggatgccgaatgcacctacaaggaaaggagattccgcactgctacccaggaaccagctcatctaccctctgcaaagcttcctccaaggaaactatgacgctccccgactacgacatgctcatggagacaaccctgcaccgagtatataccctccaggcagttttgcggatccttctcagaaagtctcactagtatcttgcatatccgtgaaacttaaactccctgtggacattgcacttcccactagccagaagcacgaagctggcggggatctcccccaacctgatgctgctgctgttcacacatgagatgctattgaacaggagtaccccttgctgctaaaagatatccaatgaactcttgcttgacctgttgctgcgtctcctggacgacatgcacatttctactgagacgctcaccgctgagacgatattcctacgagacatagaggtccgacactatcaacgactgtctaggatgatgatccaggactcggagggtttcccgccagaccagtagaggctgatcttcgccggcaagcagctccaggacggacgtacccttgctgactacaacatc

SEQ ID NO: 8925 - DNA, 441 bp, Glycine max
  unsure (1)..(441): unsure at all n locations
  Clone ID: PAT_MRT3847_10806C.1
attttnnttttttttttttttcacagcaaaataataagatcttaatttatgtaatcaacgttagcaatgttcgcagactcagtgtgtaaccagggctgggaagcatcctgggaaggagatactttgcaaacaagcacattttgaaacacaatgagatcaaattctgaactccacgctatcgtggaattcattcctttgtgatcaggacttccaaacttacatttgaataaagacccacgctgagtaactaactaaccatgacaaggatatcagatctcaaagaggctgataatgcctttttgtcctattctttttggtgctcaataacttccaaaggctactcggattcaagcttttgaagttcacccttgatgcctgattgctttgtatcagacaaggtgtgaattaaaacttgaataacagcaacctggatcactgggt

SEQ ID NO: 8926 - DNA, 528 bp, Glycine max
  unsure (1)..(528): unsure at all n locations
  Clone ID: PAT_MRT3847_108070C.1
tctcattgtatctttatgatggaaggttcaaagtctgctcaaaggttaccaattctactattacagacttattctgacattttcggccgaaactctttaccattttttctggttttcggaccatctattttttttgtgggggtctancacnctacagatttttctcatgcacactttttttggggaagagaggttgacttattctncccacaaaattaccaatcctcatcctcctcttataccaacaatccatgttccatcacatgatgagccacgtttttcatgttttcttgaatcccaagctccttggtctgcactcatgattagttttaacatgccctcacatgagcttatacccgtgaatgacttccctactttactttcagaatccatgttcctctatgccttaaaccagaggttctttaatatatcacgtttaaatgatccaccctatttctcctgttctgcgtctcctgatcttcttctccctttcttagtggccaatttaatgacttcctcttttcaaag

SEQ ID NO: 8927 - DNA, 548 bp, Glycine max
  Clone ID: PAT_MRT3847_108071C.1
gttcactaccagctggaaacaaacagttttattttgaataaaccaatccaaattaaagaacccccacacacaaaacctagaagttggctcaaaaagaccaccaaaaaaaagggtttacggagaaaaaaaaaaccgaaaaaaatcgaaaagagggggcgcgcaaaaaaagttaaaaaaaaaaaaaaaaacctttataaacaaaaaaaaaggtgttttacttactaaaaaaaaccacccaaacatgggggggagacacacaagaagggggggttaccaccccaaaaccaaccaccccaaaaggggggggaaaaaaaaccaatcttggggagacacacccccaataaagacaagaaacgccctgggggggacaacatcgacacgaaaagacaggataaacatgctggtacccaaaggacgttcggccctcataaagaacacatacacctttgggtcgcccaccaaggggggaaccccacccaacaagccgggcgggaccacccggggggggagaaaaaagaagcctcccaaaaaaacaaacaccccgaaag

SEQ ID NO: 8928 - DNA, 345 bp, Glycine max
  Clone ID: PAT_MRT3847_108072C.1
ggaccatgtcggggttttttcttggctagtacgggttcccaaagcgtctgtcctccttatgttgaaccggtgatgatgttggttcagggtctttgtcatgctctacaggagtggaatcctgtaacaagggaaaacataacaactcagggatctcagcttctagactactctccctctgaagcggaggactagtgaagaaagactctgtttcatgaaaagtgacatccttggaaacatagacacgacgactttgagggtgataacatttgtacccctttttgtttgaggcataacctatgaagacacatttgatagcccgaggatctaactttccctgatggggac

SEQ ID NO: 8929 - DNA, 514 bp, Glycine max
  Clone ID: PAT_MRT3847_108073C.1
aattcggctcgagcggctcgaggctgcgagaagacgacagaaggggacattaaacttttatttttaaatgataaaacttaaatataatatttaagatattttgacagtgttctttagtcaaaattagaatttaatcttggtaatctttataataagtattttcattaaatatcaagatattttattgaggtataactccaatctactactgatgagaaaacaaaactatatataattccaatcccatttttaatcaattaggagttacatccctttaaaaaatccagacttttcaatgactaacaccctttttctatgcaatatacaaggatcaagtttgaatgtacaatcttgggatggaaatcaaattcgtatttggttgacgatatttaaaaagtagtcattcttttcttacagctttctgtcagaaaattgtaaattaaatcaaacatggatagaatatgctggaggccgtaaatgagtatttaataagaagtgattggctttaaaaact

SEQ ID NO: 8930 - DNA, 537 bp, Glycine max
  Clone ID: PAT_MRT3847_108074C.1
acttacccttacacttcttttagtcctcaacaacaacaacaagaagtagatgaggttcaattctctgatgacaaacattcggctcgagatggaaagatattgctttttgtttttctctctgccttctttctactttttgtgttcgtcctcatgattccatggctgaagaatcatgcaaggggttctcatgattcaggaacagaagaagattcgattgagttccagaataacactgcgtcacaaaactggttcagaagaagaaggaaagaagatgatgccaacaccatgcaacaacagtagcaaattctattctccttttataatgtgaggaattgcttatttttggagcaagaagttaagtgcttgaatttccgtgtgaatatgatgtagctagagtttaattagatatctgattctgtgtgcagaaacttgtttgttggttatgttggtaattattgaatatttgtagtcttgtcagtgtcataacaccttatgatatacacacatagttgaagcatatcaacatatttttcgtgt

SEQ ID NO: 8931 - DNA, 367 bp, Glycine max
  Clone ID: PAT_MRT3847_108075C.1
cgtcacgtgtgatggatatctgcagaatcctgcttaagcagtggtaacaacgcatagtacgaagatcacacacaacattcatgcactcacaggccactcgggaaaaactacatcacatatcaacgaaattaatcaattcttaactctttaaaacaacgctcgagccgacctgcctgtgccaccactactatgggacgcaggactgtcaaagtacgctgacatgtatgcacgacaaaggcgacaggatcgcttgttaaagcattcaaacgggccgtatggggaaaatatcttctggcgtagaggtgatcggtggacgccagcacaagccgtaatggcgtgggtgacggagcaacgatggtataactat

SEQ ID NO: 8932 - DNA, 495 bp, Glycine max
  Clone ID: PAT_MRT3847_108076C.1
aatgcacccatagttctccaatgactatgaatcaactaaaataaaatcttaaaatttgatgttacaatcaacatcctttaacacgcactgccgtccacaaagtgggaacaacacccagagcaatcaatcatgggatcatggcaaccgaattccaacctagactccactataataacaggttataaaaactaaaataaatcacatttaaaattacgcggtcattaagatttaagactactcctaataatgatatatatcactctctgaccttttcttatcttttttacaattcagactcttgccctctcactcacccttgtacttttacactccatgtgtacttttccatgatcatttgttaattttttttacctatatccacattgttgacgcaatcaaattgtgctttgcgggttgcggatagagcaacattccttttgctatcttcgtacttgccacctaaagaatcaaagagaatttcagcaccaaccccta

SEQ ID NO: 8933 - DNA, 235 bp, Glycine max
  Clone ID: PAT_MRT3847_108077C.1
cttctttacgtaccaaagtataacatccaatgttggtagtatctctatggaacaaaatataccattcttatatgtattgcgaataaataaattcaatatattcatacaccgttggatgcttaaatgttttgaagagttgaacttattgaattttaatgcatcaaagcgggcatcaagttcatgataatcatggaatttgggatgaacatgaatgcggctatactgttttatcata

SEQ ID NO: 8934 - DNA, 291 bp, Glycine max
  Clone ID: PAT_MRT3847_108078C.1
cacttttaaaaaattggtctaaagcataaccgaaacttttgaacaattgttccagacaactatggcagagccactgctacattcctccaccaacccctaatccaaaattggaacagattcctccatttcggttggaacaatattgggatttaccaaccggtgtaaccctgccaaaactattgatctctagagatggaggacctttgtttatcacactcctcattgatttttaggggactaaagttttcgaccccaccgaccctcgggtacaaggggttaaattttcaaatt

SEQ ID NO: 8935 - DNA, 573 bp, Glycine max
  Clone ID: PAT_MRT3847_108079C.1
ctattcttcatttaatcatttcacacttcatttcaaatctcaagattaaagacgagactacttaagaaatttaaaattaaaaataatttttaagtttgaaaatttgtcatgcacatttttaattttattataatatttaactttaaagtaattgaaactggaaaaaaagatagctcaaaccctttcaagacaagaattatttaatactttaagaatgtgtttagatagggtaatttaattaggtaatgtatttttttatagaaaattaaattcttttttattaaaagtaacaatttgaatattttaataaaaggaattcaaaattttaaaagagattttaattagttgaaaaaatagaatttcaaattttatcttcaagggaatgaatttggaaattttgcaacaattctctcttttctcttctttctcccatgctccagcggcgcatgtgcaagtcgtggccgtgtgcggaggtgtgttggtcgtcgatctctccaaaagaattaaaattaaaacatttaaaattcttagaatttaaaatttaaaattgtctcatctaaatatattttaaga

SEQ ID NO: 8936 - DNA, 756 bp, Glycine max
  Clone ID: PAT_MRT3847_10807C.1
ccacgcgtccgctttgttctcagctacccaaacaaagaatgtcgaggatcttgcccgcttatcatttcaggcaactcctatctatattgatgtagatgatgggagaaaaaaaggtcacaaatgaaggattgcagcagggctatgttgttgttccctgtgctaaacgttttgttgttctctattcattcttgaggagataccaatcaaaaaaagtgatggtctttttctcttcatgcaactctgtcaaattccatgcagatcttctcaagtgcactgggttggactgtttaaatattcatggaaaacaaaagcaacatgccaggactactacgttcttcaacttctgcaaagcacaaaaggggatcttgctctgtactgatgttgctgctcgtggacttgacatacctgatgtggtatgatattttttcttatcaagttacatgaatatttctggcctttgaatgtgattaggttctatcatacttttaaggttttatcctaaagacttttcagttgcaatttgcaaccagtcaatcacaactgcctgcacagaaacattagaatagaacaatacaatctttatttagaagaacttccatagtgaagagaaagaaggaaggggaattctgttgcaagtactctaaaacctagctaaccctttctggttggttgcatcctttgtcattggatgactggatgaatttggatatagaatccaatggaagatgcaggcgcaccacatttagtatggtacct

SEQ ID NO: 8937 - DNA, 385 bp, Glycine max
  Clone ID: PAT_MRT3847_108080C.1
ggaagttatgagtgatgacgatattgacgggaaaacatgtcctgtcttgtgtttttctctccctttgagttgagaattcccttttgatcacacactcactccgtcacacccatctcttggcttcttcccaacatcatggacttggacttcatgagggcttcatctattcattccatcagtcatcagttctcttctcacaaaccatctcgccttcactcagatgacgatgatgatgcgcaatcccttcttcgatgtccttcctgtgaatttgagattgatttatcctctctgcgtatccatttggaagagattcaatgctatgaaccacaaaatatgctatgtcatgtgtgtgatgacacattaagggacgatgtaatcacggttg

SEQ ID NO: 8938 - DNA, 709 bp, Glycine max
  unsure (1)..(709): unsure at all n locations
  Clone ID: PAT_MRT3847_108081C.1
cccattcgtactggcacgcgtgtcggtacgatgggctgacgacaccacaaacccaagggactgattcgccggggggaagctgttccgtggagattaaagctcgctctggattggaaaaagttcccttggctaaagcacaatttggtagaggaaaaaccttcaaatctgctataattggtgctggtgcacattcttcagaagattctcctgaacatgatgatcangagaaaccaaaacgattgatgccagattgagacaaagaatagatcctcaatacaatgaggttcaggctcagatggaaacaaatttgtttaaattgtctcttgatgatgttgaaactcctaaaggttccatgttggatcttaaaatttctcaatctaaaattgcactttccaaaaacacaggttggaggaaccattctgtgtagtgatctattggcatattttttgacagaggtcaattttacatcattatccattttttaatatgcttctaccatctattattgaacttgagaaagtgtattacattggttggattgattgtcccaaggatgagaaactttctcattgtaaatttttgacaaaccttagaaccgctgttttactattttccttatggagtttaatttgtggtcctttagaagttttaaattttggtaggttcattttgaagaaaagggacagcttatttttaagtttgaaatcac

SEQ ID NO: 8939 - DNA, 358 bp, Glycine max
  Clone ID: PAT_MRT3847_108082C.1
tttcttttatattgtattttttttatttttgggtggtctttttttttattcattttttttatatatgtttttttccaacaaaataaaggattctttcccttttcaacccgtacaccccgaaaaaacccctaattttgcaatatttgaaccaaaattaatttggaaaaaaaacattttaccggcaaaaaaaacttaatccgcgggatccttaaggctaacccccaactgtttgccaagggaaccaaatgtttcccaatacaaattaacttgtgcccacaaaggctaaccaaacttactcccccgaaataatggggacataggccgagttactttgcccccaccccaaaaaagttttcct

SEQ ID NO: 8940 - DNA, 221 bp, Glycine max
  Clone ID: PAT_MRT3847_108083C.1
cgctcgccatgcttcgacacacaagagcatcagcggcaccggcatccgggcgaggtggcttcgctacggctcttgtcgctaggaagaagtctgcgaacgggtctgatgcggagttcgctgatcgtcgacagcagttcggaatcggaagggagttgcctccgatgagagactttcctcggttcctgaagtggactaagcatgtccagggtcagatgcggaag

SEQ ID NO: 8941 - DNA, 124 bp, Glycine max
  Clone ID: PAT_MRT3847_108084C.1
caaattcatctcagcaggttacgatagttttgaaaaggagagaggttcaggggtttcgcaatgacagagctctcagtccacggtggccaaagggatgccgaacatctcgtccacaagcatgact

SEQ ID NO: 8942 - DNA, 290 bp, Glycine max
  unsure (1)..(290): unsure at all n locations
  Clone ID: PAT_MRT3847_108085C.1
tacatattataggagtatttaaacctatcttcaaatcttatcatacgacatgatttttgtggtatacanatgaagtttgaatttactatcagactctttttatataaatgacccgatactggtaggaatcattaacacgttttttttttcttcttttatacaatgaagtttatcattaacacgtttaaaattcgataaagagttaaagactattttcctgaggattttaatataattctacatatatacacaacaaattgtcaaacacaatttatcgaaaagaataatac

SEQ ID NO: 8943 - DNA, 207 bp, Glycine max
  unsure (1)..(207): unsure at all n locations
  Clone ID: PAT_MRT3847_108086C.1
catattttaaggtaattttttcataaaaaagttgaaacaattgtgtgcataatataactttcaatagaagttccactcctagattagtagatgtttangttttctactnctcctttgtaaacaaaaaaatataatataacttttcatctcttatttttttcatttttctgctaataatatctgttgctgacaaacatttctattcag

SEQ ID NO: 8944 - DNA, 348 bp, Glycine max
  Clone ID: PAT_MRT3847_108087C.1
cccacacgtcctggctattgtaggaccttccagctgcagcgtccacatgtattacatctcaaaatcaggagaggcgggaactgtagttgtagactctgccatagtagctgctgaagaacatgccacttctgtacaggcgattgttaatatgggtgaaggatctgatgctgtgtgcgtgaaggatagcggcgttatatatgaagatgcttatagtcacattggaattaaagcagaagggagagctcatcacgggcatcttgttattttctggggaaacaagaatactactgctgtcggctttgatcaagctataatattgctcttacacgcatctgcagatggagctct

SEQ ID NO: 8945 - DNA, 1083 bp, Glycine max
  Clone ID: PAT_MRT3847_108088C.1
aaggtagctcgtgtaaccctctcattcctcttatcttgcttcattttgatgtggttaacatccttctcctgctaaaaacaacatatataggttgaaatgtacaccctgtcttatccacattccttggaaaatctcaagtaatgctaacgtggccttatccaaatatttttcaaaccatcttcaactcttcatacgtaaaatctatgctatgtctcatattagcattgaagaccaagaacacaaaaaccacttaattagtccttctcacatccaaaatcttgtgccagcaaatcaaacatggcatccatgactatgcttcagaccatgattcctaagaatgcaccgaacctccctcctcgtgttggtgcttcttccaacaacactactaagatctcatttggtggctcaggtagggtactgtggaccgggattcagaggaacaggaataataggtcttcttcgattgtagttgctgcagttggagatgtttcatctgatggcactgcgtaccttgttgctggtgccattgctgtggctctagttggaacggccttccccatcttcttctctcgcaaagacacatgccctgaatgtgatggagcagggtttgtgcggaaggctaatgtgacattgagagcaaatgcagcacgaaaggatcaaacccaaatcgtttgtgctcgctgcaatggtttgggcaaacttaaccaaattgacaaatagacaacattatgctccctacattgcccctttctttcttttcttattactatgtaattatttaaggataatatattattgatatcccctcctcgtgtttcttcgtcctatgagatgaacattataatatatcatgataggagagaaaagcacaaatttcacttgttcagaaacctaccattttgattttgcattgcgtatctgatttgtgtttttctctcccgtatcatgataccccgatgttcctaatctgttgtttaattgtgcatatgttgtatgtacttgaagtacacttgacaacaagaaagtccaataaatatgatatatgttcgtcctttcttcctgaaaaaaaaaaaaaaagcccct

SEQ ID NO: 8946 - DNA, 282 bp, Glycine max
  Clone ID: PAT_MRT3847_108089C.1
cagagccacaggacattgagtgttgtggggccctagaatactacgacaaagcctttgaccgcatcaccacgaggagtgagaagccactgcggagcatcaagcgcatcttccacactgtcaccaaaataaacgaccctgtcatccgcaagctggcaaaaacttaggggaatgtgtttgccactgatgccatcctggccacgctgatgagctgtacccgctcagtgtattcctgggatattgtcgtccagagagttgggtccaaactcttctttgacaagagag

SEQ ID NO: 8947 - DNA, 256 bp, Glycine max
  unsure (1)..(256): unsure at all n locations
  Clone ID: PAT_MRT3847_10808C.1
tnttattaaacnccccccacactcgtaatgaatagcggggaaaagaatatatttttgcaataaaaaaattactgtaggcagtgagaaggcaataaaaatttctgcctttttcttttagagggacaacttaaagccctggatgattattaaacatttttggtgacaacaaatttgtgggacttttttgaagtggcatggcaaacactttcattttccttagaacaaagccccatatttctttttgtttttgccccca

SEQ ID NO: 8948 - DNA, 2431 bp, Glycine max
  unsure (1)..(2431): unsure at all n locations
  Clone ID: PAT_MRT3847_108090C.1
aaggccctggtttgncccngcgnaatgggccccccccntttangggcannccatgnntccnaaaggccatcgcccgggcccaggaaggaattttcccccccccagggggttncttnannctagggccttccatacacccccccccagaaattaaggtcctaaggttgggattaggtatttggccaagttgtatttaccaaaggtctatttgggggtttttttgcccctggagtgggatgggggtgcccccttccctccctgaggccagggggcgcggtttcccatttggtttgtcttctcctttcacgtcccgttggcttcttcatttgtagcagcatgaaaattgcgacgtggtgtgaggaccagcagtataattttccttcagcaaagcaagttgcggttgtggatgtgttgctgagatgttcagacattttctgtccttttctggttggttctaatagggatcttcctcctcatcgacattcaattaattccaatttttgtatttggacccatcaaacaatgaaggcaaggagaggaaaacgctcagaggctttctggccttccattgtgatgaaaaaatggttaaacatcaagcctggacgcgtgggcggacgcgtgggcggacgcgtgggtgaaactgaaagtgaagatgatgcttgttcaattagaggctcaagaatgtgtgtgcgtgaagataatccacatccacttagaacagaaggggttcaatccatattcccaagtgtaacatcagatgcatctccttgtaagggccgcaagacaagacacagaagaggaaaatcagaaactctgcgtgctcagtacataaacacgaaggaaatgagggtaacaattggcacatggaatgttgctggaagacatccatgtgaggatcttgagattgatgactggctttgtaccgaagacccagctgatatttacattattggtttccaggaggtagttccattgaatgctggaaatgtgttaggagcagaagataatacacctatcccaaaatgggaggcaatcattcgaagatctctaaacaaatcttctgagcctgacagtaaacataaaagctacagtgcccccccttctccagtgaagaacctcttctgctgctgatcttctagcagacacaatagatgctgataatccaattccaatagatatgacgattgaggagtatgtagcaacagttgataataatgaggtggagcagcaggaagtgaaaagcataattgacatagagaataacttacagttgaggagagtatttggcattgatattgactggcctgaacgttccttagatgcaatcccccaaattgttgattccaattcaaagttgcggagagtactaagcagctcagccagaattggctttaacaggactgagagtagtttggtatatggtgttggattgaaacgttcacaccgcagttctggaaatttgggcttgttatggcaacaacaacaagtgatacctgaagtcgttgattccttagaagatgtctctgatgtgttatcagctgagggtggtgatacttttattgtaccgaatgacgaagatgaagatgaatttggtaccacagaatcttgtccaagtacaaggtatgtccgaattgtgagcaagcaaatggtagggatatatgtatctgtttgggttcagaggaggttgtgaaggcacattaataatttaaaagtttcccggttggagttggacttatgggctacatgggaaacaaggtaagacatgtttcactctgaatgtgacatcttaaagcattcctggccatgaggaatttcacgccaagttttactcaactaggcttcataaacactgaattaagtactagttagtatagtatttgacacatgtattcaaaggctgtgtgtattttaacatgaatggattgatgacacattctcactaatgcaggggtcagttttgtttcacgtatgggcctttgttggttccccatttggctttctggtcaaaaggaaagggggctgaacataggcgaaactctgatgttcatgaaattctaagacgcccttgcttctcatcatctgtcttcgatgcagatcacccacaaccaatcccatctcatgagtaagctttnntatatnatnatnaaagttttcctttggaattttatccaagttggaattgaagattatgtgttcattgagtgttatttcctgctaacacccagattttctggttcggggatttgaattatcgtatcaatatgttggatgctgaggttagaaaattggttgctctaaagaagtgggatgagttgaagaattatgatcaggtgagacttgtgcctgcaaaatatgcttagttttcagtttttacatatagctattctgtttctctacaatgatctgtattataaaggattctactttagct

SEQ ID NO: 8949 - DNA, 665 bp, Glycine max
  Clone ID: PAT_MRT3847_108091C.1
ccacgcgtccgcagcagtataattttccttcagcaaagcaagttgcggttgtggatgtgttgctgagatgttcagacattttctgtccttttctggttggttctaatagggatcttcctcctcatcgacattcaattaattccaatttttggtattgttacaatagcctcatatttaaatactaactgccaaatagggccaaataaatgtcagtgactgattccatatttaagaacttgtgctccatagtccagcaaaatacgtaagtgtgtttttggattctgttgtagtatttggacccatcaaacaatgaaggcaaggagaggaaaacgctcagaggctttctggccttccattgtgatgaaaaaatggttaaacatcaagcctaaggtgaatgattttagtgaagatgaagtggacactgaaactgaaagtgaagatgatgcttgttcaattagaggctcaagaatgtgtgtgcgtgaagataatccacatccacttagaacagaaggggttcaatccatattcccaagtgtaacatcagatgcatctccttgtaagggcccgcagacaagacacagaagagggaaatcagaaactctgcgtgctcagtacataaacacgaaggaaatgagggtaacaattgcacatggaatgttgctgga

SEQ ID NO: 8950 - DNA, 463 bp, Glycine max
  unsure (1)..(463): unsure at all n locations
  Clone ID: PAT_MRT3847_108092C.1
cggacgcgtgggtctgagcctgacagtaaacacaaaagctacagtgcccctccttctccagtgttaagaacctcttctgctgctgatcttctagcagacacaatagatgctgataatccaattccaatagatatgacgattgaggagtatgtagcaacagttgataataatgaggtggagcagcaggaagtgaaaagcataattgacatagagaataacttacagttgaggagagtatttggcattgatattgactggcctgaacgttccttagatgcaatcccccaaattgttgattccaattcaaagttgcggagagtactaagcagctcagccagaattggctttaacaggactgagagtagtttggtatatggtggttggattgaaaacgttcacaccgcagttctngaaatttgggcttgntatggcaacaacaacaagtgatacctgaagtcgttga

SEQ ID NO: 8951 - DNA, 479 bp, Glycine max
  unsure (1)..(479): unsure at all n locations
  Clone ID: PAT_MRT3847_108093C.1
ctctgtttatatggttctttacccgtcacagtggctggaatattagtgccttacattcctattctgtgttggacttttggttaatagaggtccaaggccaaacttaccttaaggtttgaactgacagactacaatacactcttcacttatacaatccatgattgtgttacacccttgtgcactccttccttcttgcactaccattacatgcttcaaacctttttcccataacaatcgctttgtgccatcttcaatggttccgcggctagccctgagctatgccagaacaaggacattctcatgtagtgctagaaatcgactgaaggatttgaatggtagggacttcagtatagacattgttaacgaaaatctggagcttgaggatgatggtggcgatgatgggttttcggctcgaggattgtatgcaagaagtgaggcaaatgacactgatgaagaagaagcacanaaagatggtgatg

SEQ ID NO: 8952 - DNA, 706 bp, Glycine max
  Clone ID: PAT_MRT3847_108094C.1
ggccttataccctacgccgcctcctcctcttcttcttcttctttcatttcctccctccaaatggcttcaaccataggtatctcttcttccatctccatatacaaaaccccctcttttcaactcttcaaaagaccagccgccacaaccacctccgttttcttcaacacccttccccgtaaccgtgacgccacactctcttccgttccttccgccattgccaccccatccattctcaccgaacaacccttaaagggcttaactttggacgaccttagtaatagcgaccaatttggctatgacttcgaacccgacaccaacgttagcgaccacgaactcgacatttccaagttgggtttaccttcgcccctcgtccactccctccaaaaacgtgggatcatcagccttttccccattcagagagctgtgttggtgcctgcactagaaggtaaagatatcattgctcgtgcaaagacagggactggcaagactttagcattcggaattccaattcttaaaggtctcactaatgatgatgaacaaagtcctcacaggcggtctgggaggcttcctaaagcgttggtccttgcacctactagggagttagcaaagcaagttgagaaagagatacaagaatctgcaccttacctcaaaacagtttgtgtttatggcggtgtttcttatgtagcacagtatagtgttctttcac

SEQ ID NO: 8953 - DNA, 286 bp, Glycine max
  Clone ID: PAT_MRT3847_108095C.1
agaagacgacagaagggggaggtaggagtaatttaagagagagaaagagagagtgggagagggagacccatccacttttttcattttcacacctttacacaacacaacataacacaaaagcgctctctctaatatctaaagacaggattttcaacacactcaccttttaaagcgcgtgcccctcaaacatgaacatcatcgtcttctttctaagacccggttcaaaatcttcggagaagagtactaaggctgatcactggatccttcaaaattggaatgatttgat

SEQ ID NO: 8954 - DNA, 344 bp, Glycine max
  Clone ID: PAT_MRT3847_108096C.1
gtgccacgtcaagtggatgaacacatgtttataacttttgggccgagctttgacatatgtcgcagtgatacaggagtttgtcctgggccagtacccttattttctgcaaacatgaacaacgagtcctttgtgttgccacatggcaaaggggtatcaatgcttgaagcgtttttccggaacgatgttactggggtgtacactagagattttccggatcagcctgcggttgtgtttgactgtaccaacccaaacataacgtcgtcgccagatacacctcgtgaattcctaatcgcacctaaatcaacgaaggtgaagacgttgaagttcaattcaacagttcagat

SEQ ID NO: 8955 - DNA, 347 bp, Glycine max
  Clone ID: PAT_MRT3847_108097C.1
accccgcgtaccgtgacacaaccgtgctctttgtggacccgcggctccatccctatgttgaagcgcgggctcccacgacagtcttttcaacacacgcactgccatgtacgcccaagctggtcgtggtcaagcaccgggtaaaccaccacattgttaacccagagacagctctagctccattcagcttatgaccttgtcacgcgccaatgacctgcgggccgatgccagatccatggcacgtgccggctttgacaccgtctacagcccggacctgatcgcgtacttggtcggctccgaacccatctaggggggagcaagaggaccctccagatgctgactgcgttggg

SEQ ID NO: 8956 - DNA, 275 bp, Glycine max
  unsure (1)..(275): unsure at all n locations
  Clone ID: PAT_MRT3847_108098C.1
gagaancaacactggtgttcgcncgtgngagtctcactggttcganttcgacagaaatnacganntannnntgatgctttagcagattattagggtntcaaagnagtgagaantaanacccactagagaaaaaaaggaataaccntacttgtaaaatggangctgaagacagagaatatngtggagangagggagataatcaacaatgtgatgtgcctnttgacagacncagatagaactccttttngtgctccatgtacctanctcagaatgng

SEQ ID NO: 8957 - DNA, 618 bp, Glycine max
  Clone ID: PAT_MRT3847_108099C.1
gttggggagaacatgcagcctaatgtcatatcatcgaagtcatcttcagattctgagaattttgctgagtctcaacttgttcccaagatgccaaaacaagcttctgaggagcctaagaagaaaaagaaagtgaagctgccacttccattagttccagctgataacaatcaaaatgcctcacaacctgttaggaaatgcatgcattgtgagataaccaagacaccacagtggagggcagggccaatgggaccaaaaacactatgcaatgcttgggtgttcgttacaagaccggccggctcttcccgagtaccggcctgctgcaagtcactttttgcccatctggcactaaatctcataaaaaggcctggaaatgagatgcaggggcattgacaaatccggtttgcaatcaattcagctgcctcacccaactatccaaacactaacagcagcctgccctggatacatgtgattgaaggatgatcctttgtggaaatttctctttcattgctgccctttaagtcatgtcttatgttatttcttattgatatttcatttctttggttcattggtttttgtacagggtttgactgggggaataggagccataaatgatgatga

SEQ ID NO: 8958 - DNA, 306 bp, Glycine max
  Clone ID: PAT_MRT3847_10809C.1
cccggattgacccacgcgcccagacgtgcgagattttgctccaaagatagcaattcatagacccacacagttacgcttaagtactgagagcaacatagatacaacttgatcttggatggactgttctgttaaagaagggactcggggtcagtacatgattgtggagcttccacttcaagctcttctactgggaatggctgttattaaggcagacacacttttcggactggtactgggtcaatggaggatcaacctattgctgacccttacataacattaatggaattgaagtttctgacaaagaat

SEQ ID NO: 8959 - DNA, 412 bp, Glycine max
  Clone ID: PAT_MRT3847_1080C.1
cgggcacaaaaaattcattgggggtttgtaaaaaaaaaaaaaattccttgggcaatttataaaagaaacccggctcacctggcctggctttttgcctgcaacccggggccttggggggcaaaccagggttttttgccaattttgacaggtctcattgcccctgtttttagctacaccaaaattcttgggttgatttcaacgccttcgacaaaaaccccttccttgggctggaaacccacccccatcaaacttgtggaaacctttttatcagcttccccgccgaggagcccacccagctaaatgtctatcccccctgtttttttttttttggggatttcaaaactctccttcctcaaatttgtgacatttgttttactctggcccaaaataccccccccctttcggttgtttt

SEQ ID NO: 8960 - DNA, 1865 bp, Glycine max
  Clone ID: PAT_MRT3847_108100C.1
ccacgcgtccggacagagggtatgtggggcccgcggtttatctgaggagagagaaacaagacttgaacatcacgacgtagtaaaagacagctagcaatgaagaaggagcctcacctaccagtgcccatcactttcttctccttctctcttcccatttaagccttcttcaccctcctctctctcctttcaaaaactcacccactctcaactcaaacctccatctccatttggtgtgtgtagtggagcttttctaccttcaaagattgcacctttacccttcaggatattttcaattgtcaagaaaatggttggacctaacttcatggatgagatagactgcggcagcttctttgaccacatcgacgaccttctcgattttcccgtcgaggacgtcgacggcggcgctgccaccttgccttccgtctccgccggaaacagcaactcgctggcgagcatctggccctccgagtccgactcgtttcccgcctccgactcggtgttttccggcaacagtgcttcggacctctcggccgagctatccgttccgtatgaagacattgtccaattggaatggttgtccaactttgtggaggattccttttgtggggggagcctaacaatgaacaaagtggaagagccatcatgtaccactaaggaggactcagtcaacacccaatttcacacatcaagcccagtttctggcctcgaaagtagcagttcttgctctggtggcaggactttgccacctcgcagtccagagatttacatcctgtggacgtacagcagcgcgcaaccttcaatcctactatgtcattccctgtatatcatccaagtcatcttcagattctgagaattttgctgagtctcaacttgttcccaagatgccaaaacaagcttctgaggagcctaagaagaaaaagaaagtgaagctgccacttccattagttccagctgataacaatcaaaatgcctcacaacctgttaggaaatgcatgcattgtgagataaccaagacaccacagtggagggcagggccaatgggaccaaaaacactatgcaatgcttgtggtgttcgttacaagtccggccggctcttccccgagtaccggcctgctgcaagtccaactttttgcccatctgtgcactccaattctcataagaaggtcctggacactatgcaatgcatgtggggttcgttacaagtccggccggctcttccccgaataccggcctgctgcaagtccaactttttgcccatccgtgcactccaattctcataagaaggtcctggaaatgagatgcaggggatttgacaaatctggttttgcaatcaattcagctgcctcacctgaactcattccaaacactaacagcagccttaccctggagtacatgtgatgtgaaggaggattgatcctttgttggaaatttctctttcattgctgccctctagagtcatgtcttatgttatttcttttgatatttcatttctttggttcattggtttttgtacagggttggactgggggaataggagcaatagatgatgatgatcttattttagcagttaggggaagattgtaatgagaagtgaggaaaaaaagggtagacatatgcaggtcaaaaagggtagggtcttaggtctagtaattgtaggtcccttaaggtcattaggagttggtgtctcggttgttttttttttatttttcttggaattcttttcatttttttccctttttatatatatccctatttgtgggaattctttttgcagttcattttgtagcaaaaatttcgagttgagtaagagagtttttaatttgtaaaaaaaaaaaaaaaaaaaaaaaaaaaaaaaaaatgatttg

SEQ ID NO: 8961 - DNA, 244 bp, Glycine max
  Clone ID: PAT_MRT3847_108101C.1
gattccgggtccgccccacccttccgaccaggcttattggtgggggctccaacccagccgggcctcctttttagttccgtccacgggcgcgggtacgctttgaattcttcgcgggcttttggcttttccgttgccagccttttgttctgtcttaccaattggccaccagggttcaaattcctaccaccatttcagcactcatggctttgatggcagatgaggatcctgtagttggatttttgtt

SEQ ID NO: 8962 - DNA, 265 bp, Glycine max
  Clone ID: PAT_MRT3847_108102C.1
cggaggccagatggaggagatgaccggaagtccttcatctcaagcatccaatgctgaaagcgggctgattttctctaccggcagcccttttccagaggcttggaccaccggccacctagtaggaagtctcacctccttgagctccggcacccttcgcgaagtgtttcggtcacctgtgttatgctccgtcccctttccggctttgatccgcgtaccagaaaaggatacatttcgtgattcctaagcagctctactaaacgggttg

SEQ ID NO: 8963 - DNA, 277 bp, Glycine max
  unsure (1)..(277): unsure at all n locations
  Clone ID: PAT_MRT3847_108103C.1
ctcagatggcagtggaanatatcagagtcnacgaagattccancgttgcccntncancatncatcaacacnatcacnatgccctccctttnactttgtatgacactntgtncctcaggttcccttccattgantggntcttctnnctatncccncnatgctcaacaatcagaancttctttcttctatgcgaangtcattccaaagctcgangnctctntctctcacagcctccnacactaccctcntctcgctggcaanttctttggccntctgat

SEQ ID NO: 8964 - DNA, 431 bp, Glycine max
  unsure (1)..(431): unsure at all n locations
  Clone ID: PAT_MRT3847_108104C.1
ggctcgagggggnnccangccacnancaagacaacaancgaccaagcgnancnggagnnnnananaagacacaagganggcaccccaannagnncagaaccagagcgagaccgngnganncaaggcnngcaagcngcagnggagagaagggcannngagggngnnaggcnagagnnangcaccgaagacagacaaggacnncnngcagaagngangagaacnnnccgagaaaangggcngaaggggacaagggcagagaaancnaccanaggggacanggcancaaangnnnncaaagnaacagaagcganagganacccngcnganccaaaaancgnggaancnngaaggcagaaagnagggnnaagcaannnaaaagncaaggagnngccanngnnnngccaggagaaggcagaaagggaggaacaacc

SEQ ID NO: 8965 - DNA, 372 bp, Glycine max
  Clone ID: PAT_MRT3847_108105C.1
cgtttctcgtgggaaaaattactgcgccaggctaaagctccaagtatgtttttacaatctttcaaaaattttgtttctttgtgtgtgtatggagatgataactaaattagtgtctatgagtatgataagcctaacttttatggttctaaatagaaaagctttctagcttatcataatatcaccattactgattgctttgataaaactagtgcaactttacaatttcgaaagtcagcagatcgttattttctctagagaaattttaacaagatgtctaatgttttgtgggaggcttctgaagacaaggccagtttatggtcacaacgtcattatcgtttgtgttataaactgccaatgcactaagcttatttt

SEQ ID NO: 8966 - DNA, 742 bp, Glycine max
  Clone ID: PAT_MRT3847_108106C.1
cgttcgcgtggggtagcgtgaaacttccataataactcacctgcgctctttcgcttcctgcgaatctttccgagaatcgagtcacagagtagagcgaaatcggcgtagagatacaaaaatgccaaaagtaaagacaaatcgtgttaaatacccagagggctgggaattgattgagcctacactccgtgaacttcaagcaaagatgagggaagctgagaatgatccacatgatggcaaaagaaaatgtgagaccttatggcctatatttaagattgcacaccagaagagccgctacatatttgatctataccatcggaggaaggaaatttctaaagaactgtatgaattctgtttagatcaaggatatgctgaccgcaatctaattgcaaaatggaagaagcctggttatgaacgtctttgctgcctgaggtgcatgcagccacgtgatcacaattttgccaccacttgtgtttgcagagtacccaagcaacttagggaggagaaggtcatagacttaatgttgtctgaaaccctcaccatgggacaccacttctccaggttgtattactgtctactaaatgagtgctatatattgggaacattgcctaatatggtgtacttttgctctatacttcaaagctttaatgctgctttggttaagattggagccaagctggacaaactccaaagtttttattttttattttttaaagagatcaattttgtgaggggaacattgtaa

SEQ ID NO: 8967 - DNA, 858 bp, Glycine max
  unsure (1)..(858): unsure at all n locations
  Clone ID: PAT_MRT3847_108107C.1
ttcanaagcactcctcttctgcttgccctctctcgcttcctgcaaatcttctctgagatacaaaaatgccaaaagtaaagacaaatcgtgttaaatacccagagggctgggaattgattgagcctacactccgtgaacttcaagcaaagatgagggaagctgagaatgatccacatgatggcaaaagaaaatgtgagacattatggccaatatttaagattgcacaccagaagagccgctacatatttgacctctaccatcggaggaaggaaatttctaaagaactgtatgaattctgtttagatcaaggatatgctgaccgcaatctaattgcaaaatggaagaagcctggttatgaacgtctttgctgcctgaggtgcatgcagccacgtgatcacaattttgccaccacttgtgtttgcagagttcccaagcaacttagggaggagaaggtcatagagtgtgttcactgtgggtgcaagggttgtgcaagtggggactgattgaataccgattctagttttagttgccaatggagggtttcttagaattactttctttgtgcttttagctttctgttgtctgaaatcctcaccatgggacaccacttctcctggttgtattactgtctactaaatgagtgctatatatattgggaatattggtttcatattagtcatctgcctagttcaaaatctgactggagctttgtacctttacattgattagcctaatatggtgtacttttgctcgatacttctcagcttaaacattgggcttaaaataatcgaaggttagtgtaaacttttaatgctgctttggttaagattggagtcaagctaaatatttttgtgaggt

SEQ ID NO: 8968 - DNA, 1047 bp, Glycine max
  Clone ID: PAT_MRT3847_108108C.1
gacccacgtggatgatttcagtcgcgtgaaacttccagaagaactcaaagtcactcctcttctgcttgccctctttcgcttcctgcaaatctttctgagaatcgagtcacagactagagctaaatcagcatagagatacaaaaatgccaaaagtaaagacaaatcgtgttaaatacccagagggctgggaattaattgagcctacactccgtgaacttcaagcaaagatgagggaagctgagaatgatccgcatgatggcaaaagaaaatgtgagaccttatggcctatatttaagattgcacaccagaagagccgctacatatttgatctataccatcggaggaaggaaatttctaaagaactgtatgaattctgtttagatcaaggatatgctgaccgcaatctaattgcaaaatggaagaagcctggttatgaacgtctttgctgcctgaggtgcatgcagccacgtgatcacaattttgccaccacttgtgtttgcagagtacccaagcaacttagggaggagaaggtcatagagtgtgttcactgtggatgcaagggttgtgcaagcggggactaattgaataccgattctagttttagttgccaatggaaggtttcttagaattactttcttagttttagtagcttaatgttgtctgaaaccctcaccatgggacaccacttctccaggttgtattactgtctactaaatgagtgctatatattgggaacattggttacatattagggtgtgtttggtttgcatttttatctgcctagttcaatttctgacgggagctttgtaccttttcattgattagcctaatatggtgtacttttgctctatacttcaaagctttaatgctgctttggttaagattggagccaagctggacaaactccaaagtttttattttttattttttaaagagatcaattttgtgaggggaacattgtaaaagtcaaagcattattctgagataaatatatttttatgtcattctcccagtcaaatcaaaaaaaaaaaaaaaaaaacctcgtgc

SEQ ID NO: 8969 - DNA, 298 bp, Glycine max
  Clone ID: PAT_MRT3847_108109C.1
cagctactgtcggggccgcctttatttttttataattttttttataaacactctatgttaaaagggaggggctcatacaattaaagaaacgacatatcatgacgcacgacataggcactcataaacttatgtgcactggatttcattacacaaatgacctgtcaaatgcaacaatgaattcgcctgtttataccaatccgcttacaatctacctagtctaaaaaatctaaaaagcagcatagattggaccggcagacattactgcaatttaaaccacactctcaaacctagttttgaa

SEQ ID NO: 8970 - DNA, 641 bp, Glycine max
  Clone ID: PAT_MRT3847_10810C.1
gcgaaaaataaaaccacataaacaggcgagcgtatgtagcagagcgaaagccacccaccagctcagatcagcagcagcagcagcagcaccccctatttctccgttctctttgtttttacactctttctatgcaatttcctcccccctaaatttcaggcttttattcttgtccctatctttctagtccattcttttgttagaacactctgattacccatttcaggacttcttcacttttcctcatcattcctctctgtattttacatttcatcttaaaggatctgtaatttccctgattgttttttctttttttccattttctttcccacttttgttttcttgggtctcatcttatctctctgtacctgactattcaaccccccctatttttttctttccacaatttacatttattatttgttttcaataggctcagaagagatttttagctcaatacatcaaagtctcaaacttcctggggatgcggaaagtgtctttaaaaaaattcccccttttgttataagttttgaatccaacccttgtttcaccaaatcttttttcacccattttggttgcaggctctgctcacctaatctgaagcacccagggccacaaaatggaccatttgacgggttgagact

SEQ ID NO: 8971 - DNA, 232 bp, Glycine max
  Clone ID: PAT_MRT3847_108110C.1
aacaatgaaacactcttatacttaattaacagaaaacagtgaagcaatacaaataacatggcttgagtgtacataaaaagccataaacacatttaagacaaacagcggatactaagaagacacaagatctcaacatgagtcttaaaaacatacatgctttaaatgggccccagttcactaccagctgtctgaaaactcttgtataaaactaagcatggttcacatggaccgt

SEQ ID NO: 8972 - DNA, 844 bp, Glycine max
  Clone ID: PAT_MRT3847_108111C.1
ccacgcgtccgcttcttcttctctctctctcaccctaatcccatccttttttacattgctgcattcttcttctcagatgcctcatgtgagatgaggaagaaaacctattccgacttgtctctcttgctcattctggttgctcagtccctctctgcctcctcattctcacacaatggacctctcaccgacgcccaagtctctttcatcaagcagcgtcagcttctttattacaaggacgagttcggtgacagaggagaaaaggtaaccctagatccctccttcgtcttcgaaaacgaccgtttgaaaagcgcttatatagcgttacaagcctggaaggaagccattctctccgatcccaagaacctcacccaggactggctgggacccaatgtttgcaactactcctacgttttctgcgctccggctcctgacaaccataagatccgcaccgtcgccggcatcgacctcaaccacggcgacattgccggataccttcctgaggagctaggtttgctcaccgacctcgctcttctccacatcaacaccaaccgtttctgcggcactttgccgcacaagttcgacaggctgaaactcctcttcgagttagatctcagcaacaaccgtttcgccgggaagttccccgacgtggtgctgcgtttgccgcagctcaagtttctagatctgagattcaacgaattcgaaggcacggttccgaaggagctcttcgacaaggacctggacgcgattttcatcaatgacaaccgcttcgtcttcgacttgccggaaaatttcggaaactcgccggtgtcggtgatcgtgctggcgaacaaccgcttccacggat

SEQ ID NO: 8973 - DNA, 1253 bp, Glycine max
  Clone ID: PAT_MRT3847_108112C.1
ctgagttctaagaatacccttttaatcattttggtctgcttatatatgaatttggatatttgatgttgagatgcataatctgggtcaagggtacctcacttatacatgaaagatccaaattttgcggaaaattgattgaatatttgaattcaaaaatagtggtcgaatcggctttagtaagaacataaaaatgtaaaatcaaagggttgattgtggtgattcagtcagttagttgtgcatcatggaaaagtgcacattagtatgttacaaggttatagaagctgcttctgatatgttaatgctcacactgctcttcacttcgaaaatggccccttctttggctcctcttcttgcagaaccagattcgcaggtgccatccccacgttgctccgtcacaatgtattggcacgtgccgaagataaggccagagaccctacaccttcttcctttcagcctcaacaaagttctcagcaacagtatcagaacttaacaccagaatctgggagttgtgatcccctatgttcactcgatgaaacaagctcacaagagtttgaagacagctaccagcccaagactgatttcctcaaagctgttgcaatattagcaacagctgcaactggggcagtggcaattaatcattcttgggtagccactaataaggatcttgctatgcgattgcgagtgacgacagcatgtgcaggcatcatatttgaagaatctctagccttcaataaaagtggagtgggactgttgatggctgtaagcttatgggtgatacggagtattggggctccatcaactgatatagctgtttcagagcttacacatgcatctgcagaagtcagtgaaatagtgtttttcttgcttggtgcaatgaccattgttgagatcgttgatgctcatcaaggatttaagctggttactgacaatataacaacccgaaacccacgccttctcctctgggtgattggaatttgtacattttttctcctcgcgccgctagacaacctgacatccaccatagttatggtttctctgttgcggaaattggaccctccatcagagtaccgaaagattcttggagctgttgttgtaatagcagcaaatgcggggggtgcatggactcctatggtgatgttacaactactatgctgtggatacatgggaaattatctacagttcaaacgtgaaggatttgtttgtaccttcagccgtttctctaagtgttccccttggtctctaatgtccctgac

SEQ ID NO: 8974 - DNA, 621 bp, Glycine max
  Clone ID: PAT_MRT3847_108113C.1
ggctcgagcctcactctgcccgttaaagagagtagaacactttgagcgaatggctacgttttcaattgggacacacacttgtccatgttccagcatttgcataattctagacttccacttcatggcttctgcaccgttgaatcatcacccttctttggctcctcttcctgcagaatctgtttcacaggtaccctccccacgttgctccgtcacaatgtattggcacgtgccgaagataaggccagagaccctacaccttcttcctttcagcctcaacaaagctcacagcaacagtttcagaacttgacaccagaatctgggagttgtgatcccctatgttcactcgatgaaactagctcacaagagtttgaagacagctaccagcccaagactgatttcctcaaagctgttgcaatattagcagcagctgcaactggagcactgacaattaaccattcatgggtggccactaatcaggatcttgctatggcattgctatttgtataggatatgcaggcatcatatttgaagaatctccagcccttcataaaagtgagtgggactgttgatgactgtaagcttatgggtgataccgagtattgggggaaatatctatctttt

SEQ ID NO: 8975 - DNA, 142 bp, Glycine max
  unsure (1)..(142): unsure at all n locations
  Clone ID: PAT_MRT3847_108114C.1
actaatgattgggtccactgcaccaactcgtgcgtgcactgatagttgtggatgtgagtgtgaatgcagagctgtgcacgtgcccgtntagggccatgacccaagtaattgcccctaccactacagatgtgtttgccataga

SEQ ID NO: 8976 - DNA, 478 bp, Glycine max
  Clone ID: PAT_MRT3847_108115C.1
atggaggagattgcttttaactttttttatctttatggtcttacggacccttaaactccattttctatttgcctgggtgaccttaaaagcctctggtttctcccttagaacaaacttctgtgtcttccctgttgaaggttttggcttatcttgaaaaatgacagtgttgggagccatcttatggggcgaatggtccctgcaaaagtggattatttctggagcatgtaaagtaaacccctttttcaactttgcaaaagcacaaggagtgtgggcccactgatcattaagctttgaaacaactggggtttcaaaaaccggtggatggttatacaaaactggttgtaccccaaccgagctaatattctttcccccggagactactatgtgcttgaaactgtccttgatttgtatgggaccatacaaatgtttctcagcttgatccccactttgaaaccacccctctttgaaagcctgtttt

SEQ ID NO: 8977 - DNA, 265 bp, Glycine max
  Clone ID: PAT_MRT3847_108116C.1
ctttttggtttcggggtattcttcttttacattttacaggcctcctacgattccaatattcgaggagatatacatgggttgggttagtggatatgaagggcagcatttaggtgagcataggctttcaagagagcctgtttgtgtaaatctctgaaggaacacattctgtcactgagtcaatcgtgccatatctagttcaaggaaagctatctcctttgaagaaaaacctctttactttagaagccctgatcccatctattccaac

SEQ ID NO: 8978 - DNA, 304 bp, Glycine max
  Clone ID: PAT_MRT3847_108117C.1
actttagcaggcaccactatctgttgctctttattgttttgggtcagatgccattgtacacatggctggtcaacattaccatgaattggctgttgtagggggatagttgttacactgtactagaagcaattcttagtgaaatgatttggctgctgatgtgggacaaatgtaacatgtgggctcgtacttgacccatggtaataatctgcaggagagtgatctagaacagaatactaaatgggctcactcacatatgaggtcagcaccacacatgcttgatacttgaaacgtagttatttgataa

SEQ ID NO: 8979 - DNA, 352 bp, Glycine max
  Clone ID: PAT_MRT3847_108118C.1
ctcgacttgctacctccataaagttcttactaatctgtgtccaggaacactaaaaataatatagacaagtgcttttctagtgaaacatagatggtcgtggttacaagtgttgtttcaatattgtaagtgtctgtaggatgctagagaagaggaatatgggaacagcatttatcctcaagggttgttatcttactgttgtcattactaacagtttcatttcttttcttttctttctgtttttttgaatactttacttttgccaaatcagaataggaagcactaaattgtagcattgatgatagcacactagtactttaatttcaaaatggaaaagactaatgcactgcgcatt

SEQ ID NO: 8980 - DNA, 1886 bp, Glycine max
  Clone ID: PAT_MRT3847_108119C.1
gggcagaaaaacaatgatgtcattagtgttgatcttgtatttaatcctcaaataacattattttcacatttttaagcatatggtcctagctcaaccactcataatctgtatcctgtctcttcaagattctccaattatttggcctttggcctttggaaagcataagaaaatgtcagaaggaaaaagcacttcaataaattaatgaaaataagaagacttaatgttattttatggaaaagacactgccaccgggcttcttacaatgtgatgttggtgagtccatgcataccatccaaaatagtacttatctgggccatgcttggttggtatctgactccaatttgctgtcactgtgatggcgaagttaattttctgcccaacatgattaaatttcagaatgtttggagtggctgtgatggagtattcctttggtgacacggcactaaacttgtaaacactcctgcccctaccaacattggtgactgtcctctttatagtcttagtgtaatagagtctatggatttgtatggatggatagttgagctcaaagggttcaagaaatgactttggacagttatatgtaatgttaaagttttgagttactccaaggttacaagtgtaaagaaggtagcccatgtaggaggcatcataaaccagtccaggatctgctgctcttttggggttgaagtggccagaccccattgcgaaaggcgtcgccggatttccagtttcatcagtcaatggatgacctgtgttgtctgttgtcatggctgtagtcatcagggcagatcttatagcagcagtgctccatgtagggtgtatggctttgagaagaacagctgcagcagcaacatgagggcatgacattgaagttccagagaagatgttgtatttaaccactcgtttgtcgttaaatgtcattcttgtggggccatcttcagcggtccatgagtgccaaacgtagacccctcgggctataatctccagcttcagaatattggggtcaactatatttggacccctgctagagaaggaggccatggagggtgctggtttggtttctaacactgttgttcctggtagaatttgtgccattggatttggagtagaatgaacatattgaataagttttaaggaattctcataggacaccccagtggctggaataaaatgaggatcagagggtacatctttcccatttagtttattgttgccaaggataaaaccaaccccacctgccctttgaacttctaagccttttttcagtctttctccttgccctctcatgcagagaactatcttcccccttgccttgttgggttgaagggtattgtctaggcaaaacccagaattgttactaggcaagcctggatgttcaacatctctagctagaaccaatgggtagaagctgtttcccatgtggagtggagtaatagatcgaccctcaataattgttccattgctgagcttaattggagcatgaaaagaacggtccacagtgctagcagcaacagtgatgatccatggagcagggtttgacaaagtctgaggcaaagggccagagttgccagcactacacacaaccacaatgttcttcctcacagcatgcaacgcacccctagcaatcacatcctcttcatatgaaattggtgcactgcaccctatggaaatgcttagaacatcaactccatcaccaatggcatcatctattgctttaagcatgtcaatgtttgtgcatatgttcccttcgtgttttgactttccctttattggccaacatgctttgtatatggcgagacgggccaaaggggctcctcctaaggctgtgcccttggcgaagcctccaatggctgaggcatttggaactacacgccctgcaactattg

SEQ ID NO: 8981 - DNA, 449 bp, Glycine max
  Clone ID: PAT_MRT3847_10811C.1
ggggcaaaaaaattttggtactttattgcccttacaaaaaattttccccttttataaaaaggggaataattcccaaaaaaatctttcctgtaaaagccccgaaaaattttccccttcccagcccccccagaaaaaagaaagaaagaaatccccttttttggggggggggtcccacattcaaggggccctttgggttttctcactttttagggggctttttttggatacaaatttacttattctttcacaactttttgcccaggaaattgaaaaaaaatggggggtttggattccttggatttttcagggaaaggttaaaggggttccaatcccttaagccctttttttatggaaggaccttttttggggtcatgttttaaacattttacaaaaaggtgggctgcttgaaaccctgcctttggggaaaattgccccccttttttaacccc

SEQ ID NO: 8982 - DNA, 414 bp, Glycine max
  Clone ID: PAT_MRT3847_108120C.1
cccgtcctgcagatcatttgcgttctactgatatgctttctaagagtgaagccgtaagggattagcagcctaaaatgagaaggtattcatctcctaactgctcacttacaggagagagatcgtagctgatcatgtccgcgagggatagatgataagaacttcgataagagagtttacagtctttgtggaggtgatgataaaattgctgcgtagaaaggacacacctgctgtaggatagttgcttaaagatggcaatttgtaagaaagattctaggagagctgaatgctgaatcccttctagattctcgctcacagccattggcaatagcatttgtaatgagatgctcattagatatatctatgataaattactgcgccaggctaaagctcctgcgatgttatcacaatccttca

SEQ ID NO: 8983 - DNA, 512 bp, Glycine max
  unsure (1)..(512): unsure at all n locations
  Clone ID: PAT_MRT3847_108121C.1
accttcccccccccccccccccccccccttacgagtgtttacaattacttttattcaaatattattaccttcacatctcatcacacacatgaattttggagatgcgtctaaaatttcaactgcaatatcttaattatgagtatacctaaaaaaagaatgtgctagatgtataggtatttgggatcaataatgatgattattaatctgggtaccaaaggcagagccaattcttggtatgttctgacaccattctaaacctcaggaaacaatctgaaaatttcatattcatggtgccaatctttctcggcctacatagtgattgagatagttaacaagtttaggtggcgcttacgttttagtatacaaaacgatttcaaaagctaagaaattgataacagatctataaagggaaatgatcttctatggcaaactctagtttactatcacaagtntctttgtcaacagataagtacagtacaccaatccttcattatttgntcttcacataaccg

SEQ ID NO: 8984 - DNA, 396 bp, Glycine max
  Clone ID: PAT_MRT3847_108122C.1
aattcggctcgaggctgcgagaagacgacagaaggggtacctttaggcatctttgaaggggatcacattaattcctccatattttagtgggcacaattccagccaatggtgcggccagttaaggcccaatttaaaggattgggatcttgggaatcctgtgcttcattatttaaatggaatttaaaaaaaaattgcaccaaacaatttcagattcgcttccatcaaagagagtcagggaacaacactcagttcatgagtatcattatctattcaataaacatctctatttggggtggggggaaaccaccctgagggttaataaaatacacttgataaaatataagttatagtattaaagctggcagcgttagatggttaggaaaaagcaaatatatg

SEQ ID NO: 8985 - DNA, 298 bp, Glycine max
  unsure (1)..(298): unsure at all n locations
  Clone ID: PAT_MRT3847_108123C.1
gaacgaaggatgggcatatccattcatggaacgatcgttagaaagcatgacgtttttttcttaaaaaaaaataaaatcaaagtaattaatagaaattagaaagtacaaaatggtccctatataacttgagtgtcctaagctcgcaataatacgataaagggtttttgttttgtttccttgggtgctgcatgcactttcactcgaagaaccttgaagcgagtctgggccacagcaaccagcgacaacaactcaatcagctagggttgctttgcttgctatctngttggaagattttctg

SEQ ID NO: 8986 - DNA, 656 bp, Glycine max
  unsure (1)..(656): unsure at all n locations
  Clone ID: PAT_MRT3847_108124C.1
acgacccacgcgtccgcggacgcgtgggcaaagcctcaaaatttttcccatgtctctatgtcttttcctaagaaaataatataattgagattaactgcaacctaactgacaatgttttaaaataatcccttctcaaccttccattttgtaatggaagaaaagaaatcaaaattatgcaatgatataaatcaaggaaaacaacaactccatatagtcttaatgaaattaaaatctatcaatctctgcaaaataatgttttggtgcaaacaataaaaaataaaaaaagaagtttgattcatatgctttgaagcaaaggaactatgtatttatattaggcagttatagcagagtggggtggaagaattatcgaattctctctctggatcttccttctttttagcattttgttcccttttggggcggttactattttttttcttttggtggctgtaatccaaggtttcttatgttaatggaggataattcctaactatctcttgcatttgttttcctctgctactaaattccttccattcttgccttcattaatttgcctccattacattggtgctttcattgcgtcatggttgacaacacacgcatgaaggagcttcaggngatgtcaaaaggatcctggagatgatggaaaaccgcaa

SEQ ID NO: 8987 - DNA, 358 bp, Glycine max
  unsure (1)..(358): unsure at all n locations
  Clone ID: PAT_MRT3847_108125C.1
cggcccggaatcccttttcgacccacgcgcgctgtacnggtgggctcaccaaaggtactctcttatccattctattactatcggtgcactcgcgcccactgcacacagaagaaacgcagcaagcagctctgatacagcctgcgagttcaaaacgcgggcgaaatcgcatgtcagaccagtactcaaaccatatcttattgatgggcatgtctggagggtcatatgcacaatgatgaacattctgtaaccaacccatgaatgaaaaacttctatttattgaagcacagggaactatttgtgcgagtgaaacttgttgctctgaggattgagtttgatatacatgctgtgcttatggacg

SEQ ID NO: 8988 - DNA, 345 bp, Glycine max
  Clone ID: PAT_MRT3847_108126C.1
agatgaagagttagaattgaggacactagggcgagagcttttcctcacatcttattcagaagggccggaaccttatgatctatagggagcgtgcaggctctaaacggagacatggccaacgactcttacgggaacgactatatccctgacgtgatgaagcactgcatccgtccggacatcgtcagcttcgatcactgaaacggatcgcataactgccgaccaccatatgcagatagtcgccgcaccggacatcaaacatgcgacgacccttgcggaacccgacgtgccgaatgaagcatccctcgatttcccggtggcggaacccatcgggctggtcgaggattc

SEQ ID NO: 8989 - DNA, 384 bp, Glycine max
  Clone ID: PAT_MRT3847_108127C.1
gaaaaaaggtggtagttttgtaattaaaaagtgaaaacagaatatgaaatttggaaattaaaatagaagtaaacatgcccttggtgtttttctcctatagattctaaaaagaattaaatgtttggtttgagttggttttgaagttctgttgtgagtcatgactaatgcttgagtgaggggaatagtttggaaagggaacaaggaaatggagataaagcaatctatttttgttctccatttttagcgttcctttcatctcttcaccaacatatacccgaagacaccagaagtactctttttatgggtttgtgactatttatttttattttttattttattagagcacttcaagaattgacttcatttgcttatctttttctgaaa

SEQ ID NO: 8990 - DNA, 645 bp, Glycine max
  Clone ID: PAT_MRT3847_108128C.1
gtacttaaaacaattatttcataaacagttttcaaaactcaacagattttggatgaaaaattgattgctgagtagggcaaacttgttttaaaaaatcagtttgtaaaacaaaaaagtgagaagaagaaatacacccttaatatctcatttatttgtgataaattactattaagcaactgctggaaaggagtataaacatcaacaaaaaaaagactgagtttgtaaaatatcaatagttttgaaaaagaacaaggacatggaatacaacctgattaatgctttattgattcatgtgaaatattgaaatggatttaattgtatgttttggtcaattgtgaatgataggtatgtgatgcatcaatattgctggactcaacacccaaaaacctggctgagaaagatggtcctcctaatctctctgtccatgctttctatgttattgatgaagccaaggccaagcttgagaaagcttgccctcgcacggtttcctgtgctgacttaatagccattgcggctagggatgtggtagcattggtaataactcaattaagccttcaagctattttagaactgccccttctgtcgtcttctcgcagccgtactcgagcggctcgagcggctcgagcggctcgagcccaatcccaa

SEQ ID NO: 8991 - DNA, 283 bp, Glycine max
  Clone ID: PAT_MRT3847_108129C.1
cttttagttagctataatgtgaggcaggacaagtttggtgattatttgctgcttcaatacagttgtcttgtgtgtttgaggtgtgtgagtatatatctaggacttgatagtggttctttttgtaggtattttttataatttaataatattgttgttttttgtttccaatcaatctggttgaatcagaccttatgtgttttctggtagttgagggatagatggaaatttgaatagatatatttccttacctgtattaagatttaatttgggataagataaaagt

SEQ ID NO: 8992 - DNA, 1107 bp, Glycine max
  Clone ID: PAT_MRT3847_10812C.1
gttctcttctacatcttccagtttatccgcgtcgttttgctctttactgtcatcgttttgatagggacaggatggtcttttctcaaaccgtttttgcaggacagggagaacgtccggttgatgattgtcatcccgcttcaggttctcgccaatttggcttccgttgtgatcggggaaacaggtcctttcatcaaagactgggttacttggaatcaggttttcttgcttgtggatattatctgctgctgtgccattattttccctattgtgtggtccataaggtcgttgagggaaacttcgaaaactgatgggaaggcttcgaggaatttggccaagttgactctgtttagacaattctacattgttgtcattggatacttgtatttcaccagaatagtggtgtttgctttgaggaccattgcggcttataagtaccaatgggtgagcaatgctgccgaggagaccgcgagtcttgcgttttatgttgtcatgttctatatgtttagaccattggagaagaatgagtactttgtgcttgatgaggaggaagaggaggctgcggaaatggcgctcaaggatgaagactttgagctttgaatttgaagactcccactacgttacgttacattacacccctttaaacccttcttctactgttagagaagacaagtgttgttcacgagggaatactgcctctatgtttagctgctgcttcttttgcgggatacaaaaaaaggttttctacttttcttttttgttcattttttaagctatatgtcatttgagaagctgtactagtgaaatgttcttttattgatcggtcattcattcttctttggattttctctgcttgagattatggtggggacagggcgctttacatttctcaattcattcattagcttcttacttgatccaaaattatcagtcttataatgttgctgttgttgctttgcttgacattatacactttgtgtgcatttgtatcatgttatgttgttaatagaatatcctgcagtttttttctttctaaaaaaaaaaaaaaaaaaaaaaaaaaaaaaaaaggcggccgctttataggataaaagctcttgctatgccgtgcat

SEQ ID NO: 8993 - DNA, 201 bp, Glycine max
  Clone ID: PAT_MRT3847_108130C.1
acttaaacctgagtcctttttaaccaaaaaaggaaactggcattcacggaatacaaaaagtccatccaaagcccagaaaaaaaaaggcattaattttccttacaacaacaacacctgggtttgacttaatcaacgtttgatgctcccaacaggaaaagaaacgtagggtctatacaaattgcggacttctcagatgaaaag

SEQ ID NO: 8994 - DNA, 466 bp, Glycine max
  Clone ID: PAT_MRT3847_108131C.1
ctttattatagactctgacagcttgtctctgcggcacgcacctgtattatctttggtaatggtgcgccgggacccatttagagcaatacccagtggtgtagggactgctttggggacaatgcgtcttatcttttatttgctatacctggacactgaaggcgacacacggaaccatgccctacggcatgagaatccatggaacatcgtgagatgttaaagtccccatcaggggaggcatgccaatgtagatggagttcaacgttgatatgtctacatgacaacacatgccagagacagcaggcatgcttgtcactcctcaactgcctaatctgaaaaagaaagcaattacctgtatgattcgatctgctctttaaatggctgtaattcagttcttgctgggacactgccatatcttatcagccaatactattgcatggcaccaagcatgtctgtgtgagtctttatt

SEQ ID NO: 8995 - DNA, 1517 bp, Glycine max
  Clone ID: PAT_MRT3847_108132C.1
tgttgttcttatcggctcgagaaacctcttcctcctcttcttccttttgcttcaaggtgtggtgttttgtgtttcacatttaaagcaacactgaaaagaaaggaaagtgaagttgagagtttgtttaggaagaacaagaaatgggggttggttcccaggatgccatcaagcagttccaggcattcattgaccaagttgaggagcctttgcgaacaacgtttcagaatgttcatcaagggtttgtcaccgaaactttaatgcggtttctaaaagcaagggactgggatccttgcaaggcacataaaatgttggttgactgtttaaattggaagggtgcaaaatgagattgacaatatattatctaaaccaattgttcctgctgatttatacagagcggtgcgtgattcacaactcataggattatcaggttactcaagagagggtctgcctgtctttgcaattggtgttgggcttagcacatttgacaaagcatctgttcattattatgtgcagtcacacattcaaattaatgaatatcgtgagcgtataatcttgccttctgcatcaaagaagcaggggcgacctattaccacttgtataaaggttttagacatgactggtctgaagttatcagccctgaatcagattaagttgctaactattatatcatccattgatgatctgaactaccctgagaagacaaatacttattacattgtaaatgctccatacatattttctgcttgttggaaggttgtgaagccacttttacaagagaggacaagaagaaaaatacaggtgttaccaggttgtggacgagatgagctattgactatcatggattactcgtctctaccacatttctgtcgaagagaaggctctggatcatccagacattctgagagtggtagtgaaaattgctattccttggatcatcccttccatcaagagctctacaatcacatcaagcagcaagccagactccgtgaagctgttgaacccatcaagcagggttcatttcatgtacattttccagaacacccagaggagaaatttgagattgacaagactattgagtccaagaaacataagtttgagaacggaaattttgtctgatactttgtttaaggatctactattgacacgtcaatagagtatgagctacacaagtttaagatcagcaatgtgaatggtgattgaagattgatactgttgccaatggtgtcttggccatgttggtcttttacctctcctactaaccatttgaaccaaactaatgttgtaacaatggttcttcctccacactattacaatttacgaggattccgcagtactagttagggagtagtcaaaataaagcggatcctagctttgcattatgccataatgcaaagtgagaaatgtcaactatgatgataattaccatcatgtttcttctaagcttgatatttgcacatatatattttttttatcttcatattgccttctcaattcaaatagaaaacagtttgcgttcg

SEQ ID NO: 8996 - DNA, 726 bp, Glycine max
  Clone ID: PAT_MRT3847_108133C.1
agaacttggtgataggcccgcctttgttgaatcttcatttatggtctttctttctattagttgttcttgtttgctatatctttaaacctcttgcttttgttttgcttcaaggtgtggtgtgtttcacatttgaagtaacactgaaaagaaaggaaagtgaagttgagagtttaagaagaacaagaaatgggggttggttcccaggatgccatcaagcagttccaggcattcattgaccaagttgaggagcctttgcgaacaacgtttcagtggttaaggaactaaaaggataaaatagcactgcctataagatcatggaatgttcatcaaggatttgtcactgcaactttaatgcggtttctaaaagcaagggactgggatccttacaaggcacagaaaatgttggttgattgtttaaattggagggtgcaaaatgagattgacaatatattatctaaaccaattgttcctgctgatttatacagagcggtgcgtgattcacaactcataggattatcaggttactcaagagagggtctgcctgtctttgcaattggtgttgggcttaacacatttgacaaagcatctgtccattattatgtgcagtcacacattcaaattaatgaatatcagagagcgtataggcttgccttctgcatcagagaagcaagggcgacctattaccacttgtataaaggtcttacacatgactgggctgaaactatc

SEQ ID NO: 8997 - DNA, 715 bp, Glycine max
  Clone ID: PAT_MRT3847_108134C.1
aattaaccaggtatttttcatgagtttggggggtcaggttgagttggtgaaggatgggaagccttatgtgttgtttgtagatgggaaactgtgtgcttgtaagcctatgagtgagtctgatctggcttcttttattgtgaattgtgtgctgagtgaggataagattaaccaggtgttgccaattggagggcctgggaaggcattgactccattggaacaaggagagatgttgtttcggcttttggggaaggagcctaagttcttgaaagttccgatcgaaataatggattttgccattggggttcttgactttctggttaaggtctttccttcactggaagatgctgctgagtttgggaagattggaagatactatgcggcggaaagtatgttgcttctggatcccgagaccggagaatacagtgctgagaaaacacctagctatgggaatgatacattggaagagttttttgcaagggttctcagggagggcatggctggtcaagaactaggtgagcaaacaatattttaagatgattgtggttagatatgtatgaacacaataaggcaaatagagcaaccagttttgtttctgtaaatgtatgtattcagctagagtcattgtaatgtttacaagttcaggcactgttgaaagaaattcaagtttttggaaatgaattgttgaggattcattcttcaattgcattgcactgtc

SEQ ID NO: 8998 - DNA, 291 bp, Glycine max
  Clone ID: PAT_MRT3847_108135C.1
gcaatatggctttaacaaacaaatctccagacggtaaaacatatcgcggaatggttgcgtttgattcgccggcagataggttcacgtgcgtgcctctgggatgctcaagtgcccgaggctgcccaagctggtcgtgcttgagcctaaggttctgatcttgctgttagtcagacactgtatgtatcgaggtacatgtcaatgatgtgtgtatgacacgctctatttgatatgcttgagacgctatatatggcttgacagaatgctctgtagcgcttgtaggagcaccgagct

SEQ ID NO: 8999 - DNA, 818 bp, Glycine max
  Clone ID: PAT_MRT3847_108136C.1
agaaacatacaaactggcaaaccagaagttcgtactccaataaatcaatccactaatactaagaggctctaatgggacatcaaaaacacaattagagcctcagttatcctgctatacaaatatgttaacaaaaggccacgaatcactcaaagtgtgtgaaaaaaataaaaaacacaaacggcaaacccaagacgctgcttaatcattgattagcaggggctaataactgaactaaaaaataccaaaattggagcctatcttttttttcttcactcagatttttacaagctacgaggcaattagccattgcctttctccttcaacgagttaagcttttcgagcctccattctcctctaagccgagcaatgaacgttgcggctttaacattcacatcggggctgggacagaaaacgttacgatccgtaacggtttcattaacagaatcagtaacggcgtcaatgattgtagtttccgacacattaataatgtcctcgcgttctggagagctacaccgcgagctctggttgctacgtatcttcacgaaatctccgcgaactacgaacttcatcgccttcatcttaaacggtggtggcggcggcggaatcggaattaacggcgactggttgccggcgtttagagtctcgtcgttgaaagtgacagctctgttagggagaggtggtcggccggagtttctccgccgtggaggctctggcggagaagacggcgacggagggatctggctcttgcgctttgtcggcggaggaggtggtggcggaggtggcgccgacaccgagtggattttctctctctctctctc

SEQ ID NO: 9000 - DNA, 490 bp, Glycine max
  Clone ID: PAT_MRT3847_108137C.1
ggtggtgggtgttttttttttttttctttttttgttttttgtgccctggttgctttttttgattttgaacattttccaaaacatctgctttttttgttttgcaagccagcttgggggccctctccctccctttattaccttttgctggttgaatgaagaaagggggaggcttcttttctttctttttttcaaaccccccatccttaaggaaccgcagaccttttcatattgagagactgttgggaattcctctgaaagttaatccttcccttctcgagggcgctccccggttttagggcttttgccctggtgcccaacgggttctcagtttcgcatcggtgtttttttttgggggtttcttctccctttgggccggtttatttccaaaccttttaaaagcctctaatgctcttggttccgatggccaggtgggaaatgtccctctcccccgggtcccctccttcgctgcatgccttgtcttttttctttg

SEQ ID NO: 9001 - DNA, 439 bp, Glycine max
  unsure (1)..(439): unsure at all n locations
  Clone ID: PAT_MRT3847_108138C.1
gtcggangacgcgaacgggnattcggctcgagattgatggcatttatcccatggtttaacatgttaattatactgtaataaacatggctttaatattaaactttttccttattatccaaagtcaccacagtccatttcagtaaatataaaaatatatgcttaatactttgtacaatactggtttttggtccaaacaaaactggatcagaaaagccaataaattcaactttaagaatccccaatttttttttaaagatttccaaatggatttaggcaactttgaataatgggatttacataataaaatctgagacaagactaaacaaacaacaaaaatatgtctaacataaaattaaaatttcaagttcacagatttatgttatgccaaaaaagtacagaaacaaaattgtatttacagaagtttcataataaaataatg

SEQ ID NO: 9002 - DNA, 2377 bp, Glycine max
  Clone ID: PAT_MRT3847_108139C.1
ggaaaaaaagaaaaagaaaatccactactactctcactaagtcactatagtgaaccgtggctatgctactactaaacctggtttgagtggtttcctcatcttctccctcttgaatcagcgtcactttctctctagcataattttgtgcctaccttcttctgaaatgaaaaataaatataattaatattattatattgatcgatggaaacagactgacatatttaagcgtagatcggcatcgtcgtgtagtgttgtatccacttgtcaatcgcaaattcggaaaccctagctagcagcagcagcagatctgatctcacgttcgtggctatggcgccaaggaaacctcgcgagcgtgaaatgctgttcgactccgtcatcgcgctcgtcttcatcctcgttgcctgcgtcgacctctgcgacggcgccaccgtcgtcgacgtctaccgcctcatccagtacgacatgtccggcgtccccttcggatctcgactcgccagcctcaaccaccacgccgcctcgctccacttctctccgcacgccgatctctctcgcaccgtcctcctcataccgcttcgtgaactcaacatgtcttttgtcaaagagtatattgctgaaagcaagcctcttgggggtttaatatttttgcttccccggatgttcagttttgaaaacaaagatggtatgggaagtaatcatcaagatgagagtaaagaactgctgaagaatgtattggatgaacttgaaaaaatacttatacatgccaacttaccttatcctgtttattttgcattcgaggatgataacattgatgctgtgttaactgatatcaagaagaatgatgtcactggtcagcctgctacagcaacaactggcggatacaaatttgttgtttcggccacagaaccaaagaaagttgtatctcctcccattacaaatattcagggatggttggcaggactgaagacagatgatgatgctcatcaattacccaccattgcaatagttgcttcatatgacacctttggggctgctcctgcattatcagtgggaagcgatagtaatggaagtggcattgtggctcttcttgaagtagctaggttgttttctctcttatattctaatccaaagacaagaggacaatacaatctgctgtttgggctaacgtctggtgggccttataactacaatggaacccataagtggcttaggagctttgatcaacgtctgcgtgagagcattgactatggctatttgcttggatagtattggctcttgggaaaatgaattgtggattcatgtgtctaagcctccggaaaatgcctttattaagaaaattcatgaagatttttcaagggttgcagaagaattaggctttaaagtgaatctgaagcataagaaaattaacatttccaatcctcgagtagcttgggagcatgaacagttttcaaggctgagagttactgcggccaccctttctgaactctctacagcacctgaattgctagggaagactggtggtttggttgatggcaggcattttgtcaatgaagcggctattgtcagaagtgtgaaattaattgctgagagtcttgcgaggcatatctatggacatcaaggaaagaacattcagatctttgcagccaacagtaacttggctgtcaatccttcttatgttcaatcatggttagatgttttgtcccaaacgcctcgagtagctccatttttgtcaaaaggtgatccttttgtaatggcactgaaaaaggaattagaagaccatactgatgaggtaaatctacatagagatgtgcttgatgggatgttcactttctatgattcaaccagggcaaagctgaacatatatcaggttgccagtgtcacatttgacttgctgttgcttctagtgctgggatcgtatttgattgtgctcttcagtttcttggtcatcaccactaggggtcttgatgatctaatcagtctatttcggcggcctccctctcgaaaagtgaaaactgcatagtggctagcaggattttgccaacatagttctgaagttctaaatagtttcttaggatggaggtttctaatgaaaaagttttgtagcggattttttttcgtcctttgctgaagttggttgctttagtggataaaaacagcaagatattttgttttggctgtgcgaaattaacgacgccaaaattttgatattttttgcccgtttcatttggcgcatttttgttgtggtaaaaaaaatgcttactaattcatgccttttgaacacagggttacccgggttgttataggcaaggcttgtttacatgttacttagtttcggctcaataaaggatccgtttggttgatttgtcaaaaaaaaaaaaaa

SEQ ID NO: 9003 - DNA, 556 bp, Glycine max
  Clone ID: PAT_MRT3847_10813C.1
ggaaaagaagtaattcattgttctacagagcataaagctagcggaatcactttggtggcacaggagtaaattaacaggctcccaatggctagcatactaaatggtagttaatggtaagcataacagaaacttggaatataatccacattcaactatcaatcttgtaatagttgatccctcaagttatcacaaatgcattagatgacctaaatgtaacctttgcgagttgtcacaccagctgcatcaagatcacactggtttctatgttgagtgtatctcttcctctcattctgcttccttcagttcaaatactgctccaacacttgaaaattaataagttcattaaagggaataaaacaaaagagctcaaaataccagggtctcaccactgctacctcatacttcaagtcagaaagaaatatactatcagtattcagtttaaagtcgtcacaaacttcatacaataaccgaaagggacatgtaagttatttgtagacataacttacctaattgtcattggagcgagaatgacgtctccgcgatctgcgaaaaccac

SEQ ID NO: 9004 - DNA, 1711 bp, Glycine max
  Clone ID: PAT_MRT3847_108140C.1
ggtcgtacacacgagtaccacaaacctctctctataaatctttctagaacgtttcttcactccccgaacctgatctcttgctggttgccacactacaccgatatttccaccaaacccgtttgcgttgttgtttgcgaataaatggcaactaagaggagcgtgggaacgttgaaggagggtgatttgaaggggaagagggtattcgtgagggtcgatctgaacgtgcctttggatgacaaccttaacatcaccgatgacactagagtccgtgctgctgttcccaccatcaagtacttgactggttatggtgctaaagtgatcctttctagccatttgggacgtccaaaaggtgtaacacctaaatacagtttgaagcctcttgtgccaaggctgtctcaacttcttggaattgaggttacgatggccaatgactctattggggaggaagttgaaaagttggttacacaacttccagaaggtggtgttttgcttctagagaatgtgaggttctacaaggaggaagagaagaatgatcctgaatttgcaaagaagttggcttctctagctgatctctatgtgaatgatgcatttggcactgcccacagagctcatgcttctacagaaggagttgccaaatacttgaagccctctgttgcaggattcctaatgcagaaggagcttgattatctagttggggctgtgtcaaaccccaagagaccatttgctgctattgtcggtggatcgaaggtgtcttccaagattggagttattgaatccttgttggagaaagttaatgttctcttgcttggtggaggaatgatctttaccttttacaaggctcagggttattcagttgggtcatctcttgtggaggaagacaagcttagccttgcaactacacttcttgaaaaggccaaggctaaaggggtttctttgttgcttccaactgatgttgtcatagcagacaagtttgctgctgatgctaacagcaagactgtgccggcatcaagcatcccagatgggtggatggggttggatattggtcctgattccatcaagacatttggtgaagcattggatacgactcagaccattatttggaatggaccaatgggtgtttttgagtttgataagtttgccacaggaacagaggctatagccaagaaactggcagagctgagtgggaagggagtgacaaccatcattggaggaggtgactccgttgccgctgtggagaaggttggacttgcagacaagatgagccacatctccactggtggtggtgccagcttagagcttcttgagggaaagcaactccctggtgtccttgctcttgatgatgcttgagcaaaaatcattcgttcctttgaagtttgtgctttatattattattatggttgggtttcagccaacagtggattaaggtacaatgagagctgcgagctcttgctcctgtagaggcttaatataggataggtttcaaaataagagggttttgtggcatccttggtgttgcattgagctttgatctaattgttcttgaacaatgttcatttccaaatgagtttactttgttggttaagtttggttttcttagcggctaattttcgtgttaatttccaaagctatagtgatttggtatatggtcctaaaaaaaaaaaaaaaaaaaaaaaaaaaaaaaaaaaaaaaaaaaaaaaaaaaaaaaaaaaaa

SEQ ID NO: 9005 - DNA, 475 bp, Glycine max
  Clone ID: PAT_MRT3847_108141C.1
aattttctttttttttttttttttttttttttttttttttttttttttttttttttttttttttttaagggccggaaaaaaagggtcctgggaaacccatattggaacatccccaaccggaagatctataaaatttccccaaagcaagaaaagaaccccgggaagaacatgggccttttttttttccacacaaaacagggacaatttacgggaaaaaaacaaaaaccttttaaagcaaaacatgggttctgaaactaaaaaatttacggggggcttccccgggttcaaaaccagacggaccaaccttagggggcatcatttatccaacgggtttcatcttctaccacctgggaaaagctgaaaggggtgaccctgatcttccattctcctttagggggaccataggaaaaaaattcagcaccttgggcctcagcctttttttggggcatcccctgggatttctaaatcttggggc

SEQ ID NO: 9006 - DNA, 476 bp, Glycine max
  unsure (1)..(476): unsure at all n locations
  Clone ID: PAT_MRT3847_108142C.1
catctatgttgacgatttgatttatgctggtaatgacaagggtatgatgattgagttcaagcagtctatgatgcaagcttttgacatgactggtctaggaaagatgagattctttcttggcattgaagttttgaagaaatcataacggattttcttgtgtcaaagaaaatatgccactgatatctggaagaagtttgcaatgtctaagagcaaacttgtgaaaagtccaattgtttcaggctttaaaattattaaagatgctgatggcgcactgtggatgacacttatttcaagcaaattgttggaagtttaatgtatcttacagctacaaggtcagatataatgtatagtgtgagcttaattagcagatatatgccaaaaccaacatnnnnnnnnnnnnnnnnnnnnnnnnnnnnnnnnnnnnnnnnnnnnnnnnnnnnnnnnnnnnnnnnnnnnnnnnnnnnnnnnnnnnnnnn

SEQ ID NO: 9007 - DNA, 670 bp, Glycine max
  Clone ID: PAT_MRT3847_108143C.1
acaaaatattttttgtatctgctattatgccaaaaccagccaaacttgaaaaacttagtccattacatttaaagccaaagggttaggagataaaaggatcccaactcatctcttttggaagttcaggaattttatgctataggcaaaaacaaacaagaaaaggagaacccagcctaagtgaacaacaacaaccactgggaggaagtgatagtcataaccgaagtttttcttaagtagttccttcagccccatgttttcagctcctggaatttccacttgtgtaattttatcaccgaattgagaggtaacaaggccatacagtgtccaagcattaggagctagccaatagtaccatctccaccatataggaatttgcgtcctaggaatgacaaagccacagaacgtgttccagatggtcaagaagaaggaattgcaaacagcagcaatttgaaaacttggggtgacggcaacaatcatcatcccatataatgggtagtagatcaaacacataagcatgaagtagtagaaggaaagaaatttccctggccgtccattcaaaccccatcatggagtagatgatgacactgaagatggtcgtttgagtggcagaataaattgcctctattgccacctgactaattgcataagtcaatggtggaatacctccctg

SEQ ID NO: 9008 - DNA, 400 bp, Glycine max
  Clone ID: PAT_MRT3847_108144C.1
tgcggctgctataagatcacacaatggttttctaattaaatataaattgattttcagcatatatctaagagggaagactcaactctgggataaaatttgttgtactgctgtcttggcatatcaaattataaagttaaattaatgtcgttacagttgtgaagtacattatttcatttcttttaaaaaaatcacttattattatgtcaatagtactaatttgtcaatatttaaataatgattttaataatgatttgaaaatatatcattaatagctatatcatggatgcttggctagagatttgagatctagtcttgtttatttatctatttaccaaacctataattttatttcttattaacttaatgaaagttgttaatatattcttattatctatttgtt

SEQ ID NO: 9009 - DNA, 281 bp, Glycine max
  Clone ID: PAT_MRT3847_108145C.1
aactatttttggctttttccggaactatggacaagctgcggaacaggtcattgtatagtagaatgacctaacctgatttcgaaagatcatggatctgtgcatactagactgaccatgcgtggtggggccaaaacctacgacatcataccggtatgttacgccatctgtgcatcggtacgtgaccatcgtcataccgtatccgagatcgtggatgcgctttatgatacctgagctggacgatgatatcttggctagcttctatgaatatattgatgactctt

SEQ ID NO: 9010 - DNA, 229 bp, Glycine max
  Clone ID: PAT_MRT3847_108146C.1
ggcaccaggaacatgtcctttttcagatatatatgatgcaaagccacaagagggttaaggttataactatttattaatgcataatttaatttcaattttgaagctgattctgacctcaagctgaaaatagcagggaaacagcctctttgcttccagggataaggcggcatactttggtggatccctgcaggttggaaccttgcccattgaactggccttgttaagtgtt

SEQ ID NO: 9011 - DNA, 578 bp, Glycine max
  Clone ID: PAT_MRT3847_108147C.1
catctcccaatccccccactggtgcacgcctcatggccttgttgggaacccaaaatcctccctccaatcaggaaccatcatcggttgtgtactcatctccatcaccatcacctgtggtttctgatttctcagtgccaccagcctccacacagcagccctcagggtctcctgtgaatctggctagtcctcagtccacaccaaccaggatgctcagcaccaaactgcccaaggggcgccacttgatcggagagcatgctgtgtatgacattgatgcgagggtgcctggggaggtgcagcctcagcttgaagtcactcctatcaccaagtatgcctcggatccaggcctcgtgcttggccgccaaattgcagtgaataagtcttacatatgctatggactcaaactcggggccatccgggtgcttaatatcaatactgcattgagatatttgcttcggggccatactcagagagtaacagacatggctttcttcgccgaggatcttcacctgttggctagtgctagcacggatgggagaatatttgtatggaaaatcaatgagggccctgacgaggacgac

SEQ ID NO: 9012 - DNA, 418 bp, Glycine max
  Clone ID: PAT_MRT3847_108148C.1
gggaacaaaacccccctttaatttttttaaaggaatttaaagcaccaaaacgtccaaaagctttttattttgttttggggccaaccccccttgctttttttttacaacaacaacctacttttacgatttccacccgggggggggggaaacacccttctttccccgtttttttggtccaatagaagggggtttgaggggaaatcctttttggtttttgccaaagcttgctttttgggaaacattgcggaagcaaaagtcaactaattgggggaacccccccaaaatttagccccgccttagggttttaaggggtattttttaaaaaaaaattaaaatgggttttcgataatcaatacaaaaagggccgggaataaattttaattttaattttgggggaaaaaaaattaatttttttaaa

SEQ ID NO: 9013 - DNA, 274 bp, Glycine max
  Clone ID: PAT_MRT3847_108149C.1
ttctaggggacaggttggtttagaactttcattgcagactatgtagcggggcttatgaaagtcggggggacagctttattattcatagtaccaagtaaagtgccttttggagttccaagaaagcccaacttctcctcttgcttgcggaaactacatcctttcactaattggacagtaatcaaagatattgtggaggtttctctcgcatatatacttgctgcttcttatctcccgtcctaatgatagcggtgctttactcttttactcataatgt

SEQ ID NO: 9014 - DNA, 271 bp, Glycine max
  unsure (1)..(271): unsure at all n locations
  Clone ID: PAT_MRT3847_10814C.1
cacgcgtnnaccgtaagcctcggnaatttcggctttcgaagcctatgtcccttnatttaaaataagctattctaannaaanntccttctcttaatgttcccaattttcattcttccccaataacctcaaaaaccttcaacttctntatcttaaaagtttttttntcttaattcttcttttcttcttcttcttcttggtcttgcccattgggtttcttcttcccaaaaacncacccttcccgaatcccgaaccgtctttcttgtcccacttc

SEQ ID NO: 9015 - DNA, 235 bp, Glycine max
  Clone ID: PAT_MRT3847_108150C.1
aatcccttcccatctgccattctctcatttcaaacgtcaaattactattggtaacaatcaattgactaaccaaattaagaaagggtaaagttgtgttgtgtacttgatatgcctttatattgttccactttgggtgcaagctctcccacgtatcttaggacttgggaagagaagtgaaaactacacaatagtcatataaaaacaccctcccattttggttcttgctttttgtctc

SEQ ID NO: 9016 - DNA, 329 bp, Glycine max
  Clone ID: PAT_MRT3847_108151C.1
gaccgacgcgaccgaaataaggattctaccggcgccaaagctaccacagttggatagaacacaaagatattaaagccagctgcatcataatggaagcaaaggctacaagctaaagatggctgatttttggtgtagctcaggtgccttcaagaatatgagagccgcattaggacagatatcgatggaactacgatcattatggatctagagtacctagaacagggttcttgaacgaaaaagctgaagagatagatttagaggggtactgatagaaataattactggaagactgaactatcaaagcagagcatcgcaataagctgacagac

SEQ ID NO: 9017 - DNA, 710 bp, Glycine max
  Clone ID: PAT_MRT3847_108152C.1
cactatcattaaccaataaccaataaatacattaatcaccatggggaagtactttgctgttgttgctctctttgtctcagctttgtgcttctcctctatcttggctcgtaagacacctgcccttgataaattcttcgttgagggcaagatttactgtgacccttgccacttcgcatttgagtccaggctcagtttccccttggaaggtgttaaggtaagcctgcaatgtctgaggagtgagaatgataccgtgacatatgtgaaggagggcaaaactgatgcaaatgggcaatacagcatccctgtccatggtgatcacgaggaggagatttgcatagttgttgctgactcacccactgagggtcagtgcaaagaggcaatgccaaacaagtccgataggatcgtcctcacaaaaaacatgggtgtctcctccatggcacgctatgtcaatccccttgggttcatgacacagggaattgatgcaacacaatgcaatcttgttgtccaagagttgggattggaccaacttgataactgactggaacagagataattcattaaactccatccaccaagacaaaatatatatatatatgtattcatgttggatcaattgccctgtatcatatatttaattaaccattctccacaatgtgtgtttggaggttacattctaatgaaatataattaatatgtggagtttggaatat

SEQ ID NO: 9018 - DNA, 334 bp, Glycine max
  Clone ID: PAT_MRT3847_108153C.1
ggctgcttttgcttttcactccttggacaacacaacggcagtccttccccctgaggtttgtatctgacaaaccgctgctgacactttcatgaaaaccataggatcccgagagataacaggtgccaatgatgtcaaaaatgatcgaggagtgacacgccctgattggcgatttccacttaaagtttgacgtatttacaacttcatggctgttcgtagagtttgacagatcttcaaggagatgccggactatttctgactcaactgtgtcatacccagggaaaaagcaagtccttggaagattaaaaagagcagccaaacttcttttttaaggaac

SEQ ID NO: 9019 - DNA, 378 bp, Glycine max
  Clone ID: PAT_MRT3847_108154C.1
acgaattaataaatatgaaatgacgtaaaagtatatgttgatatcattctttcatataaattatatggttagtttcgacagacagacaaaaccttcaacaacttcttgtgagaaagcaaaaccattcttaaaatcaaagtaataacatctaaagggtgtatctaaggtaacaaaagttgaaaaaaaacgcgggggggcccgttttaaaggacccaagtttacttccccgccatggcaacgtaaaagcttttttatggggacccctaagttaatttttggggccgcgattttaaaacttcgggcctggaaaaccctatggcttccctattgtgaaccctttgacaaaacccccctttgcttacagagggaagagagaga

SEQ ID NO: 9020 - DNA, 277 bp, Glycine max
  unsure (1)..(277): unsure at all n locations
  Clone ID: PAT_MRT3847_108155C.1
agtttccggtttttttttaaaancccatatcacctttcgctgttttttcaattcctcatcaaatttttgttcctctaccagaagtggggtgggaaaaacttgaaaaaagatcaacattcaaaaactcatatttttttttccattttctcccacgtgggggggggggctctcacctcccaaacccccttacaaccttcaacaaaatccaaaaaaaggacccaaactctcccttattatgctccctaactagccccccgctcaattccctcaaaaaccc

SEQ ID NO: 9021 - DNA, 433 bp, Glycine max
  Clone ID: PAT_MRT3847_108156C.1
gtgaattggcatgtgccttgtattacattttggctgaatgaggttttatttttaagctacatccaataattatacaatctaccagaaaaaaagtgggggggaccacaccaatgtaaggaggtaaaaagacatccaggaaaataatatcaaagtaaaatcgttggggggggcttttagctgactaggcacaaaaatgcttcatgaagaatgccacacacgaagcattttattacctaggacagaaaaaacctctacagcagcaaagcagtgtgctctttcttataacatttcgaacagaacaaacacctgaatggggcccaagagaaacattgggtcaatttgaaaaatgaaccattacaagcacccaagaaagaccaacaagaaaccatcttgacggaatggtataaaaataaaccaatgcagagcacatgct

SEQ ID NO: 9022 - DNA, 290 bp, Glycine max
  unsure (1)..(290): unsure at all n locations
  Clone ID: PAT_MRT3847_108157C.1
ccaccagcaacggaacaagaaggacattatatggggagngcacccccatgaacacgaagaagaacacatggaagatggtgctttgataagaaagcatactgtgtcacagaacaagggcaatcttattacagacgaattaacttggtcataatcatcttcatcttctactactagcagaggcagagagcatagcaatggcgccctgctaatggacccacacgagcggatggatatcctgttcagaaagaggcagaagttcgccagattgggggcgccggtgaaaaaagcaa

SEQ ID NO: 9023 - DNA, 608 bp, Glycine max
  unsure (1)..(608): unsure at all n locations
  Clone ID: PAT_MRT3847_108158C.1
tgaattgactcggggtgagttgactcagcgatggcggaagaggtgactcgggtgatggtggcagtgaacgagtcgagcatgaagggataccctcatccttcgatcagcagcaaaggggctttcgaatggaccatcaacaagatcgttcgcaacaacgtctctgccttcaaccttctttttcttcacgttcaagtccccgatgaagatggttctctttctatttccctctcttttctttttaattgttctttgttgttgtgtcaagaaatattatgattactggcgtttggattctgttttgcattcggtgctgcttggtttctgtgaaaatggaggaaagaaaacggaaaaaggacgggaaattagttgatccctacaatttatgttaagagtgtgtccatgattggtgaaattagttaattgagagtaagcatgtgtatatgtacgcagaaattttaattcataacaccaagtaggcgcaagattattttagcttaatcagtaatttcgagttcgagttccaagcattccaccatgtaggcacaaggttgttntagcttgatcggtgattttgagttcgagttccaagcattccaccatgtaggcac

SEQ ID NO: 9024 - DNA, 424 bp, Glycine max
  Clone ID: PAT_MRT3847_108159C.1
aacgcaacacaatgtcttattcattcttactcaagcattaatttccattgaagcccggaaacggaatccatgaataccggatgatgaaatctgatctctcgaactcataagggaatgtaccttaagttctacaaacacataggggtggttacagatgctcggccaatttttcaatgacttacaagcctggtggcatcggaagctattgaaaccgaggcactgttctcggcgaacgttgtcaaatccaataatactgatgaagccaccgccgcctgcagcactatgctcttgaagctacggccacaccggaaaaaaatcgccgcagtcaaacatatgcagattacacatggtgcaacaacgtgcattatttggtgctagtgatctgttgcgctgacagcacactaaagggtgctatttacataca

SEQ ID NO: 9025 - DNA, 328 bp, Glycine max
  Clone ID: PAT_MRT3847_10815C.1
tgaaataggggctttttcaaaaatgctacggcgtttacatactaaaatcctctgagatatcaaacactaaatatctttatacccgcacaaaccgctaataaatcagatgatccagatcattacatctctactctagcgctcctatagctcattacttcttaacgcactctactctctgttcaccaccatacatatcctcattctcatcctatccctccttctgaccttttttcctcctccttgtctcttactccatgttcacatcatggagtttggtcttctcacactcatccatcttcattttttacaactctcatgtttactttta

SEQ ID NO: 9026 - DNA, 562 bp, Glycine max
  Clone ID: PAT_MRT3847_108160C.1
cttgatcacttgaaattgttgtctggtgcaagaagcttattgtcattgcgttcgctcatgttacccttgaaaacaggctgtcttcttctcatgcaaccacagagtaaaaaacatgcaatcctaggaagatggaagaatgcaatacgaggataggtggatcgatagcatcatagcaacagttattaataaatcaagggcttttgatttatatgaagtgtggtgtacttgaataaagcttacctgtatgcaagcaggaattgtaggtggttcttaagttcacaatggtgttttttgaataaagttgtcttgtgtatttatgcaagaccagatgcgtgcaaggtttttaagtatacaagaagggtgtttcataaataaatttgatttgtatctttgtaggaggtttgcattgttttcatgattttcaatgaataaagttgacatggatgtattttaggagaaggatgctccgtgaataatattgacctgtatttatacaggtgtgtaatatggttttatgttgtaaaccgattgttttgttaataaattgaccagaagaatttct

SEQ ID NO: 9027 - DNA, 428 bp, Glycine max
  Clone ID: PAT_MRT3847_108161C.1
cccgtttgggcggatgcggatacctggtttgagaggcagcagcatgaggaggagatgaaacggattgaagcaaaaaatcgtgcaacgattccagccgggggagaatttcaccgggagccaataaccaaaccaccggaggggaaaaaaggaggaggaaattgaaatcaaggttgatcctatggccaaggttgaaccggaggtttttaaaaataaatgacttgtcaaattgccccacctggtgaggggaacccctgggtttggtttttggttggcctaatggaatggcttaatgaatttggggattggattgccttgaaccgtggaaatttgaaccaggttacttggggaattgaattaccatttagttggaaattgaattacccttctttggaccttaaaatcatatattcctattatggacttcaacc

SEQ ID NO: 9028 - DNA, 291 bp, Glycine max
  Clone ID: PAT_MRT3847_108162C.1
agaaaaaagaggttgctttttttaaaccgggggcaaaaaaaaaaactccccattttcaaggcccaaccaaaaattctcccaagttcaacccaatccccagaggaaagctccacgggttcatttttaaccccgggggcagcccccaagggtttttccggaaaacaaaactactccccccaaaaaattcccctggggcctcgaacctgaccccataacttaaactctcgggcctgcaaccaaattccggttttatagagccgccctaaggaaaattaaatgtcttttattggg

SEQ ID NO: 9029 - DNA, 471 bp, Glycine max
  Clone ID: PAT_MRT3847_108163C.1
ggttgccgatttgaaacaattgacgggggggcaggagcatgggggggcgcgtacacccggatgtagcatgtatgagcgagggaagaaacccactgtgcgcggtaaaataccctctactgggctgagcaggaaacggtgcatgaacatgcatgtgaactcttagatgattaggaccaagaacttcgacagcatgaagcaacgggagtcaaaaccaaacctcttgtgtctctttatgaaagcaatgcaagaactcacggccacactggtgaaaccttacattagtgctctccttatcataccatatgtgaaactgccagtgtggactttcatattgctctacttacttgcactctctacttctcactgatccgcattgccgttcaaagtggtcttatttgaaaaacacttgggcgttggtgcaaatgttagagtgcccatcctatgtggagacaccatgcccactggaaaaac

SEQ ID NO: 9030 - DNA, 1210 bp, Glycine max
  Clone ID: PAT_MRT3847_108164C.1
cccacgcgtccgacggctgcgagaagacgacagaaggggagggtaagggatgtcgtcgattgtgaagaacagatactgggttctgaggcatggcaagagcattcccaacgagcgaggcatcatcgtttcctccatggagaacgggactcgccccgaattccaattggcctccgacggtgttcatcaagcacaactcgctgcacaatcattccaaaaggaactagaggctaataatatcccggcttgctactgtacgcatttgctactcccccttttctcgaaaagcccataccgctaacgaatcttcaactctgctaattcacgcttttgatagaccatgctcttaccatgccccagaaccccgtatctgttcttcacaatcgacgaggcatcatcgtttcctccatggagaacgggactcgccccgaattccaattggcctccgacggtgttcatcaagcacaactcgctgcacaatcattccaaaaggaactagaggctaataatatcccgcttgctaatgtacgcatttgctactcccccttttcaagaacaacccataccgctaacgttgtttcaactctcttgaatctcccttttgatggaccccactgtaaggtcatccaagatcttcgagaacgctattttggtccttcttttgaactcctttcgcatgataaataccaagtgatttgggatatagatgaaaaagatccatttcttgggccagaaggaggggaaagtgtcaaggatgttgcttgtcgacttgcaactgcaatggccactatggaatcagaatttcaaggatgtgcagttttggttgtcagccatggagatcccttgcaaatcttgcaaacaattctgcatgcagctaatgaacacaaggaacccacatataatgacttagcatcaatactgactgcagttcaggtggcaccaatcttgtcccagcaccgcaaacatgcgctgcttactggagagctcagggcagtcatttgagatgtcagacccctatatatggtttcatttcaaaatacaaaacacctccccagtcatttttttaggaacagggatctaaattcgttttgctccctattccatttattactttatagattatttagcaaataaaatttcaatcacgaataacatggcatctgatgtgaatttcttttttttggtaccaattagcaaataatcattatcactt

SEQ ID NO: 9031 - DNA, 698 bp, Glycine max
  unsure (1)..(698): unsure at all n locations
  Clone ID: PAT_MRT3847_108165C.1
cacgcgtccggatttcctcttttgatgtaaatggtaacataagggcttcaagttctaatccacttcaaagagacaatgatagagaaactggtcaaggagattcgttatcagatcagagactgttttcatgtgtaacatgtggaatactatgcttttcctgtgttgctattgtacagcctagagaaccagcagctagatatcttatgtcagctgattgcagcttctttaatgattgggttgttggctctggagtatctagcaataaatttactattgcccttgaagaagcaactattgctgagccaaacatgtatacaggatggatgaaaaaaaatgtccaagatggtnacatgatgtttctgttcaatcttctcgggaggctttaaatactgaaagtgaaaatggcaatacagctcttgcattattggcttcagcatatggaaattcatctgactctgaggaagatcagattgcagatgagagtcacgaatcaaatgtgataaactctgcttcggaatgtttactttctcatactcaagattcctatgctagtcccatgactgcacttgacaaggagatgattntccttcaacgagtgccagttgtgaagatgtgcatcgtaatttgagtgtatttgagtcatcagtctttagacactctttaagaacaggatatatatcacatcaggggtacatttg

SEQ ID NO: 9032 - DNA, 354 bp, Glycine max
  Clone ID: PAT_MRT3847_108166C.1
aatataaaaattttttttttttttggaacaagggcacataatttattaaagcgacgaaagaaaaaacaacatagtgaaatctcttacatgacttgatgacacacaactgaaacaacataaaatgaagctaatgcccctatttgaacgcatcttattacatatagatagaaaggagcaaactagattgttgaaaggtgaaggaactactgaatgtagtacaagggataaggaagcttaaaagtcctgctttcgactctgtggcctccaaggagaacgctccaatggtctacaaagatcccaacaaagttgaaaacctgccttataaaaaaatatcacactgctgaattataaaaa

SEQ ID NO: 9033 - DNA, 461 bp, Glycine max
  unsure (1)..(461): unsure at all n locations
  Clone ID: PAT_MRT3847_108167C.1
aatcaattaaagtgagggttttagctttgagcctaaagcctctgcttctcctccttctccttttccttcttctccttttccttgtatagtaccgatgttgacactcacttctccttccatggccttatccatggattctcttcccaaattgcgccacccttccccatttcccactcccttatcctcttccatctccttccgatctttgccgccacctcactttccctcttcctcctcctcctcgtttaggttacactccatcagaccctcctcccaaaaccacccctcgtttcgcaccccctccctcccccctctcctccaaaccctaacctccttcctctcccccgtcgtcgaaaccacctgcatcgtcatcgccgccgctgccttattcttcatgcgctttcaccacacaccccccgccatcgccgncccgctcactccccccgccgccgagtccgaca

SEQ ID NO: 9034 - DNA, 500 bp, Glycine max
  unsure (1)..(500): unsure at all n locations
  Clone ID: PAT_MRT3847_108168C.1
gcttctgccaactctcctatcctcttgcttcccccgtttcttcctttcgccatatataacaaacaatgcaaacacaacgagttaacactctcgcacttttcctcttgttgttgctctctccgccacgccccgccgcatcaatgccaccacgagatccgctccggtcatcgtgcgcaaaggccaggtacccaactctctgcttccaaaccctctccaacttctcaaacctcgccacgaagcccttggacctagcccaagccgcgatcaaggttagcctggctcgcacgcgcaccctctccgtttacttcaagacgctgaatgccacgtcgtcgcgtttcgggaagaggcagcgagttgcggtgagtgactgcgtggagcagatatccgactcggtgactcagttgatcaacacgctcaacgagttgcagcacctccgcgccggaaccttccagtggcagatgagcaacgctcagacgtggaccagcgccgncctcaccaac

SEQ ID NO: 9035 - DNA, 1046 bp, Glycine max
  Clone ID: PAT_MRT3847_108169C.1
ccacgcgtccgatcccccactctcaccccgcatttcccggcacaaagattttttcccagcttgctcatcaagtccaagaaccaacctaccttttgcaatctcaattcaatggcgtcctctctcattgcgaagcgcttcctctcctcttccctcctctccaggtccctccttcgccccgccgcttccgcttcccaccgctctttcaacaccaacgccatgcgccagtatgacaaccgcgccgacgaccacagcaccgacatcgatcgtcactccgaacgctctttccctagcactgcgcgccgcgacgatatcttctcagatgtgttggatccattttttccgactcggagtttgagccaggttctgaacatgatggaccaggtcatggacaatccgttcctctccgcgtcgcgcgggatcggagctggcgctggagtgcgtcgcggatgggacgcgagggagacagaggatgctctgcatctgcgcgtggacatgcctgggctcggcaaggaagacgtgaagatctccgtggagcagaacactctcattatcaaaggtgaaggtgctaaagaaggcgatgaagaagagagcgctcgtcgctacactagcaggattgacttgccggacaagctctacaagattgaccagatcagagctgagatgaagaacggtgtgctcaaggtcgttgtgccgaaaatgaaggaggaagagaggaaagacgtgatcagtgttaaggttgagtagaacaacccaagctgatttggccattttgcatcgacactactctttagttttcttttattaggtggtgatgaatctagttagtagatataacagcttaatagtattgttgctgtgtttggttttgaaacttcaaacgtatctgtaataattgttatatagagttgtgaatgagcttgttgtttagaagtctactgcagtctgaatttgacttgtcaatgaaattcgtgtcattttaaattcgtaaaaaaaagcgtttccctaggaagggcggccgccgacttattgctgtcgtcccgggaaat

SEQ ID NO: 9036 - DNA, 489 bp, Glycine max
  Clone ID: PAT_MRT3847_10816C.1
tgatcatcaagcaaataatgcgccagataattacatctcttaagaaaattcacgacataggcattgtacacagggatgttaagcctgccaacttggtggttaccaaacgggggcagattaaactcattgattttggtgctgcgacagaccttcgaattggaaagaattatgttcctaatcgtacccctttggatcgtgactactgtccccctgagctatacgtgttaccagaagaaacactaagtctcccaccagagcctattgcagctttcctttcacccatcttgtggcagttaaacagtcctgatctgtttgatatgtattctgccgggattgtactcctgcaaatggcaataccaaccttaaggtctccagctgctttgaagaatttcaatttggagataagaacatgtggatatgatttgaacaaatggagggcatctactcgcatgaggtctgacttccaaattcttgatagtgactctagta

SEQ ID NO: 9037 - DNA, 1158 bp, Glycine max
  Clone ID: PAT_MRT3847_108170C.1
agctcatcaagtccaagaaccaacctaccttttgcaatctcaattcaatggcgtcctctctcattgcgaagcgcttcctctcctcttccctcctctccaggtccctccttcgccccgccgcttccgcttcccaccgctctttcaacaccaacgccatgcgccagtatgacaaccgcgccgacgaccacagcaccgacatcgatcgtcactccgaacgctctttccctagcactgcgcgccgcgacgatatcttctcaggtagttgtagtcgctctctccctaacctcgcactaaccgattctcttaattcttctattttttatgtagtttagttgattcaatcgtggttttaaattgcgttgccgcaattgtccaaatctataaaaaatttatggctcaccgaaagtgcaatcgcaatttaacaccacggattcaataaatatcattacttaaacgttttgttttattcgattctagctaaccttgcactaaacggatctcttcaattatttctttccgcggttttggtgattctgaactctacgttttgttcgattcttgctatccgcagatgtgttggatccattttttccgactcggagtttgagccaggttctgaacatgatggaccaggtcatggacaatccgttcctctccgcgtcgcgcgggatcggagctggcgctggagtgcgtcgcggatgggacgcgagggagacagaggatgctctgcatctgcgcgtggacatgcctgggctcggcaaggaagacgtgaagatctccgtggagcagaacactctcattatcaaaggtgaaggtgctaaagaaggcgatgaagaagagagcgctcgtcgctacactagcaggattgacttgccggacaagctctacaagattgaccagatcagagctgagatgaagaacggtgtgctcaaggtcgttgtgccgaaaatgaaggaggaagagaggaaagacgtgatcagtgttaaggttgagtagaacaacataagctgatttggccattttgcatcgacactactctttagttttcttttattaggtggtgatggatctggttagtagatataacagcttaatagtattgttgctgtgttgggttttgaaacttcaaacgtgtctgtaataattgttatatagagt

SEQ ID NO: 9038 - DNA, 527 bp, Glycine max
  Clone ID: PAT_MRT3847_108171C.1
gcacatcattttcccaccgtaaacaccacaacgccatccctatcaaacctgtaaaacatcagaaataatgttctggatgtcattctgagttgaattgccgcatttcagcggctctttccgacccgcttgactgattttggtcacagagggatgaagagtaaagagtgatggaaaagaacaaacacgcagcctgttttttgaccagcgcctccgccctgcatctaagcttatcgccttttgacttcgcttcctccccgcttgttcttgacctccgtctggaacttgacccggggcccttgatatcatgtgatcgctgagtcagcccgcccttgaacatcaaaatagcttcgtctctataaaacatagaatagaagcagaactcattagattgaatagttacctcatcagtcagtatattaatttaacatgcctcctcgtcttaactttaattgctcttcggcgcttttccgcagaaacttaacaaccacccgcacccgactgaacaccggtatgccgccgcattcacc

SEQ ID NO: 9039 - DNA, 453 bp, Glycine max
  Clone ID: PAT_MRT3847_108172C.1
atgtttctctttaattgctttctctctgctttcttttcttcgtcgaaactttagatgactttcttctccaaatcaatttcagctctatttctttgtctattgacaagcttaagaatctcctcaactatgaacactgggaatgagaacatcagtactaataaccaatcattgctattcagaggtacgggtccaaagattactccaaagaatggaatatacaggataacgcagtggagtgccatacataggaagattgcaaccaacaaccatgggtttgcgaataaacctatagtaagaatggatgaatcctcactaagagcattcaaagcgttaaacatttcaattacgacaaggactgtcaaggatagagtggaagccttttgtttaccaacggtgaaataagagcatgggttggtcttgaattgagtgtattttccataattggtaacagag

SEQ ID NO: 9040 - DNA, 155 bp, Glycine max
  Clone ID: PAT_MRT3847_108173C.1
aattattatgttaaacaaaggaaacggaaacttaaaaaaacataataaagccaagatacaaacaaactcataaaggaatttgactatgcaagtaaagggctcggcaaattcaagcccagactcaaatggggcacgcaaatccagccatgaactgg

SEQ ID NO: 9041 - DNA, 367 bp, Glycine max
  Clone ID: PAT_MRT3847_108174C.1
acccccccagaactgtgtcttcttggaaggtctgcccaaattgccattagaccgaagccacaaagaagggggaacaggggggccatctctgaaggtgacttgttatgagcgggatcgcccatggaggtttgagttgctctgccagttgtgcccccacccccttgacatgggctgcggcccacccatggaccctgggatgctcactgaatggacataaccacctcctgccacaccgatgttcacaactagggtgacccaagagtgtccaaagattgagaaccttattcctacctttttcacacatggtaccccggtgttggccccccgctctattccagctccatataaaacagtttgaaggaagggg

SEQ ID NO: 9042 - DNA, 162 bp, Glycine max
  unsure (1)..(162): unsure at all n locations
  Clone ID: PAT_MRT3847_108175C.1
gcngnagcgtnngnnagntcggaattcggctcgagcanngnagtnanccgctgacagataaagncnaangagtggcttantagtncgaaatctcagacgaatcctgtgttgagnnggggtgcntntctcgtccgttngatcgntgtggacttcatcagatng

SEQ ID NO: 9043 - DNA, 154 bp, Glycine max
  Clone ID: PAT_MRT3847_108176C.1
ctcgagcaacaagttcgaatacaacaggagtgataacaacaaaacccaaagaccggagcaatgcacttgaacattccaccaacccatctatgggccccagagcccacccttgattgctcccaacaacgatgtgaaacttgaccgacaggccata

SEQ ID NO: 9044 - DNA, 202 bp, Glycine max
  Clone ID: PAT_MRT3847_108177C.1
cgtacgactgaagatcatgctggaaggacccaatatttataacatcaagtatcatgtacacgaccacggcgtatatatacatgcgtgtgtggacgacgccatggacttcagacacgaccgtgattatgacgcctataggatgaaactaccatgtggttcagatctgattgatcctcgtgactgtagagccatgcttggtcag

SEQ ID NO: 9045 - DNA, 396 bp, Glycine max
  unsure (1)..(396): unsure at all n locations
  Clone ID: PAT_MRT3847_108178C.1
nnggacccccgggcngcagggaancggcacgagggcgaaaaccaaacccnccagaanaacngnngagagagccgccnggggcggngcagccaacgaccaagagcgaagnggaagccaaagngaaaaaangacaaanattttgggggggggaggaccnnnctgtttgtattgntgttggngaaacacgggaagaaatatttgggcagggaatnanagagcacctnnnnggtgattntatgggtgcaagtgatatgacttaaagaagaggataatnggaaaagaaagnatacccaattacatggattgaaagngaaggnaataaattaagtcaaaaaccttnctgtggagggtgggggaaaagggtctnctaaaaaagaantgaataancagagaaac

SEQ ID NO: 9046 - DNA, 331 bp, Glycine max
  unsure (1)..(331): unsure at all n locations
  Clone ID: PAT_MRT3847_108179C.1
gtcagtgcaaacaaacagaagccccncgggannnnnaatttgtaattttgtnnngggnttctgcttttggggatttagtttttgagttgtgtgtgtgtaatttctgttcccttcttctttatttatttatttggtttctcggtggccacctaaaagtaccgccaccaccatatatcaagttgtattatcaatgtgtgacccccaaaggatttgccaatcccccacccatatcttcttccgcctttccctttcttttggggtattccccttcctttttcccttttcctccccttggttcttcttgggtggggagccaaaaaggcctgccttt

SEQ ID NO: 9047 - DNA, 166 bp, Glycine max
  unsure (1)..(166): unsure at all n locations
  Clone ID: PAT_MRT3847_10817C.1
ngtacgcgcggggaaannnngacaaaccgcgancataggttgccgcaccgnaaaaccggaaacaaaagcaancggnacnggannccaagaancncncaannncnnccnaccagggggggaacgacnnccnaagggaaagaaaancactcncggngcnggccacaga

SEQ ID NO: 9048 - DNA, 1524 bp, Glycine max
  unsure (1)..(1524): unsure at all n locations
  Clone ID: PAT_MRT3847_108180C.1
cgaaccctgaaggggggactgcctccctcgcagactctagttatatcctttatcggtatctggagccctcctacaattagatcgccgcccttgatgaagttcttttgcttgttgttttcagggtaatctgtatctgatgagtccagatgaatcctttcttattgtcaactagatgtagtttgagaggattcgaactacttgtgcctcactgttggacacttttgaggccttagttcatgtcgttttatatgttgtgtgatgtatcaacctttcctttaaaaggacctaacaccagtaaaagataatgaaaattccatatagggaagtattgacagtaactgggaccggttccggggaatggaagacatacgattgaatgttctaattaggctccttaagaacaaatttgcagaaaactttctggtagatgtaattgagtgggagagttggtggtatggtctatgtactacactagttttagagacgcaaaatgccttagagcacgatgttttggaagcgttctcttgccattttgtctccagtttattccataggtacctttgaatttacacgtgaagcatattgatgacaaagagttgaatgctattgggtctaatctttggaaggaggagtccaagtgcgttgagtggctcaacactaaacaacccagtagtgttgtttacgtgaattttgggagcatcgcggttatgacaagtgagcaattgattgagtttgcatggggacttgctaatagcaacaaaaactttttgtgggtcataagggcagatcttgtggcgggtgaaaatgctgttttacctccagagtttgtgaaacaaaccgaaaatagaggcctattgtctagttggtgctcccaggagcaagtgttggctcacccttcagttgggggatttttgacacacagtggttggaattcaacgttggaaagtatgtgtggaggtgttccaatgatttgttggcctttctttgcagagcaacagaccaattgtcggttttgttgcaaggattgggggattgggttggagattgaagatgttgagagggaaaaaatagagacccttgtgagggagttgatggatggggaaaagggtaaagagatgaagaaaaaagctttgcaatggaaggaattggcagaaagtgctgcttttcgctctgttggatcttcatttgctaatttggacaacatggttcgtgatgttcttttgggcaaaagtcttaaatattaggggtagaagagctcaaatcttttaacttactcctttgttgtgtgaagactttttttaaaataattattccttagtgggaaatgaagtgtaccaggtacaaacgtatcatttgtttatttttcttttccaattaatgtcaatcttattgaagtatggaaataatttatgtgagcaatgagtgagagccagtttaagatagagttcaaatcttttaacttactcaatgaataaaccaacaaatctgtttaactattttcttttcagttttagtccnnnnana

SEQ ID NO: 9049 - DNA, 1516 bp, Glycine max
  Clone ID: PAT_MRT3847_108181C.1
gataactctctgtagcgaaaagtcagcgccttcttttgtctctctctctcaaaaaaaaaattccacacactgcagagtttgtctctctatggcggaagattgggatctacatgcggtggttagaggctgctccaccgttacatcatcctcagtgtcttcttcttcatctccttcttcctctggttttgcctcttcttacttccaccctgaagctgcagtttcttcttcttcttcttcctattctggcttcaacatcttcaagggtgaacaaggaataagccaagttttgtcgctctctgcgtacccctttgaggcaaggagctccattgaggaattgcatgagctttgcaaacctttcttctccaaatctcagcctctaacgttgcaagcctcttcacctttgtcctcactctcttcctattcctctgcgccacccaaatctgtttcaacgcaagagaaacaacaacagaggagcaagcaggcacatgctgtcaccaccccacgatctaaaagaagaaagaaccagcttaagaaagtttgtcaagtgccagttgagaatctctcctcagacatatgggcatggaggaaatatggccagaaacccataaaggggtctccatatccaagggggtactatagatgtagcagctcaaaggggtgtttggcaaggaaacaggttgaaagaaacagatcagacccaacaatgtttatagtgacttacactgctgagcacaaccaccctgctcctactcacagaaactctcttgctggctccacacgtcagaagccattggtacctcaaacagccaccaccactgaagaagactctgacaagagcaagagcctcacaaaacccacttcccctgccacctcaggggcagaagaagaggctccaacaccatcacaaggggaaaagtctgagagcagagaagagaaagaggatgtgatggatgatgaggaagaagatgaatttggcttgtctgatatggtgctttcagatgacttctttgaaagtttggatgaactgagccaacttacggctccttctgttgtcactggagactgtttcagtgaccccttttcagcaattgcaatcccttcttgggtggctagtggtgctgctactgctagtgggtgtagatgattctttcgggcaaatcatcacaatgcttttcattgatgacaatagggaccttttctttttggtttttgtttgtagaggaaatggaacattttggaggaatctttactaacaatggtttgtggatgggaggaaaagttttccttagtagagtagtagtgactagtaaggtagatcaagcattaatcttgttaaaaatcaatgattattattaggcattcatagttttattatttatgtcatacctatgttaatgtaaaaacaatatattttagtaagctttttgtatgctccttgagttgtggttgagttcattgtatttgacattggttttgtgatataaattggcagaagcacttttgggttgacttatag

SEQ ID NO: 9050 - DNA, 577 bp, Glycine max
  Clone ID: PAT_MRT3847_108182C.1
cacataattattagcatttttcataaaatttaattgtagtgactctccataattaaaatcgttaatcacatcattgtaaaaaataaaatacaaatgtttggacgataaataggacaaaaatggcaaaaagaattagaactcctaacatgtgaagattttaagacatatcctataaatcaagagcacaattaaagtacctaaaatttaacaggcagatttgtcaagaaagccaaggtgtaaggagaggtggatttgccaaacaaagaacaccaacgaggaagcttctcaaggactcgttcggttattggtgttaatctgttcacatcagtccttagtttcagaagaggactatcagagttatgagttgaacctgacctccagtaaagagtcagatcaaacaatgttggtgcattttttcctccagaaaactgaataatgtgccaaccatccacactactctttttgtcaactgaaatcaattcttcagaattccttgcatctttaaactcgaaatcttctatttcttctatattgattgcaagaacccaacgctagaaccctttgtattgattgaaac

SEQ ID NO: 9051 - DNA, 328 bp, Glycine max
  Clone ID: PAT_MRT3847_108183C.1
aaaggctgtttcgaacttgggagcacgggaaaagcgtgtttataacgttgttaaaaccgaattatacttgccctgctatattcaattaacagttgatttagttgcccgtgggggccaaggcattcactttgacactgttgattcaaagaacatttgaaatttccgaggggctaaaactattggacttgctctttatttttttgcagtgccttgcctgggcgtgcttaaaatttaggccccagcacacccacttttataacatcccttgcttttaattttacccaactttgaggcttccccttggtttccttttacactttgggggggg

SEQ ID NO: 9052 - DNA, 414 bp, Glycine max
  Clone ID: PAT_MRT3847_108184C.1
cttattttcagatgttttgtataaaatttgaaaataaaaaaatgtttcatttttcatgtacaagtatttaagaataaaataaaaaataatgtgatatttttataattaaaaaataaaacaagaaaacatctttccaaaccgaataatcctattactaactcaaaatattaaagataaaaagtttataaataaaaatttgaagaaaataatacaagtgcatgtttgttgtttcgttggaaacttcaaactgatgttgaattaaaagtaataagttgaagcttctcacaaaatgtacattggaatgtgtgtccatccatctaaatgtaaaattaaatacaccctaccctaagtggttaagtcatctattaaaatttgaaaattgataatatcacattaaatttagcttaatgatga

SEQ ID NO: 9053 - DNA, 616 bp, Glycine max
  unsure (1)..(616): unsure at all n locations
  Clone ID: PAT_MRT3847_108185C.1
ggccgggcccgggatattctacatataaaatatattannnaaaaaaaaaaaaaaaaaaaaaaaaaaaaaaaaaaaaaaaaaaaaaaaaaaaaccttcacttggaaaattgtttgtttcttcattactatccaccttcacttcacacacaaacatgtcctgccaccgccggcaagcttcccaggtcttgccgccagagattctcgctggcaatgaagacttcacaaagtcctgtgacctgactcaacaagttgctgatcatgttggaaccaccaaaagtgccactatttccaccacaaaccaaccacaccaagagagacaagccccttctccggtgaccaccgctaagaagccgccaccaccggggaaatctacctgaataatttgttattaccatatatgatcaaattgtgtatgtggattccataaccctttgtgcttttgcttcattttgtgtttctagttacctttaaggatatttttttccttttttctttgtttggtctttctttttatttggataataattgtgacataatgggagtggaaatccatggccttggaatatgtagccaccaatgttaatttgaaagacttccctttggctttttgttttcc

SEQ ID NO: 9054 - DNA, 313 bp, Glycine max
  Clone ID: PAT_MRT3847_108186C.1
cggccgctcgagccggcgggcgggaaccgtacgccggggacccgatggcactatgccagtgtggaaaccgagatcttgggcctggtcctgcgctccgcgacgggcacgccggttgccgactatctccacgaccggatctgggatgccatcggcaccgaagcggatgcctcatgggcgatcgacggcagcgggcaggagatcgccttttgctgcttcaacgcaaccttgcgcgactatgcgcgcctcgcccggctgctcgcgcatgacggcgcctgggaaggccgtcagttgatcccccggcaatggctgctgg

SEQ ID NO: 9055 - DNA, 290 bp, Glycine max
  unsure (1)..(290): unsure at all n locations
  Clone ID: PAT_MRT3847_108187C.1
ctatttgnntnttntattataaatntnattcatatgaatatttcctgagaaaaaaaaaatnatgtaattggttgatnggaagtgtttgtggttaatttcatagactgaagttttnggctttttaatttcatagactggttaatgaatttaatcaattnatnaatctggattttnatgttttntcaaatggattgagtatacaatctgttgaatataaacggtgctgttgatttggaagtcaatgggtgtggttttattttactggattggatcacttgngatctgtgagg

SEQ ID NO: 9056 - DNA, 271 bp, Glycine max
  Clone ID: PAT_MRT3847_108188C.1
ccccggcgggacccggatccggaaataatgcccgtggcacactagattctggccgcccccgccccacaaaaggatggggaaaatttgggaacagattcattataaacccccgagccatacataaaaacagctatgctgataacaaccaagaaggcgagaaccaaacacgtccgcaccagagacgaaaaaacagacaggacgcacacgatgtgcccgacacaacaaggatcatcagaccccttgaccatcaaaaaaggcaaacaccagactc

SEQ ID NO: 9057 - DNA, 289 bp, Glycine max
  Clone ID: PAT_MRT3847_108189C.1
ggtggtgggttgggtcaatccttattatcctagagttgattgaagtattttgctacaaactgaaccagggacttattctaccttccactagccctaatttactagagcaatttgtaatctgcaacatgcagttttttgacaggacgacatcttgaggggggggggggatacacttataggacaacccacttgaaaaacgtggaccgtggtgggggatagaatgaggcgcagacattggtggctcgcgtaacatttgagcccttttttgcaccggctcccaataattgag

SEQ ID NO: 9058 - DNA, 211 bp, Glycine max
  Clone ID: PAT_MRT3847_10818C.1
ttggaccagacaattactactggtactaggagacctgcctcatgcaggatataactaacagtgattatttattaagcgtgattcgtgcagtaataaaaaagagacagtgcttatgtgaaggtatgttatacgaaaatgaattctggaaatgtaatgggttgaaggatgtggagcgcaaagtgatccagatacgcatataaacaaggtttgt

SEQ ID NO: 9059 - DNA, 327 bp, Glycine max
  Clone ID: PAT_MRT3847_108190C.1
aaaaccaacactcatcactcaattggggagcctgtaaaaagattgttttttttttcaaattacagaagagactgggtgcaaaacaaaacaaattaaactcaaaatccaaagttttttaggggggggccctatttttcttcctaaccttgggggccggattaaacagtcaagttgggggcaaattaatggcactgccaacacttgtctaagttttttccccctggtaaaaaatgggggctaggcccttttttttttggacttttaacacaaaaaaaggtggcccaatttacattttaaaatttttttccgggggcccctcaaaaatgg

SEQ ID NO: 9060 - DNA, 2008 bp, Glycine max
  unsure (1)..(2008): unsure at all n locations
  Clone ID: PAT_MRT3847_108191C.1
ttggtcttgactgatgaagtaaagcacgctgttccttactcttgggatccaacatccttggctagttttattgagaattatggtacccatattgttacatctgcaactgttggtggaagagacgtagtgtacatcaggcagcaccaatcatcttctttgtctgcttcagacattgagacctatgtaaaggacattggagatgataggtttcacaacgttaaacacttttcgggtcctggtcctttaaagtataaggagaaggatgttactgtcatatttaggaggagaggaggggatgatcttgagcaaagtcatactaaatgggtggaaactgtaaaattggcacctgatgtcattaacatgaactttacacccattggttctcttcttgaaggagtgcctggcataaaacttttggctttgttgagttgagacttgagannaagagaaagaaagagnnnnnnagcgtagaagccctccaacgacaacgaggtccaaccttcccttctcggtacctccgctttccaaaaaaaactgcaccttgtgcaattccggctgctcctgctattgtccttcaatttatggaaaacccaacttcagattctctctctgccactcttggcaactcaatccaagctctgggtcgtggctttgatgtcacatcagatattaggcttctatactgcaagggtgctcctggctcaaggcttgttcacgttgatgaggagcacaccaagaaccttcgtctctcgcatgacctcgttattcccaatgtctctgtggatgttgattggtcacctgggaaggatggtatagagacgacccctgtgtatagtttccctgaggatctgactctcctcttcaggccccctgcagccgaccctcttgattccaggcattttcaattggcggaaactgtcgaaccagcacaagataatctacaaagaaacgttcctgccagtcagtctcttcatttcggcttgctgggccttaagtattttgtccgtgctattgatctatatctggagtacaaaccacctatcgaagacctacagtatttcttggatttccaaataactcgagtttgggcaccagagcagaataatctacaaagaaaggagcccctccgtccgccccggcactcccacttggccataggtgctcccaagtggcatggtcccgaggagcaagacagccgttggtttgaaccaatcaagtggaagaacttctcccatgtaagcactgcaccaattgagtacaccgaaactagcattggggacctgtccggtgttcacattgtcacaggtgcccagcttggtgtttgggactttggtgccaaaaatgtgttacacctcaagctccttttctctaaggtaccgggatgtacaatacggcgttccgtgtgggatcacaatccctccgctcctgttgctcagagaccagatggtgcttcatcatcattgatgaagaaaacctccgaagataaaaaggaagatagttcaatccacattggaaaactggcaaaaattgtggacatgacagaaatgtccaaaggcccccaagatattcctggtcattggttggttaccggggctaagcttggagttgaaaaaggaaaaattgtgctgcggataaaatactctttgcttaactattgattgatattcttcttctttttctctatttgttatttgttattttttccccttcatattagaaacagtagtcaagcattctttgcacagggaatctcggagttttttgtgttgtagattttgctttagttatttagttaatggtcatttagatgttgattacatttctacaattttaaattcaattttgtttatctactggacaatgaatataatgactttagtagacagacagataatgacctttttttatagggaatctcggaggattttgtgttgtagattttgctttagttattttgttaaatggtcatttagtcgttgattacatttctacacttgaatnnaatttt

SEQ ID NO: 9061 - DNA, 361 bp, Glycine max
  Clone ID: PAT_MRT3847_108192C.1
gtgactctttgttgcgggggtgtgtatatttccagcgccacgtcgattttcaaggcttgatctaattggattgccatagaaacaatatcactgcctcatttttctccttctgtagatgctggtgataacacattcggcctgagaaataccatgaaatagtggtttatgggctatctggagctgagttcttttcaaatgtcggatgcttaagagatgatggcagataattgggaatagacggttaatggttggtgatcaagattctgggtaagagcttgttcaaacaggttaagaataaaatgtgctgaaaccacctctcgttttggtattggaacttttaagtagacattcttatgcctgt

SEQ ID NO: 9062 - DNA, 279 bp, Glycine max
  Clone ID: PAT_MRT3847_108193C.1
gccattcttgaagactcctatatctacaattcaaagatggtggctaaggtgtttaagcattcttgggcgtgaaggggtgagttgtatccgataccaacatcaacttgtaaagataagtaatcatcttataagttggttttaaagagttgagttaaccatttactcttaagagtaaaagaaagtgatgtattagtattttaacctatgtattgtatgaaataaatgtatattttatataactaatttataataaataaatatttatataaaaaaaaaaaa

SEQ ID NO: 9063 - DNA, 199 bp, Glycine max
  Clone ID: PAT_MRT3847_108194C.1
actccctttctagaaacataataggagctacaaaagaccacaagtacagcagagcagttacccagaaagtgataattcgaacccacacagaaagccaccccacgtgaaccaacttgccggtctctgcaacagatgtaaaccaaccagtcagaagcattgcgcaatacatactgccgagagaaaaaatcgagtgagaaaa

SEQ ID NO: 9064 - DNA, 403 bp, Glycine max
  Clone ID: PAT_MRT3847_108195C.1
acgagccataatgtctggattatacacaatcattttatgttttggcctgaaacactaaaattacaagtgaatgagaaggtagtcttattattcttctctgtatcttggcacttgttgttttgttatggtaactgtcgtctttggctttaaaacaaagtcttttaaacaagggctataaaaaacataggaggaaaccaatcatgaatatgtttacttgtcaaatagaatataatcagattatttcaggactgaactgtgatgctagtgttgggctctggggctattatgatttataaagtttttgaagttttaggactccattctctctcttccatctgcgtgcctactgtggccttccaaagtttcccttcctgtcttattctgcatgtcaagaaagccctat

SEQ ID NO: 9065 - DNA, 398 bp, Glycine max
  Clone ID: PAT_MRT3847_108196C.1
ggtctagaattaagggaattcatcatagaagcttgtttaggaggagggtggcaccaatacatgaaaagtagcatccacatgtgggcaggaacagtgagcacttgatggtattgatccagttaaaggactaaggagattgcatttctgtgtttgcattttttttataggtaaatattaattttgtttgcatttttttatcttataaattagaggcatatattgttaaccctttaattttttgagtccacaacttcaaaagcaaatctctttcctttttatctttttaacaagtccttttcactctgttataatttaaatttagccaatatataaattgtcaatataacaattcttcacacaaaaatacacgtagactttttttaagcaaaatagtgaat

SEQ ID NO: 9066 - DNA, 383 bp, Glycine max
  Clone ID: PAT_MRT3847_108197C.1
atataatatttcttgttatttggcgggctataagaagttattggtttgattctctttaacaaagacatcaagagggaacaaagaaaatatatgttaaagaaagaggtataaacattcttcaatagtgtacaagatatatagctgaatcaagcactttagcctttagttctttactccttgagaatgtcttggttccttgttattctatttctcaggctcacatttggtttaactcattctgaggctggccatgacaagaagctctcctctgctgttgcatgtggcactgtttactgcgacacatgctatcaaaaggatttatccacaggcgaccacttcattttaagggcatttgcactgtttgattttttttttttaaaaag

SEQ ID NO: 9067 - DNA, 616 bp, Glycine max
  Clone ID: PAT_MRT3847_108198C.1
gctgaagaacttaattctgatgcagccaaaaaaattttaagtatcaggaataatgaaaatgatatctggagacttgatttgcatggtcttcatgcaacagaagctattcaagcattgcaggaacatctctacagaattgaatgccaaggcttctcaaagagttcagccacttcaaatggagtgaaggaaaatgggcttggacattctactcttggatctttcaatttcatggacagggaaaaattggatacacaagcaccattacggcttagaccgttagctttacatgtcataacaggcatcggtaatcacagtcgaggactggcggctcttcctgcagctgtcagaagtttcctcaatgaaaacaggtaccgttttgaggagatgagaccaggagtaattacagtgtggcccaagtttcgtcaaaactgatttttgagtccccgttagaaacttgttcttgtattgtaccatttcatagggatcatatactttatgagtatttagcagtggtgagatttaattccacatatattggtctccctgttgatgtaaaataaaacatttgccttggcattgaaaattaattcagatggaattatttatttcagacatc

SEQ ID NO: 9068 - DNA, 1520 bp, Glycine max
  unsure (1)..(1520): unsure at all n locations
  Clone ID: PAT_MRT3847_108199C.1
aattcggctcgagtggaaaatattgcggggctactgctcaggaagatgttaatttagctatcaaaaagcttagagagcagcatctttgggctgaacatagcttgatagatgatattttctctgctgttaataacaatattgacaaggccacagctttattggaaactatggaccctgcagcgaattttgaagaatccaaagtatccagcaatcctagatcaactacttcagatgatactccttgtaaggataagactgacgatagtcttacttcagaaaaggttgaggatgacattcccttcgattctaatcttgttgataatctccaggataatgataaggacttggaggatagaaatgctccctcaggtcaaaagctttctgatgttgattacttgagatgcaaaatgaaactcttgaattccattcctgttgagcctgaatgggaggatgatgatatttacattagcaatcggaaggatgcattgaggacaatgcggtcagcatcacgacattctagggcagcttctagtgcttttcttagaggtgatcatttttctgctcaacatcattcaatgaaagctcgggcggaacggcatactgctgaagaacttaattctgatgcagccaaaaaaattttaagcgtcaggaataatgaaaatgatatctggaaacttgatttgcatggtcttcatgcaactgaagctattcaagcattgcaagaacatctctacagaattgaaagccaaggcttctcaaagagttcagccacttcaaatggcgtgaaggaaaacgggcttggacattctacacttggatctctcaatttcatggacagggaagcaccattacggctcagaccattagctttgcatgtcataacaggtgtcggtaatcacagtcggggacaagccgctcttcctacagctgtcagaagtttcctcaatgaaaacaggtaccgttttgaggagatgagaccgggcgtaattacagtgtggcccaagtttcgtcaaaattgatttttgagtccccatcagaaacttgttcttgtattgtatcatttcatagggggatcatatactatatgagtatttagcagtggtgagatttaattttggtctcccatgttgatgtgaaataagaaatttgcattgccattggaaattaattcagattgatttatttatttcagacatcatgcttgttctattcaacatttactgcaattacgacttaatcagaacttccggtggtttaattcgctaggaattactacgactctaaatatgattttgcttcaattaccgttaaacactaaatatgaaccatggtttgaactctccttagaagaagcactcacatttaatatttagtcatcaatttaataggtataaaaaatacatcttattagttattcaattaatattggctacgagataaattaaaattattaactacgtgttcgtatcaatntatcttataaatattatttttgacaatttgcttataattttttttaa

SEQ ID NO: 9069 - DNA, 255 bp, Glycine max
  Clone ID: PAT_MRT3847_10819C.1
aaaaaccggcccgacccacgcgttcgaccaaacaaactaccaactcaattttatttttttaatggaatgctcaaaaaatcaaggaagagctgattttggtccatctttggatactctccaaaacatctttcacaaacctctacagaaaaatgatgctatagaccatcttccagtcattgccttcaacttcggtctaaacctccctatatggaacaacaccgagcaaaccgatcttatataaccatttactccttc

SEQ ID NO: 9070 - DNA, 188 bp, Glycine max
  Clone ID: PAT_MRT3847_1081C.1
acgcaaccgccaacgcgtccgtacagccgtcagcacacgactcagcgggtgcttcaagaccattgactgggggagtttgtcgtgtggtgttccagtgtcaatactggccgctctatacgatccttgcctacgtgcccttgcatgctccgttctctctcttctatagtctcagctaatttcaattcatt

SEQ ID NO: 9071 - DNA, 315 bp, Glycine max
  Clone ID: PAT_MRT3847_108200C.1
gatggctatctgcagaatgcagacttaggcagtgtgcacaacgcttagatctcgatatgcgaagtctctggttcaggtccaggattgcccagctgcgccagggaaaagaatagaagaagcgtctagactccttcatgcatgctccacttagctctagatgtaattagctcagttggtagagctccgctcttgcaattgggtcgttgcaattacaaggtaggatgtctaattatccaggcggtaatgatagaagcttgtacctgaaccggtgactcactttttctaagtaatggggaagaggaccgaaacatgcca

SEQ ID NO: 9072 - DNA, 557 bp, Glycine max
  Clone ID: PAT_MRT3847_108201C.1
gatacatgagagtggatggaacgctacccaaacctgtacacctttttattattatcaaacctagtatacagatgcatttaccaccccaattaaccactaccaacaccttacaagcttattttcctaactacaaagaaaaatgctagttgcagagcgctgatgttgtagctcaatgtccgatgcacactacctaaggcgaatgcaattgaccattattcctatttacatacgacaaccttaatttgaaagcttgctactgaaccctaacctttggttagtgccgatgaacccagaacccatatgggcggtgttttgccctgaaaacatcattgcttcaaaagctgaacccatgcttggagcaccgtcacaacccagcaacttccatcccagtaacatttatgccaggctcaaccttcctagtgggctacacactggcatttctctgccttgttgatggcaagggctttgatgcctggcacactatccatcaccccaatgctgttgagcctctacacccacaaggtgccaaagggtccatcatggtcgcaagaacttac

SEQ ID NO: 9073 - DNA, 485 bp, Glycine max
  Clone ID: PAT_MRT3847_108202C.1
agaatgaatgatattcaaaataaacatgtagtttcagtgccaaaatacatcaaaattaacacttaagataatgttttgttcaacaacacaaacagaaaaaaggaaatcaaaatggaacgttgaaatgaacctgaatgagtgtacctttaatgcaagattttcagaaatggtgggttcatcaccagagagttccccagaatgcagaaacttcgtcaaaattacagaatggggacatgctctccaattgaacagacaatatactttcaatagttcagaaccatgtagattgtcttcctttaacttcgagtatctaacatcagcacagatgacacaagtgatcactgaccaatatgatctcaagaagaaaaaaacaaattgaaacctcttctaatagtaaataaaagctaaaaaggaacaacaacccacctaagccaacaataaaacaagtcacaatttcaaacgccgaacaatacggccacacctgc

SEQ ID NO: 9074 - DNA, 802 bp, Glycine max
  Clone ID: PAT_MRT3847_108203C.1
tcgggggtcgtgtaacaggaattgacggaggcattcgaaatcggtgaagatggttgctatgaggtttcatcagtaccaggtggtgggaagggctcttcctaccgaatccgatgagcatcctaagatctaccgcatgaaactctgggcaactaacgaggtccgtgccaaatccaagttctggtattttttgagaaaattgaagaaggttaagaaaagcaatgggcaagtgctagccataaatgagatttttgagaggaatcctaccaagattaagaatcatggaatttggctgcggtatcagagtcgtactgggtatcacaatatgtacaaggaataccgagatactactctgaacggtgcagttgagcatatgtacaccgaaatggcgtctcgacatagggtgaggcatccatgcatccagataatcaagactgccaccatcccagctaagctgtgcaaaagggagagcaccaagcagttccacaattctaaaatcaagttcccattggtgttcaagaaggttaggcccccaactaggaagctgaagacaacatacaaggcatccaggccaaacctgtttatgtgattcagttaatgggatttccctgtttcttgattcatttaaataggaagagctttagaggtgatcatgtagtgacaaactttgtttccctgaagattttgtttttgaaagatggtgttttatttaattttatatttttgcagagttgtctattttacttattccgatgtatttgatcaaggttgctttttgatttagtgattactttttttgtttcgg

SEQ ID NO: 9075 - DNA, 486 bp, Glycine max
  unsure (1)..(486): unsure at all n locations
  Clone ID: PAT_MRT3847_108204C.1
tgttgtacatggtgaagcctttcaaggtgttgcatggaggggtatcagcattggtggcagagtctctggcaagcataggagcacacatggctagtggataccaaagagtggctgggattcaactcagcatcaaccatttgaaaagtgctgtgcttggtgacttggtctatgctgaagccatccctttaaatgttggcaaaaccattcaggtatttcaattctttctttcattctttctttctttcacctcttcttcaattagtccacactcataggttgaccatatctaatcaagctggaagaaaaaccaaactaatcacattgaaaattttgtatcacaccataaccaaggtaggtacttttgtgtaatttggtgttacccttgttgtctggttaaattaaaatattgttcacgtgttcaccgaaaaggtaatgttgagtggtgataatgtgtcccatcacanngataagaaaaaagtntgatgc

SEQ ID NO: 9076 - DNA, 1087 bp, Glycine max
  Clone ID: PAT_MRT3847_108205C.1
aagctcggaattcggctcgaggaaaaacactgcaactgatagaacactaagcagttgctacccacgcgtcggacggctgcgagaagacgacagaaaggggaacaacagtggcggagtcaatcgaaatcggcggagatggttgccatgaggtttcaccagtaccaggtggtgggaagggctcttcctaccgaatccgatgagcatcctaagatctaccgcatgaaactctgggccaccaacgaggtccgtgccaaatccaagttctggtattttttgagaaaattgaagaaggttaagaaaagcaatggacaagtgctagccatcaatgagatttttgagaagaatcctaccaagattaagaattatggaatttggctgcgttatcagagccgcactggttatcacaatatgtacaaggaataccgagatacaactctgaatggtgcagttgagcatatgtacactgaaatggcatctcgtcatagggtgaggcatccatgcatccagataattaagactgccaccatcccagctaagctgtgcaaaagggagagcaccaagcagtttcacaattctaaaatcaagttcccattggtgttcaagaagattaggcctccaactaggaagctgaagacaacatacaaggcatccaggccaaacctatttatgtgattcagttaatggaatttccctgctttttgattcattaagtataaaaaggaagagcttagaggtgatccatgtagtgacaaacttcgttgcctgcaaccatagtttgcattcttttaagctctgaagattttgtttttgaaagatggtgttttatttaattttatatttttgcagagtcgtctattttactcattctgatgtattcgatcaagttgcttttgaatttagcgattacttttttgtctcaaaaatgggtttatggcctgttagttgatatgtgctctctgatttttggtaattaatgaaaaaagacacatacaaaaaaaaaaaccaaaggggggggccgttttaaaggttccaactttccttacccggccttccaacttcttagtttttttatgggggccccaaaatt

SEQ ID NO: 9077 - DNA, 645 bp, Glycine max
  unsure (1)..(645): unsure at all n locations
  Clone ID: PAT_MRT3847_108206C.1
agacacaaaaaaatggctagtggccgcaatttgaagaacgctgtgattgcattcttggttcctcttccctccatcttcttctacctctcattcctcaaccactacgactcagcaaaatccccatctttttggtcaactctatggtcatggtgctatcaccaccctcttctattagccaacgctctcttcttcctcaacgtcaatgtcctcttctggctcataggcctaatacaatccagccactggatgatcgacccctattggactgtgatacctgtgatgcttgttcactactatgccactcatcctttggctccctatgatttgtggaggtccaagatcgtgattttattgacttgggtgtggagtgttaggctcactcacaactatttcaggagagagaggtggcagtggggtgccagggaagattggcgtttcactgagatgagtcaacagtatggaaagcaatggtggtgggtttcattctttgctgtctatgtctcacaacagatgtttttgattgcactgtcacttcccttgtatgctgtccatactgtcaatcagcccttgaacatgtgggacttggtggctactgttgtctgtttatgtggcattgntatagcatattttgctgatacacagctc

SEQ ID NO: 9078 - DNA, 351 bp, Glycine max
  Clone ID: PAT_MRT3847_108207C.1
gaaatgctcactgatagtctcgcaagtcctgactgcaacatatttggcgcaatgctgctggtggatacttatcataccaatcctgaaaatgcagatcgtagtattctcgatgcgcctttcagaggcggaaggcccattcgggcggttgcattatcgaataccattgtgcaaattgaaccaaacatgaattcaaggtttcagcttttgaggaccaactaccatggggaggaatgttcaaggaaaagatctcgcaatggctaaagataatgtagcatgtgctgctgaaggcttgacatcaagtgacactccaactccattgttggaatctgggttgcaaaaagacagaaggat

SEQ ID NO: 9079 - DNA, 394 bp, Glycine max
  Clone ID: PAT_MRT3847_108208C.1
aatccttaaagttagatatttaagattaccagttgcagtcaaacaagggccccacacatgcgcaagaatgtaaaatgattaacaattgtcatacaaactgtaggaatccttaaccataatcaatggtacatgtgcatcaaatgcctcctcatagagttatagaaaaagcctattgcaagctaatcaatctcccttctatccatgaggatttctggcaattctcagtgataagtctataaatccttgccttcatacacattggggccaaaacaatggagtaagataatggttattgaatccctgtttttgtgcaagtcttttgtttttgtttttgcttttctttactaacaactgtgacctatagatgtgattgtatttggtgaactttacccct

SEQ ID NO: 9080 - DNA, 353 bp, Glycine max
  Clone ID: PAT_MRT3847_108209C.1
gagggacatggtggttctggtggagagatttacttgccaaaagcttacgttagaaccatgaggaccacttcttggatcagctcagttagtagaacctgtatctagcttcccaacgggcttatctgagtgtgtagaaacactcacgtgccccaggagtcggagaacgagtattgtatgtgatcaatgtctatggtttacgatctctgtccttagtcacttgtgtgttttgttactcagttctcaggactttactgctcaggctctcaagtttcagatacatgctgccaaaaagccttactctgtgtccattgtttgtgcgatctttggaagtaatccagaactggagagctgag

SEQ ID NO: 9081 - DNA, 330 bp, Glycine max
  Clone ID: PAT_MRT3847_10820C.1
caacgggggggagggaccacccaaaattgttatggattaaaaacactggtccacattgttacaattttttttaaatataccaaaagaatctatgcgccatgaaataaattgttggaacatggtgactccggtggtgaacctctagctgcagaaattaatggccatgcaagctcatgttatatacactttgaaggagcggcacctttgggcaaggagggaagctacagcctactttaacttgggaatacaacatacccaagggaattaagacaaaataaagggggtccttaataacccacgtaaaagggtcctgtaactaaaaaccttggg

SEQ ID NO: 9082 - DNA, 964 bp, Glycine max
  Clone ID: PAT_MRT3847_108210C.1
gagaagacgacagaaggggacagaaagagactgagaaaaatagagtttagaactgaagatccagagcttttggaactgagaaattgttggaggaaacagtctttcagggccataaaaagatatttcatggggtctactgttgaatatcacatccaacatataattaacatcccagaacagattgagcctgcattgtggccagaatgttgtatctacaaggtacctactagtcttttgaaggtgaaagaggtggcctacactcctctattgatctcaattggccctgttcaccataacaaagaacagctaatggaaatgcaagagcagaaacacagatattttcatttcttttgggcacgcctaagcctagtgaacaagcttgatttggtgcaatacaaagcattccttgaactagaagagcgaaacctacgctgttgttaccaaaagaaattccctgaaatcagcaaggagcaatttgtggagatgatgctactggatgctgtgttcatcatggagctgtttctgagagaagcgaaaaaatgggaacataaggatgactatctaatgactcaaggatgtgttagcaaaagtatccggtgtgacttgatgttgcttgagaatcagcttccaatggtagtgttggaaaaactatatgatagagttgttccaagcaatgccaaaaaacacaccagatttattaaccttgctcatgagtactttagatcttattaccctcatcagcaatcttcagaaaacaagtttgagctgagaaactgggagaaatcactgcatttcactgatttaattagaaatgcctatctccctaagaaactgagcagtcagaaaaactatcctcaaaaggagtgtgtgctaaggactgcaacaaagttgaatgagtctgggataagctttgataaggttgacgagagatgcttacttgacgtaaagtttgagaagaagcgat

SEQ ID NO: 9083 - DNA, 859 bp, Glycine max
  Clone ID: PAT_MRT3847_108211C.1
cccacatcagagccagactccgacgacaaccactcgctttctctctccccgcgatggagaaagccgagagctccgcctccacatcggagccagactccgacgagaaccaccaccgccacccgacgaaccaccacatcaaccctccctccagcctcaccccgctcgagttcgcctccctcatcccctccgtcgccgagcaccactcctacctcgtcggctccgggcaatgctcctcactcctcgcccagcgcgtccaagcgccgcccgacgccgtctggtccgtcgtccgccgcttcgacaagccccaaacctacaagcacttcatcaagagctgcgccgtcaaagagccctttcacatggccgtcggcgtcactcgggacgtcaatgtcatctccggcctccccgccgccaccagcaccgaacgcctcgacctcctcgacgacatccgctgcgtcaccggctttagcatcatcggcggcgaacaccgcctccgcaactaccgctccgtcaccaccgtccactccttcgacgacgacgccgacgacggcaagatctacaccgtcgtcctcgaatcctacgtcgtcgacgtccccgacggcaacaccgaagaggacacgcgtctcttcgccgacaccgtccgtcaagctcaacctccagaagctcgcgtccgtcaccgaaggaaccaacggcgacggtgacggtaagccacactcgcggtgaggaagcaagcaagcctcaataaaaaaatatatatatattgggaaaagcaaaacgagttggtctctctttcctttcgctcccccgtcattccttttgaggagaaaagcaaaacatgttttccgctctgtcccccgtttta

SEQ ID NO: 9084 - DNA, 472 bp, Glycine max
  Clone ID: PAT_MRT3847_108212C.1
taagactaagcaaaaccaaaggagaagagcattgtagagaaaataaaaaaaataaaaaatggaagggtgagtagagatagagagagcaaacgcaaacgctggttgtttcgtttttgttttgttgctgttttttttttatccacaaatattacttgttaatattattaatttttgtttaacaaaaaatttccaactgatgatttttactttatatctctcttgtttttgctactttattgggtgttggagagagagagtcagagataagaccttcaagttgagttgagtttttttattgcaatctgtttttgtctgtctaataaaatatttttatttatttatgagccttctagagagaaagggagatgaatgttgttacttgttattagtggaggcttctgaagagagtgaagagtagtagcgtgtgttgtgttgttgttgctgctgctgctgcaatgggaacttcaccaac

SEQ ID NO: 9085 - DNA, 327 bp, Glycine max
  Clone ID: PAT_MRT3847_108213C.1
cacccacgccgttcggttgagacaaacctttgatgtgaaatgtctgctctatgttgagagagtggtctgtacagaacctcaggttgatggtgcttaaaccgttggatttgatatatttggcgctggcatgcattctttagatgattatcctgtttcggaggatgcacaagacccggttgaggttggtgccgaatggggacatgaagtggatccttaatatgatgaggctctagctgcaatggtaacaggtgtggttggattggcctttgttgatggagtaactcctgccggatccgtgggggatcctcatgtgcttcaacgcaaaat

SEQ ID NO: 9086 - DNA, 258 bp, Glycine max
  Clone ID: PAT_MRT3847_108214C.1
aaaaaacaaaaaaaaaaaaaaaaaaaatttttaacaaaaaaaaacaaaaaacaaactaaggggcacattcatacaaacgtgcacattcttctataatatcaccatatactatattcactgccccttcattttacaacttccatgacttgttaataaccctttcactacctaactaaatcgctcttacaatacatatcctctttctccagatgcccttatatcaaccagtcccattcatatcacacttcaaaaccttta

SEQ ID NO: 9087 - DNA, 499 bp, Glycine max
  Clone ID: PAT_MRT3847_108215C.1
aatcgcgtcattatgtgctattttttttaaaaagttttttaatcggtgtattttgagcttttctattccttgatttcaagttttttagcaagtgttacttgttgcatattagcggttaagacaatcacgtctaatgtggttattttctttgctcactgtttatgaacttgttcccttttcagttttggttttgcgtcgtggtgcatttgtatttcggaagttgaacggtttgcatgtgagtaaatgggcttatgcgtttgacgacctaatcagtttatacttgtctagaaagcagagtgctgcagctgtcccctcagagttcttcttccttccgccaccgccaccgccaccgccatcacccccttcatcttccttccgcgactcctcctccccctcccctttcttcctccctcccccgccacgcccaacgtccactcaagatggtcatgcccattattcttcagaaagataggaaaattataagcgccgtgaagtgctt

SEQ ID NO: 9088 - DNA, 360 bp, Glycine max
  unsure (1)..(360): unsure at all n locations
  Clone ID: PAT_MRT3847_108216C.1
anaaaaaaaaaaaaaaaaannntttnnnnccntttttncgaannnnnaatttttnggnnccccnaaaaanccnggggccnnggnattnnanaaccagggttnaaaaaanaccnttnccgggnggaaaattttcnagntggcgttccganaagacntnnnggagcacgncgtgtgnttttgcgaaattngngnacaatcacgancnctcaagangatgnaganngngatcaacagacanaagatntgcttcatcacnaacccttcatcatcnncannnacgaanctgtcatgtngngatgggggnnntgttaagctgnatcggangttntgngtgtngattagnanaagggngagnctctt

SEQ ID NO: 9089 - DNA, 253 bp, Glycine max
  Clone ID: PAT_MRT3847_108217C.1
aaccaggggagggggaaaaaaagggatcttcatgcccatggagaggaaaccattttcccatttctaagcattaaaaaagcccttcacccatttttaaattactagggccacgggtatatttttaccctaatttggaaaattgggaaaaaggcttgaccaaaagagcccaccagcctcctggaatttggggcttgaatgccaagcttaagctggaattatggttaaaggaaatttattaaccttgggctttcct

SEQ ID NO: 9090 - DNA, 441 bp, Glycine max
  unsure (1)..(441): unsure at all n locations
  Clone ID: PAT_MRT3847_108218C.1
cacacttcctcccactcttccgcctatacttatacccataccttaaaaacctaaagctaagtgttttccatcatccccacattcctcacttcttactcgttaaccttctaaactaaccttatatcctttaccaacaaatgggtttcaaagggtctttcaaagtcaagaactttcaacctttagacgtaattttccttaaagcaactaatcttatactgcatataactcttgtatatttccaccttccacttattatcaaaacattcatctttctacctcaataaggtatgggtcacacatctggatgtcaatggtaatgcattaaccaacatatccagatctactttcnatcttttatcccactcaaatcattcatcccatccatcatttcttgatcaaaatggtcctttagctaaccttattacaaaacattttctggat

SEQ ID NO: 9091 - DNA, 1038 bp, Glycine max
  Clone ID: PAT_MRT3847_108219C.1
gcactttgtgaggctgagaacaaaggggctccaatgctactagtttctacaactatgtttttttttttttttttgtttcagttggctcgcttccctttgttgcaaaatctcacctctatatccttctattaacattgcccttcttccacaatgtgtacttgaaacctcaaaccaaccagaacctctttgattgaaaataatccaagttttttttttcacagttaatttatttgtggagaaagaaaaaaaatgtctgcttccactgttgttcacaatttttgttccgtcgcttgttgcatttcaaattgcggccataaccgaaccttggttcctacccatcatcagtttcattcacccaattcccttttgaggttaaagaagcaaactttcctcacgaacatttacttcaagagttccagaacccagaaacctcgctccagttttgtagtttccgcagcacaatcgaattttgttaaagttctgcagaatgcatggaaagttggtagggatggaattgaggcaggcactaatctcgttcctaattctgttccaaggccaatagcaaggatttcagtaacaattgtggctttgagtgttacgctttttgtactcaaggcattcctctttacagctttctttatattggccactataggacttgcatactttgcgtacctagcattcaataaagatcaaggacctagcgggaatggaggaactacctctactcctatggatgatcctgtggaagaagctagaaagataatggaaaaatacaagtagcagcatcagagtaagaaattctgcactatacttttgttcaatgtaaagttgtgatcctgtgagtaatagcttattgagttgggaaatttgatggaatggaattgtcaccatttatgtgaatgtcattttctctttctagatccaattagatgttagttaaagcatgtttggatttgcttaatttttagggaaaaattgtttttctttcaacagttatctcagaaaatttagttatgaaaaaaaaaaaaaaaaaaa

SEQ ID NO: 9092 - DNA, 193 bp, Glycine max
  unsure (1)..(193): unsure at all n locations
  Clone ID: PAT_MRT3847_10821C.1
ctctctctgtgctggagtttcgcgcttcactcatttggcgtcttctccttattgtctctctcttatctcctcacatcaagggtgatggttctggttacgtcttcttcgtcgatagctcagtaatcaattcatctgcgncagatcctccaactatgagnaacattcactgttgctagaagaagctggtgctgtt

SEQ ID NO: 9093 - DNA, 239 bp, Glycine max
  Clone ID: PAT_MRT3847_108220C.1
ctttcggctcaaacatcactacaggtgggaaggggccgaaaatctgggaatcaaaaggttcttcaaaaggactgtaaatctttactcctaggatccaataacggctttttggttttaatcttcctaattacataaattactatcctactactgtagtgtctactgactgaatcgtgaattacattggatgggccaatggagaatcaaattacgagttgtgcaaacgacttaagatacta

SEQ ID NO: 9094 - DNA, 294 bp, Glycine max
  Clone ID: PAT_MRT3847_108221C.1
tttttacgcgtgggcggacccgtggggtttctgtgatgttcttaaacacaaaaacggtgaacaaggcaaaaggagataagattgtggtgatggggaacagatgacatggactgcgggagccagagacgaagagtgatccagcacgctctttgacaaactcgagaaaagcggacctcacattggctgtgattgcatgtgccaaggcatagaaacttgctagtcaaacaatatcagacaatactaagcactgagcacatatactattttccctatggagtacaatctatgcggtcc

SEQ ID NO: 9095 - DNA, 126 bp, Glycine max
  Clone ID: PAT_MRT3847_108222C.1
atgcatgtaactgttctttggtttttgttacgggatacggtgtccattatttgttgagcacgaccgatcactattataaacagtgtcaaatgagatttcgcgcggtgacgcttacttgtctgtgac

SEQ ID NO: 9096 - DNA, 981 bp, Glycine max
  Clone ID: PAT_MRT3847_108223C.1
gaatacttattggggaagaagatctattatgggcttcgttgctcattatccagactctgagcttagaactgcaaaaaatgggcaattcgtgaaggtctctggggttgttacctgcggtaatgtgcctcttgagtcatctttccagaaagttcccagatgtgtatatacgtcaacaagtttatatgagtatcgaggatgggactcaaaagctgccaatcctgcacaccgtcggcttacttggggccttagactgctggaaaggcgcgtggttgacttctacatctcagatttccagtctggtttaagggcactggttaagactgggcatggagcaagagtgaccccttatgttgatgactcagttctcatcaatgtaaatccaaccaaagaagagctttcaccagagtttctccggtggttgggagagaggaatctttcaagtgatgaccgcatcatgcggctggaagaagggtacatcaaagaaggaagcacagtaagtgtaatgggagttgttcagaggaatgagaatgtgcttatgattgttcctccgccagatccaatcactactggttgccaatggaccaaatgcatttttccatctagtcttgagggtatagttttaagatgtgaagatgcatccaagaatgacgtgataccagtttaacagtatgtgctatgagggtgcttgtagcatcttctaattggtgttcttagatagtattcttttcccctctattattagtggtggtggaatatcatagtgacaaattattatagattaagatggcaaagttgtgtgtgcgcccgccttctttttctcctttaaattgttgtatagttctggttgttttgatgttcttctagggtttgttaatgtttggtgcggtaaaaattcttacttgtacgagcatattgtgattatgctaacatgctaaatagaatacaatttttgtttgtgtttgccaaaaattctgtatgtgt

SEQ ID NO: 9097 - DNA, 440 bp, Glycine max
  Clone ID: PAT_MRT3847_108224C.1
aacacataaattagagtttttaaaagcgaaccttgccaaaattgagcacagatgtaaagtgcacatttaaaaagggaaccaacaacgcatcggggaagccctaaaactcggtgggcttaacaaaaatgtggtggggggtgttgacaaactcaacacattaaagcagagtggaaaaggggtgttgcgaccagggatcaaaaacccaattttgggaacaaaaggtgcgagaggaggggggagacttcaaactatgtgccaggaacaaggtagctagaaacgaatacacaaggggaagaaaccaacattgatgtggaccataagaaacgacatgccctggggaaccaaaccggacgatttacttcttcttctaagcaaccttggggagctttggtccaggaagatccttgttcttcacggggttggtgactcccacaaaaaca

SEQ ID NO: 9098 - DNA, 1368 bp, Glycine max
  Clone ID: PAT_MRT3847_108225C.1
acgagcttccaggcggcgtttgctgataactacaggatgtactcacgaagtcattttgtgaagggcctagagatactcatactattgattgtttatgaagtctatgggagctcatatcgcagttcacatctttatttattcatcacaatctcaatgtggtttttagccacttcctggctgtttggtcctttgttgtttaatccttctggatttgattggcaaaaaacagtggatgattggacagattggaagcgatggatgggaaatcgtggtggtattggtatttcatctgataaaagctgggaatcttggtgggatgaagaaaatgaacacctgaaatactcaaatctcagggggaaaataattgagatagttcttgcatttcgcttctttatgtaccaatatggaattgtctaccacatggatattactcatcataacaaagatttgctggtatttgggctttcttgggcagttttagtaataatactaattgtattgaagatggtatccatgggaaggcgaagatttggcaccgactttcagctcatgtttcgtattctcaaggcacttctttttcttggcttcttgtcagtcatgactgtattatttgtggtatgtggacttaccatagcagatttgtttgctgccattatcgccttcatgccatctggatgggcaattattctgattgcacaagcatgcaaggtatgcttgaaaggagctaaactatgggactcagtgaaagaactatccagagcttatgaatatgtaatgggattaataatcttcttgccaacagccattttgtcatggttcccatttgtgtcagagttccaaacccggttgctattcaatcaagcatttagtagaggtctccaaatttcaatgattcttgctggaaagaaggatacttataaatctgattgacatattactgaattgctaaggaatttgaagttttcaaattggagagaaattgatctcccacatactataattttttggggagtccctatgattccctttttcatactatattttactgactgagaataggaatgacaaattactaaagcagggctatcacattttgaagttgcataattgtatcagcaatgtatacgtatgagctaagaggagagctttatttatttgttacagtataaaggggattcatagtacaatgtgattattactcattataaattaattacgaattttttaatattagttattaagtttaaagatagtttacatgtctcaagtattaatactcaatataaaggggattcatagtacaaagtgattatgacaatgtgattataatcaatatgaaggggattgatatatagtacaatgtgattc

SEQ ID NO: 9099 - DNA, 1526 bp, Glycine max
  Clone ID: PAT_MRT3847_108226C.1
gtttttaacagtggaccgtcatcatcaacttatgctggttctattcaggctacacagagaactgctcatggacaatttcctgctggttcatcgaggaacacacgtgacaatgtaagaattgttcactctgcatctgctccaaatctcatggagaacaactctgttgaaatttcaatttctgattttcctccagtttctgctgcacaagtgagtaagttacctgccagcagccagtctaaattaaacgtggaaaattttcaatctgctaacaagtctttggttgaaaagattcgtggtgctcttgattttgatgaagaaagatacagtatatttaaagacatatctgcccaatatcgccaaggcacaatagatacaggtacatatgtggactatgtgcagcagtttggcttgtctcatcttgtgcttgagttggcaagactatgcccggatactcagaaacaaaaagagcttattgcgaggcgtcaagtttgcaaagagatgctttcccagaaattaactttgttcgaggcacctctagcacccattccaaagacagtaacgtaaacaagaaaggtaaaggtaagtctgtagatagtagggggagtaactccaaagagaaattagcaaataactttttaagcactgtacatcagctacaggcaaattataaatcttcagaagagaaagcggaggtgctatcaaggggtgattaccgcagtgacggaggcaaattaaaaatcgagcagcggattgatatgaattctggtagtcaacctacgatgaagcttggtgggaagactgaaacatcaaacgacagtttatctaatcaaagtaaagacgatgggggtggtgggaacaagcaacgcaagaaaacttctaagttcctgagagtacgccttggtgatggttctgtttcagcccttcttgatcaatcagatcctggaacaacagacggctcagaaggtaacaaggatgactctggaggagggcctcctgtgcgaggtgtttggcgaaaagggggaggtaataaactattttcctagttttgcttcaccgtgattttgaaaacgtgaagtatcaaacgcagttgaactaactggctaaagccatggttgaactgcaatataaacatgaatttggttttcggcttagggagtggtattggattatatcggatttaagtatttaaagtatatcaagctgggatgtgactttgacgttttgttgaaggccaaacgccattgcctgaatgggcttatattttatttttggtttggggtatacttcgattttgatcaaagacagaggtgttcatatgccaagtgtactgtttgctttttacgaaagtggcactgtttcttactttgcgatttgctgtctcatctatcttctgcaattgtattagcttctgaggccaggctagacacttgtcgactggtctatgtcaggtttgtttgggtgtccggaatgttaaaaagaatcagtaattagtaataatataaataaaacaagggtatcttttattt

SEQ ID NO: 9100 - DNA, 644 bp, Glycine max
  Clone ID: PAT_MRT3847_108227C.1
aaaaaattcgtaattaaattaaattataatgagtaataatcacattgtactacaaatcccctttatattgtaacaaataaataaagctctcctcttagctcatacatatacattgctgatacaattatgcaacttcaaaatgtgatattcctgctttagtcatttgtcattcctattctcagtcagtaaaatatagtatgaaaaagggaatcataagaactcccaaaaaaaattatagtatgagggagatcaatttctctccattctgaaaacttcaaattcctgctaatatttggaaagatatatggaatcagtgagcaaagtaaacaagcatcactttctttaatgcatggtacaaaaaccaccttgatgtatggtacattcaagattaccttggcaattcagcaatatctcaatcagatttataagtgtccttctttccagcaagaatcattgaaatttggagacctctactaaatgcttgattgaatagcaaccgggtttggaactctgacacaaatggaaaccatgacaaaatggctgttggcaagaagattattaatcccattacatattcataagctctggatagctctttcactgagtcccatagtttagcttctttcaagcataccttgcatgct

SEQ ID NO: 9101 - DNA, 203 bp, Glycine max
  Clone ID: PAT_MRT3847_108228C.1
cttactcccttggtttttttataggtttggagagaaaaccgcaaccacgacgccgacctttttttcatagtttcatcagcaggggccttggcagcaacccaaacgaaaacccctccaggctttcaaaacaagaccctggtggcaaagaactaaggaaaagagctgtgctgccccaggggcacacttgaggggatctcactaga

SEQ ID NO: 9102 - DNA, 224 bp, Glycine max
  unsure (1)..(224): unsure at all n locations
  Clone ID: PAT_MRT3847_108229C.1
aaaaaaaaaaaaaannnannattgaaaaaacactgaagtaccgaacacaattcaggatcaacccacccacccgacagatgcgagatgacacagaggaggtgagtgttatctttgcatcataaactgatacttttaagcatacccctctctgagcttaatacagtgtactctgccacagttgtagggtgcatctgcttggcgacttcgctatggcaataactagt

SEQ ID NO: 9103 - DNA, 435 bp, Glycine max
  Clone ID: PAT_MRT3847_10822C.1
cggccgcgccttttttttattattttaagcagaaagcacagcttccattgctgatgctggaactatgtcatacctggaatcctagtaactgtactgaacctgagcccgattcttgggaaatacataccagctacaacacaagagattccagagcatccttatccagagagactccctcaggatccaagactgccgcccttgttgctaccttattagcgtggataaagaatataggctggaaggccacaatgccacgatcacgaccactaccacaacacccgcagaggaaaccgtaccaacccagggaaagcgaggaacaccactatgatcagccatctggcttaccaatcgcactcgcaaaccttcgaagaaaagactatcgctagctgtcgagaggaacaccaatggcctagaaaggaagatatacgcgaacaa

SEQ ID NO: 9104 - DNA, 490 bp, Glycine max
  Clone ID: PAT_MRT3847_108230C.1
aaggatggaaaaagtttaatattttctattaacctttttttttaaccaagtttgggatgtaaaacaggatccgtgcactaacccaggataaaaaccaacattattttgggattcaataaaaggagtaaacaaacccttgtaaaaaaagttctcaaataaaaatgcaacatttgggagctctaaggaacttatttggggaagtaaattattcttccaaaaatcctatataaaattttacaattgagtttcacccctgtgtagaacccatatatcccccaaataataccgaaattttaaaaacactagctgaatatattcccaagggatgaaaaaaaggaccaatttgaagggggccttcgccttgatccggggaaagctgtatataaaagctggatcaaagagtccggtaatcctggacggcacccgtggttgcaaccattgcctgcatggtccccactataagcccaaaggtgaacatccttgcttaaaa

SEQ ID NO: 9105 - DNA, 1822 bp, Glycine max
  Clone ID: PAT_MRT3847_108231C.1
gcccatgttgcagcgttatgtgacttaacatgttccgtgcaactttatcggagcatataggacaaatcgtgactcttgattcacaagaatgttcatcttcaagatgagaacacaaagacgcgatgtcaaagtcttcataacaataggggcaagggaaatcgggtctcacctcttcttccatatcaaaatcatcgattcccaaccgatctaagtgagagtttggatggtgatgctgaagcgtgtattggcgtttagcggcggcaagacgcgaggtccagaagtcagaatccattgaaagatcggagagataatgaatagatgaattggttatgtgaattattcaaatcaaatcaaatcaccaccttcaacagattcaaagaacacttgtttttctcttttctctcaaatgaatgaaaattccagaatgatttgactttttccacaaaaacacagcacaacacaactcgttccatttcagtcggcaattctggaaaaagtcaaatcattctggaattttcattcatttgagagaaaagagaaaaacaagtgttctttgaatctgttgaaggtggtgatttgatttgatttgaataattcacataaccaattcatctattcattatctctccgatctttcaatggattctgacttctggacctcgcgtcttgccgccgctaaacgccaatacacgcttcagcatcaccatccaaattctcacttagatcggttgggaatcgatgattttgatgtggaagaagaggtgagacctgattttccttgcccgtattgttatgaagactttgacatcgcgtctttgtcttctcatcttgaagatgaacattcttgtgaatcaagagtcacgatttgtcctatatgctccgataaagttgcacggaacatgttaagtcacataacgctgcaacatgggcatttattaaagttacagagaaggcgcaggttaagaagagttgctattccaaacagtcagacattgtcccttttgggtcgagatcttcgtgaggctcatctacaggtgcttcttggtggtggaggtggtggtggataccggtcaaatagtgtagctgcagccgtatctaatgctgctgctactgatccattcctatcctcatttattttgaacttccctgcttgtgaagctgaagaaatttcaaaatctgtggtaacaagtgctgagaattcttctgccaaaaatgcgacgcctgaacatatttggaaatcaagttttggtccctccttgagtactgaagagcgcgagaaacggatgagacaagctgctgggagatctggttttgtgcaggaactgtttctttcaactttgttaggtgaataatggaagctgtaaggtgctttcagaagaataatcaacacgagatccatcgttaaggatcttgaatgaaggatacctctagtggggatttcgttggttatctgacaatccatgttatagactaattttggtatattgtcacagctgcacctttgacatatagtgctgaatctgatcatagttatccttttatcccacccttgtaagttgtaagcatcttaactggagatgtattactatctgaaaacaaaaaaatagaagttttcttgcttatggaaagacctattttgctatattggcgtatgttgattccctggactcagaacactaggaccttatgctccctttcaagtggaatctgatgaagaagttgggaatttctcttttagatagattgaaaaaaaaaaccaactaatgtatcgaaaactacttttctatgcacaataaatatgtatttagattattttattttt

SEQ ID NO: 9106 - DNA, 277 bp, Glycine max
  Clone ID: PAT_MRT3847_108232C.1
cgggcaagaggaggagtcgttgagcgtaacttttgcccggaacaacgtctggctacccaatgagcggctgcgcctgcaatcgcgagacagaccgggacttggggttggaccacagcgacgcgatggtccacagttgcgtcatgcacaggagtgggcttacgatttcatcattgagtgacacgacgaccttttctgagagcttacaacttctaaagcgatgaagaagagaggctgctacttgggagcatgtgataagatacaaggaatatactttgag

SEQ ID NO: 9107 - DNA, 643 bp, Glycine max
  unsure (1)..(643): unsure at all n locations
  Clone ID: PAT_MRT3847_108233C.1
ttcccggnggtcgacgccacgccggtcgcggatctaaaagttacgggctagggaaggaaaggagagtgtgtgttcaaaaaatgaaaaagaagggtgacacggataacgggtttggaagtcttcctcaattcacattttctggagaggcaaagtgggtgctgggtgatttgtttgctcattatccgcctggcgatggaaactcatgggagatggtcggagaaaatagtgacactgctactgacagaacaaaacagaggccggatgatattttcagcaggccctctatgaccaaagctgaaattgctaggagattggaagctcttacttctagaatgaacaatggctctaacttgaaacagatcattgaagggagatctaagcttccaattgtgtcttacaaggattcaattacatcaactgttgaatctcaccaggttgttctaatatctggtgagactggttgtggaaagaccacgcaggtcccacaatttattttggatcatatgtggggtaagggagaggtatgtaaaatagtttgcactcagcctcggcggatctctgcgacttcagtttccgagagaattgctagtgagagaggagagactattggagaaaatgtgggatataagataccggtagaaag

SEQ ID NO: 9108 - DNA, 180 bp, Glycine max
  Clone ID: PAT_MRT3847_108234C.1
tgttgtaacaaagaagtgtagtagcggcgccaagaggagcggtctcacgaaagcaccagcgtcaagtgacagcatcggatacccaactgcatggtagcaagatcagacgaaactgaagttggaggaagattcaaggccctctctgagatcactgaggtgtgatctcgttgcaaggatcag

SEQ ID NO: 9109 - DNA, 212 bp, Glycine max
  Clone ID: PAT_MRT3847_108235C.1
ggggcattagcacattttaaatttctgaactaaacgctaagcacattacacttttttatgtaaataaacatatattatgcaacggtggggaatgcgatctctactaagattaggcttaactccaaaatgttctgatgaatactgccctagcccacaacgatttgcgtttgtcttaatacgagtgatcttacaactctggaacattggttttg

SEQ ID NO: 9110 - DNA, 291 bp, Glycine max
  Clone ID: PAT_MRT3847_108236C.1
ttatactgcacgctcccgcttcttcaactcttctaaggaaaatcacaagacgcaagatactttctcagggaatggagcgatggagaatgtggtggggctctcgcagtgtcgtactgcaacaagaagctctagaaatgaggcaagtccaaacgcactttggattcgttagagtctcttggtcgaaaacaagcctcagaggacccaggtggattcgatcaacggaatagggttcacagctgattgctgcattgctgtgtaggaagagaccagagaaatggatatcataggaga

SEQ ID NO: 9111 - DNA, 342 bp, Glycine max
  unsure (1)..(342): unsure at all n locations
  Clone ID: PAT_MRT3847_108237C.1
gngngnnnggncgncgnncnncgngnngncngnnncngccggcancccnggcacgctcncngacgcgnncggngncncggccnncngcncnnncngnncgcgncccnnctcggncncngngngaggcntnncnggggnncgggnnnnnccnccgcgcncncngcctncnnccncgncncgctcccnnccctcgctccngntccnccgtnccnnccnccncagccncnnnctcgccnggcgcatnncnnngcgcgncncgccccgcctnggccgncgnngcgccgccnncnnggagcgcanggncnngccnngggncccnccnngtntgccnncgcnggnccg

SEQ ID NO: 9112 - DNA, 347 bp, Glycine max
  Clone ID: PAT_MRT3847_108238C.1
ctcgagcaccaccttaatttaattcatgatcctaatatccttttccaccaacattccccgccacaacctatccttttatattacaagttacttgtgactcacataacaccaccattaattttaatatccttacctgaacccaaattctttaaatgataaattctcatagggatttatcatattttcccaccactacaaacatataaacctaacaagtaaatgtcattgactttttatatatatctgtcttataacatcaccccacccaattattcacgtattgcaccatttgtcattattaacgcataacatcatatacccaccaataattaatgatatttatgacc

SEQ ID NO: 9113 - DNA, 334 bp, Glycine max
  Clone ID: PAT_MRT3847_108239C.1
aaacaacaaatgtccacttaaatacttggatatatagacggggaaagggtcaacaaaccgggcaaaatacccccatcaaaaaaaagggaactcaacatttgcaaaaagtcccccacatataaaatggaccaataagttattggggagcaaattaaaactaagagcagagcattggctaccccaatttcaagcccaaagaagagcacaagggaacccatctggcacaagttgataaaccggattcctgaacttataatagacctcaaccctgttggaaacccgacaagaaattcgcgcatacccaataacagaggcccccttccccaccacaaaa

SEQ ID NO: 9114 - DNA, 1599 bp, Glycine max
  Clone ID: PAT_MRT3847_10823C.1
gagaatctgcactttctgtttgatgtagcgtatgtcactcacactgactatgtatgttgagcaattctagcatctgcttgaaaatatgttctattgaaaacgctatatacatggaacgaaacactccaattagaccttcttttttggtacaaagaagaaattagctttaactaattatacttaatgactacgtgcatgtgtaaaaattgctctggactgccaaactattttacttcagcaaaaatcaacgaaatggtgtgttagtaatataaaattaaaagaataaagcatcaagaaccattttcctaatcactgcaaaactacgtgcatgttagtaatatatatataccttccttttctctgcatcacagaaactagcccagtttctgccccatggcagaagaagccatcgatctctcaccccttctcaaactctacaaagacggtcacgtcgagagactcataggctgcgacgtcgttccgccgggtcacgaccccgcaacaaacgttgaatccaaagacatcgtaatctccaaagacaacgacgtatcggccagaatctatattcccaaactcaccgatcagacccaaaagcttccacttttcctttacttccacggtggaggtttctgcatagagacaccgtcttcatccacttaccacaaattcctcaactcaatcgtttcaaaagccaacgtaatcggcgtctctgttcattaccgaagagccccagagcaccctgttcccatcgcacacgaagattcatggacttcgttgaaatgggtcgcgtcccatttcaacggaaacggccccgaagagtggctcaaccgccacgtggatttcgggaaagtgtttttcggtggggacagtgccggagcgaacatcgcacaccacatggccattcgggtcgggtcccacggacttcctggtgcagacccgattcaagggtctgaatttctgttggagcgaccctgtgcgggtgtgaactttaaaggaatggttttggtgcatccttacttttggggcgtggagcgagttggatccgaggcccgaaaacccgagcatgttgcccttgtggagaatctgtggcgttttacatgcccgacaacggttggatccgacgatccgttgatgaacccggaaaaggatccgaatctggggaagctggcttgcgagagagtgatggtttttgttgctgagaatgatttgctgaaagataggggttggtattacaaggaattgctcgagaagtgtgggtggaacggtgttgtggaggttatagaggcaaagggagagggacacgtgtttcatttgttgaatccagattgtgacaatgctgtttccttgctcgatcgagttgcttcctttatcaaccatagttaaggatacagttatgagtttctatgtgatatgtctgtttgcacttgttacttgttacttgttagtaacatccttcctttacttgaggttatttatgagaatctgcactttctgtttgatgtagcgtatgtcactcacactgactatgtatgttgagcaattctagcatctgcttgaaaatatgttctattgaaaacgctatatacatggggccccaag

SEQ ID NO: 9115 - DNA, 335 bp, Glycine max
  Clone ID: PAT_MRT3847_108240C.1
acgctgacgcgtaccacaacactttcaatcattagttcccaatgggtcaaatctgatgacggagaggcttctgctgagctaaaagggaatgaactcaacaacggtagattggccatgatctctatgtacgggttctctgatcaagccattgtcacctgcaagggtccattggacaacctcgctgatcaccttgcgaacccagacaacaacaatgcctgggcctacgccaccaactacgtccacctcaagcgagcatcaaacaaaaggatgacttgtggactcttgagaggttttagaattgcgtatcgtgaagactaatatattgcaatgtactt

SEQ ID NO: 9116 - DNA, 254 bp, Glycine max
  Clone ID: PAT_MRT3847_108241C.1
ttccaacataactgatatttcacaggttggctgtgtaccttgtccttttataatactctaaccttattctaatgtttaagaagtggaaacttgttcagttatcaaatttatggcattgtcactgaaattttgtagtctttgtttgtggaatagttgatccgttgcatcatgcacatggttttatgcattttttatggacttgtacatgtcacttagaactggaaaaaaatgtgtttgttgagcctgacttatgc

SEQ ID NO: 9117 - DNA, 411 bp, Glycine max
  Clone ID: PAT_MRT3847_108242C.1
aaaccaacaaaaaaccaaatttttggcccccaaggggggggaggcaattccccctggtaaaaaagggttaaaaggctgatttttaaacaaaaaaccctgtttggggtttccttgaaaaggggggatgtaagtggaaaaaattcaataataattcaataaaaaccaaaggggggcccctgccccaagaaacagtaaaaagggctgggtggggcaaaaaaatggaaaattcccccccctccttgggccatggttttttttttaaccaaaacaggagccccttgattttctcccctccccatttttaccccagggctttttattttgggggggaaaaggaaaaggatttgcccccccccatgaagggttttcatttggtgggcctccaaaaaaaagggcccatagcttttaaaa

SEQ ID NO: 9118 - DNA, 361 bp, Glycine max
  Clone ID: PAT_MRT3847_108243C.1
tgaggggaagaacttgatggttgacattcgaactgcaagccaacaagtcactcggggataccaacatctctatattcaacggattttatttattgccaaaaactggcagcatattgaaatggtttcatgctcatgagtatcaggaatcatcatctttctcacaatccttgtgtgttgaataaccatcctcagtggttctattgtcattcaagtataaagtttgttttgttccccttggaaacatttgaatggttttggacatggataacatgtttattataacatctaaattttcatcatataatttcatgttgaaaaaatacccatggtatcttttatttttttcccagttcacttataa

SEQ ID NO: 9119 - DNA, 231 bp, Glycine max
  Clone ID: PAT_MRT3847_108244C.1
ctccaataattatagtaattggagattcaaaatacggcatttttgacaaattaataaaacataaaatgaatccttcccccctacatttgccaagaaaattccaaatatgtgaaaaaaggagaatcacttgggcaaatagttccaaaaataccatttccttgaacagcttctgatttccatgacgtatgggttgctccaccaacatactatttgccaggaccaaccaaacta

SEQ ID NO: 9120 - DNA, 224 bp, Glycine max
  Clone ID: PAT_MRT3847_108245C.1
gtatctccatgcttgcttcgtatcacggccaacacttaacggctgccagggaggaatactcagattcagcgttactgtagaatcgtgacgctgtagagtgggaaccatggataaacagtgaagacctcaattcatcgatctaaactatgctcatcgtaggcaaccgagagcagatgaagagcaaacaacaactcctggcttcacagaaatccacccacaccggg

SEQ ID NO: 9121 - DNA, 691 bp, Glycine max
  unsure (1)..(691): unsure at all n locations
  Clone ID: PAT_MRT3847_108246C.1
ccacgcgtccggctgttacccagtgttcatgcttactagcttcctcataagattgaggctcagtgcagtgtgtgattgacatactaaatgccttgtgtgaaggagacaaaagtgtaagtgaatgaaaagaagacaagggatatttagactttgtacctgaagtgagagattcgtgtgaagttggagatgtattgtgacaaacatagtcagacaaatgtaatggtgcccttctttgtctgatgggtttggaatgtaatagaggagaatcattgtgatctttaggtggaggtgtggaggtagaggtatcagaaatgacagtgtcatttgaaatattaggagataaagatgagtggggtggtgatggtgactgctcagcattaatgtctaaggaaatgtcactatctaaggtaatgtcactgtcatttggagtaggactgatggaatgatactcccaaggagtcttgggagatgaggactgatagggaaaaatgtgttcatgngtgagtcacatccctagacaagaatatggaattatttaatagatcaaagagtacaactcctttcacaccagatttatatcctagaaaaacacattntctagctctaaggtctacttggtttcatggtgattggaaagtagatgcaaaaactagagaaccaaacactttgagagtatcaaaatcaggggcag

SEQ ID NO: 9122 - DNA, 443 bp, Glycine max
  Clone ID: PAT_MRT3847_108247C.1
gggaaggccctgcggatttattagaataaaatttcaccaactaggtgtaccaaatttcaaaatttaaaagaaaggaccccggttaaacaaagtttagttatcacaaggaatgtgaatttcctccttcataattcggaaatggcctactaatacttacaacgttggggcctacttaatttttcacaggccacttgattcccagtttcctgaccctactctggcaaataccggggggaggttggtactatatctgccccattttaatctaaagatctcgaaaaacagtgggtgcctcccggaggtgattaatttctgcccaactttgaaggaaagacaaattccggtctggaaacaattaaaccttagaaagttctttatctttaaaatccaaggggacttccttgtattgacatgactacgagtaacccttacggtttttcttt

SEQ ID NO: 9123 - DNA, 267 bp, Glycine max
  Clone ID: PAT_MRT3847_108248C.1
gtagtactgatcaagggtgtctgtttctatgtctctgtgtgtttcgtcactttctctcgtttcaatcgaaaaagatcatgggtagaagattagtcgtcggtggcaactggaaatgcaatgggaccactgaggaggtgaagaagattgttactactttaaatgaggctaaagtccctggagaagatgttgttgaagttgttgtgagccgccttttgtgttcctccttttgtagaggtttgctgcgcctggatttccatgtctcggccc

SEQ ID NO: 9124 - DNA, 884 bp, Glycine max
  Clone ID: PAT_MRT3847_108249C.1
tccactccttttataaggtttctgaattcactggttgtagtatatggtaatcattttatcatcaacgctaattaattataactagtgatgaatgaatcaacgaagatctccaacggtcaaaagcatatgcttagagcgatccaaggtcggttcctaacgtttcaattctcatttctctctgacccataacggtcacatttacattcttcactatcacgtgcacacacactctcactcaacgctttctgggtttgcactcactcactcatctctttctctctctctcatcaatggaacccgcgaaaattgattggaagaggctagagtggagcttcgtggaagacaagctctacgagcacatcaacgcgcccaagtgggttgacttcttgtcccttgaccactccctcaatgatcatgctgacgaagcttggttctgcaagcctgattgcaaacatcccaagacagcagaggattttctgagatcaaaaactcctccttccaagaagggttttagcccgggttatgtttcagagaatcttccaagtggtgacaaaattagaagagatgcgaaaatcaagagaagggtgcctgcactattcaaccaagaaagtgaaaaccaaaacccgaatttgtttactcctcctcctactactaaagttaaccccttgaaggaagcaatcaagtctactgaagagaagaagaaagtggttgataatgatgacacatttgtggatcacaaggcgccttcattgagatcaactctatccaccaagaatttgtttgccgggaggcctattctgaatcaaatcacggaattctgcaatgaattgaagaaattggcaataagagctaaggagagagaaaatgctgaaaatttgatccca

SEQ ID NO: 9125 - DNA, 312 bp, Glycine max
  Clone ID: PAT_MRT3847_10824C.1
taaaagctcaaatccaaaccctaaaataccaccgccgttctcatctctcttcccagccctcacctcaacgctgcatcttcacgtcgtctcacgaggtgcatatagtagagagggaaaatgagtcgaggaggcgcagtagcagcagcgaagggaaagaagaagggtgctacattcaccattgactgtgcaaagccagtggaagataagatcatggacattgcttctctcgaaaagtttcttcaagagaggatcaaggtatttgaagtacttgacgaagaagtacttgaagaaacacaatgtgcgagactggct

SEQ ID NO: 9126 - DNA, 521 bp, Glycine max
  Clone ID: PAT_MRT3847_108250C.1
ggctcgagtttgcactcactttctcatctctttctctctctcatcaatggaacccgcgaaaattgattggaagagactagagtggagcttcgtggaagacgagctctacgagcacatcaacgcgcccaagtgggttgacttcttgtcccttgaccactccctcgatgatcatgctgatgaagcttggttctgcaaacctgattgcaaacatcccaagacagcagaggattttctgagatcagcaactccttccaagaagggttttagcccgggttatgtttcagagaatcttccaagtggtgacaaaattagaagagatgtgaaaatcaagagaagggtgccagcaatgtcatcagcttcaccccaagctgataagttcagattcaaccaagaaagtgaaaaccaaaacccaaatttgtttactcctcctcctactaaggaggttaaccccgtgaaggaaagcatcaagtctagtgaagagaagaagaaactgttgataatgatgacacattagaggatca

SEQ ID NO: 9127 - DNA, 322 bp, Glycine max
  unsure (1)..(322): unsure at all n locations
  Clone ID: PAT_MRT3847_108251C.1
aaaaaaanaactgcatgtttaatttcaaaaggcccccccaacacaaaanaaaaccacaaactatcaaaccaacctctacctttcctaaaacaccatctactacctcccaacatattcaccaccaacacctcctcttactcaatcaacaatatccaatacattgcccaaccaaacccctaaccctaatccatcacattacaactaaaccaaccatcccttcaaaaaacccatcataatcaaaaccaacaaacacaaaatttcccttcaactaaccctagaaataacacaaattacttaacctaacacccatacctactcccaa

SEQ ID NO: 9128 - DNA, 2060 bp, Glycine max
  Clone ID: PAT_MRT3847_108252C.1
gggtctgcaacaggttgacatcgcacacaaaaatgttttgtcacaaagcacatggaatgacaatactggacgtaacagatggtagcaagattgtctcagctgtgccggttacaaagccttactcatctacattgaacagtgagaatgtgcgcgactcaggcaactagcagagcaacatcagtgattctacgtcaaagcatgcatctgggggtgcttgcattgatccctcatgctgttgccactcagactctttttgtagtatattataagccaaggacgagccaattcatcataggcgtgaacaagtatttagaggctatggacaaaaagttcagtgtcggcatgaggtttaagatgagattcgagggggatgattctgctgagactgacaaaagattttcgggtaccatagttggagtggaagatatttctcctcattgggtaaattcaaaatggcgatcactcaaggttcaatgggatgaacctgcagctgttcccagacctgatagggtctcaccatgggagatagaaccctttgttgcttctgcttctacaccctcagttcaacctactatggtaaagactaaaaggccccggccacccagcgaaactccagatgttgacacaacatctgttgcttctgttttctgggatgctggtctgcaacaggctgacatggcacaaaaaaatgttttggcggaaagcaaatggaatgacaatactggtacgtggcatcatatgcaaactgacatgaatagtaaaagcaacagtggcaacactatgttaaggaatcagacagaaggaagttggctatcttctccgcattctagttgtccctctcatttgtttcaggacgtaacagatgatagcaagattgtctcagcttggccggtttcaaagcctcactcatccaaattgaacaatgatcatgtgctcgaccaagttgacaaggagagcaaagttgagactgctacaagttatcggttgtttggaattgaccttattgatccttctaggaactctccttctgtagagaaggcatctgcacaagcagtaaatgtacccaaagttactactgaaggctgtaccatcaccttgtcccattctgtaatatggtgagaagaatcttcatttgttccagccaggatgtgaagaagatgagttgtggaagcaaactgccgatctcctcagtggaagacgggactgtaataagctcagacacaactgaaacctgaaacttttgacattctttcctgtggttttgcgtttgtttgtcagcagcacccaaatgctgatccttcttgttgcttcaaattgtttgtgggaaggaagttggtctatttgggctggggtaagtttcatgttatcagatgtgagacactagctaattgtaacttaatttgtagagacaccaccaccaggcattaattgtgctagaaaaaaaaagacctaaacagatttctttaataaattagtaagtgggaagatggcaaatttaggcttagtatatgtgaatattcatgtcaagctggaaaaagaataaactttgacatctttcttgtggttttgcgtttgtttgtcagcatccaaatgctgatccttcttcttgttgcttcaaattgtttgtgggaaggaagttggtctatttgggctgggtaagtttcatgttattaaatgtgaaacgcactagctaattgtaaacttaatttgtagagacaccaccaggcattaattgtgctagaaaaaaaagagaccaaaacagatttctttaataaattagtagtgggagatggcaaatttaggcttagtatatgtgaatattcatgttaagttggaagaagaatgttgggggttgatgttttgaaaagacttgccttttctagtcaagggggcttattcattggagctttgtatgcgtataatgtgcactttgttgttatcctctaaaatttctaatctgggtgagtcaatgtctgttgctgtcatcagtgaatgtaaattatggcattaaattgcttcaattgtagtgttcagaaaaacagtggtcccctgtgccagtc

SEQ ID NO: 9129 - DNA, 612 bp, Glycine max
  Clone ID: PAT_MRT3847_108253C.1
gaatcaaaaccctccaaggtttgatctcaaaataaacaatggaaaactcttcaccccttcctctttctaaacacaacagagatctccttttatctgctttataactcccatctggtcatccttcgcaaaaagaatttcagaatgagaatgtgtcaccactcttttgccttcaccatctcaatgtccttttctaattatctttatcttgctccttagaagaagaacctcacactacagagctcaagcaccccacccccaagtggtcaaaatgtcaactatgccaatgtatcaacagcaacaagaacaacctcctccgatgagtgtgacacaacattcaccacatgagtccattggtcccgtgattggggttctggtcgtggtgtcggtgttattcgtaaaggcgtttttgctgttatgattggaaggctttgttcacgaagaagaatcatggcgcatggtcaatgccatgtagaaaggtgggcagagagaaaatgttcatcttggcattgatggcataattaacccctcacgtcccactggggccagcgactctggccccgcagctcccgtccccccctgtcacgaaaccaagcgaccagaacaatcttctca

SEQ ID NO: 9130 - DNA, 1422 bp, Glycine max
  Clone ID: PAT_MRT3847_108254C.1
gaccaacatctgctgcttctgttttctgggatgctggtcttcaacaggctgacatggcacaaaaaaatgttttggcagaaagcaaacggaatgacagtactggtacatggcatcatatgcaaactgacatgaatagtaaaagcaacagcggcaatgctatgttaaggaatcagacagaaggaagttggctatcttctccgcattctagttgtccgtctcatttgtttcaggacgcaacagatgatagcaagagtgtctcagcctggcctgtttcaaagcctcactcatccagattgaacaatgatcacgtgcttgaccaagttgacaaggagagcaaagttgagactgctacaagttatcggttgtttggaattgatcttattgatcattctaggaactctccttcagtagagaaggcatctgcacaagcaggaaatgcacccaaagttactactgaaggctgcaccagtaccttgacccgaactgatgctggccatctgtcggatgtaccaatggcttcttccaaggagaggaaacaagaacagcagcaagtatcaccaaaagagactcagagcaagcaaatttgtagaagtcgaaccaaggttcaaatgcaaggtgttgcagtgggtcgtgctgtcgatttgaccatgttggatggatatgatcaacttataaatgaattggaggagatgtttgacataaaggcacaacttcaacaccggaataagtgggaaattgtcttcactgacgatgaaggtgacatgatgcttgttggagatgatccatggcctgaattctgtaatatggtgagaagaatcttcatttgttccagccaggatgtgaagaagatgagttgtggaagcaaactgccgatctcctcagtggaagacgggactgtaataagctcagacacaaccgaaacctgaaacttttgacattctttcctgtggttttgcgtttgtttgtcagcagcacccaaatgctgatccttcttgttgcttcaaattgtttgtgggaaggaagttggtctatttgggctggggtaagtttcatgttatcagatgtgagacactagctaattgtaacttaatttgtagagacaccaccaccaggcattaattgtgctagaaaaaaaaagacctaaacagatttctttaataaattagtaagtgggaagatggcaaatttaggcttagtatatgtgaatattcatgtcaagttggaagaagaatgttgggggttttgatgttttgaaagacttgccttttttggttaaggggcttattcattggtgctttgtatgcatataatgtgcactttgttattaccctctaaaaattctaatattggtgagtcaatgtctgttgctgtcatcagtgaatgtaaattatggcattaaattgcttcaattgtaatgttcag

SEQ ID NO: 9131 - DNA, 282 bp, Glycine max
  Clone ID: PAT_MRT3847_108255C.1
ggattgactactgacaatggcgcttcaacggttaccagaaggatgaattgctattacacacacttgcacttcgacgtgcgaacatgtgtatgtcttccgtcgtatcaacgatttactctccggctgtcgatcccgccgctgtgtcgcaccgttttcgccatgtcgactaccactccagcaattgacattctcgatcagttcgcaatcaactctctactctcgcgctctagctagatctctaggatcggcctaggatcactcatcacggtaagaagagctttc

SEQ ID NO: 9132 - DNA, 427 bp, Glycine max
  unsure (1)..(427): unsure at all n locations
  Clone ID: PAT_MRT3847_108256C.1
gcacgcgaacgaaagcaaggtttttgtggagcggccgccctgggggggggggggggnnnnaaagaaaccananagagaggacgaggaanaaanacacaganngcccagaagaacgacaaccnaanaagaganacagcagacaggcagcaaacnagngggggaagcaggggccncaannccanacgaaanncccacccggagggggggacnnaancntccatganngccaaannaannaagnagcccaagggggccnncaaaaaccngggcanagcaaccccccnnngcggaagggcgaaagaagaagaaaaaaaaaaaaggaccaaaagcncncacagccaaccggangcgccaagagcaacgggggacagcgagccgggggangaaganacnccncacaaacangaggacaagccaagggccgagc

SEQ ID NO: 9133 - DNA, 1714 bp, Glycine max
  unsure (1)..(1714): unsure at all n locations
  Clone ID: PAT_MRT3847_108257C.1
gccggaattcccgggtcgccccgcgtccgaaaatatggcggtctgtattgcggcatatgaagcaactggtagccaggttcaattgtctcttgagagaggtcttcctgctatgattggcaacttcatctcaagacagcttccatatccatcattatcttatgacatggttcactgtgctcagtgcggcattatgtgggttgaaaaaaaatgggatgttccttatagaagtggaccgtgttcttaaacctggaggatattttgttttaacctcacctacaagcaggccacagggttcatcacgggagaaaaaaaggatcatggcaaacccaatggaagggctgacccaacaactctgctggactcttttagctcagcaagatgaaactttcatctggcagaagaccgctgatattgattgttatgcatctcgcaagcagcgtactatacaangtgtgtaaaggagacgatactcagtcatactatcggcctcttttgccatgtataagtgggacctctagcaagcgctggattgcaatacagaacagatcttctgaatctgaattgggctcagctgaacttaaaattcatggaaagtattgtttcttaatagctttctgcttatgtctttctcctttcttcttcccctctaaatttcatttcctttttgtactgctttgccttttcatgaatttatttttattattgcaggagttcagcctgaagaattttatgaagacttccaatattggagatcagctgttaacaattattggtcattacttacaccactaattttctctgaccatccaaagagacctggagatgaagatccattgcctccatataacatgatccggaatgttatggacatgagtgctaattttgggggtttgaatgctgcgctgctggaggagaaaaaaaaacagtgtgggtcatgaatgttgttcctgcaagggcttctaatgcacttcctcttatactagatagaggttttgctggtgtcacacatgactggtgtgaacctttccctacctaccccagaacatatgatatgcttcatgcatacggacttatctcacatctctcctcggagaggtgtagtatggtagacttattcctggaaatggatagaatactgcgtccagagggatgggtcattctttctgatacaataggagctatagagatggctcgcatgcttgcagcacaagtacgttgggatgcaaggataattgatcttcagaatggcagtgaccagcgactacttgtttgccagaaaccatttgtgaaaaaataattgatggagcacaagtatatctcactatgacagatgaacacaatttttttgctctgagaatggattggttagttggcacatctttgtatatacaaaactcagagccttgacgttttcaatcttgtccacaaccgggtcagaggattgaggaagctgtagattgtgaaggttcatgttgaatttggcttcagtttattcttttgtcaaagtttgtagtaattcatttttctaatatcatgttagcattctttatttatttttttatatatttttttaattcaatatgtctctatcgatcattggacttctatcactttctgttgaacaatcactaatttttgagaaagaatgtgaatggccatgaaattcaagaataaaaaaaaaaaaaaaggggcggcctgccgaactagtgagatc

SEQ ID NO: 9134 - DNA, 782 bp, Glycine max
  Clone ID: PAT_MRT3847_108258C.1
catgcacccgtgggaaggctcgagccccaaacattctcaaaccaaagccatgaccaatatggaatccaccacacctatactcactcctctagtgctcctcctcctcttctctctagccaaagggcttcacaaccccaaatgtgatgctgcctatcaacatgaccatgatggctcaaccctccaagtgttccatgtgttcagcccttgttccccattcaggccctcaaaaccaatgtcatgggaagagagtgtcctacagctacaagccaaggaccaagccaggatgcagtacctttctaacttggtggctagaagatccattgtcccaattgcctcagggagacaaatcacacagagccctacatacatagtgagggccaagtttggtaccccagcacagaccctcctcttggccatggacactagcaatgatgctgcctgggtcccttgcactgcctgtgttggttgctcaacaaccacaccctttgctcctcccaagtccaccactttcaagaaagttggatgtggtgcttctcagtgcaaacaggtacggaatcccacttgcgacggaagcgcgtgtgcattcaacttcacctatggcacttcctctgtggcagctagccttgtccaagacacagtgaccctagccactgacccagtcccagcctacaccttttggtgcattcaaaaggccacagggagctcagtgccaccacaagggctattggggcctggccgaggcccattatcactcttggcccaacccaaagctctaccaatct

SEQ ID NO: 9135 - DNA, 1243 bp, Glycine max
  Clone ID: PAT_MRT3847_108259C.1
cggccgctcaagccggccgggccgagattataccttcacaccaaatccatattcatcgaagttcatcaattccaagatgaaaatgatttacatttttttcctcttggctcttctatcatccacttcccatgcttctgtcaatgatttttgtgtagcaaacctaaaaggtccagatagcccttcaggctaccagtgcaagccacctaacacagtcacggtgaatgattttgtgttgtctggctttgtagctggaaacaccacaaacgctttcaatgctgcattaacaccagcatttgtcactgagttaccaggagtcaatggtcttggcatatctgcagcacggttagacttagccaaaggtggatcagttccaatgcactcacatcctggtgctagtgaaatactaataatggtgaaaggtcaaatcactgctggtattttgacacctggtgctgtttatgagaagacacttaaacctggagatgttatggttttcccacaaggacttttgcattttcaagcgaattctggtaagggaaaagccactgcttttgttgctttcagcagtgcaaaccctggagcacaactacttgaccttctgttgtttggcaatagcttgccttctgacttggttgcacaaactaccttccttgatgttgctcaagtgaagaagcttaaggctcgttttggtggtagaggctagcttctattgctcatgaattgatcttttcctaatgtttatttctaatcatatagtcaataatgttttgtatgccatttgccttttccacttccatgtttgaagatttcgtaatggagaaagattgttctactattagctagcaaatgaataaccccagcatgtaaccaaatgcaagtgaagagtctccatccctgatgtctattcacaacattatcccatcgaagggctcccatcttggtcaatgttgaagaagaaggaccaagcaagggattctcctgcataggctgaaaagagaaccttccaaggaacctggccacgcagcgaccttggaaacgaaggttgttcctgggacaattgttgatgtacatggtaataacaaagacagcaatattagcaaccacaaacataggcacgagccatgatgtccaatgggtctcagaatcataaacatgggaagattcaggtgcagagtagttttcctctgcagttctgttattcttggttcctccaccgccactttcaagatctcttgctcgagcc

SEQ ID NO: 9136 - DNA, 476 bp, Glycine max
  Clone ID: PAT_MRT3847_10825C.1
gggaagagaaaatacccgcaactttcgtttaaggggggaaattggaaaatttccccttccagtggtccaaccaaagacataacccttgctggttccaaagggtttgattaagcaaacaatgcttttaaataatcccattggggaacaaaaaaaaaaaaaaacttttcctattctaaggggggggggggcaacagtccaccccctccaatttaatagggcaaaaatataaaaattccctctttacccgctttcaacagaaaaaagggtgaaaaagctttcaaaattgaaaataaaaaccccccaataataaaaaaaaaggccccaaaatttaggaacccccttttgcccccataaaaaaggaccaagacccaatttaaaaaaagcccttaaccattttggaaaccaatttgacccacccccctttttttccccaaggggcctactattttaaacccttaagataccagtcttttttt

SEQ ID NO: 9137 - DNA, 249 bp, Glycine max
  Clone ID: PAT_MRT3847_108260C.1
gcttgaattagtcatgtgtggattttttgagtagatgttgagctatgtggatttttattgaactaagttgaaattatgagatttcaaattttgcctaaacctatttcagcaaaatcgtggtcccggattcgttaaccgttggatcatcttcaaattttgtttggagattcctaagacaatgcgacagagtcttaggaatctctaaaaaaaaaaaaaaaaaaaaaaaaaaaaaaaaaaaaaaaggggggc

SEQ ID NO: 9138 - DNA, 480 bp, Glycine max
  Clone ID: PAT_MRT3847_108261C.1
ttagcatgagtgtcacgctaagcatacaagagagttctaattgaccaattagttggtgaagcatataaaaaggaagggaaacatttgtttccttacaaacgaagaaaccaaaaagtagaggaaagcaaagaagccactgcaaggaaaattcgtttctggagctctggttgatctgtttcaatccatttctcttccattttcttccccttcatcccatttttatatttgtaagtctctcattataatgagaggctaaaaaccacccgttgttgggagctctacaaactaaactctctttgatgtaatgattgtaaactatcttttaatataatgttattattatttatccctatgcttattcacatacttatggtttgatcatccctctttatgcattgttttaggatataaatattgggaaatgtttgtatgctaggaacttgggaagaatatctaaagtgagtcatatctagggataga

SEQ ID NO: 9139 - DNA, 200 bp, Glycine max
  unsure (1)..(200): unsure at all n locations
  Clone ID: PAT_MRT3847_108262C.1
acccgtncctgtantcnggcgattgctcntntttttaaacatgaagcccagttcncaaaaaggagancgggccagantggttcttttgttggagccatggctattgctgacttcgtgaagacaaccttggggccaaatgnctggatatnattttgcngtcaacaggtngannacgtgaagttntgtcactnatnatggtc

SEQ ID NO: 9140 - DNA, 399 bp, Glycine max
  Clone ID: PAT_MRT3847_108263C.1
aaaacaaacacacactatccttattaaaaatatttgttcacggaaaggtttgtctgcccacacttgtttgatccattctctatcagtcaacaaaaaagcaacccaccctaaccaatcaaggtgcgtgctggttgcaacatatactttctcagtatggttcgcttcttactaacttaaatgccttccagaaattaactgatttccttctttttaacatgccatttctggttaatgagagcgcacgccctacctacaagctcaatgtatgtcccatccaaaatcaattaatttttaacttttttagatcgaacaaccgacacacccttcagaaggtccgctttttttactttctttttttcaaggaaagttatgatctcaataaactggctggcggtgccg

SEQ ID NO: 9141 - DNA, 638 bp, Glycine max
  unsure (1)..(638): unsure at all n locations
  Clone ID: PAT_MRT3847_108264C.1
ccacgcgtccggtcatgttacaaaaatattatgtggcagtattagatagagtacaatgtccataggcctttttgataattggacattaaggggatcagattttttttttttttttttacatgaactaaaagaatggctgatatttttatatgatttaagtctgttttgcaaaggacaaaatttagatacagtttcatatgtaatctgtataatgcatattattaaggtggaactctacttctgattaaagaataaaaccaaaaagacatatgaaactatatctaagttttgtccttctccaaacccaagtttcatttcctaaacatttgaaacattccatgtgacttactttttactcataaaaccagttatgctcaatcttacttcttttttcttttctcatactactcagggaggtcatgttcggcatgaactatactatctccttaaaaatgaaaaagacgtgcatttttcatttggngagtgttcaaaagggtggnggtgagaaaggccacagaaggcatgcgttcttccaagttctgcctcaacatagcaggtgacaccccttcatcaaaccgcttgtttgatgccattgccagccattgcgtccccgtcatcatcagcgacgatatcgagct

SEQ ID NO: 9142 - DNA, 408 bp, Glycine max
  Clone ID: PAT_MRT3847_108265C.1
aaagattatgcagatttaagaaggtttatttgatttctttggttcttatatctgcataatctttaagattaacaagtgtagatgtgaagattgtatatgtatatggatcaaagaaataaataaaccttcttaaaattacagacactcttatttgattactctcttttttatattttttgttatttactttatatctactgaaatattagtacatgggttcgacaggtatggggtagatttcctagtggagctctagcagaattggtagccattaatctcttgttttattgcattgaatttaagggctgtcagcctgttagtagagtgacagattctaaggggaaaactttaatttacattcaatgcataatttactgctggcaaacttttcatttctgcattgtcttc

SEQ ID NO: 9143 - DNA, 563 bp, Glycine max
  unsure (1)..(563): unsure at all n locations
  Clone ID: PAT_MRT3847_108266C.1
gcagaattcatttgcattatacaatgcgcgttcggatgcattccactttctattctaatgcattctcaattcccccacaaccaacggaggggagatctattatcaacgacaggcgaaagggcgaatggtctaaaaaccaacacactnnttcttctttctcgaaccaaaaactgctactgcccaaccgtggttggcgctaccangttcgcagactcaactttgcggttcccttaccgaacgaccgcgcttccgcacacccgctgatctcttccgacccccaaccagcctcttccgacccccgcacggatctctcttccgctcggtgaaacttctgaaggggtaccctgtcacncnngtcgtcgacgaagaagggaccgngtcaagaagtacccanngatcgnnaagtcaccccaagatggcaccttgtcaagagcctcttgtacttccaagaagaatattcaactcggggaaaaatgaacaaggnngactcaaactttaatgagtcctggcgttatttgaacaaactgctcctgtcattctcaagggagtttcttacanttgat

SEQ ID NO: 9144 - DNA, 660 bp, Glycine max
  unsure (1)..(660): unsure at all n locations
  Clone ID: PAT_MRT3847_108267C.1
ctaaccttaagatccacggttttgccagctcctcatttatcaaattatcacaataaagatcattattagactagaaagggtattctttaagacaaaaatagccattaatctcattgactcaacaaattctaattagtaattactctctcttttttactcttttaagtacacaatttttcttatactaaaaacgaggttgattgagcggtggaggtaacagtagtaggatgaatcaaacagcggaagaaaagaaaacgcaaaggttgttgtgagcggtttcacgccaaaaacagaaacaatgcgcggaagaatgaggattgaagaacaaagagacagagacagggacaaagaaagaggcattgttgttcttcaatccaaaaaaacatagcggcatggttgcattctcctttttcatcctctgttccttaatcctcctcgtacaaccttcttcttcttcgacccaacaaccccccaatttagaccccgataacatctacctcctcggcgacgcccacgttgtctccgccgccgccgacaacggcgactcccacgtgcgcctnacgcgccccaccccttcctccttcggcatcctccgncgccgcgagcccctcgctttctccgaccccacatccctctccacggagttctccttctccgtct

SEQ ID NO: 9145 - DNA, 252 bp, Glycine max
  Clone ID: PAT_MRT3847_108268C.1
tttttagaagattactcatggctaaaatatttgctacatgctattggggcaagaagctatttgaacagatggtgaggtttacagggatgacgcatgtacaaatggtgcacagattttatggcatacgaatcaacatatcgcacgagttgcacttactgaaattgccacaccttaaaccaccgaactcgatatgagattctacaggatattctaatgagtgttggtgatacatcatgggaggctgaggtattg

SEQ ID NO: 9146 - DNA, 387 bp, Glycine max
  Clone ID: PAT_MRT3847_108269C.1
tttttggggcttcagaatattttcatataaggactgggtttataagttacatgcccaaataccaaaagctttaactatatcaacgattacaggttcataattcaaaagctttgcaaaattaacaatgatctggaaacaaaatcttaaagctattggcctgccttgagtaatattaagatttaaacaagttatgaaacttacatatgatacaacaatcccttaaacataaggatttaaccctcttccataatgaattccttttataccccgatctgctgcagtgtcccttcaacctaatgttttcccatcaaggccacaacattctgtgcctaaaatagatgatattttctcactaaagctattcacttgcttactatacaaagccaa

SEQ ID NO: 9147 - DNA, 778 bp, Glycine max
  Clone ID: PAT_MRT3847_10826C.1
cccacgcgtccgtacggctgcgagaagacgacagaaggggaccgccgttctcatctctcttcccagttctcacctcaccgctgcatcttcacgtcgtctctaacgagggaaaatgagtcgaggaggtgcagcagcagcgaagggaaagaagaagggtgctacattcaccattgactgtgcaaagccagtagaagacaagatcatggacattgcttctctcgagaagtttcttcaagagaggatcaaggttggtggcaaagctggtgctcttggtgactctgttaccgttacacgtgagaagactaagattattctcacctctgactgtaacttttccaaacggtatttgaagtacttgacgaagaagtacttgaagaaacacaatgtgcgagactggctcagagtggttgtttcaaacaaggatagaagtgtttacgaactgaggtacttcaacattgctgagaatgagggagaggaagaagattagttgtctgatagccttatttgcttaagtgttttgtttacccttttcctatacctagcttcctttttggcaaatattgcttgagatacgatgctttgttttgatccgttgcaatttaacggttttgatcatttaagaattgcggtactatttgggtgttgaattgggaaacagagattacaaattattctctgttgtttcagtttttaaattgcattatgtttctttcaacaaaaaaaaaaaaaaaaaaaaaaaaaaagaaaagaaaaaacaaaaaaaaaaaaaaaaaaaaaa

SEQ ID NO: 9148 - DNA, 390 bp, Glycine max
  unsure (1)..(390): unsure at all n locations
  Clone ID: PAT_MRT3847_108270C.1
ttttttttttttttttttttttttttttttttttttttttttttttttttnnnnnnnnnnntttttgggcataattccaatttacaataaattgggttgttttatcatttccggaagctaaaaaaccccctttgtccatgaaccacaatagcttgttacaaacaggcgacaacctttctacaaataaattttttttttcaaaaagaaaaaaaagggaaaaaaaaaagccctaaccggttaacccggtttcttctttttaaaacaaaaagaaagcccaaccaaatttttttcaaactttttattttttggcaaactttaattaaagcatttttttttttcctcctaaacgtttgccaaatttggttggggccttccccccgttggcctttg

SEQ ID NO: 9149 - DNA, 958 bp, Glycine max
  Clone ID: PAT_MRT3847_108271C.1
caaaatagccacagtcacaatttaaacatatcttgtcacgtatatatccacatccacccccataaactagttccagtatttattcattatgctagcatacatcgatgatttgacggtggattctgtgattataatttatacccaatttatattgtcaactaaatagctatgatttatatttttcttcttttattattactagacaaatcttacatttcacactgaccaccatgaggtagacactgaaactacctcaattattcgttttatatataagttttcacagtacaaacacaatattaggtattactaatagaggatgacagcttataaacagcacaatttcttctccgtctttcacagctctagaactaagtaatctgcatctgttttgatccagtactccctgttgacagatgaatcttcctctggatgcaccaggtcacttttgttgtagcctccatcattgattgttttcttcttcttctggttcttgtggtgtttagcagatttttgtgcagctgttgaactttcagggtgaactttcttgcggaacatatggagaatcttattcagttttgtctcagcagaagcagaatcaataggcccaccatttattgaagtagaattcttagaataagcatggagcattcttttcttcagcttttctttcatcaggttcatggcagacttgtccacttccttctcagctcttttgtcctccttttcacattttgcgctgaaattctcctcagctgatttgcttctctgaaacagctccccgagcgaagtcctatgttctttctttgctgctgctgcagtagtttcagacagttcaatagctgttccaaagagatatccctggagtggacaaattgcagcaccatttccatttggttctgtgccttctattggctttccactgagtgttattatgctgacatggctgcctcgagcc

SEQ ID NO: 9150 - DNA, 238 bp, Glycine max
  Clone ID: PAT_MRT3847_108272C.1
aaaaaaaaaagaaaaaaaaaaaaatattacctttaaaaacaaaaaaaaataaaaaaaaaaaaggcaaaaaaaaaaaaaaaaatatgaaaaaaaaattaaaaataaaattctaataaggggcgacccttttaacggttccaatcttacgtacccttccttccaacgtcttaatatcttattggtcgaccctatattaattttagtggccatcgatttaaaacgttgtccactggaaaaa

SEQ ID NO: 9151 - DNA, 414 bp, Glycine max
  Clone ID: PAT_MRT3847_108273C.1
aaaaccaggaagggcccaaaccggaaaaaaaaaacctaaggcccccgaaattacaccatccccaaaaccccaatatcgggaaccggaaaagcgcgtccgaacgcccaaaccgcccgcagggaaaaaggcccccccgggcccagagtccttcccaagggccccgaaaacccctaaaggggggcccccccgaggggcaaaagacccctttcagggcccggcaaacacggtaattttccccgccctttaattgggccccccccttttaccggccggggggttcccccccccaaaaaaatggcccaaaccgggcacccctggaaaaccggttggcgcccatgagaacctgggagcggggcccccctccggaaaaaccccgggggttctaaggggggcccccctttgaaaaaaccccgg

SEQ ID NO: 9152 - DNA, 345 bp, Glycine max
  unsure (1)..(345): unsure at all n locations
  Clone ID: PAT_MRT3847_108274C.1
gtcgcangcncgcgttcgcngcccccgtacgtggccccggacttcgcctcctgggccttacaagacgccacatcacctatcatagaagaacttacaaactttcatgaccacaccctaataattgtattcctcatcagctccctagtactttatattatttcactaatactaacaacaaaactaacacacacaagcacaatagacgcccaagaagtagaaacaatttgaacaattctcccagctgtgcattcttattctaattgcccttccctccctacgagttctatacataatagacgagcttaataacccagttctaccagtaaaaactataggacaccaatg

SEQ ID NO: 9153 - DNA, 374 bp, Glycine max
  Clone ID: PAT_MRT3847_108275C.1
gtatgatgacatcgtgacagaagtctcttcttacttgacgaaggttggttacaacccagacaacattcgctttggtctcatctctggatttgaaggtgacaacatgattgagaggtccaccaatcttgactggtacaagggaacaactctccttgaggctcttgatcaaatcaatgaacccaagaggacctccgactagcctctaatgcttccattgcacgatgtctacaatattgatggtattggtactgtgccaatgggacgtgtagagactgaggttgttaagcctgttaaggcgatgacttttggtcacactgggctgacaactgaagttaagtctgttgagatgcaccatgacgctctcacacacgctc

SEQ ID NO: 9154 - DNA, 1504 bp, Glycine max
  Clone ID: PAT_MRT3847_108276C.1
ggctcgaggttcttaagtatgccatgacccttgatggaaaaattgctgctaccactggccatgcatcatggataagctgcaagcagtctagaaatctagtttttgagttaagaggccgaagcgatgctgttattgtgggaggcagaaaccttatctgataaggtctgactgggacaacataaagatcgatgtcatgtacagggcactgaaatgcaagttctcaatctacccgcaattgaatgctatcctacctgtgggatatgtctgtggtttctaccagagttgtaacacaaaggggttttagggggagtttccagaagctgcatgcatcaaatggattggaagactgttagtttgatatagatcagacctgagtggggagtctgtatcatcaagtgagacccctagtttaactgtataattttttcaaagggaagagtaacaatattttgatgtagaactaccaaaactgcttgatgtgcaacttgtcccgggcaaaaccatgtcaccatcttattagtttactgaccaagccttctgttttgcttaagagggactttcattcaagtcttcaacaatgttccaagtttcttttatgtggcgtttcccattttgattattaacacttaattgtactttaggtacatggaacatgtaatcccatcacaaaatgaaacttttgttgttgatcccactgtctcaccatatgagtcaaggatcatatttttctataaaacatgggatcctttcggcgtgttgtcaaatttccctccccatcccattcaaatgcctgatgaaaatggtgattgtgtgacttggatgagtgttgagcattactaccaggctcacaagtttattcgggtggatgatcctttggcacaagattgtgttgaaaggattaaatctgcaataagtccagaagaagctgcaagaataggaaggtcaatgcaaaagcagaaaccttatctgataaggtctgactgggacaacataaagatcgatgtcatgtacagggcactgaaatgcaagttctcaatctacccacacttgaattctatgctgctctctactgctggttctgttctagttgaggcttcgccacatgatctgttttggggtggaggccgagacggtgaaggcttaaattatcttggtaggctgttgatgaaattgagatcagagtttcttggggagtcttcatcatcaagtgagacccctagtttaactgtatagtgttttcaaagggaggagtaacaatattttgatgtagaactacccaaaactgcttgttgtgcaacatgtcccagacaaaaccatgttaccgtgttgttagtttactgatcaagccttctattttgcttaagagggactttcattcaagtcttcaaccatgttccaagtttctttttatgtggcgtttcccattttgattatttacttaattgtactttaggtactcttactattgtcatttctcaattttttctcttcattctgttttcac

SEQ ID NO: 9155 - DNA, 217 bp, Glycine max
  Clone ID: PAT_MRT3847_108277C.1
catatggtcgcgctccatgttctcagagacttcgacggcctttgttagctactactggttgtcgaatccacagatttagtgtggagctaccgaatcctggaattagtcaacctcttcagctagcttattattcagagaatttcgaattacatacacgtgaactgatatgctctaggctgcttgggctatatacttattgaaacttcccggagacctt

SEQ ID NO: 9156 - DNA, 283 bp, Glycine max
  Clone ID: PAT_MRT3847_108278C.1
ttccaggaaggtttcccgtcatcactgtatgacgtcctccttctttgggggggggggggggtagcgcaaatacgtatctgtgcgataacataaaagcaccaactggacttataacaacctgaacgagaaatggggagggcaatcacaaacaaaagaccacggagacgccggggtttgcgggtttaatgggttagttgttgtgcggggtagcccgctaagcccgaatcgccaccgaagtacgcgatggcgaaaacgccgcggggcgattgcgttatgcggatgg

SEQ ID NO: 9157 - DNA, 1479 bp, Glycine max
  Clone ID: PAT_MRT3847_108279C.1
gtgattgccatgattctgcaggtctattatggctgggcgagtactttcacatgcagaatttgaaatttctgaactcggtagaagcgctgcgcaagtggaattgcgcgtttctgtttggcgggtcagttttcctcctccttttgggcttctaaaagcctaagataaaaccaaagccccaaaaccaactcttctataactaaatcccaaattgtgaaaacacaccctatctatttattctcaacttcgcgcaaacactcccttaaactctgctgcccaaaccaccacaaccagagccctcctctgctgtgtcagatttcttctcccccacgtgtgaggtcaactcttgttcctttgcagggataagtttatcttcggccgacccacgcgtccgcggatggaggagatggtgttggatattctgaagaaatccaatattaaagaagccactgagttcaccatccgagtcgctgcctccgagcgtctcggcatcgacctctccgacaccgccagtaagcacttcgtgagatccgtcgtcgagtcttttcttctctccgtcgcggccaatgaaaagtccaaagacgcagagaagaagaaggagaacgaagatattgccgccaaaaacgacgacgtagcgaagaaggaagatgtcgttgtggccaacgaagaagagtcccgagagacagaggtgctgcccaaactgaagagggatgatcccgaacgcgttatttgccacctgtccaacaggaggaacgtggcggtgaaagatttcaaagggacaaccctggtctcaattagggagttctatatgaaagatggaaaaccacttcctggttcgaaagggataagtttatcttctgaacaatggtcgaccttcaagaagagtgttcctgccatagaggaagctatcaaaaagatggaaggaaggataggatcggagcctaatggtaagcaaaatggagatgcgtcaaattcagctgttgatgttgctcttgagcccaatggtaagcaaaatggagatgcgtcaaattcagttgttgatgttgctccacttgagcctcatggtaagcaaaatggagatgcatcaaattctgttgttgatgttgctgctcttgagcctgttgtccctattgaggtcatccgattggatgggaagaatttccaatcctgggctcggcagatggaattactcttgaaacaattaaaggttgactatgtgctagatgaaccatgcccgaaccctacactagggggaaagtgccaaggctgaagacattgccacagccaaggctgcagaaaggagatggctgaacgatgatttgacatgtcatcggaatatcttgagccatttatctgatcctttgtataacctgtatgcgaacagaaaattgagtgctaaggatttatgggaaagaattaaaactggtttatctgtacgaggaatttggaacccaaagatatcatgtgaaaaaagtatctttg

SEQ ID NO: 9158 - DNA, 793 bp, Glycine max
  unsure (1)..(793): unsure at all n locations
  Clone ID: PAT_MRT3847_10827C.1
gctcttcccagttctcacctcaccgctgcatcttcacgtcgtctctaacggtaataccctttcatcctctatgcatcttcttcttcttctatttcgccaaaaacaaaggcaaattagggttttcaccgtattttattcccttttccaattacttaagatatttgaaggtttcactacttattgactcgattttcaaaatcgattcccattaaagttcaattaacgacgtgttaaatcgcataagcatcttcgtgttgttgcagagggaaaatgagtcgaggaggtgcagcagcagcgaagggaaagaagaagggtgctacattcaccattgactgtgcaaagccagtagaagacaagatcatggacattgcttctctcgagaagtttcttcaagagaggatcaaggttggtggcaaagctggtgctcttggtgactctgttaccgttacacgtgagaagactaagattattctcacctctgactgtaacttttccaaacggtatttgaagtacttgacgaagaagtacttgaagaaacacaatgtgcgagactggctcagagtgattgcttcaaacaaggatagaagtgtttacgaactgaggtacttcaacattgctgagaatgagggagaggaagaagattagttgtctgatagccttatttgcttaagtgttttgtttacccttttcctatacctagcttcctttttggcaaatattgcttgagatacgatgctttgttttgatcggttgcaatttaacggtttntgatcatttaagaattgcggtacta

SEQ ID NO: 9159 - DNA, 2229 bp, Glycine max
  Clone ID: PAT_MRT3847_108280C.1
gcccgactctgcaaagaaagataatctctccaaggaacaaacggatagaaagacaaaccccctcttcgagatttcagagttcgcccccttcaaaattctaataacattacccccacccctcacaatcttcatcttccgctcagctactcctatttacacccctcaaatctgctttcaactttcacactcacaccaccaccatgacccttcctcaatcatttggctgtggacttgtgcaagcacccttggtgacaagctctggtcttcttactaaagtttggagtgttatctcttctcgtgatgaagacatagtttcatactcaggaaataatggactgtccttgaaagtttctgaggattcgggtttgacggttgttgcgtttgaggtcaacccggattttgatcttcaatctacagttgtttctttctctgatcccaaggagaataatttgaaccgctttgagtttctttgtaccaagaaacatccagatttctctgtcaacaagtctgtagttgatcttttttctaaaaatcttccgaggcttgatgagttgaagtccaagattgatagctcccctcgattgattgttactggacgtggtcttggaggaccaattgcttctctcttcactttatcgctattaggtaacaagaattcctctgagaaaaagaaaccccctctctgcatcacctttggttctccccttgtcggtaacaaaaagtttcaagaagccatatcacgtagttctacatggagttcttgctttctacatgtggtctctatcaaagacccatttctcaaaagattgaatcctgacatcaaggattacatgccttttgggacatttctcttctgctctgatataagttctacctgttttgagaaccccaagtctgttttggaacttcttgtgatctcaatcaaagatcaaaatcaagcatttccgtccatagattatggcaacattgtgggaaatctctatattaaagcaatttgcaaggactttaccccacgggggcaggactttactgattctaattcactgcgtgcaagtatccgtttgcagttgtgggcagcactaggattgacaccagatatgcagcaacaacacctgaacattgatataaatgctttggtaacaaagttggaaaagctggagaaggaagtgatcttccagaaggggaacaaatttgatccatccaagaaattgaatgtgatgaagatagaaatggccaaacttgagtggtacaagaagtattccaaaaataataagattggctactatgacagcttcaagaggggtatctcaacaagcgacctagatgttgttcagtgccagaaaaccctcagaaattactggattgacatggttgcagaggcagagctgaaacctcagacagaaggtgcagcttttcgtactcgctggctttttggcggaactaattacaggagaatgtttgaacccctagatattgctgagtactacgcgaatggtggtaaagactatgaggctaagggaagatctagacattatatagtgttgcaggagtggctggaagaggataagaaagaaaaaagcaattcaaacagtacaaacaaaaaggatgtggaatctattttaacttttgactcttgcttttgggcacatgttgaagaagctatcctttcatgcaaagtgttgaaggatgaacaatctagtgtgacagagaaggaagaggaaactgggaagttgcttgaattcgagaagtatgtttatgggttgctcacgaaatatgaagtgtcatcagagattttcctaaggcaaagcagctacatgatttggtggaatcagtataaggcaattaagggaacttcttataattcagcactcgcagacttcatgagcaatcccgatcattataatgtgctgtatattaagggaacttataatttcccccctcaggcttagtgattagtgaacgtccgtgtggttgaacagtgtaaaataaattgtggttttatctcactgtgcaccttttaataagctttttttatattttcccttgttgatttttgttaaggatcttggttttaccctcccttgtgttgtggtattggaaactcatgcaattgtcttgacttgtgatattggaaactcttgcaattgtcttaccttgcaaaccttcactcattattcttgaaaatttaagttgagagcaatggatgcaggctagtttgtattaatgtaa

SEQ ID NO: 9160 - DNA, 401 bp, Glycine max
  unsure (1)..(401): unsure at all n locations
  Clone ID: PAT_MRT3847_108281C.1
ggacaataattggatatggtcattatggtttctggctttttacaagataaanatttggcactgaatatcttcttacacaaatctctctaaaggggttaatactttcctttaatccctttttcacaggaacatggataaatatctggtggtgggtaatggcggggaaaataattatttaccgggggcacttcctaacctttaacaacgtatgagatcggtgggttttatttatatatagcatttataggattcatcggaaggtagggcaaatcgggatttaacacaggggttcatccatctttggtattccttgggaaatttatattccccggttgggaggctattggtggattgctaattgccttggccacttcaatttaaaacatcctttgttccctttg

SEQ ID NO: 9161 - DNA, 972 bp, Glycine max
  Clone ID: PAT_MRT3847_108282C.1
attatcttcagatagttcacatgcagtagaatcagaggggattggtgatgtagtacaactagtagatgagaaaaagtattaccaatcttgctgtgttgatggagtaacatataggctgcagggtcatgctcttttccccaccagccatgggaaactaactccttctaaactccagtctatgtgggaagattgcaaaactgggttaaagtgggttaaggtgacaaactgctactttcctgatgatttgcctgggaatattggtcatccgtgtatatctgaagtcaacgaggtttatgaatctaatagtgatagaactgaaatggctagctctattcgagggccatgtgaagtcctcccatctgataaatttaaacaagagaatgacaggcgatgtcagttacgaaatgaggaaagttctagagtgcagcccattttcctatgcaggtggttttatgatgaattcaagaagttatttcaacctgtaatcagttgattatgtcttgaacttatatgttttgtggttcctacatggtgccatttttgtggtatttggtggggcttcgaacaggatatttcttggatgggtaattaagcatgcattaagattcaattgagacccattataaggcacattgcagaagcattgcctcctcgtacagagtgttttatcatttcagcatgaattgcttttggtgtaaaatatgtaactgaatctgtggactgcttagtttagctttcgctttggtagttctttttctgatagatattcattctgtataattcttttttgggcattaggctctttaggcccaataattacattattatctttgaattagatcagtgtagttcccttagtttgctgaattgtaagatacttcatttgtacaaaagccatttcttctaaaatgcataacatggcaaataggttatcaaaaaaaagcggccgctcctccaggagacaagattacg

SEQ ID NO: 9162 - DNA, 513 bp, Glycine max
  Clone ID: PAT_MRT3847_108283C.1
acaagatcaagaagcctagatataattttcatcttcacatatggaacaacagcaacgaggtttttttttttttttttttttttttttttttctcttttgcagtatgtaccaaaattgatgatttcttgtcgcacatagctcctactaagctctatggggacaagtttgaatgatacctaacagacttctattttagtagttatatttacaaattacaatatcagcacaattaagcaagttgttcatcagctacatacccttctctcctcaagtgcaagcctcttgtgtagccgctcttggtgattaaaaaattccaaaaacaaatctctcatgtcactagctatcttgaattcttgagttcttgagtgtacaaccttcaaattgttgctcgttccactctttcccttttgtaatatattctttgtaacatgcaccaatcttcctattgatgctttaatgtttttgagccccatggcttttcaagtatcacccatggccagttgaagaagttac

SEQ ID NO: 9163 - DNA, 540 bp, Glycine max
  Clone ID: PAT_MRT3847_108284C.1
cggtcgcgtgggttgagaaagactatgaaaaaatcattcgtttcttttctgttttttacggcattgctcgtcattgtttgctcaaaagaggaggaagggggcgcaaaggaaaagaagtacggcacaatcattggtattgaccttggcaccacctactcctgtgttggcgtctacaaaaacggcagagtggagataatcgccaatgaccagggaaaccgaataacgccttcctacgtggctttcacaccagactcgggcgagcgtctgatcggagatgctgcaaaaaaccagttgactctaaacccggaaaacaccattttcgatgccaaacgactcattggacgggaattcaccgacaaaaccgtccaggacgatatgaaactttggccttttaagatctacaacaaggcaaacaagccccatgttcaagtgaaagtcggtaacgaggataagcaatttgcggcggaggaggtttctgctatggttctgacgaagatgaaggaaaatgcggagtcttacctcggtcacgaagtgaaaaat

SEQ ID NO: 9164 - DNA, 342 bp, Glycine max
  unsure (1)..(342): unsure at all n locations
  Clone ID: PAT_MRT3847_108285C.1
cgaggctaaaacgttagcgcgaatttattcttagatagngcagacacgacacatgggggggggctgttaaagaataattgcggtcaatccaccaatacccaaactcaaagccatagccatggacacccaaactttaggttagaacctatcaggtaggagtcacatttcactttcacttccacttccacatctaattcccgtgcaattcactatccctactcgggcatactattggcaaccggaagaagatggggacgtgatttgtaattggagaaccgtgcgaagtggatgagggaggacactttccacgggcacaatgcggtggttccccttgagtactac

SEQ ID NO: 9165 - DNA, 626 bp, Glycine max
  Clone ID: PAT_MRT3847_108286C.1
ctcctcccgaatcggctccacattcacgtactcactcacctgtttttagtagtttcttccctattttctgttcataactcagtttgtaactatgactgctgaggttatggctcaagaggagacacaagcagctgaggttgttgttgctgttgagcccctgaaagaggagaaggttgctgaagaaaatgtgaaaccaagagagtcatcagtggaagcatccaaacccaaaatggtggagaaaagctcttcttacaaggaagaaagcaactacctttctgatctcaaggagtttgaaagaaaggctttgagtgaactcaagtcaaagcttgaggaagctatcttggggaacaccctttttgagccaaagaaggaggctttgctagagaatgaagagaagaaaaatgaaggtgaagagaaggaagaagaggaggagaaaaaggttgacgtacaggagaatgatgtgtctctttggggggtgcctcttttgccaagcaaaggtgcagaatgtgttgatgtggctctgttgaagtttttgagggctagggaatttaaagttactgatgcatttgagatgctgaaaagacccttaagtggaggaaggaatcaaagattgattctgctgtgga

SEQ ID NO: 9166 - DNA, 467 bp, Glycine max
  Clone ID: PAT_MRT3847_108287C.1
aggggctctggggtgctgagatactatttgacccagtgacttgtaaatgccttagtcaaattcatctcattcttagttttgaatttgacattatgctgcctgttgtggtgatcttatttcgtggggctgtatactgagtgtaacagtaacagtattcataaagaattcactaaatttgtatgcactatggacactgcaatgttggaccaatagtgcatatgattgatggagactactgttcatttgccctgaattgatattaactttcctttaatgctggtgattgttgttattctgccaaaagttggtttctgcaatagcacacctactcattactgggagtcatgtagtgctgggtgatgctttatttggatatgagcctgtgggtttgctgacagagaagctgtttgatcaccacaagttggttatattctctcgtggcctaaaatgttgagggatggatggat

SEQ ID NO: 9167 - DNA, 348 bp, Glycine max
  Clone ID: PAT_MRT3847_108288C.1
agagagatatcttagaccttatctcctttatttatattatagccgatctaagatatgctcgcttgtgacaggaagagatggcaagttaaacaggaataagtgaataacattccatctcccatgcaattagtcgacccctttggaccgtttggcccacacaagctctccacagaaaatttaacaaagatcgaaagcagatctatcaactcatctatttcaaaacgtatatcatacataatggcaggacctgtaatgattctaccaccaagatacttagcggctaccatgtaaacaaaaatcggagtgaaaacagaaaaactatccctttgtagagtgcatgctacagat

SEQ ID NO: 9168 - DNA, 295 bp, Glycine max
  Clone ID: PAT_MRT3847_108289C.1
ggttccggccacgcgcccgcgttcggttttatgctgttgttgcattggggggatgtactgttggaaatcatggctgtgcagtggctgccaggactggtgcctacattaaacgtactggctctttccttgttgcacgaggcaaagggggtgctgactccgtcaggttggaggcctatcctcacacgctggtgcatgttgaacaggctcaagaatacgttgacttgcaacctggacaagaggaatgtcacacaggtggggcaaccgatggggaacctacaacagctgtgtgggctgc

SEQ ID NO: 9169 - DNA, 805 bp, Glycine max
  Clone ID: PAT_MRT3847_10828C.1
ttcttgcatgcctgcagtatgatttttaaggatgaggcactgtcgggttgatacttcttagcattgaaatcctctacatggtttaggtttccttatccactacaatggggtactcctgtcttccattggaaaatggctattgtaatgtgtgtggtttccttaatctcatctgtggattcggttagtttcttgtctttctctgttttggttcctgagctgtatttttttttacttgcttgtgttattttagctaaaagctaattatctacagggcctttgtaccaacttcacaagtatgttctagaaatgttgtatttataaggttgttctttttcttggatgtgatacaggctttgatgggaaattatgatttggacctaccaggctaccactatgatatatgtttgataaaaatatggtttggatgatgaaatatgaaacttgcatatgctattttcttaagagttaaaactatttgtaaattcattttaactgcattctttgtcaatgaagcttgaaaacttttgttattaaaatgatactttatcagatccaaactttaaaaccattgttgtctacttgtcagttgtcacattgttttgtagatcaatgccttttcttttggctgtccttttttccacattaagtagataccaattacaagggtgagtaatgtagtgctggttcaagatttaggaaatgactggatcaatgacaataattctttaattactaaattttttagattttgatgctgtgaacaaccactgtgttattaatcaaaatatatatgtattgatgttct

SEQ ID NO: 9170 - DNA, 256 bp, Glycine max
  Clone ID: PAT_MRT3847_108290C.1
ggctcgagggacaattgattagaagagcatgtgcaacaaggcaattgagtagaagttattattggttttactgggatagaataagaaagataattcagatcttgctcatttaactttcctttatgtatgacatgaaacttgggatttgtttgtcaaattgaaactgaaaaatttagttaaacaaagaccaataaatgaaaaataaaaatactatgcaaagacaacaatggatattgaaactctagggaggctttcc

SEQ ID NO: 9171 - DNA, 147 bp, Glycine max
  Clone ID: PAT_MRT3847_108291C.1
gaccattattggctacaagagacagagtgatgtaatgttctaattcgtttacatgcgtgaggacagtgatgccagtaaattcatgcgaatctctatatagctggtacttatggattgacttggatacttcgttaacgtctacgttat

SEQ ID NO: 9172 - DNA, 862 bp, Glycine max
  unsure (1)..(862): unsure at all n locations
  Clone ID: PAT_MRT3847_108292C.1
gggggggcacctttaaggatttnaggaaaaaaattttgttttnnccccaaaaagaagggccttaanctttnnggagggggaancccaaaaaaaaaaanaagggaanttttgaggggggatttttggggggttnttnccccattggntaaaaangaatttnttgggnttcaaanggnggaaaaaaanttggggggttcctgaaccgngtggggattncccccttgcttgttttggggncngggngaaataggggngggacaggcccaccttggaaaggnttttttnnangnnnnnnnnnttnnnnnnnnnnnnnnccttntctaggntccatgtcgagcaagaaagcccatggaagnttacccttgagacccccntcatggatnaagttnagaaagcgagttattgttgcaagantgcaantctgtgaaggatctcgttntcancctctttgagactgcttttttaacttntgggttcagccttgatgatcccaacactttcggtaacaggattcacaggatgctgaagcttggactgagcattgatgaagatgctggtgaagcagatgctgacatgcctcctctcgaggacgccgatgctgatgccgatgctnnnnnnagcaagatggangaagttgattaaatctancttaattattgntncgcctntgtgtttttagaaacaatgattggggaacagtcttttactatgtttatgttttgaattttcgaaattttggaatgttggctagntaggnccnntttcctggattagtagtgtatttagtttctatatnnnnaatttgngtcagctttctggccaatgaatttgtgcttnncntcgtaaaaaaaaaaaaaaaaaa

SEQ ID NO: 9173 - DNA, 343 bp, Glycine max
  Clone ID: PAT_MRT3847_108293C.1
gggggtttttttttttttttttttttttttttttttttttttttttttttttttttttttttttccacagggggaaaccatataattgggggggggaaaaacccttttaatttttaaacaatgtttcttccctacaaaaaacctgggaccttaaatccgggtaaaaggaaagcaaaccgggaccccaacatttttgggatacaaaggatggggcaagtgggcgtcttgtcatttacaaaaaaaaaggtaatttttttaaaaaaaaaaaaaatctaaagcacccttgcaaactgatctagctaaacttttggacttgaaccaaaaattggagggctgggggggg

SEQ ID NO: 9174 - DNA, 247 bp, Glycine max
  Clone ID: PAT_MRT3847_108294C.1
ggaaaaacacaaccctgatcacaacgagtgcctccagagttgcgatagtgacatagactcgaacaggaaccaagcatgcgacgctcaggtgctcctacttaaggcgcacaaagaggaatgctaaggaggtgatgttctcacgacacgaccacaaccacaacacccggataggtaacctcatgcacccggtgagaaggaggaagactacaatgagcacccacatacaatcccatatccacgcccacat

SEQ ID NO: 9175 - DNA, 514 bp, Glycine max
  Clone ID: PAT_MRT3847_108295C.1
aaaaaaaaaaaaggggacgggaaaatattattaatggtcaaaaaaggaaagtaccaaaaaaccacatttagttttacctgccaccaccgggggaaaccactaggggacccgtttaagcactaaagccccaatccccctctttttattttcattaaaaaaaatttccccacattttgatttattctctcccgcgactgaaaaaccgccctggagttttttccttatactaaacccccccttaaaaacttgaggggggcccaagagggggagggtcttatcttgcaagggatgttggccccccatttcccaaggaaaaaggcttcgttccccacattaaaactttgccccatattattggcaaggtttttcaggcaattgcccccttcctgggggtgggggggggtcttccacaccccagtgaacgatttcactcccttgaaacaggcctcccacggttttcccccccttctaaaaaaactgggggccggggacccgtgggcgggaacccgccccc

SEQ ID NO: 9176 - DNA, 211 bp, Glycine max
  Clone ID: PAT_MRT3847_108296C.1
cggggctaattagagggatgctaacataatgatgaaggaaccctagtgtgtcagggcacatcatcagtgtgtgggattaggcgtagctttgctatggctacgttctttgagatgagagtgatgaggaacagtaccatactgaggaatagttgtccttgcaagctaatgcatgcttcttatcttacgcccaattatgcattaatatttgctg

SEQ ID NO: 9177 - DNA, 247 bp, Glycine max
  Clone ID: PAT_MRT3847_108297C.1
tatgctttcaagttttaccaattgggcactttgaatagtgtcgtcattaatgctttcatggtcatcaattaaaccccctaaacagcatttatcttgctagccaaattacttattaattaggcacataatgttaaacccataatcctatttgtcacctgattttaggttccaccctaccgattatgaactcattcttcactaccttagtaaaaaggtatcatccatacccttgctctattccatcatt

SEQ ID NO: 9178 - DNA, 453 bp, Glycine max
  Clone ID: PAT_MRT3847_108298C.1
aggtactgggcagaggaagagggttttgttttggtcgttggcagggtttaaggaagcgcggagaaaggttgtcttcaagaagtaagttttcactgttcaaatcaaaatctgatggcacacatcacaaaccttcccatgacgccactgatgccggccagcacttcctcaaacaacatcaaagaaatcgcgtttaagactgctccttcagcttccaaggtcgaaatcaagcgtttcctcgaaaccttctacgggttcgaggtcgaaaaggtgcgaactctgaacatgaagggcaagaagaagcgttacgcgggatcgttggtagcaaaacccgattacaagaaggcctacgtcaccctcaagaaaccactttccttctctcagaacccttacccctttggttccaccgtagaagacaagaagaaagagaatatgttgaccactactcactactaa

SEQ ID NO: 9179 - DNA, 626 bp, Glycine max
  Clone ID: PAT_MRT3847_108299C.1
aggagaatcctgctaatgaagctgaagaaaaagagcctgaggataaggagatgactctcgaggaatatgaaaaagtactagaagagagaaggaaggctttgcaagcacttaagactgaggagagaaaggtagatactaaagtttttgaatccatgcagcagctgtcaaacaagaaagacattgatgacatctttattaagctgggatctgataaggacaagcgcagagagactcttgagaaggaagataaatccaaaaagtctgtcaacatcaatgagtttctgaagtccccagagggtgaaagttactataacccgggtgggcatggacgccgtcatggtcgtggacgtggtgcaagaggaggttatggtggctatgcaactgctaacattccagctccatcaattgaagatcctgggcaattccctactttgggtgtcaagtgagaatttccagtactgtgctgacatttttatgtactacctcctctcaattttggttcactgctttgaagcaggaaaaagaactatggtaattgcccatacaggaaatccaatttttttttataacgtcttaaaatgtaaatttagattggttctttgtgccccccttaatctcttataata

SEQ ID NO: 9180 - DNA, 148 bp, Glycine max
  Clone ID: PAT_MRT3847_10829C.1
aaaaagaaagatagcttattttaaacacctcccaggggagtagggaacaccttacacattaacttttaatttggagacttcccatggaatatcaaattttttttaatacaatattttacattggtaaacttttaaagcctaataactt

SEQ ID NO: 9181 - DNA, 760 bp, Glycine max
  Clone ID: PAT_MRT3847_1082C.1
cagtaatcggctccacctgtttcagctacttaactcactgcaaaacccaaagctcagcctattccctaacgaaaataatgtcgagagacgaaaacgcaaacggttctcagccggaaagcgacgacgacgacgaagctccggcacggagatattctaggaaatcgcgagaaaattcggatgtagattctgaacccgatagaaatttttttaattcgcggagaggaacctccgattccgacgacggggataggcgccgccggagggagaggaaatcgcggcggcactactgcagcgagtcggattccggttccgggaaagcgcgagaagattctgatgtagactcggaaaccgatagaaagcaatgcaattcgaggagaaaatcgcagggaggacgctcggattccgacgacggcgacagaacgcaccggaggaagaggaaatcgcggcggcgccacagcagtgacttcggctcggaggagtccgagtcggagcggtccggttcggaatcggagagtgaggaggagcggaagcggcgggagaagaggagaaggagagagaaggaggatgagagggagtggaagcggagaaggagagagaaagagaggaagaggcgaaggagagagaaagagaaagaggaagaggagaggaggaagaaggagaagctgaagaaaaagaagaagaaggagaaggaggagagagggaagaagggagcggtgacgaattcttgggggaagtatggtgttattagagaaactgatat

SEQ ID NO: 9182 - DNA, 308 bp, Glycine max
  Clone ID: PAT_MRT3847_108300C.1
ccctcactcgcaagcaaatagattgaatccctggcgaggagaaagatggaggggatggaacaggatgtgtcgatgggagcgaacaagttccgacttagacagcccatggtgacggcggcgctgagcacaagacgtctgcagggactaccacgatccgtggcgggctccgctggttgacccaaccgagtttacggaacgggcgttttacacatcagggattgcatagtttgcggccacttttctgtttctctacatcaccgtctgaaccgtgatgggagtcgccggggctaagactatacagagtaccg

SEQ ID NO: 9183 - DNA, 318 bp, Glycine max
  Clone ID: PAT_MRT3847_108301C.1
cccacgcgtccgacttgctcacagatatatgtttatctgtctccatcattttctcgagagcggggattttctggggtgcatctttcttcttgttaatctctccccgcctctatgtaacatcccgcttatctgaatccctttctgctcatcatctgtctttcaagctaagatattctcagtagactatgaattcagcataaagcaaacttacaaggctttttcgaaagccatgtgttctcagaaacgagatccatgttttattgccgaatttcgctagtcatattaatataccatcattgattgttcctttgaaaccag

SEQ ID NO: 9184 - DNA, 374 bp, Glycine max
  Clone ID: PAT_MRT3847_108302C.1
gtgttattacaaagaggtggaggaagctgcgctagcttcccgtggagaaatggaggtgagatgagtgagcttcttagtcgagcttcttgtcgatgttgtcgtcgacgatgactccccaggaacccttcttgcagagccaggtgatcttcttgccctcgcgagccatctgagcgtacttggtgttgcgctcaatgttctgctggatgaagaggagtccgtgctcgttgattcggacgtagcggcatccagaagcgccgaaggtgaccgggtaggtgactccgttgatctcgacgtcgtcgctgagatcgtggatggcggcgtggatcttcatcatgtcctcgttgctgagcatgatggcctccttagattcgtca

SEQ ID NO: 9185 - DNA, 525 bp, Glycine max
  Clone ID: PAT_MRT3847_108303C.1
gactgaatcgaaacaaaatatacaaggagaatacactaccatatatgggagatttgatcaatctttgagtttaaccctggggaaaaccaaaattacatggagcaataggttttaacacctaacaaaaaaattctatctaatgggcttattcacttataatcccaaattcccaatccaaagatattaaacctttttcttattcatgacctgaaatgctgtctatccacatctgcacgctaatataaatcatatgttctggattagctctatatgtggagcagcaacagctgccttagtgacaccaaaaagtctgaatattattgcagctggagcactaactccaaaacgatcaatgcctattgcttttaccttcggtccaacaattatttcccacccaaaagatgaatctggctcaatgctaactttggctgaaacagcggcaagggaaacactccccttggcggcctctgaaagcttattaaaaagattccaaaaaagaagggaaacaactataacaggcttccc

SEQ ID NO: 9186 - DNA, 466 bp, Glycine max
  Clone ID: PAT_MRT3847_108304C.1
cggtcgcttgggcggacgcgtgggatcaccattactgatggttttgacaaaactagtgcaactttgcactctagaaagttagcagattgcgattctctcaagagaaactttaggcagatgtctaatgtcttgtgggtggctcctgtaggacaaggcgagtttatggtcacaccttcattatgtttcgtgcaataatctggaaatgcaagaagcttatcttgtcaatctcgcaaatgtgtcaccagaattgtttttgcacagtccataggaagcccgcccattgagaaggaaaagctctctctcgcatcgaatggctgcaaaaagctgctgtgcctaccatatcacatattgaagagtcccattctctgcacaggacgatgaatgcccccgatccaaaagataatatcgaccaactgttgagcacgatttgttgtgtttccaggagcatgtaaagctttcccaaata

SEQ ID NO: 9187 - DNA, 400 bp, Glycine max
  Clone ID: PAT_MRT3847_108305C.1
aattcatccaattaacggtgaaccattgatccgaagcctgatcacctcagttacttccaaccctttgatctcatgatatttgtgcaacctgatcgcatacagaaccgcagctactccactactaagatggatcaaagtggacctgacatcacggattcgcttttgtggccccatgctctaatgccgaccctgttaggaacgatcagatcaccgtgctagctgcggtctctatccggcggatggcactgtggcgatcttcagtctctgcctcacagtctatgtgatctcttccttgaacgagagagccccatcgactgatctgatgatcatcttgacgggcctcatgatcgagccctatcagctccagactgctgatgtgttggccagatctactcaaggc

SEQ ID NO: 9188 - DNA, 401 bp, Glycine max
  unsure (1)..(401): unsure at all n locations
  Clone ID: PAT_MRT3847_108306C.1
cttgcttttctctcgcaacacctcaaatccatatcattttcacgtctctttttacacttatccttcgcaattagcctctgcttcgttgaaaccccttttctctttctatgcaaagacgatttcacttttgttttttcccccacacgctcaactaagtaaaccctaatacttactcgcataaagtatcgggtatattcagttatgaactccaacaagttgttgctgctttcatatttccttgtaattcattttgcacgcgctgtcgctaggttttttaggcatcatatgtggtgcacgtttgctctggggtgattatgtgttgcagacttcggctcatagagaactcatagtatggcttaattagcgntgcgtgagcgactggtcaacacggcagagttttt

SEQ ID NO: 9189 - DNA, 1149 bp, Glycine max
  unsure (1)..(1149): unsure at all n locations
  Clone ID: PAT_MRT3847_108307C.1
ttgaaaaagtaaataaaatgtacatctaataaattgtgtacctcttaaaaaaataaaaaagaagcaacatgaaaaaactaaaaattatgcctttcttagttcaatagcaaaaatctgctgcttatgaatcgttaaagtggatcaagtatcaaagcaaaatctctagatgcgacagaccaaaagcaaaggcattataatccatcctgttaaacatttcaagtctagaaatgagaaacataaattgtatatgcttttagcagaaaagaaaaatttacagcagccttaccgagaagccatcacaagatgcattaccctttgcttctgaaatgaagattgttcaacaaggtcaagggtgaattcatctcccgcagcaacacgatcctgggcatcgatagcatcaagggcttcttaaaccacttgtaaagcattactagccttttgcataatgctagatcagggnacagtctgggactctgctggctgagcaactgcttcatgttaaggtgaggcttgctctctgtttggtacattacctagtctnactaggttgtgaactaggaatatttgattggaccacttgttccctttagcaaactgcactccagcactcaccaaattcataatatgcattataatactgtggaaactttcncagatgcaccacccaagggatgtttgtgtggcatctagtaggagaaatatccgctccctcacaggcaaatcagactttttcttcacaatttttactagaataggaataattccagtatcaatcacctgctcatgaatatgctctccaatattgttcatcaacatttccagcaacatgacagcaaagagttgagtattggagtgtttgcttcctagtctcttttttatagctttaacaacatctcttgcttcccttttatcatgagcaactagctcacaaatttcaatattttttgtccaatcagtttcagccagcttctcgcttgttgcaccattgactagctcagccgccatctttttctagataatgatctttatgaatagcatgaacggagaccaagaaaaactgtgaatacggatacaacgatagagatgacgaggaagaagccaaggaagcactgataggccctaaagagcttcagcatttccggacgctgg

SEQ ID NO: 9190 - DNA, 389 bp, Glycine max
  Clone ID: PAT_MRT3847_108308C.1
ctcatgaatatgctctccaatattgttcatcaacatttccagcaacatgacagcaaagagttgagtattggagtgtttgcttcctagtctcttttttatagctttaacaacatctcttgcttcccttttatcatgagcaactagctcacaaatttcaatattttttgtccaatcagtttcagccagcttctcgcttgttgcaccattgactagctcagccgccatctttttctagataatgatctgtgaatacggatacaacgatagagatgacgaggaagaagccaaggaagcactgataggccctaaagagcttcagcatttcatttcaccacggaagatcaagtgccaccaaaccaattctcttgctttttctcttttttcttaac

SEQ ID NO: 9191 - DNA, 382 bp, Glycine max
  Clone ID: PAT_MRT3847_108309C.1
aaaaaagagaaaaagcaagagaattggtttggtggcacttgatcttccgtggtgaaatgaaatgctgaagctctttagggcctatcagtgcttccttggcttcttcctcgtcatctctatcgttgtatccgtattcacaggtaattcttgacatgctgttcagatttcgattgctattgtaacatgatgacatttttcactttggactgagctcattttactggaagatcattatctagaaaaagatggcggctgagctagtcaatggtgcaacaagcgagaagctggctgaaactgattggacaaaaaatattgaaatttgtgagctagttgctcatgataaaagggaagcaagagatgttgtaaagctataaaaagagac

SEQ ID NO: 9192 - DNA, 865 bp, Glycine max
  Clone ID: PAT_MRT3847_10830C.1
atcgtataaaagctcaaatccaaaccctaaaataccaccgccgttctcatctctcttcccagccctcacctcaacgctgcatcttcacgtcgtctcacgatatttgaaggtttcagtacttattcactcgatcccctttaaagttcaattaacgtcgtgttaaatcgcataagcatcttggtgttgatgcagaggtgcatatagtagagagggaaaatgagtcgaggaggcgcagtagcagcagcgaagggaaagaagaagggtgctacattcaccattgactgtgcaaagccagtggaagataagatcatggacattgcttctctcgaaaagtttcttcaagagaggatcaaggttggtggcaaagctggtgctcttggtgacagtatcactgttacccgcgagaagaccaagatcattgtcacctctgacagtaacttttccaaacggtatttgaagtacttgacgaagaagtacttgaagaaacacaatgtgcgagactggctcagagtgattgcttcaaacaaggatagaagtgtttacgaactgaggtacttcaacattgccgagaatgagggagaggaagaagattagttgtctgataatcttatttgcttgtgttttgtttacccttttcctatacctagctttctttttggcaaatattgcttgagatacgatgctttgtttttatcagttgcaatttaacggttttgatcatttaagaattgcggtactatcggtgttgaattgggaacagagtttacatattattcattgctgtttcagtctttaaaattgtattatgtttctttcaacaatctcgaataatttacctttgcctacctccaaaaaaaaaaaaaaa

SEQ ID NO: 9193 - DNA, 917 bp, Glycine max
  Clone ID: PAT_MRT3847_108310C.1
tatataaaacgttaaagatattcagaagcagaaacgaacagtcaacaaagttaatatcaactaaattaaattcagcggttaaccaacaaagccttctgatagattttccaacaaaagtacacagtaaaataacaatttgggacatgcaattacaaatataaagccaaaaaataaaaaaagcaaagctataagtaataaataacaacaattgaagaccaaattgagaaccaactttttcacctttatgaatagcatgaacggagaccaagaaaaactacaagtgaaacaaataagaagaatttagaggccaatggtttgtctgtagatataatttacagtagaacattatagcatcatttgatccatattgtagccaacctcatccagtgaaaaaaaaaactttttgttttttgttgtcgttgtatgaatagcatgatagaatgaatgtagagtacctcttcagatttatgagaagccagtatcacacatagttttagttaacagccagtctttaagcaagtataaagcaaaaatttggattccatatcaatcagacaggtaaccatcatgtacaataatctgcagggaaatggatggtgattgaaaacaaaaagttgctatcctgacatgcataatttgtaacaaaaatcaaatcaccttccagtaaaatgagctcagtccaaagtgaaaaatgtcatcatgttacaatagcaatcgaaatctgaacagcatgtcaagaattacctgtgaatacggatacaacgatagagatgacgaggaagaagccaaggaagcactgataggccctaaagagcttcagcatttcatttcaccacggaagatcaagtgccaccaaaccaaatctctgctttttctctttttcttaaccggacgcgtggtcgagccggttttccgga

SEQ ID NO: 9194 - DNA, 414 bp, Glycine max
  Clone ID: PAT_MRT3847_108311C.1
aatgaatcgataagcaaccaaactgacgtggccctgagcatctcaaagctgcggtatacgggaagaagctagggacacgaacctcctatattctacgttgtcgatgcacgttgttctgagcatcatagtggctggctccaaagaccccacactcgatcaacttctctccttcctccaatccaaatccaccgatcatctaaactccttcgcctatcagctcttcaccgaagagctctccgacgcactctcccgacggaagacctcgcatcttcatcgccgactgcgtatgggttgagcaatccctcttaattgtcccttccttcaaacaacttgtcaatgctgattacaacgccagtttggcttcaattgatttccagaccaaggctgttgaagtgttcaatgaaattaattcat

SEQ ID NO: 9195 - DNA, 169 bp, Glycine max
  unsure (1)..(169): unsure at all n locations
  Clone ID: PAT_MRT3847_108312C.1
ccgttcctcgaactcttaaactctaacacgctgaaaacctccgacttcccgaaaaatcgagagatgtaccgctagcggcctactgcactcgtngaatctgtntagttaaaatcgccgataacctcgttcaatcgccgtgtcgcgatacaccaccacacagacactttga

SEQ ID NO: 9196 - DNA, 875 bp, Glycine max
  unsure (1)..(875): unsure at all n locations
  Clone ID: PAT_MRT3847_108313C.1
gctcgtgtcactttaataaatatattatagtgtatgaccatgtgctatcccgtgtataacttgtacaggtaaaagacacgcactgtcacctcacaaaaagggtgagaatgaatcagaagaataacacctttttttttttgtacacaataaaatattttctttcattccatctgtgctaacagtctacaaaattcaatgtccaaaatatgataccaccatgcccaacataataacggggaggaaaaatgctagcaattcaaatctgacactcttttcaacactatcggataaaacctcatgttggtcaacttatataggattgggtttaagttatttagtgatgccaacacaagatttcacctaataacaataaaatgttgaaaagtgtcaacgagtaagttaccaacattcccctatggtggaatggccttcaaatgtgctagtactattttgtttctcattaagcaagacggcaaaaacagaagattcactattcctataaagtttgacagcctataatctatttgtgcctgcacctaacaagtaatcagacattgcaatatactcataccttatttatcttccagaacaaaagttcgatttaggtccaactctcaaaaacctgaaacttctttgtcaatagaactgcttccaaaaggtggaaatatagtacgatttaaaaaatcatctacatgttgaggccttgtgacagaagcaaaactgggaccaaatttcccgtgaaccaacctgactntcaatcggttcctaaatctttagttaacagttcaatacccctttgttttgctgcatcaacagcatcttttgcatctccactggtcatatacagcttatagaagcatttcacaacatgatag

SEQ ID NO: 9197 - DNA, 383 bp, Glycine max
  unsure (1)..(383): unsure at all n locations
  Clone ID: PAT_MRT3847_108314C.1
tcctcgcgcccgcgagaacaaaaaaataaaagcgagattcgctccgcgatccgcaaagcgcaaggaaaagggacaaccaaaagagcgaacggaagagaagagggaagaagaagggggagaaganggggaagccgcncaccaagctggncaccaggaaggaagcgaggaaggaaacgaggagcctgaaggcaggcggcgaggcagccggcaagacaaccatcatgcacaagcaaaaggttggcgaaatccccaccactatacccaccgtcgagactgaggaggacactgacgagaacaagaacgtgagctatgctgggggggaggacaggggccaggacaagagccggccacagtggaggaacaattaagagaaacactcaggg

SEQ ID NO: 9198 - DNA, 939 bp, Glycine max
  Clone ID: PAT_MRT3847_108315C.1
ggctcgaggtgctaagaagcaagataaagagggtttctagagactgccttatagccatttcatggcttggttttcaaatatcaaaaagcccagacagcataagttattctgcatctgaggttatactaagtggaattgagcagtttctgcatcctgggatagagtcagaggaaaggcttctagcatgcatgtgcatgtttaattatgctctagggaaagcaaaaactaatgcatttctcagaaggagtaaaggaatcactaagacgcctttcaaatataatttggatggcggaggaattacacagagtagccgatttcttgctgccaaacatatcacgtatttcttgcgttcacacacaaatcctcgaggcaggttgtggcttcagcttagctgtttgctccctcatctacttcaagggattgctgttcagtggatattcagatggatcaatcaaggtctgggatattagggggcactcagccagtcttgtatgggacattaaagagcacaagaagtctgtgacatgcttttcacttcatgagccgtcagacagtcttttaagcggttccactgataaaaccataagggtttggaaaatgatccagagaaagctggaatgtgttgaagttatagcattgaaggaaccaattcatcatttgcgtgcacatggtgaaacaatttttgcaattagcgaaagccacggattaaagctagttaatggatcaagagtgaccaaagatattttgaaaggtaagcatgtgaagtgcatgacagtggctcaaggaaagttatatattggatgcacagattcaagcatacaggagtattccacaacacacaaccgtgaactagaaatcaaacccccaacaaggagttggaggaagcaaagtaagcccatcaatgcagtagtagcatatagagactggctctatagtgca

SEQ ID NO: 9199 - DNA, 277 bp, Glycine max
  Clone ID: PAT_MRT3847_108316C.1
cataatctatccaagccaaaaaattttcgggccctaaattagaaatttggccaactaatgccggctcttacaattccttcaggggcccttcccttctggttgaatatgactttacccccaaacgaaaggaccatttcaggcttaccccccaggaagggtatacggcaaatacccctttacctcaatttcgtcgaccccaatttttcggccagatctttagccccctgtacatgggatgcctttgtcccccgacccggttgaagctacagcctaattc

SEQ ID NO: 9200 - DNA, 393 bp, Glycine max
  unsure (1)..(393): unsure at all n locations
  Clone ID: PAT_MRT3847_108317C.1
tattcggctcgagatgagaacaactaatatgatatcaaatcaccctcatcttgagagagagagagagtgaagtggatgatggagagagtggacgagacagaggtggttggtgcgagtgtgctgcacggtggcatgatcattactatggtcgtggagcctcgagtgtatagggtcgggggcatcgctggtgaacatgatggattcatagcaatgcgtcaatgtgctgatatccttgcagtgcagtatgctgtctcctactggattgatgatctgctcgggcatatgttactgacaggatttattgtcacctagcgttcatagctcccagcanacggccagaagcatagctgaccacgtggattcaatgtcctggatgcttgagcgcatgttgtc

SEQ ID NO: 9201 - DNA, 262 bp, Glycine max
  Clone ID: PAT_MRT3847_108318C.1
gggaggagctggtgcaaagaatgctatgctcatgaatttgccaaatgctgttctttcaatgtggagatattttgttggagatctcgtctttgaagtgtctaagatgacttatgcctacattaaatgtacagtctctttcttcatatgatttgcaaagtaggctgatgataccatcaattctgaggctgtccccatcatgctgtttcagtctggagagattcacgaaaatgtcgtattgaaattttcactagaaggaattctt

SEQ ID NO: 9202 - DNA, 713 bp, Glycine max
  Clone ID: PAT_MRT3847_108319C.1
attcccgggctcgacccggacttccgctactccttagtttctctcttcacatatcatcatacttagatagtcagatacatcacccaataattaaattaaatacatgctagcactttaacagtactcctttctctaatatctctctcatattttcctttctgcggatattcagctaattaaactaagtcactaagatgactgagggaaagctagttgaagctgcagaagctcataagacacttcaggatttcgatcctccaaagaagcgcaaaaggaacaagtatgcttttgcttgtgctatgctggcctccatgacttccatcttgcttggttatgatattggagtgatgagtggagcagccatatacataaaaagggacctgaaagtctcggacgagcaaatcgagatcctgctcggaatcatcaacctatactctctgataggctcatgtctcgccggcagaacctccgactggataggtcgccgttacacgattgttttcgccggcgccatcttctttgtcggagcacttctcatgggtttctcccccaattattcctttctcatgtttggccgtttcgtcgctggcattggcatcggctacgccctctgatagcccccgtctacaccggcgagggctgcccgggctgctgtggggggtagctggactgcttggcgtgggggtgggttggtggggggggtgtgggtgggg

SEQ ID NO: 9203 - DNA, 343 bp, Glycine max
  Clone ID: PAT_MRT3847_10831C.1
ctcgagccgttgtgatcaaacgatgcagcagaagagatattctgaccctgaacgaactgctagcttgctttgcgaatcttgccttataagaatatacgtccaagattctactgggggtcacgatagcataaagtcaaggggggaaacagttgaagcacagaatccggatggactgacagataaagtgccaaaagatttacagcagataatggatacagcaatcacgattgaaaaggaactagagaacgtgtgcaagaagcgagctgctagaattgaagaactgaatgagattgggcagaaacttaaaggagagcatgcagcaaaatctctcatcattgtgtgt

SEQ ID NO: 9204 - DNA, 365 bp, Glycine max
  Clone ID: PAT_MRT3847_108320C.1
aaaaaccaccaactttgtataaccctgcagagttttttctgttcctctccctgctgctgctgcttttgcagtctctgggggattttgctttgcgtttttttatgtgtcaattggtggcggctttcaagaggtggtggctattattgtgctgagtttacatttttccaagaatcatatataggatccacatttagacactgcttttgtggataagagagacaatgttgtctcagaagcaagcagaggaagccatagtcacaaacgagacagaacataaagttggcagcactagggaagaagagaaggagcaaggccactccattttcagcctcaagagcatcctttggcatggtggttctgtttgg

SEQ ID NO: 9205 - DNA, 233 bp, Glycine max
  Clone ID: PAT_MRT3847_108321C.1
cacaaaatacaaacgttcaaattaaaaaatctcttctactagaccaaatgcaaaactgggtagggtcggctgcactgatgctcctcacaaaaaaaaagagctttaagaggctaaaactgcatacaccaataacttcatccccttcattggatttgacaacactcgcccagtgctgcgcatcaacttctttttctacaagcccccaagcttctataacatcgcaaaatttgcaa

SEQ ID NO: 9206 - DNA, 693 bp, Glycine max
  Clone ID: PAT_MRT3847_108322C.1
ggactcaatacgctactgagtcggtttctttctcgagtcctttttttctttctttcttttcaatagtaaacgcaaaagctcacaaacaacacaatttctgctgggtcttctcttcggggtcagactctaaaagcaagcatctatctaattgatggaagcgtgttttcgtaattttatttcattttagtttttgttattatttcatgaatcatgatcatcgtcttcttctctcgacaaaaccaataagtgtccacttcttttcacgttttcaatcgttctagtctttgttctttgatcttcattcattctttttcgatcacatcattcttaacgacaccattaattaccaccttcagtttcgttaacaatcaatatttttttttttcaattttgttttcaaacattgaagtttaaccttctttgaaatcccatcaccaccgttatgttgccaagaaacccttcatacacaaacccagaaccctgccagcaccttgctgagtacaagctcaagcatggcttcaatggctacaaagccatccaaaagctcctcgtgacctctccaattgggaaaaccagtgtgaagaaacccaacacaaagacattgaaaggactgaactttattgtggagtgtgccgtgatcaattgtatgaccctgattttgaccaagttgtgatgtctaagcactcaatgggg

SEQ ID NO: 9207 - DNA, 825 bp, Glycine max
  Clone ID: PAT_MRT3847_108323C.1
ggctcgaggcaaaagctctcaaacaacaatttctgctgggtcttctcttcagagtcagactctaaaagcaagcatctatcttattgatggaagcgtgttttggttattttatttcatttcatgattcatgatcatcatcatcatcttctctcgacaaaatcaataactgtccacttctacttcttttcacgttttcaatcgttcttgttcttgtctttgttctttgatcttcattcattcttttttcgatcacctcattcttaaagagaaaccatcaataaccacccttcagtttccgcaacaatcaatattttgtttttgttttcaaaagattgaattttaaccttctttgaaaaaaatatcccatcaccaccgttatgttgctaagaaacccttctttatacacaaacccagaaccctgccagcaccttgctgagtacaagctcaagcatggcttcgatggctacaaagccatccaaaagctccttgtgatttctccaattgggaaagccagtgtcaagaaacccaacacaaaggtacccagatgcggtttctgtaatgggtgtgaagggagattctatctatgcctgatttgttcttcattttcatgtttggatcacacccttttgcaccctcaatcagaaacaggtcatgctgtctttgtggacattgaaagggctgaacttttttgtggggtgtgccgtgatcaattgtatgaccctgattttgaccaagttgtgatgtctaagcactcattgggggtggcaagtggtgtcactgggaatgaaagcatttgccagagattgatcaagaggaggagattgg

SEQ ID NO: 9208 - DNA, 230 bp, Glycine max
  Clone ID: PAT_MRT3847_108324C.1
tttttaaattatccgaatttcgaaccacacaaccatatacccctttatcgtccctcttaacgcgcgagacccttagaattgaggtggaagcctcagattttgacccttcaaacgttgaatcgacgaacgtacaagttgagggactcgatcgggagtggataaacgcgttagcgaaaagagaagaagaacttgattgttctgggcttgcaaagaggtgttatcagaaggag

SEQ ID NO: 9209 - DNA, 324 bp, Glycine max
  Clone ID: PAT_MRT3847_108325C.1
cccggtcaccccgtcatagccattaggattcgcatcaagagcgatccaatcatggctccgtcaagatctcagccgggcatcgtctcgccagagatcgagaggatcaccttgcacaaccctatcgcctttacagccagggtttatgccgctcctttcctctctctctaccccttgctctactttgcctattatcaccgttacgatcaatggatcaaatctgaagaatggacattcgtctactgcgtcctcctcggtttcggtcacgccctgacgtttctgtccacccgatggtcagtagggatccgaactcgtgtggagaacacc

SEQ ID NO: 9210 - DNA, 188 bp, Glycine max
  Clone ID: PAT_MRT3847_108326C.1
cttggctcgagcgataggagaggagagaatttaggattattaggggttcgaattctttagaaggggttgaaatcatattgcaagaagatccgatcgttcgacagaaggctctggtacggagttgtagtaatatctgccgggggagggcgcacctgaggacaattgctctctccaagccaaccaaagta

SEQ ID NO: 9211 - DNA, 466 bp, Glycine max
  Clone ID: PAT_MRT3847_108327C.1
catccggctcgagaattaaaccagcgcccataagggtttgggtgttttattggcagcacactcctatggacgaggattgggacaacacttgtgaacatacaaggtgagcgaaaactatacagaatggcaatgcacttgatagaccggaggaagtaatctgattagaaagagggataacgatccaacctacatttgctacgttatttcccgattggaatacggagagggatcagactgcaaaggacttagcagctacccacctgataccaaactaggggcctcaagactgatatgcacaccctcatgaatgatagcatcttggacatgaacctcatgatgacccagtccttgtgacgccatcgatggctccccaatgcgaatgccctacggatctagggggctcctatcaccacgcgataagtttgtgaagggggtcatatacatcatctcaagaatttacatccac

SEQ ID NO: 9212 - DNA, 253 bp, Glycine max
  Clone ID: PAT_MRT3847_108328C.1
gggggaaaaaaaggacaaaattttttttgaaaacctttttggaaatacaaaacattcgggttttcaacatgggtaccttttctcacatgggtgaccttattggctcattttcaactcacttgggactaactttaactgggtgcgaataaatttggccgcagcaaccattttggggaggggaggtttgacctcagtgtttttgcgtgtcttaaggccccaatttgggttgacccaaaaaatgctttttttaaaa

SEQ ID NO: 9213 - DNA, 792 bp, Glycine max
  unsure (1)..(792): unsure at all n locations
  Clone ID: PAT_MRT3847_108329C.1
atttgtactcctcatcagaagacaaccaaagtacacaaattgcacacaatcatgaaggaaaacataactgttactcaacaacaacctctacattcatcaacacttngagaaatacatacggtggttgcgtgtgtccatttatacaatccttcttctcgtttgccaatgttcagccactcttttgggaaggttttactttgacaaaggtggtaaaagcaaatggattgaagcatttgttcaatcagctggattccctataccaattccactcctattttactgtccaaaacatgcaaaatcaacaaacgatcctagtaataatgatacctccgaaaccaaaccaaaacttctcattatatttctcttgtacctagtttttggattattgttagcagccatagactttatgtatgcatgtggacttttataccttcctctttccacttttgcactattatgtgcatcccaattgggcttcattgcagtgttgactttcttcatcaattcccaaaagttcactgcactcatattaaactctgtagctgtccttagcatgtcagttatcctaattgcactcaaccctgaatctgaggacacaaagcaccatcccagagagaagcaaataattgggatcctctgtgccatagtctcatctgccacgtttgcactccatcactctcttgtgcagcgttgttttgagaaagtataaagactaaaacctttgctactgtgttaagaatgaatttttacccaatgctcgttgcttcagtttttggcagtgtgnggttgttt

SEQ ID NO: 9214 - DNA, 351 bp, Glycine max
  Clone ID: PAT_MRT3847_10832C.1
cgagcaattttaaaaataagaaaataaaaaacacactaaaaaaattcatcaagaaaaaggatacaaaaaaagaaacataaaaaacacaacaaaaaaactaaaaaaaacaaaacctaaacataaaaaacgcggccgcccaaagggttccaacttaacttacccgtgaatgcaagttataaccccttcaaaagtgtccccaaatttcatttcacgggccttcttttaaaaacttcttaacgggaaaaccccggctttaacccatctaattccccttgcagaaaatccccttttcccaactgggtttattaccaaaaaggcccgcaccgttcgcctttccaaaaatttgcccac

SEQ ID NO: 9215 - DNA, 199 bp, Glycine max
  Clone ID: PAT_MRT3847_108330C.1
gggggttgaaattcaaaacaaaacaaaaaatggccatttaagacctatttgtggcacattaaaaaccaagggtgtctgattccatgcgggattttatacattctataccctaacaatgcccgggacagtttaaaaacaatttcaagtttttacgctattttttggggttgtttaaaacttgaaaagcaaaaattttggg

SEQ ID NO: 9216 - DNA, 845 bp, Glycine max
  Clone ID: PAT_MRT3847_108331C.1
tttacaagaaataaaggagccttctatttctcaaaatgaaactaaacgcacttaagaataattacttgcagttcctattcaagtcagattactggccctacctatcgcgccccacatcattacttgcctgatataaatgaagttttaacttcataccacagacagattaatgtatctaaagcatcttcatccaaagagttacaatcctctattcttgagatagataccaaggtcttcaaccattcttcatgaagggttgagaactctgatctctgttcgcttgacctaaaactttgtccaattgattttttcatcttctggcttggcttagaagcaatgtttaccgttttttctgggattccagccatgagggcaacctgcaacccgtagctctctggacatggtccggaggcaagccgatataggaaaactagttcctgatcacgcatggagtgggtatccgattttgaattgaaagcacaagccatgtgttgcattataacacgtggatgagaagcaaactctttcgtgagtggatggtagtgggtggcaaatagcatgcgacagttaactttttcaatcagatgccggaatactgcataagcaatggcatagccatcaaaagtgcttgttccccgacccaattcatcaaggataacaagagaatcttgagtagcattctgaagcaccgatgccgtttcagtacactcaataaagaaggtactctcgcctgtcatgattctatctttggctccaagtcgtgtgaagatgatatccacagctgagagagcacaactttcacatggcacataacagcctagcggacgcgtgggcggacgcgtgag

SEQ ID NO: 9217 - DNA, 383 bp, Glycine max
  Clone ID: PAT_MRT3847_108332C.1
accgattgctagaatggaatttcgatgctcagtcatctcttttaccattctcttctctgtaagtgctttggtgctcagaagcctttagatattctatttttcgtgtctttatgagctcttgctaactagtttttcataagtgttcagaaacttaaacaacaattattaataaatgattctccatttcacatactaaaagctatccatcctatatataatgaggctctattaatgtttaatatcaataaaaaggaatttcattaaaagagaaaaaaagaaatgaactatatatagcacaagaaatgccaagggtcacctacagataacaatctggcacacgtttatttaacatctgaaaaccaatatttatgtgggatatacat

SEQ ID NO: 9218 - DNA, 220 bp, Glycine max
  Clone ID: PAT_MRT3847_108333C.1
acggctgcgagaagacgacagaagggatctgtaaaaaaaaaaaaaaaaaaaaaaaaaaaaaacgggccgccgctaagacaactcgttcacccgggaatttttccgggcccgttaccggggggggaaccgatttccccaatagggatctgtttaaaggcttggggtaaccagggctaaacagtttccccgaggaaaatgtataaccccccagatttccccc

SEQ ID NO: 9219 - DNA, 1701 bp, Glycine max
  Clone ID: PAT_MRT3847_108334C.1
tgaaggttggcgttgggtaaggttgcagtgcaacaaatcctatgctgcaaagaataaaattgcagaaatttaaccatcccatgcattcccttttacgatgagagcacagtacatacatgcaaaatcgttcatgattttctgaattcatgccattcatcacagaccacagaaactgatattggaactgttgaatcttgatccactttggtcctagggcgtttcacttagggaagatgtgtacatgatactgcgccttgatggacagcttctacgatgaaggctgagtctgcgtaattcgaagcaaagtactacaacaaagccaccaatggtgcatacaggggagaagaaaagaaagcagccgattgtgttggcacttcagagagtgcaaattttcttaaattttgtttttcctgtcccaagtgtcattataatcctggtatcaccgtcgttggtaatgtcccacagcaatatttttcttgactattaaactaaacactgtactttcattcttgccgagatctaaaacttattagtgaagtccaagcaccatttcgtggggttaggagattcttttatgtagcatttacagcagctgcaggaataacattgttttttactgtgcccaggctattgcgtgcaattaatggtggtgatggtgctcctgatctcttggcaactgctgggaatgctgccattaatattggaggtatcgttgttcttgtggcattattcttttgggacaataaaaaagaggaggaacaactcgcacaaatatctcgagacgagacactatcaaggttgcctttgtgcctttcaactaatcgtgtagttgaacttgtgcagctacgggatacagttcgaccagttatattagcaggaaaaaaggaaacagtttctttggctatgcaaagagcagagagatttcaaactgagctccttagacgtggtgttctgttagttcctgttatttggggagaaggtcaggaaacaaaactagagaaaaaaggttttggcctaaagccaaaggctgctgaagctcttccatctattggggaagattttgagaagagagcacagtccataactgcaaaatcaaagttgaaatctgaaattaggttcaaggctgaggttgtatcaccagtggaatgggaacggtggataagagatcagcagaagtctgaaggagtttcacttggtgaagacgtgtacataatacttcgcttagatggacgggttcgaagatcagggaagggtatgcctgattggcagcaaattgtgaaggagctaccaccaaaggaagcatttttaagcaagatagaaagatgagaagtattgttgagaattcagacggttcaaattttaattattattttttttcctgtcccaagtgtctcctggtatctccgtcgttggtaatgtcccacagcaatatttttcttggccattaaactaaacactgggcatccattcctccacgatcactacagactttttttttgggtataatgttttacactgagatttaaacctataacttcatgtatatttcaattcccaccactagggcgaccctaatggttctatcactacagacaattgcaaagtaaatgttacgaaagaatattaatattgataaaatattttgatgacaaaaaaatattgtacttaattcgtcaaaaataaaaatgatgtacttaagcg

SEQ ID NO: 9220 - DNA, 618 bp, Glycine max
  Clone ID: PAT_MRT3847_108335C.1
gagggaccgcctttagtagaatgcgagacctatagatttagaggacattcattggctgatcctgatgagcttcgtgaccctgctgagaaggcgcattatgccggtagggatcccatctctgcactgaagaaatacatgattgagaacaaattagccagtgaacaagagttgaagaccatagagaagaagatagaggagattgttgaggatgctgttgagtttgcggatgagagccctcatccaccccgcagccagcttctagagaatgtctttgctgatccaaaaggttttggaattggacccgatggcaagtacagatgtgaggacccaaaattcacccaaggcacggcgcatgtctaatgtttttcatgtctgacatctggcatctatctgtttggagttttcagttttagattcatgttctttttcttatacttactagaggatcaaacgttacagacaaaatgcccttcataaaatataaggaggatttgttctttaggttcacttttctttttcttctattatatttattaggtaaaattgtaaatttagtctttcatttgtctcagaattgcaaatttggccccctatagtttaattcatgaatttagtccc

SEQ ID NO: 9221 - DNA, 862 bp, Glycine max
  unsure (1)..(862): unsure at all n locations
  Clone ID: PAT_MRT3847_108336C.1
ctggacccccacaagatcgcccttagatacctcaagtcttgcttcctccccgattttctctcctgtctcccctgggactacttttacaaactctcctccaacaacgagctcgtccgctatcttctcttgataaggctctgccgtgctttcagagtcacccaattcttcgacaccctcgagaagaacacccgtgtctgttacttgttctcccgtatcctcaaactctttgtcgttgaactttattgcacccacactgccgcttgcttattttactatctggcaactaccgtgcccccttcccaacactcttatacctggatcggtagcttgaagatgggtgactatacttattctgacttcactcatattgatctttggaagcgttacgtcacctccctctacttcgctattgttaccatggctactcttggctacggagacatccatgccgtcaatgtcagggaaatgatatttgtcatgatttatgtctcctttgacatgattctcggcgcttaccttctcggcaacatcactgccttgattggccagggatctaagaccgagagattcagagatcaaatgtctcatattgttaactacatcaataagaacaatttggacaagcagatatgtcaccacattaaagatcatttgcgcttaaagtatcatccaagttacaccggatcttctgttctccaggacataccaaccactatccgcacaaagatttcgattagtttgtatgagcagttcattcaaaaagtttctcttttcaagggannntcttcagggtttataaagcagattgtaagacattctttacatgctcacactannncatcagagtggcatagtcggaatt

SEQ ID NO: 9222 - DNA, 382 bp, Glycine max
  Clone ID: PAT_MRT3847_108337C.1
tgctcgagtcttattatttcagttttgcatatggttcgaatttgctaatagctccaatgggtactattgttgaagctgatgacacatataccaagatcctatgaagatggccaggcttttactatggcatggtgcacatgctcaatgacataactgctgcttgctggctcacctatttattattgaccttgacagatattggactttcacctagcatacagatgctccacagaagaggagaatgaacaagttactggcttagattattaactatacagctctggcatagcacggtagagacgacacaactccaagaccccatggagagaatgcagctgatgtgatgctttcatgtcccgttgctgatggctgtgtcccatac

SEQ ID NO: 9223 - DNA, 418 bp, Glycine max
  unsure (1)..(418): unsure at all n locations
  Clone ID: PAT_MRT3847_108338C.1
ccacgcgtccgctactggcaactccgttaataacaacactcaaaacccaaacgcacttagatttctattttctactttcgaactcgcacctcatttccctctctatctctccgccacgcgccaccatgtcagtctcacactccctccacctccgcctcttcacccctccccccaccgccattcccacccacctcccacgggcgaccctcctcctcccgcgctccgccgcccaccgccgcctcccctccctccgcgcctcctcctccccggngntcctggtctccgncnncnncggggccccctccccgcccccctccggtccgggctccgtcggggtggtcgccgtnccggtggccgggctccggtgtgcggcttccgctggtcgcgcggggcctcgctggtctgcnctgtgggcccc

SEQ ID NO: 9224 - DNA, 388 bp, Glycine max
  Clone ID: PAT_MRT3847_108339C.1
agggaaataaactaaactttttcaaaaaataactgggttaaaacaaaaaacaaattttccctgggggaataaaaaggccttcattttccaacaattgggatagaagcggtctcctccttccccgcaaaataaagtactcttttaacctagtatttctcaggtttttatttccctaacctcagcaattgctgggtttaaaaaaacctgcctttggggaaaaccccctttcccacttttggagttaatccccaaagtaatcttcttttcccccagctttttttggggaaattttccccccaacccaattttccctttccaagggggggggttaaaaaattggttttgtttaaaaactgaccttgagcccaatttccgggtttcccacccc

SEQ ID NO: 9225 - DNA, 345 bp, Glycine max
  Clone ID: PAT_MRT3847_10833C.1
cccccgacaaaaatcacacttttttaccctaatttctttaactcccctcccaaaaaaatgatcaaaagtaaaaaagggggctcccattttttcccagggggggggcaaacaaccaaaaataaagggggggaaataaaacaaagccttttaaaaaccccaattgatccaaacccggttttgaaattaaattttaaaatttttccccggaaaggttgggccaaattgccaattccggggaacaatgttccacgggggggatgtccgtcggccattgcttgggcccttaaaggggagggtctgcccaaccaaacccgcttttgattgccaattctccccccagtgggg

SEQ ID NO: 9226 - DNA, 296 bp, Glycine max
  Clone ID: PAT_MRT3847_108340C.1
gccttcggtttcagcccaggtacactgcctacaggctcgctcactttaccaggacagctgggttaatcttgcatacaaataccagcgttatgcctagagcacgtgctagcacggaacagcacgttgatcaaatcgccatagattcatacatgcttcagccaatatctcattagcatgtatgcatcagcgcattaactctatcctgagctcatagaaaatgagatcgctatcactatggtatttccagtttcacatttaaaagaggtaatgatcctgatatgttcatatctaaaatt

SEQ ID NO: 9227 - DNA, 274 bp, Glycine max
  unsure (1)..(274): unsure at all n locations
  Clone ID: PAT_MRT3847_108341C.1
ctcgagcggcaatgtataangcctgctggctggaataattgggggnaaattgagaatgannanactgcttgcttctntgaatacnggtgttttggacctggttggtgtccatcccaacgagtaaaatgggctagagaattacaagctgaagcagcagagcagtttctcatgcatagcttcattggacccagaatcagagagnccttggcttgctcaangaatggctctgaagnttccnaattcggntaaaaatnttggggcatttgggttaaag

SEQ ID NO: 9228 - DNA, 375 bp, Glycine max
  Clone ID: PAT_MRT3847_108342C.1
ggctagaacgttgaactgcaccttctcactggagctggcattaccttcttcagttctcctcaaatttgatgtattttctatctacaacttcagtgtttattctgtctcactctcaaaacctgtgtgttctggcggtgattgctgaagaccccaatgctttgttgatccatctcagcgtcttaacgtttactaaattctgctttgaaaatgagagttgagaaaggagcaaaaaatgaaggtggatatgttggtggtttcttccacttgtttgactggacctcaaaatctcgtaagaaattatttgcagccaagtcagatttgccagagtcctcaaaacagagaagaaaggttgatggcaacatggcaatggtgctg

SEQ ID NO: 9229 - DNA, 186 bp, Glycine max
  Clone ID: PAT_MRT3847_108343C.1
caattacaagcgtggtttagtggctcacaacgaatgcattgccttgctgcttacacagcagaggaggcaccaaaagaatctgatgtttcaaggcgatgccacctcttcttccaggggcatagaactgacaaaggtagacggtggaggaaaaccagcgggcggcaccgtggggcgagtattaccctc

SEQ ID NO: 9230 - DNA, 341 bp, Glycine max
  Clone ID: PAT_MRT3847_108344C.1
ctaaaacccattttcttctccaaaaccttcgacttttctctaaccgaaacgcgcttcggaacatttcttcttcgctctctcacatcttccattgctccaactttcacgcactatcaaattccgacactactgtgtgtgtgctaatttgatcaaggaagttgataaggagccagttcagttttctaccttaacgacagaaaaaaggaccgatcaaattctatggctggtgctgtaggtgtcgtgaaggaactaaggaggcgtttgtttcaagttataatattgtattggttctctccctcagatcaaaatagagttcggagaggtagcattgttactggcaa

SEQ ID NO: 9231 - DNA, 140 bp, Glycine max
  Clone ID: PAT_MRT3847_108345C.1
ggctcgagcgcaaaagtacaccttcaactaactaacgcctcttgaaccagatccgcgctatcagtcaagcaggggcatcctttggaacgcccaaacgccatggaaaacgatggagctgctggccgccaccggagggacaa

SEQ ID NO: 9232 - DNA, 866 bp, Glycine max
  Clone ID: PAT_MRT3847_108346C.1
gcaaagaaaatagaagaaatacaattgatatgttattacgtgaattatggctgatatacaaagaatatagggataggggtaattctagggccaattctaacatttacaagcgtggatattaaacaaaaccaaactaattttggagggcaaccaagtaacaagtatcttgaatagttgcatttatatgatgaccagttctgacatgtacacgcttggtggttaaacagaagcaaaccaatttcggagagtaaccagctaagcagtagttgcagtgatgttaaagatcaactggcaagcttaaaggcatcaatgaagagtccataggtgaaacccattttaaagttgttgagaagggcaactgggaaagtaacttttggtcggctgtaataaaacttagtcacatattctgtgagaagaacacataacacagcagcaataacatcattgactcctagagctccaaaagagagagagattgtttgtgcaacataaaatccacccaacaaggagattccaccaaacagagccctgcgagaaggacttctgaagtaattccttgagaactcaggcacaagtctaataatgtccactagtctacgtggtccaccattctcttgcaccgcccgaatgcgaagtcctgctgaagatctggagacaagccttccagatacactgactttggttttaggaagtggaccaaaactgaggcccataaagatcaagcttgttgaatgtgccattagacttctatcaagatactagtaatgtcacactcaccagaaagactgcctccctaggaaactaattgcccagaaactgtgtgtttgtagcgagacaagtaaaccactgagtagagagaggaaaag

SEQ ID NO: 9233 - DNA, 447 bp, Glycine max
  Clone ID: PAT_MRT3847_108347C.1
cttaaataattttttacttttctgggaagcaaggggggcaactgtgaacaaatctcgcagttggcccaacacagcaagatggctcctatttgggaagaatcaatggctcaagacgtcagaggcatacaaggcggaaccgggttcgaccgagctgaaagaaaatcgattactgcgccaaaagcttataaagggctggaaaggacgtcacctaatccaacaaacaatactgcagatatggaggacatgcagggaacacccgggttcaaccaggagtggatcaatgctactgagaaggtcattgaaccaactgctgaccaagagaggaaatggatgcccctcaatgcaacagtgaccgaagatacgggggacatacaagccagaatcgggttgaaccaggatgggataaacgttgccagtgagccaaaagctgacccaaggaaggaaagg

SEQ ID NO: 9234 - DNA, 355 bp, Glycine max
  Clone ID: PAT_MRT3847_108348C.1
tctctttcaatccatgcctgattcctaatcctccaatccaaccacctcatcctcacactcacatatacacatatcttaactcatatcatccctcctatggcttcaaatctcatcctcaatgatctcaatgactttcacaaatacccaccaacttctttcatctcttgtccagtatcttattacatgttccattttcaatcaacaataattattcctgcttataatccttattctttatctgtattcctaatcactattcacttcccttcccattatcctttcaaaccttctaatgttacctttattactaatgtgtttcaccctaacatcaatatcaattgtaacatttttcttt

SEQ ID NO: 9235 - DNA, 710 bp, Glycine max
  Clone ID: PAT_MRT3847_108349C.1
ggctgtaaaactctctttttgaatatttaacatagttgcatatcaggatttgaactcgagaccagaaatcactggttaaactagaacaactccatgctggttgatccatccactcgactgtttaatactaaaagcacctactgaaccgtatgagttttacccaaagtcaatacacttttacctgcacaatttattattttattttacatacaagctcactttaaaagagtgtagaatctatctacaagaagactaatcgcttttcatccatacatccctaaggagttcatatctgacaggagattggttgcgaatttctttgaacttcaagctggattttgttaaaacttttggggatgaggaaacactgaagaatattgaagacaatggggacttcaattcatcgagctcatcatcacttgtgtgtgacttcctaacaacagaagatttgtttcttcttagttgagatttgcttcctatctccccaacaatgcttgcaatggaagttgctggtggtggtgaataggcaatgggagctgcaatgcatggaaagttgttgacatactcctttccatcttccatttcattctctgagttcaaagcttcaaaaacattagagggaacaggatcagggcaaagctcatccgggacaaagttgtctagaatcttcttgataagtgttgcattaaacattgggcacacctcattcc

SEQ ID NO: 9236 - DNA, 136 bp, Glycine max
  Clone ID: PAT_MRT3847_10834C.1
gtttactatttttgttattagaaatgaattgaaagcctcacactcaggggactatcccatcaattcccttcagaagagatcaatgccgatcactacctagctgtttaatatatataaactatgacgcgtttattgt

SEQ ID NO: 9237 - DNA, 376 bp, Glycine max
  Clone ID: PAT_MRT3847_108350C.1
acgactcctgtttttcgtacggtcctgactgcaacatagttggcgcaacgcttgtggctgatacttatcataccaatcctgaaaaggcagatggtagtattttagttgctgctttcagaggcggaaggcccattctggtggtcacattttcgaataccatggagcagattgaaccagacatgaattcaaggtttcagcatttgagtaccactaccaatggtgattttgttcaaggaaaagatctcgaaatggggaaaggtaatgtagcatgtgctgttgtgggcttgtcatcaaggtacactgcaactccattgaaggcatctggtttgcaaaaagacagctggttaattgacgagtattgtggagggatgcctta

SEQ ID NO: 9238 - DNA, 2011 bp, Glycine max
  Clone ID: PAT_MRT3847_108351C.1
tgaattactatcaagatctttccttcaagattttttcgatggtggcactttttatgaatttaaaattcatgatttggtgcatgatcttgctgtatttgttgcaaaagaggagtgcctacttgtaaagtcccacattcaaaatattcctgagaatattcggcatctgtcttttgctgagtataattttcttggaaattcattcacctcaaaatcggtagctgtgagaaccataatgtttcgaaatggtgcagaaggaggcagcgttgaagctttgctaaatacctgtgtgtcaaagttcaaattattgcgagttttggatttaagggattcaaaatgcaagactttgccacgttccattggtaagttgaaacacttgagatatttcagcattgagaataatcgcaacatcaagagactccccaattctatttgcaagctccaaaatttgcaattgttgaatgtttcgggatgcaaggagctggaagcattgcccaaaggattgggaaaattgattagtcttcgccttttgtggataactacaaagcaacctgttttgccttacagtgagattaccaatttgatctcgcttgcacatttgtatatcggatcaagctataatatggagtctatctttggaagggtgaagttacctgctcttaaaacattgaatgttgcttactgtgatagtctgaagtctttgacattggatgttacaaattttcctgaattagaaactctgattgttgtagcttgtgttaatctggactaggatctgtggaaggaacaccatgaagaacgaattggcaagttgaagttaaaactcctgggattcagggatttaccacagcttgtggccttacctcaatggcttcaagaaactgccaactccttgcagtccttacgtatttcaggttgcgacaatcttgaaatacttccggagtggctgtcaactatgactaatctgaaagtacttcttatatcagattgtccaaagcttatatctcggaggggtgaagttccctgctcttaaaacattgtatgttgctgactgtcatagtctgaagtctttgccactggatgttacaaattttcctgaattagaatctctgtttgttcatgactgtgttaatctggacttggaactgtggaaggaccaccatgaagaacaaagccccatgttgaagttaaaatgtgttttattcaggggtttaccacagctggtggccttacctcaatggcttcaagaaactgccaactccttacagaccttggttattataaactgcgacaatcttgaaatgcttccggagtggctgtcaactctgactaatctgaaatcacttgttatatcagattgtccaaagcttatatctctcccggataacatccatcacctcaccgcacttgaaaggttgagaattgcctattgtcctgaactatgtagaaaataccagccccatgtcggtgagttttggtccaaaatatcacatatcaaagaagtcttcattgaagaaccagaaaagctggaggaagaagaagacgaataggaatgatttgttgacacatataagtgttgaagctcctttggcaacccctggacgtggatcaggaatggtcaaaggtgaaaaaaggggagaccatgatgtttgattattgtgttggacgtgattgacgtattgaaaattgattttgggtgaagttaccctggagctgcttctgcgtcatgggagaatcaattctcagatttcaatgttgggtttttccattgtccatcaagttaatgcatgcgtgtgtttatttccactgcctattttacgttgtgcttattattttgttgttatttttatactcggatatttactgtgatctccacttctgcctgttatttttatactgttactttgctgcagaactgctatatttggtgttgttttagcattttataaggttattctgttaacattttattgggtgttgttgattcataatatcagtgttatattgcatggtt

SEQ ID NO: 9239 - DNA, 253 bp, Glycine max
  Clone ID: PAT_MRT3847_108352C.1
aaaaaaaaaaaaaaaaaaaaaaaaaaaataaaaaaaaaaaaaaaaaaaaaaaaggaaagggcggccgatttaaaggggtccagcgttacatacgcttccatgcttacgttactcctgcttccatagcgttacctcatttcaattcactgcccgacttttttcaatggcctgactggtaaaaccctgtcgttgcccaacttaatccccttgcaggacatacccctttggccagcttgcgtatttcccaagctgc

SEQ ID NO: 9240 - DNA, 1779 bp, Glycine max
  Clone ID: PAT_MRT3847_108353C.1
atcctcaatactctctctctcttgtattctttctttctagaaacaataaaaacacagaaaaaatctgaatttggaaaaaggttggtgcatcggacaagttctgagttgaatcagttccgcccgtgaaccaaaaaagatatctcttaccacaaaactcaccttttcttccatgaccatcaaaactctctcactttcactccgcatacaacggttctgatttgcctccagttccccacacagagagaagagtgaaaacatcgcgaatggggactctctgcttccctctatttgcgaccatggcaatttgggggctattgttaggagcagaatcaaaaacacatgtcggagatgcagaggttctgaaggagctgaagcaaggtttggagcctggttcggtgaagccaggctcgtgcgtgagctcctgggacttcaccttggacccatgcgacaaccttttcggcgacaagttcacgtgtggcttcagatgcgacgtcgtcgtttcggggctgagtcgagtcacggaactcgccttagaccaagctggttactctggctccctctccttcacttggaaccttccttatctacaaactctcgatctctccaacaactacttctccggtcaaattccatattccttctcaaatctcactcgtctgagccgactcagtctctcgtccaactcgttctccggcgagataccctcttctctcggcacactctccaacctccaagagctttacctcgacaacaacaacctgcgaggaacaatcccacaaagtttcgacaacctgcccaaccttaaaagactcgaactccagtcaaacaaactcaacacccgccttccaaacctggggtccctaagacaccttaaatttctctacctaagcgacaactccgtcactggaacattgccggcttctctccctgtttccttggttcagatttcactcaggaacaacaacttaagcggtgtcttagttggtgaaagtttcaagagcttgacgaggttgcaggtggtggatttcagctccaaccaattgagtagtgctgttccctctgttttcttccagcttccgtcgttgcagcagttgacactgtccttcaacgaattcacgaatctcgaagcgccttataagggaacggaatctcagagcgggcttgtagcggttgatctgagcaacaacaggcttaaggggtttttgccgtcgttcatggcggtgatgccgaagctttcgtcgttatcgttggagaacaacgagttcacggggagaataccgacccagtttggggtgaaaacggtgtttcccgaaaagggggtgtcttcgttcgggaggcttctgttaggtgggaattacttgctgggagggatacctcgacccttgttagcgctgaaacgcgattctgcgaacgtgagtttggttgataactgcttatacaggtgccctcatagtttctttttctgccagggtggccaacagaagtccttggcacagtgtaatagatttagccctgcctccactccttaacctctttaactttcacttctagattctctctgtttcaactcgtgtattgtatagttcttttctttgttgatttatggtgagagatcttgtcttaaatgcaaaaaaatcatcacaaggtttgcctcaacgctaagatccactgccagattttgtctctcctagacgttggatttgcaaccacgtgaccccttatcaagatgacattccatttttttttaggttaaattactatttggttactttaatttat

SEQ ID NO: 9241 - DNA, 727 bp, Glycine max
  unsure (1)..(727): unsure at all n locations
  Clone ID: PAT_MRT3847_108354C.1
tagagaaataaattctaatcaaggattccaaaaataatcataatgaaaacgagttcgattttcagtttttatacaggctattgcttcgggcattcccatgcttcttcatgcactctttccgtaatgtttttcaaccttaatggttattccgaaagttaaaaagaaagtgcattccagaaagaacattccgaaaggaaaaaggaagtgcaggaagcaatatccttttatatattggttatagggcctctaaaccaacggcgaccactgattaaccagtaagaaactacaagaataagtaaacatcccacagcaacaggagtgtagttaagtgtctcaatggttattgggtaggaaacaggcaatgagaagagtatggagatgaaaaccacccaaaaaacagcaacccagcccacaatgactccgtaacggcccaagttgaaaggcccatgcacaaaatccttctgtgccaaggtcaccctaaagaatataggtaaggcataagctatatagaggccaatcgttgctatggacaccatagcctcaaatgccactatgcttccaagagacgttagtgccatacaaaatgatataaaaacagaaagccaaactgcatatatggagacttcnttggttgttaacttggtgccacaatgatgacaatggcatagccccatctctagagaaaagctaagccatccttgaattgctggttactgaactcatacca

SEQ ID NO: 9242 - DNA, 376 bp, Glycine max
  Clone ID: PAT_MRT3847_108355C.1
gtgccgcctgcttgggggggggggggggggggggggggggggattaaaataataagcgtggcaggtacagacgcactaatggcgatattagtagagggaaagagctcggggatatgggggcggggtaacaccatgaagataggacaccaaaatagacaaacaaaccaacgtgggaggggtgtgtgagataagggcgatttttatcgcagcaatggattaatggctaattaaatgcaatgtgatttttagaggaatggggggaacaaccttaaaaaaaaaaaaagctgtaggcatagcataccatattaaaggctaaaaggcactaaaggggcaacacaaaaataaatttgggcctgaaagggaaatgtggaacttg

SEQ ID NO: 9243 - DNA, 1629 bp, Glycine max
  Clone ID: PAT_MRT3847_108356C.1
ttcccacgcgtccgtacggctgcgagaagacgacagaaggggacattcaatcacacacacatgcccctatcttccttagctacctagattattcactccctccctaacaagccacaccgtttcttgctccaatggcagctttggatctcacaataagcatgttggcactcatagttgttgttgtttctcttggcttgtggggtggtgttcaaggtgcgccacaagttccatgctacttcatttttggtgattctttggttgataatgggaacaacaaccagctccaatctttggctagggctgattacttgccttatgggattgacttccctggtggaccttctggaaggttttccaatggaaaaaccactgttgatgcaattgctgaacttttgggattcgatgattacatacctccatatgctgatgctagtggcgatgctatcctcaaaggagtcaattatgcttctgctgctgctggaattagagaggaaactgggcagcaactgggagggcgcattagttttaggggacaagtgcaaaattaccaaaacacagtgtctcaagtggtaaatttactgggaaatgaggactcagctgcaaattacttgagcaagtgcatatactcaattgggttgggtagcaatgattacctcaacaactacttcatgcctcaattctattccagcagcaggcagtactcaacagatgagtatgctgatgttcttattcaagcatatactgaacaactaaaaactttgtataattatggagcaaggaaaatggtgctgtttggaattggccaaataggttgcagcccaaatgaattggcccaaaacagcccagatggtaaaacatgtgtggaaaaaattaacactgcaaaccaaatattcaacaacaaactgaaaggtctcactgaccaattcaacaaccagctgcctgatgcaaaagtcatctacattaactcgtatggcatctttcaagatattataagcaacccttcagcctatggtttcagtgttacaaatgctgggtgctgtggggtaggaaggaacaatggtcaaattacatgtcttccaatgcaaacaccatgccaaaacaggagagagtacttgttttgggatgcttttcatcctactgaagctggcaatgttgttgtggctcagagagcttacagtgctcaatctgcatcagatgcttaccctgttgatatccaacgcttagctcagatctgatctctgaacaatgaacatgttctagagggtagtggctattaagctagtatgccacaaccatatttaatgttcttggaatgtgttacatcttttaaggcataagagtcttaattaagttttctctctttttcttacatattcacatatgctaaatgttcatggtttcacaagtacaggtgtaatttgtggaaaagttttggaagattgcttatttaattatagtgaataatagtagtatgctgttggctgatcgattctccttgtgaatgtttattccaaaatgattaattaagagaacgttcgcactagtgatctacttcccaaaaaaaaaaaaaaaaaaaaaaaaaaagcggccgctgcatcaggagcctagcagcctgtcggcggggagcat

SEQ ID NO: 9244 - DNA, 382 bp, Glycine max
  Clone ID: PAT_MRT3847_108357C.1
gcttgggagaaaagacaattacccccccatatctaattttattatggaggttttgctctgaattaaaacctaattcctaaattccacggctcaatttttgcacggattataaataagggtgggaataaagtcttgggtaatggagaaactataaatccaataaaaaacttatgggataaaccaaacacatgaacctactggaaacttaaaatgccagggttgttttgattttcagggggaatctgggggccaacgtttctatcaatgaaccgtttgaaaaaaggatttttactggaaaccaacgggagccatttcgattgggaagcatcagggctataagaccggggctggagccaagcacctatcgccttgtgcagcacaa

SEQ ID NO: 9245 - DNA, 294 bp, Glycine max
  unsure (1)..(294): unsure at all n locations
  Clone ID: PAT_MRT3847_108358C.1
ctgatttaactcgtgattntnntactactccactatttatgaagaacagaaaagccaaatcttaggcctaaattatcttttcacaatactttctttaagagcatttcaacctataaaaaattacttgcaaccagtgtctatccaacacaccactatcgctagaaatacattctcatgatgacttctcaacacccaccgaacatcatccggacaccatcttacgaatgactacacctgtagaactcaaatcaagctcactattttaaatatcccctctgaaactgctgtattcac

SEQ ID NO: 9246 - DNA, 786 bp, Glycine max
  Clone ID: PAT_MRT3847_108359C.1
agtcaaaaacaaagacgcatcccttgggcggagacccgggaggggttttatgcgaattaagaacaagccataccccaagtcacgtttctgccgtggtgttcctgatcccaagatcaggatttatgatgttggtatgaagaagaagggtgttgatgagtttcctttctgtgtccatctggttagttgggagaaggaaaatgtttcaagtgaggccctggaagctgctcgcattgcttgcaacaagtacatggccaaatttgctggaaaggatgctttccacttgagagtcagggtgcacccattccatgttcttaggatcaacaagatgctttcgtgtgctggtgctgataggctccaaactggaatgagaggtgcttttggaaagccacagggtacttgtgctagagtggctattggacaggtccttctttctgtccgctgcaaggacagcaacagccatcatgctcaggaggctcttcgccgtgccaagttcaagttccctggtcgtcaaaagattatagttagcaggaaatggggcttcaccaagtttagccgttctgattatctcaagttcaagtcagagaacagaattgtgcccgatggtgtgaatgcaaagcttcttgggtgccatggaccattggccaatcgtgaacctggaagagcctttttggatactgctactagttcttagtctgtcttttaatttggaaatactagacttttggataacattagttttgcaagagtgaatttgagttattttgtcagcacattccatttacttaa

SEQ ID NO: 9247 - DNA, 820 bp, Glycine max
  Clone ID: PAT_MRT3847_10835C.1
cctcggcgtgctctcaacccttttaccctcaaaacgccccagtccaaccactcctacatccaaaatgagcgccggtttcgacccagcaaaactagccaagcttcaagctaacaatgcaaagctcgccggtgcccctcgaaagaaggtcgtccgaaaacctggtgccgctcagggagatgaccgtaaactacaaacggcgctgaagaagctgaacgtccagccgatcaccggcgtggaggaggttaacatgttcaaggaggatggaaacgtactgcacttcaacgcaccgaaggtccacgccgctctcccttccaacaccctcgccatctacggcgccggcgccgacaaagacctaaccgagctcatccccggcatcctgaaccaactcggtcccgacaatctcgcctctctccgaaaactagcagaatcttatcaaaccttgactcaacgtaacaaaggcgccgcagggaaggacggcgaggaggacgagggcgagggtgatgatgtgccggatttggtggagagtttcgatgtagaggaagcgggggaggagaagaaggagaaggaggaggagaagaaggatgcgagtgtggaggagttgtcttaagctccaagctgagctgagctgagtgggtgataggagagagagtggagacggatgggagagtctacgctgtctctcgataaaagggtggatagctttagacgggctgcgatcgtacgtgcgcacattcgcgcatcgaagtgtcgcgttgcatcgctgcggttggtgttagtggcgatttgtatcaatgatgtggagattcatatggttgcatcc

SEQ ID NO: 9248 - DNA, 254 bp, Glycine max
  Clone ID: PAT_MRT3847_108360C.1
ctcgagccgatttttgttcttctgtttaaaaggatgaatatctataataacaatctttgctggttctactcccatactttatcttccttttttctcttccttattcttccttctctttctacaaccaacctgacttcactgttttgctatttttcaaaaactcactaacactcctttcaaactagaaacttggaaaaatggcaccgattgttgtaagtggcatggggtcgcgtgctccaccatctcaggtcatg

SEQ ID NO: 9249 - DNA, 1268 bp, Glycine max
  unsure (1)..(1268): unsure at all n locations
  Clone ID: PAT_MRT3847_108361C.1
gtaaaatgtagtccttctaattttttttggttcctctatccccttttttggggttgtttttgtctcttctcagggatataattttggtgtgtccgagtttggttgacgttaaatttaaaagccaggatgtacactcctgctaccgacgatggtgattatgtctgccttgttcagcttcatattcccaccaccatcttctctggtggtttcggggatgtcagtgttcgagaatggaaacagacctaaacagagggtaacaaaacaagcaaacaccatggtgattaagtctgtgttgttcagcttcattttccccccgccaccttctctggtggtttgggggttgactgtgacaagcttcctgatactggctaatgctttcttgtcagaaattagagggaagcatttgaactattcaaagttttggaatgctaatccctctgcagaaaagcaggtcaagttgtctagcaaagctggcatgcttttgctgtacactcctgcttttcttgctggccttgcatccttctgggtctttcctcatcaagggctcagattcaccatccttcaatctgctgttactctgcactacttcaagagggtctttgaggttctgtttattcacaaatatagtggaggcatgacacttgaatctgcaatccccatcactctgagttatttcctctcagctgtaactatggtctattctcaacacctaacaaaagggtttccagaaccaccaatcaatctgttctaccctggcattgtgttgtttctagttggcatcattggcaacttctaccaccattaccttctgtccaaattgaggggaaagggtgaaaaggagtacaagattccaaagggtggcttttttgagcttgtgatttgcccccactacttctttgagattactgtgttttatgggatcttcttcatttctcagacattatattcattcgctttcgctgtaggcactactatgtacttggtgggtaggagttactcaactaggaaatggtatctttctaagtttgaagatttccctaagcatgttaaggctgtcatcccatttgtcttctaaatgttgtaatgaacatctaattctacttgagttgtaagtgtgctgctagattgtgtttattggaattgcagctctccaacatccaagtttgagtgatttaataaactattttttaactttggttgattaaaaaaaaaaaaacnnnnnnnnnnnnnnnnnnnnnnnnnnnnnnnnnnnnnnnnnnnnnnnngaa

SEQ ID NO: 9250 - DNA, 538 bp, Glycine max
  Clone ID: PAT_MRT3847_108362C.1
cccttgcaaagagggaaaaatttcctccccctggttcaaaagcttttgaaaaataaaaatagagccgggggcaaaccctgacccaggggaaaaaaggaataagtaatttacccgctttcccaataaaaacatgatctaccccctggaaattggagagggctgaaaaatcttggcaaaaccatcagggcttggaattttttttttcacaaaacttggagtattggtctgaatccctcaagttgtttaattcacccctggcatttatttcaactttaattatccctccctttttataagggcttgaattgaccaaagcgggaaagctgttaagcccttcattgacttcaacaacttttcctgaaataggagagttaatatcacttggggccttcacactttcaactgcaccaaaactacctccttggggaacaggtgctcccacttttggcaattcaacatatacaacatcccccaaatgatcttgggcatgaacagttttgccgatgggtgggtaatttccatcaactttccccccctc

SEQ ID NO: 9251 - DNA, 248 bp, Glycine max
  Clone ID: PAT_MRT3847_108363C.1
tatcgagccgaatcggctcgagctcgaccgcaaaactcagaaccctagctatatccatggcacggggtggaacagaagcttcacgcagatttgggcaaacactgccagcaccgcgattgcacccagctcgattttcttcctttcacctgcgacggttgcccacaggtaattcattattcatcaccctttttagttcgcatagcatcataattagaacgccttataacttatgcacctaacaacttgta

SEQ ID NO: 9252 - DNA, 303 bp, Glycine max
  Clone ID: PAT_MRT3847_108364C.1
ttcacaacactaccctcacacgcttacggtgcctacttcgcctctcatctgagaccactagccaagcccacggtgcctcctaaatgtctgtcatctacacccccatcgatcaccaccacacctggggctccaccgatcaccgttacccgtacaagcgcaaattctacaatgaagactactaggatttctcggacttagtctgcgtgaggatgctgaaagacgatgccaaagcggtgaaaccctgttacgcctcctactacttcaacttctccgactccggacgttgcttcttcttgcagcatc

SEQ ID NO: 9253 - DNA, 595 bp, Glycine max
  Clone ID: PAT_MRT3847_108365C.1
aacgaacgcaaaaatcatgtgatcattatttattaaattattattaagtgtttaaaaaatattaaattaatgaatattattaatatttcgattctaatgtaatcttaatgcccatacttgcaagctcagttgcaagatatctaaaggcaaaaggaatttttataagtgtaatatattttgaagtatcacaaattttacatatcatgtggtgttttttgaattttacatcattttgagtttcgtgttctttagataataatgatgtaaatatagtaccgcattttgcacataaatgacattgagaaaaatctgagcaattcattaaacgatcttgaagacaaaaactcattccatgagccaataaagaatcacgttccatttctccaaatctaataccaccagcttttttacgtccaccaataggttgcattgtaagattatgaactggaccggtagatctcacttgccatttatcggataccatgtgtcgtaatcgttgataatatacaactccaatatatatatcagcttgaaattcttcaccagtgattccactatacatgggctcattgccatgataattatatcctgcgcg

SEQ ID NO: 9254 - DNA, 618 bp, Glycine max
  Clone ID: PAT_MRT3847_108366C.1
gacttggatcaagttgattacttttctcaaaagggtgtagagcaagcaattcaaagtggaagcataacactccctagtggtgaatctgttcctctcaaggatgccattgtcattttcagttgcgaaagcttctcttcaccaaagttgagaaaatcaccatgtgctgaaaacaaagggaaagagactgtggatgatgaaagttctagcctctctttggatctgaacctagccattgaagatgaaagtggaggtgtggcattaggtggagacaatggtatcctagagttagttgataaacaaattaatttcaacatacaagaattgtgatgataggaataatggagaaacaatcttctgtgttaaatttgagtgttaattactttttttttctcttgtattgtttttcagctacacttagtgaggtcgggggaaagaaaaacatgaatggaaaagtaatattagagacatagttttgatctgcgtttcttaagcttgaatgcagatggtatatttaggaagagaacgtgtctgtgtatatgttaattaatgtgctccaatcttttgcatgtaatttggttcctgttttaactaaatatattttaatttcttgtttcgaat

SEQ ID NO: 9255 - DNA, 581 bp, Glycine max
  Clone ID: PAT_MRT3847_108367C.1
gaccactacgcaattctttttttgggtacaagaaaaataaaagcacaaaatttgtttgaccgctctaagaaccagttagaggcaataaattttaagtataaaagaccatcaaaatttattatgcaatgtgaaactgggggggttacccttggtaagcttctgactacgccatagctcaaatgctatagaagcaaaccattaatcattatcctgcaaaaatagaacaggtctaatcaaattactataaaaaatttaaacacaccccttcaagtagacaaattgaagctttgatgtttaaacatcaaactggaaggagaggtgctatatgttacgaatcccacgaattgcaccaacagcgtgcaaatctttcccccacacgtgcccaggttatttgttctaattatacgcacagcttattaaataatttttttttcttacagcaaaaagatttactaaataaaatgaaaatatggtattatattatctgttgctcacgctgcaatacacacaacaaaaccaattgaaaaccatgtgcttgtgcttctcaattctcacacctgccttccatcggacgagtgaga

SEQ ID NO: 9256 - DNA, 362 bp, Glycine max
  Clone ID: PAT_MRT3847_108368C.1
aaaaaataaaaaatgggtttttaacggataaaaacgggttttattattgtctacacccaaatatggtaaggtgaccctacccagacccgaaatgttatataaatggccaaggggttttgattcttaaaaaaaatattcaacccgtcttggaattggtctgtaaaaggttacattacaaggggaaagccaaggtcctacttgagaaaattacactaggcactgatcttacttttctttttctcatttcacaagaaggccaacctgtttaacaaaacccaagccaggtgattacatagggtaacctctcccttctttatatatctctccccctcccactatttaaaaacaggtctttctttttt

SEQ ID NO: 9257 - DNA, 634 bp, Glycine max
  Clone ID: PAT_MRT3847_108369C.1
taaagagagagttgttgcaaagatgtaatatttgtaagaatatcaggtaacagatgaggaaatggtcacataactaagatgaagatttttcaagattagttgagttttgaattaagcttcttagagtggatattttgaaactcaaaagatttcctgtatctggagaactataaaatgccctacttagatcaagagacagtaacttggataaatgtgagacttgtttctgggatttcacctgaaaaattagcttcagaaaggttcagataccttaactgtgaaagctcaccaatcctaaatgggatttgagagtagttgaagtcattatcagcaagatcaaggctttgaaggtgtttgaggtgaaagaggctgctattagcatccaatataccaaagatttgactgctactaagatcaatggtaatgacatgacctgtgtgctcatcacattgaatgccatcccatgagcagcaatctgtggttgcattccaagatgcaattttaggataactgaaaggattataagaagtagacttactaataacaaacctttccttaaattgcaacaaggcgtggctttcatcttcatggcatcttgtaggaggaactgaaagaagacaattagtaacagtga

SEQ ID NO: 9258 - DNA, 222 bp, Glycine max
  unsure (1)..(222): unsure at all n locations
  Clone ID: PAT_MRT3847_10836C.1
annacgtaggatnccgtaagctcggaattcggctcgcngaaaatgctcagttctaactaatgaaatggattgcctagtaggggtttctgcatatacacctgtatagtagttatatgcatatgtttctgtgcatgttctctacacaattgtaaggtgtcactgtattgaactgttgcacttgtcaactttcaataaagcatataaatgttgataaaanaaaaa

SEQ ID NO: 9259 - DNA, 201 bp, Glycine max
  Clone ID: PAT_MRT3847_108370C.1
cttatagatcgcgatctagatgcggtggatcacgtccacaacggcgctatgtatacgtatgttcaggtgagcaacgggagctccgtgatgttctaccatgaagcacagtgtagctagtctggtgaagggaagttgccggatattaagttggacatatggcaatggttatgctaacgagacatgttgggaggatatctgttg

SEQ ID NO: 9260 - DNA, 266 bp, Glycine max
  Clone ID: PAT_MRT3847_108371C.1
ggtagtgtagagttggatttgagaggttctgccctcagttctccgccacgctctgtgctcctggtggaccatgtgttgcatgtagcacgaccatctgtgtcagactgggacgctgctttctcgaactacctttgtccatctggtatggcggtactcagagtgcacggatcgacttattgaattcaggtccaggctggtgagccggtgaatatgtgacgagagctttcagtcaccccactaggtgttgccacctagcgcgtgtatga

SEQ ID NO: 9261 - DNA, 402 bp, Glycine max
  Clone ID: PAT_MRT3847_108372C.1
cgttattcatctggtctttgcgtctgcccttcgaattgctattgcgccaggatagcaaccatcatgtcatttcgttttccagcaaggacactctggcaagctgccccgagattcgcgaatataccacgagtagctccccaaacaacacgttgggctcgcagttacgcagttgcatcggatcaaaatcggacagccatagtaacaggctctgctcgtggaatcggcaaggccattgctcttcgactagctaacgatggatatgatgtctgcatcaacgacatagaagccaacaaatctgaagccgacgaagttgtgaaacagatacaaggcttagggcgcaagtctttctcatatagcgccgatgtatcgaacctgagccaggtccagggcctagtgaaagcg

SEQ ID NO: 9262 - DNA, 387 bp, Glycine max
  Clone ID: PAT_MRT3847_108373C.1
attctctcagagaatgatctattcatactctatcattacctacctaggtgggtactgttgctattcaaattctggacgctcttgctcatgaccaatgctgtctgaaacacttgcaccaactaggaggaatacaagtatgctgtgctgatacgagactcgatcaacctgtgacaagatgagagactgtgactatgacaccgctagatcatctcttctatatcgaagatactcttggcagagactactcttgttgtgacgcacatgacaaacatgccacctatgctactctatatacatttcattactctcaatgacatacgcagcggctgatgtgattcagacatctgtagtcacgtgtagatatgccactccgaacgactaccacca

SEQ ID NO: 9263 - DNA, 1537 bp, Glycine max
  Clone ID: PAT_MRT3847_108374C.1
aacagaaacaaaagtgcaagacttaggtggcctcaccgatgtgcatggagctgccaacagcgtcgagatcaacaatctcgctcgctttgctgtagaggaacaaaacaaaagagagaattcagttctggagtttgtgagggtgattagtgcaaagcagcaagtggttgctggagtgaattactacctaacattggaagcaaaagatggtactcgagccgctcgagacggctgcgagaagacgacagcggggcgcaccccaaccacctcggagacatcatactgccgttcacacttcacatccaaacacgagcataaatgatgggtgagttgggtctacgaaatgagataagatgaaccttgatatttcccctatatataaaaagccttagaatagagtatagaagataaagaaaagagaaatggcaacagaaacaaaagtgcaagaattaggtggcatcaccgatgtgcatggagctgccaacagcgtcgagatcaacaatctcgctcgctttgctgtagaggaacaaaacaaaagagagaattcagttctggagtttgtgagggtgattagtgcaaagcagcaagtggttgctggagtgaattactacataacattggaagcaaaagatggtttgattaaaaatgagtatgaagcgaaggtttgggtgagggaatggttgaactccaaagagttgctagaattcaagccagtcaatgtttctagcacaccaataggaaggtggcattaccgatgtgactgcgaatagcctcgagatcgacattctcgctcgttttgctgttgatcaacacaacaaaaaagagaatgcaaatctggagtttgtgggggtgattagggcaaagcagcaggttgtggaagggttcatatactacatcactttggaagcaaaagatggtgaaaccaaaaatgtgtatgaaacgaaggtgtgggtgagatcatggttgaactccaaggaggtcctcgaattcaagcccatcagtattaatcctctttcggtgtcggtctagtctttataaggttacagaaataaatggtcgcaaggtgaaaggtgtactaaaatttattttttataaaaaaatcgaaggtagtattaaatatgttatatgtatgtattgtgcggaataaatgcagccacgtactatatataatggtacatacggtgtagggctgtacaagttgggcatcctatttcaatattaacgaccactaataaatattaccattggagttattacgtaaggaggtcctcgaattcaagcccatcagtattaatcctctttcggtgtcggtctagtcttaataaggttacaaaaataaatggtcgcaaggtgaaagttgtactaaaatttattttttataaaaaaaatcgaaggtagtattaaatatgttatatgtatgtattgtgcggaataaatgcagccacgtactatatataatggtacatacggtgtagggctgtacaaattgggcatcctatttcaatattaacgaccactaataaatattaccattggagtt

SEQ ID NO: 9264 - DNA, 1140 bp, Glycine max
  Clone ID: PAT_MRT3847_108375C.1
gttgtgcttaatttgtctcagaatcagttagaggtgattcctgattcaatagcaggactacagaggcttgtggagctggatgtttcatctaatgttttagagtccctacctgactctattggattgttggttaatctgaagatctttaatgtgtcagcaaacaagctaactgctcttcctgaatccattgctctttgcaggtcactagtcgaattggatgcaagctttaacaacttaatgtgtctgccaacgaacatgggttttggacttgttaaccttgagaagctcttgatccatttgaacaagatacgatttcttcccgcctccattggagaaatgaaatctctcaggcatcttgatgttcatttcaatgagcttcatggcctacctcaatccattgggaaactcacaaatctggaatatctgaatgttagcagtaactttagtgacatgacagagctacctgaaacacttggtgatctggtcaacttaagggagcttgacctcagcaacaaccaaatccgagctcttccttactcgttcggtaggcttgaaaaattgacaaagctcaacctggaccagaatccaatcatagttcccccaattgaggttgtaaatcaaggggctgaggctgtgaaggagttcatggccaagtggtggctcgatctcattgaagaagctcaacagaaaagcatgtccgaaacacaaaatcagcaagcacagacaggatggctcgcatggggagcctcattgttgaataatgttgctgaagtttctgaaagtgttgcagaatattttggcgctaaaaaagctcctagagacccatggttggatcaacagctgtgatacaagaatatctggactctgcctacatacactgggtttataatttcgtgggatgtatagtttgtgatatagcttttggactcttgttacccctgtaatcaatacttttgtttttcatctttttttttttttttttttacctgcagttatacttacccggtataatttgtttggcattactgtctgatcagcacgtggtttgtatgagatggtaaagaagtacgttgcttgacctgtacctaattttgtttaaatgcaaaattccctcttatggttattgagaaaaaaaacaaa

SEQ ID NO: 9265 - DNA, 433 bp, Glycine max
  Clone ID: PAT_MRT3847_108376C.1
ccatgccgcgtacgtatctcctcgctccagaagcagacacagatgcttactttggagaatcaaatatatgctgtaaaaactgggactggagggattgccaatgattactatggcttagatgcttctgctgccaatttgggtggaaaagctgggagaaggttttctgaatttccaatgaagatatgtcactatttcaacaaaggattctgtaagcatggaactagctgcagattctatcatgggcaagttgtccctgagaatttctctcagatgtatggaaatgatgctattagtgaggatcaggtgatttcaccggggtcactggcacagttagagtctgaaattattgagctcctaagaacaaaaggtggtccaatgtcaattgcttccctgccaatggcatactacgataaatataaaaaggtactgcaag

SEQ ID NO: 9266 - DNA, 201 bp, Glycine max
  Clone ID: PAT_MRT3847_108377C.1
ccctctcgttcggcccctctttattgcacgcttgctatctttgtgtggtttggccaaatggccgtgtggtcataccctatttcactatcacacgagtcgctttcaaagacgtctatgggtaggctcgtgtggcacatgaaggctgacatcatgcttcatgcgaagtgggatttacactgcatgggtgccacacactgaacc

SEQ ID NO: 9267 - DNA, 393 bp, Glycine max
  Clone ID: PAT_MRT3847_108378C.1
ggatgtgtgaaatttctcatcaaaacacaacatgataatcatacaattaatttagtagcaaatgttgataatgcaataattacaacatccatttatacggttacgctgctctcttatccccaagccatgatctgctcacaaaatgagatatcatcaataatcatatattgcaaagcaagacggtaatggggctggcgatcagttgagtagatagctttgaacatgatcgtacttccctttttgatttgataagttattctccagcatcatccatttacaaagtgaagtcgaatctgtcaaaattggaagcattcattacatggactatgctggagctactggtgtaacattttctttaataccttgcttgatgcactgaagaaggttaccatg

SEQ ID NO: 9268 - DNA, 525 bp, Glycine max
  Clone ID: PAT_MRT3847_108379C.1
aattcggcacagtaaatttcaaacaaataaattatataaagttaacaaccataaaattaataataagcacaaaagatgaaacgaaattaacctcaatttcttgcattttaattccttcaaacctgttgtcatctcatgaaaatcaattgtttggattcgctaactgtttgattacaaaataatgtcaagcaattggtaccgagaagggagatttatttctcaataatgggttcttctagaaagcatttgatatagataaataaaaaagaaagagagaagataagattttgcgtaaaacataaagatagaaaagttatataaaaaaaaaagcaataaaagaaagactataagtaaaagttttaaatgaaaataataaatgacagaaattataaagaaaaataaatgtaagataaaataaacttgtatttttaattgatggtgttattaaatttaaagtataaggtctatttaaaacatggtttgggagttattcccttgattttgcgctcaatcggttgacaattg

SEQ ID NO: 9269 - DNA, 391 bp, Glycine max
  unsure (1)..(391): unsure at all n locations
  Clone ID: PAT_MRT3847_10837C.1
tcttcttcttcaatattttcttttttcacaaancannacatcactgagaagaatgttttttataataggcagcccgccccctccattcttttttcaatttttcctatactactttcccacattttcctttgatcacatcaaatatgtcaatgctgtttcttacattcagcttcatctttacaattacacttttactgccttccatttcaataattcttacttttttttttcacttcatcatctacataatatattcttcctttaaatttttctttatacaatcacttctattttatttatttttcccaaaactctttatctattaatatatataacttttatttcttctttaacattaacaacacaaccttttcattctccaaaacaaatt

SEQ ID NO: 9270 - DNA, 377 bp, Glycine max
  Clone ID: PAT_MRT3847_108380C.1
ggggagaccaaaatttttttttaaaaattttggggagattaaaatttttttttttttgaggggggttgcaaaaaatggaaaacaatggggcccgataactcaattaaattccatcaatttgaattttttttaaaaaaaataaaaccctttttgaagctaatttgtccattgaatttttccacaatagggacggtcccttggacacacgtttaagtgttttttttaaattgggagaacaaggttaaatgctcaacaacacgaacggggcatgttccatttttgcctgcaagggagttaagctccaagttcggtggcttaatctggtggatatgatggacttctaagcgttgaaagtttcctttgtaattaaagagttg

SEQ ID NO: 9271 - DNA, 564 bp, Glycine max
  unsure (1)..(564): unsure at all n locations
  Clone ID: PAT_MRT3847_108381C.1
ggctcgagattcatcatataattttatcccaacccaaccacacatacactatattctctctctctctgccccccatttcccgcatacacagagcgatagcaaacctactttagtttctttcgcttttcttccactaacgcaaaaagactcaccagtcatcaccacaccaccccttttgcttttgctttgcgtgtttttggattgttgtagatctaaaagataaagatgattcaagaaatgttgggtggtgctagtgctagccacataccaggagaaagaaaaatctccattaataacggaggacgaggaagagcacttctactaacaccacccacatcatcatcttctccttcttgcacaacaagcataactacttncaccggcaccggcaccgtgaccttatcgaattcagagaaccaaaatttgaggtgccctcgttgtgattcatcaaacacaaagttctgttactacaacaactacaacctcactcagcctcgtcacttctgcaagacgggtcgccgctactggaccaaaagcggcgctcttcagaatgttcccatcggt

SEQ ID NO: 9272 - DNA, 298 bp, Glycine max
  Clone ID: PAT_MRT3847_108382C.1
aattcggctcgagcacatttgctctgcttgatacatgttacactcacgatgctattgagcatttactatcactcatgttggaatcattacaggtgaacacacttctggaaagatgtggctatattgtgcatgaccttgacgtgatgcttatataggacaatgtcttctacgaaagacgttatatagaatggaaatgggcatgacggcgtctattgatctattggacccgttaatgaataccggaccgaaacatgcaggcctaccagcttttgctatagtgagtcataatagaacttgg

SEQ ID NO: 9273 - DNA, 283 bp, Glycine max
  Clone ID: PAT_MRT3847_108383C.1
gaagaagctaaaaccctttccatggtgttgctgcatctacatcatcgtagctagctgagagccaaatcatggcgggtcccattcttcgttctctctggtcctccaccaggaaatccttctcctcctccttctcttcttcttcgtctccctctgctccgttttcccactcgcgcttcttctcacgcaccttcgccgccgctcccgccgccgccaccaccgccaccaccgcctcctccctcgaccccagccacctccgaaatgtggcggtgatcgcccatgtcga

SEQ ID NO: 9274 - DNA, 2212 bp, Glycine max
  Clone ID: PAT_MRT3847_108384C.1
atggacactttcaaagctcctaaagaatccaagagtgatgaagaaagtccaaatggagttggaaagtgtggtaggtatgaagaggaaggtggaggaatcagacttgggcaagttggagtatttggagatggttgtaaaggaaagcatgaggctccatccaggggcacacttgctaataccacaccagtccgcggaagattgcatggttttgcgggcaccatagttgtctcttcaccccaagctgctgaactgttcctcaagacccatgaccttgtctttgctacaagttacggcactattacccatccacgcgcggccccactgagtcgaatttcatgcggtggtccgagaccccctaagagcaagaaaagcaacctcaattcagaagcgcaagagcttgttcgcttactcacgagcaagataagaagcaacgacaaagaggttctgctgaagaccttgaacaagtatgtgaagcaggttttcagatggatgcaaaaacaacgatggtatattgctgataatgggatttactcaaaactgatatccgttatgggaaagaaagggcaaaccagaatggctatgtggcttttctcggagatgcgtaatactggttgtcgtcctgatacttctgtctacaatgcgctaattacagctcaccttcgttcacgggacaaaataaaggctttggctaaagccattggctactttcaaaagatgaaaggaatggagcgctgtaagcccaacattgttacttacaacattcttttgagagcttttgctcaagctcggaacgtggagcaggtcaattctttgtttaaggatcttgatgagagcattgtttcgcccgatatttacacttttaatggtgtgatggatgcatatggtaaaaatgggatgatccgtgaaatggaagcagtgcttgctcggatgaaaagcaaccagtgtaagcctgacctgattacctttaacttgctgattgattcctatgggaagaagcaggcgtttggtaagatggaacaggtgttcaagagtttgttgcactccaaggagagaccatcactgtccacgtttaattcaatgattttaaactatgggaaggcacggcttaaggataaagcagaagatgttttccagaagatgactgacatgggttacacgctgagctttgttacacacgagagtatgatctatatgtatggcttctgtgattgtgtctccagggctgcacaattgtttgatgagctggttgagtctaaagttcatataaaagtttcaaccctaaatgccatgcttgatgtttactgcttaaatggtttaccgcaggaagcagattcactgtttgaaagagcaattagtataaaaatacatcctgattcatcaacatttaaacttctttataaggcttacactaaagccaaccagaaggagcttcttgataaattgctgaagcatatggataaagatggtattatcccaaataagaggttcttcttggatgctttgggtgctgttgcgtctttaccagcaaattcagaatctgctaatgctgcaactgattcaaacacagcaaattcagaatctgctaatgctgcaactgattcaaacgcatcaaattcagaatctgcttatgccgctactgactcaaacaacccccaagattttgcaaagttggcaactggtgtgaagaatattttggctcatcgatgacttgtgtacaaacagctcagtttttgtgagatgtttgccagtttcaaatgaagcactaaacccttttaatgaagtttaaccaacaaagagataggcatagaagatcaagatcctattgcctgggcttcacatgttgtctggctttgcctttcatgtccgggttcatttttgttcataggtatagatgtatttccagctcattgccccttgtcttggcactatgatctatcaaatgaagaatgcatcagatctgaccgctaccaaagctaattagttgatgacaaccaatccaaaaagagcagacttgctgctgaaaagcaatgtgtaaatctataactaacaaaattgagttattaacaatggtcttattgataattcatgtacaattatcattaaaaagtaattttaaatcaagattaaaagcttgagctgtcatgttactgaaagtaccagaaggaattctcaattgattgtgtgacttgctggagcggagctttttaagctt

SEQ ID NO: 9275 - DNA, 1155 bp, Glycine max
  unsure (1)..(1155): unsure at all n locations
  Clone ID: PAT_MRT3847_108385C.1
ggccaatctccaattgcaattgcggaagacacaaaactcgaactctgaattacttttggctgtgacagaccttgaagcaatgctggaacaaaagaataatgaaatattggatctgtctaccaatacaaaatcccagaagattactaaagagcatgatgatgccacagaattagatcgcttgcggcaaaaaattgcagaccaggatgaagaaatagacaattactacaagcaacatgaagagctaagtgagcaaataaaagaactcactttggagtatgatcttcttaagaaggaaaatgtggatatctctttaaggttaaagcaagatgaagcacaacacatcaagttacagaatgaacattcatcttgtttagttacaatacaacaacttgaatctcaagtagagagattagatgaaaggctaaaggtgcaggaagaggaattttcagcatctctggtctgtatcaaggaacttgaaaatgaagtcaagtctttggagaaagaactgaaactacaggcagatcaatttgaagaagatctccatgctatgcaatgtgcaaaaactgagcaggaagaacgggccatccaagcagaagaggccttgagaaagataagacacaataatgttgtcgcatctgagcgttttgaggaggaatatagattgctttctgttgaaatgtcacanaaagttgaagagaatgaaaagatgactatgaaagcagttgcggaagctgatgcgttgcggcaccagaacaaacttatagaagaaatgctccataaatgcaatgaagagctcaggcttatcacagatcagaatgaattttaagttatcgagattgagacataacacatattttgcaatacctggtgaagaacaatccagtttgattgctttaatgctatacaatagtataaaccatgcaaagaatattcagtcaatttctttcacaacttttgtttgttgtttcagttgttgtgagttttcactattttttttttttcctttttctttttacttttgatcatttcaagttgtactactggatttttcttcaccagtttggaagctaatacaatggtgtttcaatcgtaannnnnnnnnnnnnnnnnnnnannnnnnaaaaaaaaaaaaaaaaaaaaaaaaaaaaaaaaaaa

SEQ ID NO: 9276 - DNA, 2336 bp, Glycine max
  Clone ID: PAT_MRT3847_108386C.1
atggacactttcaaagctcctaaagaatccaagagtgatgaagaaagtccaaatggagttggaaagtgtggtaggtatgaagaggaaggtggaggaatcagacttgggcaagttggagtatttggagatggttgtaaaggaaagcatgaggctccatccaggggcacacttgctaataccacaccagtccgcggaagattgcatggggatagttcaggattgcaattgggtttcactgtgattcgtctaacagtggcacgacttatgcattgttttgattggaaactaccaaatgacatgttgccagatcacttggacatgacagatgagttcggcctcacagtgccaagggccaatcatctacatgccattcccactctatcttcttgctcttcttctccttcatttgcagcaagttacggcactattacccatccacgcgcggccccactgagtcgaatttcatgcggtggtccgagaccccctaagagcaagaaaagcaacctcaattcagaagcgcaagagcttgttcgcttactcacgagcaagataagaagcaacgacaaagaggttctgctgaagaccttgaacaagtatgtgaagcaggtccgaacccaacattgcttcttgctcttcgaagaactcggcaagcacgacaactggctccaatgccttgaggttttcagatggatgcaaaaacaacgatggtatattgctgataatgggatttactcaaaactgatatccgttatgggaaagaaagggcaaaccagaatggctatgtggcttttctcggagatgcgtaatactggttgtcgtcctgatacttctgtctacaatgcgctaattacagctcaccttcgttcacgggacaaaataaaggctttggctaaagccattggctactttcaaaagatgaaaggaatggagcgctgtaagcccaacattgttacttacaacattcttttgagagcttttgctcaagctcggaacgtggagcaggtcaattctttgtttaaggatcttgatgagagcattgtttcgcccgatatttacacttttaatgggtgtgatggatgcttatggtaaaaatggggatgatccgtgaaatggaagcagtgcttgctcggatgaaaagcaaccagtgtaagcctgacctgattacctttaacttgctgattgattcctatgggaagaagcaggcgtttggtaagatggaacaggtgttcaagagtttgttgcactccaaggagagaccatcactgcccacgtttaattcaatgattttaaactatgggaaggcacggcttaaggataaagcagaagatgttttcaagaagatgactgacatgggttacacgctgagctttgttacacacgagagtatgatctatatgtatggcttctgtgattgtgtctccagggctgcacaattgtttgatgagctggttgagtctaaagttcatataaaagtttcaaccctaaatgccatgcttgatgtttactgcttaaatggtttaccgcaggaagcagattcactgtttgaaagagcaattagtataaaaatacatcctgattcatcaacatttaaacttctttataaggcttacactaaagccaaccagaaggagcttcttgataaattgctgaagcatatggataaagatggtattatcccaaataagaggttcttcttggatgctttgggtgctgttgcgtctttaccagcaaattcagaatctgctaatgctgcaactgattcaaacacagcaaattcagaatctgctaatgctgcaactgattcaaacgcatcaaattcagaatctgctaatgctgcaactgattcaaacgcatcaaattcagaatctgcttatgccgctactgactcaaacaacccccaagattttgcaaagttggcaactggtgtgaagaatattttggctcatcgatgacttgcatacaaacagctcagttctcgtgagatggtatggatgtatttccattttccagctcattgccccttgtcttggcactatggtctatgaaatgaagaacgcttcagacctgacagctgccaaagctaattagttgatgacaaccaatccaaaaagagcagacttgctgctggaaagcaatgtgtaaatctgtaactaacaaaattgagttattatcaatgatgttattgataattcatgtacaattatccttctgatgtaatttgaaatcattactaaaaagattgacttgtcatgttttctgcacagtactgaaaataaccgagtaatgaaagaatttgttgaaaacatgacaagtcaatctttttagtaatgatttca

SEQ ID NO: 9277 - DNA, 1130 bp, Glycine max
  Clone ID: PAT_MRT3847_108387C.1
gctcaatccccttacaatatgtgcaattttatggaaatatatgataaaatgttaggaatctttaaaagattttgcagagctctcctcacaattgttgtgaaatcatgagatccctccaaattttgtgtagggaaggcgggattttgaatactctatatacaagttacaaccagacaattacttgccaaattttgcatagggaaggtattagagtagtcttactctaatagaaggagacacatcaaagaaacaagtattaaaacttcatctttcaagataatcctcaaaccaataaacaaaagacaactgcaacgtggagcccaataaaattaaggatcaccacatataattatcgttaaaaacaaatgtctgtggcatttacctactgcaatcatgctgtggtttcagattttatacaaagttctggtcaacacatcttggaaaagagaatagttcttgtagaatttctgatggcattttggaaaaaaaagtacatgaagattcagaagttttggaaattggaatcacatgggatgcattaatatgaaacactcaagcattgtttctttgtgcattgtagctcagaaacagaaaccttctacatgggatctcatacaaagtttttttttctttttcttttttttttcttttctatcaattgcaaaatacctagtatatactgtaaaatgagagaaaatatagagggacaatagactaaaaccgtgtgtcagagtacacagaggatgcaagcctatataggataattacattaattatacataaatagaggatattttgtttccactaaatcaaagataatattcctataaactgtaattaatactagaatcagaatgttaattctaattttcaacactccccctcaagctgaagcttactaagcaatcagcttgttacaagaaaatttattcccactaataaataaaaaaacaacagaaatggagttccacaaaaaaatatttgaaggacaactcagggatgttgacgaagtcaaggaatattgctagaaagagagagtagaatatccatcaacctaagaaaaccaagttccaactttcttaaaaccatcatttggaagtttcaaaccaatattttgaagacaactcaaa

SEQ ID NO: 9278 - DNA, 591 bp, Glycine max
  Clone ID: PAT_MRT3847_108388C.1
aaaaaattaaactctttttattgattatcccgattcttaagtgcagttaaaaaatcgggtgccaaaagaaagtttattaaatatgtaacataagaccacgatgctagtggcctcgagttgcattcattcactataaaatggtattcacaatggagatttgtcactgtgatcagcaaatttgtcaaaaagactaagcctattatcagagagctttgacttgtatgctgcattcttgtattcccgccatgtcaattctctgtacaaactctcttcttcccttgacacgagtgaaggtaaaggtgcaatcttttcattcaatggtggtcctccaaagtagatcattgaaagtcttgacatgcttgaattggctaataccctatgcttaacacttttaaagcttccattcgtcatcacctgcaaaaggtcaccaacattgacgaaaaaggaagtgtgatcaggttggatagaagcccaagtcccatcccggagacacatttgcagtcctgatgtgttgttggatctcaggacagatattatctgtgggtctgtgggctctccgaacccaatcaaatttcgtccactcaatgcctt

SEQ ID NO: 9279 - DNA, 265 bp, Glycine max
  Clone ID: PAT_MRT3847_108389C.1
tgggaattgttttttgaaaattaataattgattcctaagaggcaactttcgtaggatgaacaggagcatttgattcccaacaggaagccagagaagagagagagagagtgagggtaatgcgtacatcgatcataagaggtggtccttgttggtttccccctaggactaggctggcatatgttctggcatgaagtgtgagaggtatttgatttatgacacgtttatcattgttatctactcttattaactcagcctatggaatctt

SEQ ID NO: 9280 - DNA, 196 bp, Glycine max
  Clone ID: PAT_MRT3847_10838C.1
caattctcacattctcctataacttaccttctatccccataccttccatcaattatatcttcaatatatcataacccatctcttcaaccatatatacttcaacacacattctcatttacatcatacctttatcaaacttattatttcaacaatcttcattcctatcttttatacaatcatttttacaaaccattat

SEQ ID NO: 9281 - DNA, 489 bp, Glycine max
  Clone ID: PAT_MRT3847_108390C.1
caaagaggttggattagctgcttttgatttgaggtcagcccacgcgtccctttctcaatatattgaaactagcagctcatatcaaaacacaaagacgctactgcatttatacgatcccattgtgatcattattcctccaaacaagttagcatccaattccacggctggagttacagaattggttgatagattttatggttcagtgaagcaggtaatgctggcccggggttgttttgatgacacaaagggtgctatcttaataaaaaaccttgctgccaaggaaccttcagcacttggtttggacacttactataagcagtattatctctgcctggctgctgctgctgccactttaaagtggacggaagcagaaaaaggggttgttgttaccaatcactcattgtcggtcaccttcaatggatcatttgatcacatgaatattgattcaacaaggagtagactactccgtgccaatctgttgcagcctct

SEQ ID NO: 9282 - DNA, 1035 bp, Glycine max
  Clone ID: PAT_MRT3847_108391C.1
ggctcgagatctcaattactggggttccacatgatgcagttcaagtttttattcgattcttatacacttccagttgtgagaaagaagaaatggatgaattcgtcctacctttgttggtgttgtcacatgtatacgtcgtccctcacttgaagcgtgaatgtgaacagaagttagaactgagtttactcaccatagataatgtggtggatgtatttcaacttgccctactttgtgatgcaccaagacttaaccttatttgtcaccgaaaggtgctgaaaaacttcaaagttgtttcagaaacagaaggatggaaaacaatgaagttgagccacccagctctagaaaaggaaattgtcgagtcaatggtcgatgaagacattattaaaaaggagaaaatcagaaaaaataaggaaagagagatatatttgcaattatacgaggccatggaagcccttgtcacatttgtagagatggttgtcgaactattggtcctcacgacaaagactcaatagcaaaccaaccatgtaagtatacagcatgcaacggattagaattgcttgttcgtcattttgctggatgcaagttgatagtccgtggaggttgtgttcattgcaacaggatgtggcaattattggagttacactctcgattatgtgttgatcctgattactgtagagttcctttgtgcaggaactttaaagagcgaatatcaaaacaaatcaagaaagacgaaattaggtggaaaatattggttcaaaagatcttgagaacaagaggaattgggatagcatcatgctttctgccacaataactatggccatctggtgggtatatagaatgtgtttgtaagaaatggccttcaaagattaagtgtttctcgtctcaaccttattgatgaaataaataagaagcaggggaacacttttttctaatatttttatcttatttttttaaccataaaattatttgtatgtctaaagatctggacattaatttatatcttgtattcaataatagttatttagttagtatacc

SEQ ID NO: 9283 - DNA, 176 bp, Glycine max
  unsure (1)..(176): unsure at all n locations
  Clone ID: PAT_MRT3847_108392C.1
cccgcgtccgctctcgtnaccctttaatcccccgcanactgctgtcttgctcttggcncacgactgccgcataccacttgtcccacctgtgatcaacgaggcacattggtcttcttcctgtccttccaaatcccccnacnccaaccctttctcacccggaaaagatcccactgttc

SEQ ID NO: 9284 - DNA, 312 bp, Glycine max
  Clone ID: PAT_MRT3847_108393C.1
gcttacttatattgaaacaatgggtcagggtggcccaccattcatcttaccaggccaattaaaaattctcatttatgattaaacctttcactcttggaatcacattgaaaataacaacacgcgaacacttctcaaaaatgaaatagctgctgctatcacaatgactgacatctttgttttcttggttgacactgtgcctcgtgaggacttttaataagcaaagcctgcattaattccaatatgaacaattcctattgcacgccctgctgatgcccttccatactggtacatgccgacttaacatccgttcca

SEQ ID NO: 9285 - DNA, 256 bp, Glycine max
  unsure (1)..(256): unsure at all n locations
  Clone ID: PAT_MRT3847_108394C.1
tatccactaaacaccaccaggatgtcccacttagactcccaacacactgccacaccgcgccactacggccggaccagatggcatcccagccctcgcggttagcaacaacgcaggcggtttgaccacggacgacattgtctccccggcctcgaacaaccccttcctcgctncagaacggtggtgaggtagtttcncctncantgtccgcctggtcgnanttccgantgcngncccgcttcacncnggccggggggaa

SEQ ID NO: 9286 - DNA, 279 bp, Glycine max
  Clone ID: PAT_MRT3847_108395C.1
ctctattctggctgtttgagctataagccacagcctcgcgtacgagtactaacacatatacaggatggtccaggactcgcctgctgaacgcactggcagacctgacggctgagctaagagggacctgcatggtcattgaggtgcagcctgagctaccaaggacggcttgtttgggacctgccggaaaaacgttatcgcctggagggtgccgagcattgaggtttgcgggggaaggttcaagagagttgctgttgaacagaggagggagattgtagaaac

SEQ ID NO: 9287 - DNA, 352 bp, Glycine max
  Clone ID: PAT_MRT3847_108396C.1
cgtatgtgtttttgtttttaccaaaaggggccaggggggaatcaccactgccataattgttattacatatgacggatgatttggcccttgaacctaacgctttagtcgaacgtagaaaggattagtcattgcatgttttggaggtgaacacataccatataaacagattgaactgcaattgcttagaattagccttgggcggtgtagattgactgtagttgaaagaattgtttgcgagttatttgggagtggtaattcgtacatttccatatacgtacggttgggctgaatctaccttgacatctccatgttcatgtgttccattctaacaaaaccatgttccagaacctta

SEQ ID NO: 9288 - DNA, 167 bp, Glycine max
  Clone ID: PAT_MRT3847_108397C.1
gggggcgctgcttcaggcctacaattgggggggggtgtccattgaagcttgctctatcatgtttagtactcctgtgtgaatttttttcatcctttttccacccatcctgctggaaagtatcttgtatacctggctgcctaggagttacctactccttttattggatt

SEQ ID NO: 9289 - DNA, 720 bp, Glycine max
  Clone ID: PAT_MRT3847_108398C.1
tttctctctcactccaaacctgcgattctcacccctccccaatgtcttcgcaggagaatggtcgtccattgcctaaattcggtgagtgggatgtgaataatcctgcctcagcggaaggttttactgtcatattcaacaaggctagagatgagaagaagactaacacagcaacggcaaccccaaccccacgtagatctgatcctgtgttcaagaatgagaattataacaatcctcaatattctggaaagagaaagtggttttgctgcggctgaatctagaagagggcatatgatggtttataaccctatttgctgtggattatgatctcgctaatcaggtggagcagggaatggtttatgatcctatttgctgtctttcacttcttttttccctttttttcttctttgttttcgcctttgtgtgatttgcaggatcacatgatgttagttgtaagcaaatttaaatttcacaccttgccattttgcttaggtgatctataagtcaaataacgttgttactgggtatgaattgatcacttgagaaaaaaggtagtgtggaatgttgtgtaatagaaaaaattgtcccaatatatatatatatatatatatctataaaaaggggaaaggaaaggaaaaaaaatgtacaaaatgtccccctattattattgatctggccacttccattcctttttttttacaacaacaaaaaaaaacaatgaaa

SEQ ID NO: 9290 - DNA, 454 bp, Glycine max
  Clone ID: PAT_MRT3847_108399C.1
ctaacccacgcgttttttcatttttccgcccacacgtatcagacggaaaccctcgttatgggagccattgtataaagtaaagacttactactctcattaccctctattgagggctgtttatcgcaccccttatgagggtctaagggcatatattgtatgattcactgtcaaatcggttaacattatgtcaaatattaggctatggcaaagaggctgagtctgaggtcacaacttacactgatatgtggtgctgcagtgcgaacgactggaaaaactgctggtcaccctcatgaagctattcggaaaataatgcagatggagcattgaaacaatgcattttgaccggcatcaggggatagaagaaagaaagaacgccttgcgttcacgatcaagaaccgtgctcttaggaaaaccgggcaatatcagaccgttacctccttacacaccagcttgg

SEQ ID NO: 9291 - DNA, 429 bp, Glycine max
  Clone ID: PAT_MRT3847_10839C.1
tcaacttgcttgactcgttgaatcaaccaagtcactgattcgaaatccactcaaaccaaatcatggacatttctgatgtaatgggtggtgactcttactgattgagtactcgatttctgacctacggttcaagccgagtcagatagttatggtgagagggcctgcattgttatgttgctctcctgcgctgttattgctatcaatttcccttcaaagttcaaacgtttggaacacgtccattacttactctttccacttcgatcaacctttgtttatttacttctcactcttccttccaattccaccattctctcttcttccaattttgctcctcttctcttctcccacggcacaattctctctttcccaatatagctgcatcctttgtagtgtagttttgaggctttgtttccatgtttttccttcatg

SEQ ID NO: 9292 - DNA, 230 bp, Glycine max
  unsure (1)..(230): unsure at all n locations
  Clone ID: PAT_MRT3847_1083C.1
actttcatttctacatccctggctctgntccgtcgatgacgatggnntttaggntgcgtaacctgactccgtttctcattcttctctctctcntgncatcacttccgccaanncttcttcnaggagcgttcgatgacggatggggaatcgttgggtnaatcagatggaaaaantgaganctggtgggggtggaccacantgggcatggatggagngntnnganaagtatc

SEQ ID NO: 9293 - DNA, 456 bp, Glycine max
  Clone ID: PAT_MRT3847_108400C.1
atggaggaggagcaggaggtggtggagttggaggacttggaggtggtatgtggctatgagtgcgaaacaagtatactgaaccttgatagtattgataaatttgaaatgtttcttctgcatcaccaaaaaaaaaaaatcacttttttttatataaaaaagtatttgcttaattatattatgatttttctattttccttccttttatttatatattttttttatttattatgtaataaaacttttttgaactttttttatttttttgtaactgttatatattgtttgtactgttttataaacaatttttatataatgatattttaaatatatttttttaatttttattaaatgaatgtttattattagaaacttactattttttttataatctttttttttttaaaagtaaactaattattttttttatttattatattttaatgtttcttttatttt

SEQ ID NO: 9294 - DNA, 489 bp, Glycine max
  Clone ID: PAT_MRT3847_108401C.1
ccggaattcccggctcgacccacgcgtccggcgatgtcttattcttgatggaagatattcaagcactgaaaccaactctattttgtgccgttcctagagtttatgatcgtgtttatgctggtatcagtagcaaaatttcatctgggggagcactgcaaagtacattgtttcaatatgcatataactacaagttgggatatctggagaagggtcttccccaagacaaagcagcacctttgtttgataagcttgtgtttgataagataaaacaagcattaggtggacgggttcgtctcctgttatcaggagctgctcctttgcctaggcatgtggaggagtttttgagggtcacttttggagctactatgtcacaaggatatggtcttaccgaaagttgtggtgggtgtttcactgcaataagcaatgtgttttctatgatgggaacgattggagttcctatgacaaccattgagtgcaggcttgaatctg

SEQ ID NO: 9295 - DNA, 712 bp, Glycine max
  Clone ID: PAT_MRT3847_108402C.1
gggccggaattcccggctcgacccacgcgtccggcaaagcatccgtgcgggtgggagcgggacccacatccaccagtgtttgtttctctcgtatttttaagacctaaagaccaaaattccacagcagcccccacccaatatcttttccgggggtacaatacaaattccgaaccccccatattcctccctcgccgatcgctcacgtcagatttgtttttttttttctttctgttttggacggaattttgatccagcaagatgagcgtggtgggattcgatttcggtaacgagagttgcattgttgcggttgcgaggcagagagggattgacgttgtgctcaatgatgagtccaagcgtgaaacgcccgccattgtgtgcttcggtgacaagcaacgcttcattggcactgctggtgctgcctccactatgatgaaccctaagaattcaatctcccagtttaagagactcattggtaggaaattctctgatcccgaattgcagcgggatcttaagtcgttgccgtttcttgtcaccgaggggagtgatgggtacccgttgattcatgcgcggtacatgggtgagtccaagacgtttacgcctacccaagtgtttggaatgatgctgtcgaatcttaaggaaattgcggagaagaatcttactacagcggttgtggattgttgcattggaatcccggtttattctactgatctgc

SEQ ID NO: 9296 - DNA, 648 bp, Glycine max
  Clone ID: PAT_MRT3847_108403C.1
aaattccagagcttttccggggatacgagaatacaaactacaatcttcccttcaccctctcagatctaactcatccacccattcggttcggtttccactcctcacctgttattcaatcaaattcatttcttcttattagttcatgtgctagctgcttttctttttaaattttcagatttgttttttcctgttttgtacggaatttcgatcgaccaagatgagcgtggttggtttcgatttcggtaacgagagttgcgttgttgcggttgcgaggcagagagggattgacgttgtgctcaatgatgagtccaagcgtgaaacgcccgccattgtgtgcttcggtgacaagcaacgcttcattggcactgccggtgctgcctccactatgatgaaccctaagaattcaatctcacagattaagagactcattggtaggaaattcgctgatcccgaattgcagcgggatcttaagtcattgccgtttctcgtcactgaggggagtgatgggtacccgttgattcatgcgcgatacatgggtgaggccaagacatttacgcctacccaagtgtttggaatgatgctgtctcatcttaaggaaattgcggagaagaatctcactacggcagttgctgattgttgcattggaat

SEQ ID NO: 9297 - DNA, 280 bp, Glycine max
  unsure (1)..(280): unsure at all n locations
  Clone ID: PAT_MRT3847_108404C.1
tacaatctttgtctcantagnctgaggcattcacgtatgatttnctancaagtgtcaaacntctgnaacttctgcatttcnatacntcnacntnctngtaattctattncatcttnctngctgtatgctantnaacattgatggtcatcaagtccctcaacacattatganggaagttggagacactnacaagagaantctggcagaggnaagatcgttgctgcatatggcntctggtgcttctnntaatcacgaatgcggtngtggttatcttaaacta

SEQ ID NO: 9298 - DNA, 953 bp, Glycine max
  unsure (1)..(953): unsure at all n locations
  Clone ID: PAT_MRT3847_108405C.1
ccctggagctgggtttttccgtttgttttctttcttctattccttttctttattctctttgttttttccacaactagctacaccaacacaatgcatgatcacagtcatcaataccctcttccttgtttgtattgccacccttatagctatattaggatggttcaaaatctcatagagagatgcatgctctttcacatgagccaagaccagtgcataagggcactggcagaacatgcagggattaagccacttgttactgttacagtgtggaaagagttgcaaaaggagaacaaggagttctttcgagcatatttgcaagttgtcactcccaggccattattcatgagtagatgttttcaaaggagaccaaatttggcaagaaggaaacactggaaatgattaatagtggctgaataaccctacaagggaaaagtgagctggattactctgtcaccatatagttaaagatgcatcagggaatattagtgatgactaattatagcacaagaaagttatttggtcagtatctctctaaggatttgtgggtgcagaccctcgttcctagcacatatatagtggccaatggttgtagttccttaatactatagatgctgttctcaaagccattaaagaaataaaactgtatcattctaggcttctagccattagctataacttttggtgtgtaaggatgcaacataagtgattgaatgtttttgcatttatttttgtgtaattttccaagtttaattgagattttcttgtgtgtgtgtgtgaggatgcttatttccagcattttgattgtaaaggaagctgccaaaggtatcatttcccacttgtataaatttgacagctgtaaagttgattcaaatgaaccaaacttaatgataaaaaaaaaaaaaannnnanaaaaaaaaaaaaaaaaaaaaaaaaaaaaaaaaaaaaaaaaaaaa

SEQ ID NO: 9299 - DNA, 523 bp, Glycine max
  unsure (1)..(523): unsure at all n locations
  Clone ID: PAT_MRT3847_108406C.1
gagaaaactagaaacagngngangaaaangaaggnccttgntnncttcgnngctacaannnnggnagcanggcaaggccatgcgnacgaaannggccctgtgcgaatgaacactgggtatggtgcccgtactgcggaggtgaaatgcgcaagttggaggctggggggggaagcacacattttttttggctttgagaccattcctgaagagtgcgttgaagcaacaaaggaatacatccatggggaacaatatagatgagactgcaaaacaggtaaccaacaagcttacttttatgccagagacctggaagtgcatgccaaggacacatgttgggttgagtatagatggtaccgaactgtgtaatattgcatactacagaaaacatgggtgtgggggggagaaatggaactggaccttgggtgatgaatggggtaacaaggggaatggaccggggctgtgggagactgtggagaatgacatcaaggtgaggagtgtggggttggagatgatatgggtggggggg

SEQ ID NO: 9300 - DNA, 594 bp, Glycine max
  Clone ID: PAT_MRT3847_108407C.1
ctgcttgggggggggggggggccaagcaatcgaatggtcgggtagatgtaatgcaaaggcctcagaaatgtacgtgcataggagcaagcggttgtgccatggaccatagtcaagcaaaattagcattaagagaaatgtagcgaagaggtacaggtatttatttaacgtcgactaaattgccgcagcacgaatgctatgaaagagaacccgaaagagataaaagctattaattaatagaccctggctaaggctagctacctgttgtgaggtaggcacaaacagctgggtagtcctaaaaagcctaagtggagagggtaacctagcaatgcaattaaagtgcacagtttagcaaaactgtaaatacagctaaccggcgcggccgcaaacaatacttttaaacgagcaatgtacgtagtaaccgaagaagaacatttcctacatggggcggtgtgcgttggccggcaagtaacgggcggcagttggccctcaaaaggacggcccgtttggtgaaagcgcagagtaacagcgcagtacaaaaccggtagcttacataataagcaggctccacgagagctaagatacgtaaggcagccg

SEQ ID NO: 9301 - DNA, 355 bp, Glycine max
  unsure (1)..(355): unsure at all n locations
  Clone ID: PAT_MRT3847_108408C.1
gaaccatcgtgacctaggagcttttaacctacccatgtattcacttgctacctcatggtacctnntgattatttatatatatatgagtatatatnnaagttatctttgctcgagccaaaaaaaaaaaggggacctaagtctttgtggatgtgctatactagcacctggtccaaggacctcccttgtaacaaataacaacaacgaaaacaagcaagcctttttctactagatggcatcggctagatggactacattagcaagtgttaaactgttaataaattataattaaggaaattatgctattatcttgtttgacaattgtgggaatgatttcgggatgcactctaactatgat

SEQ ID NO: 9302 - DNA, 483 bp, Glycine max
  Clone ID: PAT_MRT3847_108409C.1
gataatttttctcttaaaaataaatttattgaaagattattttttaatttatttacttgtataattaaattctttcattaaatttaatttacctaaaataattcctaaatccatactttttatttgaaatttctacaaatttaatggttccattatttaaatgtttgtactcaaaatattttaatctaaatatatattttgtccaaaaaaaattaataatttcacttctttaaaatatttgcctcaccgactatgtagtataaagtcattttactttttatcaagtttctaaattaggagttattcaaattattttttatttgaagtttgtcccaaatttctatttgggttaaataaaaaaattcaacagtttgggtagataaaaaaaactaactaaaggatttaatccaaataagtaaaaaaaaatgaatgattcaatttgaacaaaaattattgttagacaagaatgtcatattattgatc

SEQ ID NO: 9303 - DNA, 253 bp, Glycine max
  unsure (1)..(253): unsure at all n locations
  Clone ID: PAT_MRT3847_10840C.1
cntccattgnnnngnngtnangtcaagctncgngaanntcgtgctacgacaggatnaccttccaattattgcatctgtctctnaccatnagccnactgnttggacgtcttnatgtttgntttccacattngctgcccntttcntgnggcnctattttgctaagcgttgncgatgcaaacnttgatgatgtctaangagatttgtgggtagtcggtgatnnngtancntgggctataggtaacgtttcanggaa

SEQ ID NO: 9304 - DNA, 301 bp, Glycine max
  Clone ID: PAT_MRT3847_108410C.1
aggacaaaacaccaaaaccaacaattggcagaacacccctatatactaccctaatgtcaaaaaaaaattcccggggggccacaaccctcttttccacaggggcccaaaaaaagggagaactcctttatttttcaaccaaaaaacccccaaaaaccccttttgtttagcaccggttacatcgacgccttctcaatggaaaaaacaggggcctcccaaaaaattgaaaggggctaacggggggggtctaaacaagctaagacagccccccctggaggcgccaaaaaatcgggggggttaaaac

SEQ ID NO: 9305 - DNA, 1801 bp, Glycine max
  Clone ID: PAT_MRT3847_108411C.1
tgctggagctcggcccttccgtgctgttgctggtaaatattacatgcactatttactcatttttaatgtatgaaatatttaaatttagggattaaattaagaaccaaagtaatcaagttaagaataattggagagttgctagttcatccatgtgatcaaacctcgcatggccatgttgatgttaccaatgcaatgcgcttcgctgttcatgtttcccatcacgattgacaaaccctaaccctaacctaatccccccgaccaaaatggtgaagaataaggtccccgattggctcaacagctctatctggtcctcatcatcgccgtcgtcccctccctcctccgccgtcgccagccccttcgaacagccaccgcgtcctccgtctcccgccgtcgtgacccccttcgaaccaccgcctccgcgtcctccgtcgcctccctcagtccacgatcctctgccgacgcagagaatcgatgattcgccgagggaagatcacggcgacggctttcgttccgcgcacgatgtgtctcgccaggctcaattgctggccgagttgtcaaagaaggtggtggatatgagcgagttgcggagcctcgcgtgtcaaggtattcctgatgctgctgggatacgttctactgtgtggaagcttttgcttggatatcttccaccagatcgagggctttggtcagctgaattagcaaagaagcggtttcagtacaaacaattcaaagaggagattttcatgaatccttcagaaatcacaaggaagatgtacaactcggcaaattgtgatactgatgatgccagctgtgcgagggcgttgctctctagatcagaaatcactcatggggagcatcctttgagtctggggaagaccagcgtatggaatcagttcttccaggatacagagatcatagatcaaattgaccgagatgtaaagcgcactcatcctgatatgcactttttctctggtgattcccaatttgcaaaatctaatcaggaggctttgaagaatatattaattatttttgcaaagttaaacccgggtgtaagatatgtgcaaggaatgaatgagatattggctcctctattctacgtgttcaaaaatgacccagatgaggaaaatgcagcctttgctgaagcagatgcattcttttgttttgttgagctattgagtgggtttcgagataactttgttcagcaactcgacaatagtgttgtgggaatccgtgcaactattacgagattgtcccagcttttgagagaacatgatgaagagctgtggcgacatcttgaggtcacttctaaggtcaatcctcaattctatgcatttaggtggattactctcctgctgactcaggaattcaattttgctgacagccttcacatttgggacactcttttaagcgatccagatggtcctcaggagactcttcttcgggtatgctgtgcaatgctggttctcgttcgtaagcgcctccttgcgggtgatttcacttctaatctcaagttgctgcaaaattatcccaccacaaacattagtcatttgctctatgttgccaacaagtttcgtgtacagtcagtctaatgttgcattttgctcttctatctctagtttctctttcaaattcaatgcctgtaaatgacttttaagtgtgagactcacagcaatgccggtttatttatttgtttttacttataatttgtacgtattttttcttgggtggtggggtcaatgtgagtttgggccttggtgaaatacgcttgtaatagcaggaacttattttaatttttttaattttt

SEQ ID NO: 9306 - DNA, 184 bp, Glycine max
  Clone ID: PAT_MRT3847_108412C.1
gccaacaacacttggttgctaattgtgctagaattccaacacagtaatgggttgttgtgtgagtagtagtcacaaaacctcaacctcatcactagcaaaattccatgatccaccaaaacctctcactaaaccttcagaaagcaatagtactgtagaggagacagtggaaggaagtgctcttgga

SEQ ID NO: 9307 - DNA, 1621 bp, Glycine max
  Clone ID: PAT_MRT3847_108413C.1
ctcgagccgaatcggctcgagcggctcgagggctgcgagaagacgacagaaggggatagttaaatttttagaaattaaattaagaatcaaagtagattggtgagaataattggagagttgctagttcatccatgtgatcaacctcgcacggccatgttgatgttaccaatgcaatgtgcttcgctgttcatctctcccatcacgattgacaaaccctaaccctaaccctaatcacccgaccagcatggtgaagaataaggtccccgattggctcaacagctctatatggtcctcatcatcgccgtcgtcccctccctcctccgccgtcgccagccccttcgaacagccacctccacctccaccgcgtcctccgtctcccgccgtcgtgaccccctttgaaccaccgcctccgcgtcctccgtcgcctccctccgtccacgatcctccgccgacgcagagaatcgatgattcgccgcgggaagatcacggcgacggctttcgttccgcgcacgatgtgtctcgccaggcgcaattgctggccgagttgtcgaagaaggtggtggatatgagcgagttgcggagcctcgcgtgtcaaggtattcctgatgctgctgggatacgttctactgtgtggaagcttttgcttggatatcttccaccagatcgagggctttggtcagctgaattagcaaagaagcggtttcagtacaaacaattcaaagaggagattttcatgaatccttcagaaatcacaaggaagatgtacaactcggcaaattgtgatactgatgatgccagctgtgcgagggcgttgctctctagatcagaaatcactcatggggagcatcctttgagtctggggaagaccagcgtatggaatcagttcttccaggtaggtgaaagtctcaaaacgctcaaggaattattgaacatggtggactgtactgatacagagatcatagatcaaattgaccgagatgtaaagcgcactcatcctgatatgcactttttctctggtgattcccaatttgcaaaatctaatcaggaggctttgaagaatatattaattatttttgcaaagttaaacccgggtgtaagatatgtgcaaggaatgaatgagatattggctcctctattctacgtgttcaaaaatgacccagatgaggaaaatgcagcctttgctgaagcagatgcattcttttgttttgttgagctattgagtgggtttcgagataactttgttcagcaactcgacaatagtgttgtgggaatccgtgcaactattacgagattgtcccagcttttgagagaacatgatgaagagctgtggcgacatcttgaggtcaatcctcaattctatgcatttaggtggattactctcctgctgactcaggaattcaattttgctgacagccttcacatttgggacactcttttaagcgatccagatggtcctcaggagactcttcttcgggtatgctgtgcaatgctggttctcgttcgtaagcgcctccttgcgggtgatttcacttctaatctcaagttgctgcaaaattatcccaccacaaacattagtcatttgctctatgttgccaacaagtttcgtgtacagtcagtctaa

SEQ ID NO: 9308 - DNA, 413 bp, Glycine max
  Clone ID: PAT_MRT3847_108414C.1
agagagagagagaactagtctcgattttttttttttttttttttttttttttctttttaatcttttaattgttttatttaacccccttactcaatttcatgcgattgtctttgtcttcttttgggaacggtggatggacatgcagttgccaacacagtactacacagctctggtaattaatttttttgcagtatctttttttttttttgttcgaaaaatattaatcgttcgttgatcctaagaatccttatatagaaagcacatgatacgaatccccttattattcattcagtacaaagtactattcttgaaaggtcctactaacgattggaaatcatctaatcttctccttaattaatccgggtcttaattaattaaggaatcaacaaataattttttatttattgaagatt

SEQ ID NO: 9309 - DNA, 419 bp, Glycine max
  Clone ID: PAT_MRT3847_108415C.1
aagtttagcatatggcaaggtagttgcacaacaagaaatgattaatcagcacacgaaattctaactgtaagttcgtatagggggtggccgtgatgtgccatcgcacctttagctgacacaatcaaaagacttggcttcttacagtgaaaaaataaaataaagggggataaatgaagaagaaaaaggtacaaattaaaagccaatctctttacacccatgtatgatctcaaagtatcacaagaaactagaagaagctacttatacttaagccttgtgagggggacactgatagcactttacaaatagcccaaatgtgtcaatttggtgtatgaaattaatcatgcttgcccatcctcccaacccaaatcctatcaccaaaacccataccaccacaaaacacgtcaatgagtacaatccta

SEQ ID NO: 9310 - DNA, 231 bp, Glycine max
  Clone ID: PAT_MRT3847_108416C.1
aatagtgcgtagtgagccgagctttgaatatcatgtctagcttcagcaagttgcagatcgagcacgccagcattgatgcatcaggtataggcactggcactgtgcagagaaatgggagtcagggacttcgattcattctctggtctgttctcgttgcatcacgtggtcgatgtcggaggttagtagggaacttaagactattaggtagaagtatttctacttgaatacgtt

SEQ ID NO: 9311 - DNA, 387 bp, Glycine max
  Clone ID: PAT_MRT3847_108417C.1
aggggataattttaacatattcattgaattaagtataaataatccctggcattttatcttatccaaccacccttaaaactaattgaatttttttttttaactgtgtaagacaacaacacaactttcaaatatattgcaagaaaatggaaaaagatagaactatagactatagttgccttaaataaccatggatggccggttacactcgcaccaaaaacagattttcaagcccatgcatttccatatcaaaattagctgtaaactgatatttagaatcctttctgctacatttaatttatttgcctccaatctccattgtccgtccgtatgaatatgaatatcaagaatcatggtatacagagagtaacaatttcactcaatattcac

SEQ ID NO: 9312 - DNA, 520 bp, Glycine max
  Clone ID: PAT_MRT3847_108418C.1
gggtggaaaaacactcaatcaacacacatgattgaagtgcaagcaaatgccatggagcagagttggtgggccaatatgcctcacgagcttctcagagaggtcctcctccgaattgaatcgtcggagtccacgtggccgctgcggaggagcgtcgtggcttgtggcggagtgtgccgcacctggaggaggctcatcgtcaaggagattgtcaagccacctcaattctcttccaacataaccttccccatctctctcaaacagcctggcccgagggaacatctacttcagtgcttcattaggcgcaacagtgcctcacagacatattatctgtttctcagtttatctagtgcactagtagctgatgatggcaagttccttctggctgcacgcaagttcagacgccctacctgcacagattatattatcttccttgatgcagatgatatgtccagagaaagcaatgcctatgttgggaaattgagatcaaattttttgggaaccaagtttacaatctacgata

SEQ ID NO: 9313 - DNA, 653 bp, Glycine max
  Clone ID: PAT_MRT3847_108419C.1
ggctcgagatgaaagcttcaacggcatctgatactcagaaaaataaagaatttgaggaccctgaatttgatgaggaggattctttgcagattgccatggacgaacatgatgacattgaaactatggctatcgaagatgttgcttataataataatggaaagggaagtctgagccaggaatctggtaagtctggtaattctggatctgaaattggtgattctgcaaggtctcttgctcaggtagaccctatttcagggggtgagatggctactgggtttccatcaacattcaatggtgtaagatctctgcaggactctcctgttggaagtcctgtgtcatggaattcgcgtgtgcctcatcctttttcgtacccgcacgagtcatctgacattgatgcttctatagattctccaattggaagccccgcatcttggaattctcattctcttaaccagggtgacaatgatgctgcccgaatgaggaaaaaatggggaagtgctcaaaaaccatttcttgttgctaattcatcccaaaatcaaccccgcaaggatgtcactaaaggttttaagcgattgctgaagtttggtagaaaaactcgtggatcaaagagtttggctgattggatttctgctacaacttctgaaggagatgat

SEQ ID NO: 9314 - DNA, 379 bp, Glycine max
  Clone ID: PAT_MRT3847_10841C.1
aatactcttattataataaaaataactataattaatatgctaaaaaaatttaagatatccaattatgagcagaaataattcttatattatgatcaattttatactttcattctaaatatctcacaaaatacttaattaaaatagtattaaaaatttattctacttaaaagacaatataaaagtattggtttgattctaataattttagtttattaatctatgaaacaagatgtgtgaggttcgtttctaataatgggttcctcccttttctcattctttaatttcattttgtttttactctttataagacttattataaatctcacctttaagaagaaaagaataggaaaaggagaagttatgcagcattaatattgga

SEQ ID NO: 9315 - DNA, 1648 bp, Glycine max
  unsure (1)..(1648): unsure at all n locations
  Clone ID: PAT_MRT3847_108420C.1
ctaaatctaatcaattgatctcattttccaaattttctgtctctgacattaacaataagtggctctcaaaaaagagaagatattttggtggaaaaacactcaatcaacacacatgattgaagtgcaagcaaatgccatggagcagagttggtgggccaatatgcctcacgagcttctcagagaggtcctcctccgaattgaatcgtcggagtccacgtggccgctgcggaggagcgtcgtggcttgtggcggagtgtgccgcacctggaggaggctcatcgtcaaggagattgtcaagccacctcaattctcttccaacataaccttccccatctctctcaaacaggttcagtgctctttctctctattcaaattaaatcaattttgtttattttcttgctttaaatttggcagcctggcccgagggaacatctacttcagtgcttcattaggcgcaacagtgcctcacagacatattatctgtttctcagtttatctagtgcccagtacttagatgatgctacgttccttctggctgcacgcaagttcagacgccctacctgcacagattatattatctcccttgatgcagttgatatgtccagagaaagcaatgcctatgttgggaaattgagatcaaattntggctcgagcaagtttacaatctacgatagaaaaagttgttccactgagctggtggtgaattcaaaacttatatttaatgtgaaaaagttgttccactgagctatttttggcaaccaagttggttgtttcaccacaaaatggacatgctggactgcaagaggatgaagtcattctccaatttggaaaaattgggaaggacttgtttacaatggattaccagtaccctatctcatcatttcaagcatttgcaatctgcctcaacagcttcgctaccacggttgcttgcgaatgatgcatgtttgaacatgtcacatcagcgtacgaacacatgcttcatcataaagcgtacatatcaattgttcaccacgacattacacctcgaggactgcagaagcaacaggtcatcctccaatttggaaaaattgggaaggatttgtttacaatggattaccggtaccctatctcagcatttcaagcatttgcaatctccttcggcagcttcgctaccacagttgcttgcgaatgatgcatgtttgaacagcgtggcctttagcagtatggtttgatgtgatgatgacttggtgggaagaatctaaccaaaatcgtttcctaaggtaattggaaatttggataatcgtcatctgaattagaaggacggtgctgcggatatgtgggggttctgtttgtttttctgagatcatttttgacttctgggaatatcacacgaaagtggaatgtaacctgcaaagcaacttctgttacatctccttatatttgtatctagcactctattgtgtgcgtatatatattttattctttcatagctttgctttgtttttcatttgtgtctagtttcccatatacagctacaagttccaaagacatgttattcttaacgtgatgaggccacgttatcaataacggaattaatgtttacacaaacattttattgaatcctcacaaaatccaggcatgtatctataatcaatgctattcttgtcta

SEQ ID NO: 9316 - DNA, 277 bp, Glycine max
  Clone ID: PAT_MRT3847_108421C.1
cccgaaccggaagagccaggccgacccacgcgcccgcagagagcgaagattaatgtttaggaagggaacgcgaccaccagaaaccacagaggcggaggagccagacaaagccaaacagacccaccaccaacaggaggaagcaaagggggcacgcaagaccaccgaagggccggaaagacaccaaccaaagaacaccaggcgaagcgacagagccacgcaaaccgcacagaaacagagacccagcaagacccccagggaggaggaaacaaagcgcacg

SEQ ID NO: 9317 - DNA, 694 bp, Glycine max
  Clone ID: PAT_MRT3847_108422C.1
gcgatttagggtttaggtgtatcaaatacaataaatgttttacaatatctaaccttgtgattgaacaaagtataaagcacgtaaccatggattcttgttaaatttacaatggctttcttggtgggcatgcattataaaatcttgagtggggaatgactctgcaagattcctaatgggtgaacaataatctcatttgcatcaatgcattttgggtcgttgattgtcgtcagtgctatattggccactacttttctagcacaaatatgaatcttttaggattcttaatgagtgaacagtaacctcgcttatatcaaggtgttatgggccattaattgtcatcggtgttattccagccactacttttctggcacaaaagacaaagctctacatgattcctaatgaatgaacagtaaccttgtttccgtcaatgcattatggttgggccgttgattgtcgttggtactatcatggtcgttacttttatgacccaaaagatgaagatctacaagattctcaacaagtgaacagtatcctcgtttacatcaatgcattatgggtcattgattgtcgttggggctatctagacccctacttttttatttcaataactaccttttttgcacaaaagatgaagttttacaatattcttgatgcatgaatgtggtgaaagaatggaaaacatgtttatttgtgg

SEQ ID NO: 9318 - DNA, 304 bp, Glycine max
  unsure (1)..(304): unsure at all n locations
  Clone ID: PAT_MRT3847_108423C.1
aacgatgaccaatactgaagcctttcaaataaagtcgatttcagaactcctaatccacccgttgttatggagactcacaggctttgtgtcaagcgtatttgggtncagctgttatgccttcagcccctctttccacgacttgttcggacactggaacccgctgaagatctccttttacactgtggtaagctcacttttatctatctttatgctctttgttaaaagatgcagcggggaacacgggaagggtttcttgttgaaagcacatgtgggttttgtggtcttngggcttacctctctctgg

SEQ ID NO: 9319 - DNA, 409 bp, Glycine max
  Clone ID: PAT_MRT3847_108424C.1
aggaattcggctcgagcctatgcatattatgaagacggattcaattgcttcagtgaagctgagaattcaaaccttcaagggattttttgttaaaaagcagaaactggtttttgaagggaaggaattggctcgtaacagatcttgtatccgtgattatggtgttggtgatgggaatgttttgcacctggtgctgaggctttctgatctcaaagctattactgttaggactatgtgtggaaaggagtttgggctttatgttgagaagagtaggagtgtgggctatgtgaagcagcatattgcaaaaaaagggcaagggttcttggatcacaaggatcaaaaactgatatgtgagggtgaggaacttgaagaccacagacttattgaagatatctgctaggacaatgatgct

SEQ ID NO: 9320 - DNA, 772 bp, Glycine max
  unsure (1)..(772): unsure at all n locations
  Clone ID: PAT_MRT3847_108425C.1
aacggactttacgttctggttgcgttccagttcctcagacccatgttctcctctcatctgcttggttggaccagcattgtctgtctcattctgtagctaatattttacttcagatgcaatcaattggatatcatcctgactgtgggacttgtaattatctactatcatctctatgtgcggttgatcaactagaggaggcagttaaagtcctgaggggcatgggtggggcaggatgtattccagattcgagtagttatggcgctgtaattggtgcgatgtgcagagtgagaaagactgctaaggcactggatttgatgaagcaaatggtggtccaatacggtttaaccccaggacagggaacactggtgaaattgctggcagcattacgggcaaacagggaaatatggaaggctgttgagatgattgaattcctggagaaagagggtaactctgttggatttcggggttatgagttagtcattgaagggtgcttggagaaacgtgagtatgttttggctgcgaaggttgcaacaggaatgacagaaagaggttttataccatatatcanggtcaggcanaaaattatcnaaagcttggccagtatcgataagtggaatttancttgtgctgtaaaacaaaaatttgcancacttaaatcttagctattaaattatttatagcgagccaagtacaatacttaatgccaatcaagtaactacatattatataacttttacattataatatctattcttttctcaataacattact

SEQ ID NO: 9321 - DNA, 306 bp, Glycine max
  Clone ID: PAT_MRT3847_108426C.1
aaaaaggggtttaaaaaaaattacgggaagttttgtcacaggaaaaattaacatacatttttcccaaaaagggtttttgccaaaaaaaaaaaaaaagggcccccaggggaaccctttgggggggggaaaaaaccccaaattttttttgggcaagttttaaaatgccccaaaaaaaaaatgcttccagctgaaatttgagttttggcccaaaatgatgatccaaattgaaaaaaatggttcccaccattaaaagtatagggggactttttgaaaaaacaaacggggttaaatttagaaacaattccc

SEQ ID NO: 9322 - DNA, 476 bp, Glycine max
  Clone ID: PAT_MRT3847_108427C.1
cgcaagatgcatagaagtttgctttggcactgtacacctcgtctactctagcaaacaaacaaacccgacgtatacttctgaaactcacttgactacttcacattcacactcactgttccgcgttgcgtcctacgtagtaaccaggaccatgaattccaacattgattcaacagaccatagccaggatcaaagcagaaaacgaaacctacccgatgctgatgattctccggcgccgaatttccacattgattcatcagaccataaccaggaccaaagtaaaaaacgaaagcaacccaatgatgaagattctccatcgcttgaatcgccttgttccaacatgaaccccagaaggtatcagatagaggtgtatgaagttgcaaggagaaggaacactatagctgtgttggatacagggtcaggtaagaccctgattgctgtaatgcttatgaaagaggtgggtcaagccatcaagacta

SEQ ID NO: 9323 - DNA, 398 bp, Glycine max
  Clone ID: PAT_MRT3847_108428C.1
aaaaaaaaaaaaaaaaaaaaaaaaaaaaaaaaaaaaaaaaaaaaaaaaaaaaaaaaaaaaaaaaaaaaaaaaaaaaaaaaaaaaaaaaaaaaaaaaaaaaaaaaaaaaaggggaaacggttttaaaggattctcgggttccctccgtggggccccctgctccctcgccttttttttggggggcctggggtttctttggtgggcccgctgttttccagcgttgccgccggggtatccccttggggttccgccggcttacccgctttgtgcccctctccccttttctcccctttggcttggtggtttacgaggccgggcccgcgatcgccctttccctccagttgccaccccccttttttggcctgtggggccccccgcgtgggggggccgcttacgccc

SEQ ID NO: 9324 - DNA, 315 bp, Glycine max
  unsure (1)..(315): unsure at all n locations
  Clone ID: PAT_MRT3847_108429C.1
ccggcccggaacccccgggccgatccacgcgcctgaatagccgccagaagaccacagaaggggcggggggacacgagaaggcacgggaggaggaaagcaccgcccaggcaagggcaggaagcacgggcagcccggaagacagaagaaggcnggcacagaggcgcgccacccccaaacgaggaagcacgagcccccaccaaagcagaaccaacgaaaggaaaaacacgacaacagaaccggacaccaggaaaaccacaaagccggngcgacacaacagccaccaccggagacacaacaaagcgccaaaaaaccacg

SEQ ID NO: 9325 - DNA, 271 bp, Glycine max
  Clone ID: PAT_MRT3847_10842C.1
aaaggccccagctcaattattaattctataccaccgcactactgacgggcatttgactaattgtcactgaagcctgagcttgctacacccgacaagaccatgactataccattcgctcccccctgcacaactagtgctaccctatcaccctcaaaccctggcaatcaccgcatacctgtccgtcttaatgccttcggaaagcaacatgctaccttatacatcatgctctaaaaatctcaggtctcactacgtccatacttacactctaccc

SEQ ID NO: 9326 - DNA, 616 bp, Glycine max
  Clone ID: PAT_MRT3847_108430C.1
ggtttttttggaaaattctgagtctattttcatacgatacgtcataaaagatgaaaactcatcggaggattattttaagctacctccttgaatagcttacaaggaacaaggttctatcataccataattatgcttttgaacgttaaattcgtccatatgtttttatttttatttttaattttacacacaacaaaacaagttaagagaattcaacaattatttgataagaataggcataatctccaaggttgatgttttgctgtctgaagtttgccctgcagtcgaagttgtagaatacgcagcccaaaattggctatcttcatttccagcaagctcaagttcttcttgttgctcttgtgcattacactggttttccagtttttggatactttccaattctaatgtgacttctttcatagttggtcgctttctcccattcaactgtaagcatcttcttgcaagattggcaactacaattatgtgttctttctccacttcctgcatgactcttgcatcaacaatatcaaaaaaacgattttcctccatacaaagaagaaaatatgaagctaaactttgaagtccttgttcgttcactgaggatattggtttttgtcct

SEQ ID NO: 9327 - DNA, 473 bp, Glycine max
  Clone ID: PAT_MRT3847_108431C.1
accggagaagccaaaataaaaacccccttgtaaagggccggaaaacctcccgggtgcccaaaaaatgaagaattttcaaaacgggaaaaccaaaagaatttcaaaggccggctaaacccaaatcccagcctaactaccccggcaagcaaaggaaaaacttttttaaaagggcccccaaaatgaaaaaaacgggccggggtttaaaaaccccggaacgggaaaaacccggggttaaccaaaataaatgccctggaaaaaaacccccctttcccaaatgggggaaaaaaaaaaaaggccccccccaagggcctttccaaaaagtggccaaccccaaaggggaaagggaaccccccctgaaccgggccataaaagcgggggggggggggggtaaccccaaagggaaccctaaaatttgccaacccccaaagccccggccatttggttttttgcccttccttttaaccaaggttggc

SEQ ID NO: 9328 - DNA, 1398 bp, Glycine max
  Clone ID: PAT_MRT3847_108432C.1
agagagagagagatggggctaagaagtaaattaagaatgtcagcgtcagtggtgcagcaggggatgaaggaaataagaaggagcgtgacgtacatgcctcgaccgggggacggtgcgccgcggggggtgacgctgataccgggggacggaattgggcctctggtgactcatgcggtggagcaggtgatggaggcgatgcacgcccccatatacttcgagaagtacgatgtgcacggggacatgaggcgtgtgccggaggaggtgctggattcgatacggaagaacaaggtgtgcttgaagggtggtttgaggactccggtgggtgggggtgtgagctccctcaacgttcagctcagaaaggacctcgatctctacgcttccctcgtcaattgcttcaacttgcccggcttgcccacccgccaccacaacgtcgacatcgtcgtcattcgcgagaacaccgagggagagtactccggtctcgagcacgaggtcgttccaggcgtcgtcgagagcctcaaggttatgtccaagttctgctccgaacgtattgccaaatatgccttcgagtatgcatacttaaacaacaggaagcaagtcaccgccgtccataaagccaacatcatgaaactcgcagatggtctcttccttgaatcttgccgacatgtagctaccaaatatcctggtatcaagtacaacgagattattgtcgataattgctgcatgcaacttgtctccaaaccagagcagttcgatgttatggtgactcctaatctctatggaaatctagtggctaatacggcagctggaattgccggtggcactggggtcatgcccggagggaacgttggggctgatcatgctgtgtttgagcaaggtgcttccgctggaaatgtcggaaaggaaaagatggtggagcagaagaaggcaaatcctgttgctctgcttctctcctccgccatgatgctcaggcatctacagtttccttcattcgcggaccgccttgagactgctgtcaagcgtgtcatttcggagggcaactgcagaactaaagatcttggtggagacagcactacacagcaagttgttgacgctgtcattgccaatctcgactagactacaccttcccatggctatgcacaatctttttcaaatatccttcccccagtttgttgtaatcaaagttcattttctattgctatttttcaacagggttgaagactctctataataattcggcttaattttcatgtaattatgtttgctcaaccaaagtcacacttgtaacctgtccattgtttgaggcaatttgctcaaacaaaggatgcttctctatccacataatgtgtaatgtaacgttgattgaaacgaaaaacactgccttccccccgggcgcccgcc

SEQ ID NO: 9329 - DNA, 926 bp, Glycine max
  Clone ID: PAT_MRT3847_108433C.1
aatatccttacaatataattcaagtccattgcattttcttttgcccacaaatagttggttcatataacgggatgccaaattttgtaacataactcaaaagcagcaagtgacaccgcatgtatctctaaataacattatactgaatacaattggatgggttcataaaataaacaaaaattgcgtcgccttacaagcatatcctctaatattatactaccaaattcgccataaaattctcatcctatacggaaaagaaattggttcaaactatcaaaatgacaacaaaaatggcattctcaatcctcatgcaaagccttcatcaaatagagtctgttaaagctctgccctgacaccccattgatttgattgcagtagttggaaatttgatttgttatgaggaagctctccaaccgggatggctctgggagcggcttgaaaattggatttgaaggatcttcctccggcaaaggttcttctccagcagctttacgagccatgttctccgcccttctcttttgaagccatgcttgctgctgagcttgttgacgagacaggctccgatagtagaattggaacttttgttgttctagtgacaagtcatccatgcattcaatcaaaaattctgtattcctctccattaatgaactggttgacaattgcaagcgatcataatcacactgggtgactggagtatcaggttctagctctgtcataaaggcactgataagtgcagaatttgaaactttgatcggtatttcctcaaagatatccacccatgataagttcttctccctcaatttctctccagtaaaattattgctgcgatagagttccatgaatgagtcagaaagcttcaaggccttcagagctagaacaccttgatcagaccttgatggatcatatattatgcaaaccccacgcgtccg

SEQ ID NO: 9330 - DNA, 1723 bp, Glycine max
  Clone ID: PAT_MRT3847_108434C.1
tttttaatataactggatgccaaattttgtaacatagataaaaagcagcaagtggcactgcatgtatctctaaatattcaataacagattatactcaatacaattggatgggtttcataaaataaacaaaaattacgtcgccttacaagcgtgatcctctaatatactaccaaattcgccataaaattctcatcctatatggaaaagaaattggatcaaaccatcagaatgacaaacaaaaattgccttatcaatcctcatgcaaagccttcatcaaatagagtctgttaaagctctgccctgacaccccattgatttggttgcagtagttggaaatttgatttgttatgaggaagctctccaaccgtgaaggctctgggagcggcttgaaaatgggatttgaaggatcttcctctggcaaaggttcttctccagcagctttacgagccatgttctccgtccttctcttttgaagccatgcttgctgctgagcttgttgacgagacaagcttcgataatagaattggaacttttgttgttctagtgacaagtcatccatgcattcaatcaaaaattcagtattcctctccatcaatgaactggttgacaattgcaaacgatcataatcacactgggtgactggagtatcaggttccagctctgtcataaaagcactgataagtgcagaatttgaaactttgattggtatttcctcaaagatacccacccatgataaattcttctccctcaatctatttcacaagacagaaaaatagaaatcaagtgattcaacttaaagacaacaagacatccaaaaaaattactacttctctctggtaaaattattgttgcgatagagttccatgaatgagtcagaaagcttcaagtccttcagagctagaacaccttgatcaggccttgatggatcatatattatgcaaacctagcgtctactattctcctgaaaaacattgccaagtttgcaacaaatggtcatttaccaattagatacttttgaagatattgttttcggccaaaaaacaaaatagtgcacaaagtactgcgtccaataaactaatttttctatttgaaatatcaaaaactatcatcaacaatttatagtaagcatgatattctaacatcaaaaaaataatttagtaagtcaagataaaataacattaacccttttagtctaaatacaccaatatttgagactgaaataatattaattattttagaatagcaagttgaatataatatttaggtcctaagaaaatattgcatgaaccattttttcatatagaagtttattaaaatcaaagcatgtaatatttatatgtaaattcaacgttaagcaaaggacttttatatgaattagaatagaatgttgaaacaacgacttaaatgatagctaaaacattaaatatttgattaattataaagtagattaaattcaagataagaaatgatgtctaagagttaaaaaaaagagtttgagttaatggattagaattaatccatttggtcatatacaatgtaaaacaaaattgtgataaaaaaaatattaattggattattagatatactataataacacaaaagacaagtctcaatcaagttgataaatattataagggactgcctcaaggggcaatttctttttcttaactaaaaacattaagagccttaaaatcctagtggtggtggctgcccctaaacgcat

SEQ ID NO: 9331 - DNA, 1558 bp, Glycine max
  Clone ID: PAT_MRT3847_108435C.1
gaatttacccgtttcgctttcggttgttcttcttcgcagtctctcaagcagccagcatttattctctcaccaccccaccatccagatccagatcaaatggcagccatggctatgttgcgtttatcagcacttcttgtctctcaagcagccagcatttgttctctcatcaccacaccatccagatccagatcaaatggcagccatggctatgttgcgtttgtcaccactctctggtcaaaaccatgttctttctttcccatcatcgccatcaccaccaccacctaagcttcataaccgtcctctgtatctcaccaatttgcctcatttgccccaaaggttgaaactttccttcgccggaggcgccggcggagatggggtcggacgtggtggtggcagtggtggcggcggtggaggaggtgaaagctggggggatgatgatggaaaatccaaagattcatctcttggaattttgggtctttttctgaacggttggagatcaagggttgctgctgatccacaattccctttcaaggttttgatggaggagttggtgggtgtgagtgcttgtgtattaggtgacatggcttcaaggcctaattttgggttgaatgaacttgactttgtcttttcaactttggtggttggggctattctgaatttcactctcatgtatctattggcacctaccatgacatcatcagcatcaaacctgccagccctatttgcctcatgccccaagagtcacatgtttgagcctggtgcattttcccttttggataggttaggaaccttggtgtacaaagggaccattttttctgttgttggctttggtgcaggacttgttggaaccacactttcaaatgggttaatcaagatgaggaagaagatggatccaacatttgagacccccaacaagcctccaccaaccattttgaatgctctcacttgggctgctcacatggggattagcagcaatcttaggtaccagactttgaatggagttgagttcatgttggagagggtgcttaaccctttagctttcaagtcctcagtgttggtgctgaggtgtgtgaacaatgttcttgggggaatgtcttttgtggtgttggcaaggttgactggggcacagagtgttgggggggagcagaaggagaatgaggttgctttgattgctgagaaggagaaggtggtggagtcagagagggaagagggtttgcagaataatcagtcgacagcaccataaaagtgattgtatcactcactttggcttgtttcagagcggtttgtcttttaattttgaccagggttgttggagttggagaaggtaaggttttttagttttatgaaaaattgtgtcctatggtagtatgggcatatgatgagtctgggagcaccaaataagtggaaagggtagattgagatttgagacctagtttgtgacatttgctgcttgtatgtatgtattaatgttacctgaaacaacaataacatgccaaattagtccggccatgtattggcccccccctcccccttttataaacaaaaaatatttaggccc

SEQ ID NO: 9332 - DNA, 768 bp, Glycine max
  Clone ID: PAT_MRT3847_108436C.1
gtttatttaagtttcgttttcggttgttcttcttcgcagtctctcaagcagccagcatttattctctcaccaccccaccatccagatccagatcaaatggcagccatggctatgttgcgtttatcaccactctctggtcaaaaccatgcactttctttcccatcatcaccatcaccaccacctaagcttcagaaccgtcctctgtatctcaccaatttgcctcatttgccccaaaggttgaaactttccttcgccggcggcgacggcggagatggggtgggacgtggtggcggtggcggtggcggaggtgaaagctggggtgatgaaggaaaacccaaagattcatcttttggaattttgggtctttttctgaacggttggagatcaagggttgccgctgatccacaattccctttcaaggttttgatggaggagttggtgggtgtgagtgcttgtgtattaggtgacatggcttcaaggcctaattttgggttgaatgaacttgactttgtcttttcaactttggtggttggggcaatcctcaatttcactctcatgtatctattggcacctaccatgacatcatcagcagcatcaaatctacccgccctatttgcttcatgccccaagagtcacatgtttgagcctggtgccttttctcttttggataggttaggaaccttggtgtacaaagggaccattttttctgttgttggctttggtgctggactagttggaacacactttcaatgggctgatcaagatgag

SEQ ID NO: 9333 - DNA, 154 bp, Glycine max
  Clone ID: PAT_MRT3847_108437C.1
tggctctcccaccattaacaccaacaatgacttgccctccattgcttgcggcggaggagcagtgccctgcatgcaggtggcgccaccgcttggcacaagtaactaagagactattacatacctgccccacctagatgatgcagcattggtcaaa

SEQ ID NO: 9334 - DNA, 1029 bp, Glycine max
  Clone ID: PAT_MRT3847_108438C.1
aagcaaaaccatgtcactttattacttaaaggaattgccagcaagcttcacactgttgcatggctccacaatcatttacctgaaatttaatgtggatggatgacaccaaatttcatgatttaataaacaagctaagctcctagacttcattctccttgaagtggtgagttacgaagcataattgtgtagtattacatggatttagtacatgggcataactggatggatgctatgactcaattcaaaaaatacttctgatataatgtttctgtatatcgatgctctaacatttatcctatgcataactctatatcaccatgtcagttacaaaggtagaaaatatcaatacattaagcattatctacatgtgcatcctgactcttgtaagtaaggccctttccaataacacttcagtagttggagaaatgcctcagtgtgcaatgttggtataaataatacttggacaagattgctgctgaagagagcatgagagaagttcctgcgggagaggatccaaatgcctaatatgttgacagtaatctttgagaattaatgatacaacctcatgcaccattaatattacaccggattaattagtttcatggctttgaagcatttcgactacttggctcatggtgggtctcgaatctttcttttcctcaacacaatccagagccactctggccaaaaggtccatcttgcgttcatcataatttgttttgattgctggatccattatttgctctagccaagatgtggcactccttttctctctcacccaagttaccagccttccattatgtgattcttctccatcaatgctttggacaccggttgttgggctttttccagttatcatctgcaagagaacaattccgtagctgtaaacatccactttagaggtgattggtaaattgtaaacccactcaggtgccatatatcctcgagttcctctgatcattgaaacagttgaattgctgtggaggttatctctgtttagtagcttggacaagccaaaatctgctacct

SEQ ID NO: 9335 - DNA, 243 bp, Glycine max
  Clone ID: PAT_MRT3847_108439C.1
aatcatgtgcactcaattaggctctctcgcgctggaacgtcgaccattcatgaaggcacaaggctcttttccgatctgcgcagcaaggcctccccttggaaaatcaccacgcggttcaatcgactatcgagcaccgcccaaacaccttagtatgaacgttttcatctaaactcacagtggctctcaattcctggttgtgctgaatccgtcggaaactccttctgcatcgacaataccaacata

SEQ ID NO: 9336 - DNA, 856 bp, Glycine max
  unsure (1)..(856): unsure at all n locations
  Clone ID: PAT_MRT3847_10843C.1
ctatgattgggtttgattggacgttcagcaagttcttttggtatctcttcttcatgttctttacctttttatacttcacgttttatggcatgatggctgtgggtcttaccccggatcacaacgtagctactatagtttcctttgggttctacatgatatggaacctcttctcaggattcgtcattccacgaaccgtaagtttatgtgtccctttaattaaggtttagttactcatttagttcttatacatgcagtctttacgcctagaaattacttgtacacatacttttgatttgttttagtctctattgtccaaaatcaaaattgtaggaactaaaacagattaaaaaatatatattcctaaaatgagaaatttttaagtgtaaatgtataagtattaaaacgtaaagattgtgttggaacatataacgaatgagtaattaaacctctttttaattaacactgaactatgtaacttttagatagtaagttagtaactcaactcacaaatggtattgtgatccttgtatgtgacagagaatgccagtgtggtggagatggtacttnnngatttgtcctgtgtcttggaccnnntatggattggttacttcacaatttggtgacataaaggaacgtatagatactggagagactgtggaagagtttgttaggagttattttgggtatagagatgactttgtaggagtagctgcagctgtgcttgttgggtttacactgctttttggatttacctttgccttctcaatcaaggcattcaatttccaaaagagatgaccactttactttatgcaacttgtaaatgaatgatcacatttctgaattttgtgaacaaacg

SEQ ID NO: 9337 - DNA, 258 bp, Glycine max
  unsure (1)..(258): unsure at all n locations
  Clone ID: PAT_MRT3847_108440C.1
attttcattatttattttcttatttactctgtttattctttcctgttccttgagggcgttttttttcgcttcctcctcgctcgctgcttcccgagcagctccattgcccccatctngattcatcggagnagttctcttgccccttcaccggcggcatcgccgccgagaacctaccgggcctcgccgttataccggcaccaatcgaaacggagcacgcgcgggcggagaacccgagcgcaccgcagcttctgcatccct

SEQ ID NO: 9338 - DNA, 422 bp, Glycine max
  Clone ID: PAT_MRT3847_108441C.1
attcgaggtctcgtgggcagacgcatgcgcggacgccgttggactgtccaccttaaaaagccgaaaaggcagttctggaggccctttcggactcaatataccacaccttgctccctgcggtgaatctctgcgacttgccgccggacaccaaaattgaaaccctgatgtcccacaccgccctccgctcccttacttacctccggcaagcattccactccctgttcggcacaaacaccctgtacgccggggttgtagacctattctccaccgacgccttcgacgttgccggcgaattcaatgccttcccctacgctttctatgcctccactgccaccgaactttacttggttttccaactttctagcttcgaccagcaggtccagtgcgagtttcgtgacctgccagaaccggtcagcatcccc

SEQ ID NO: 9339 - DNA, 390 bp, Glycine max
  unsure (1)..(390): unsure at all n locations
  Clone ID: PAT_MRT3847_108442C.1
tttttgtgtttgaccctacctcttccttatttaacacattcttaacaaacacccgtggcgatattaacaatactctctttaaggggacacctttngaactcatcaccaacgcgaacttattttaacacggacattgttattaatcccttaaacactaaaactcttcatttgtgtcggaaacccactcgacgtcacacatcccccttataacccccccctgaaacaggagacaacgcgaaagcttgatctccttctgatggtggaatacagatgttccttaacacactcaactgcttgccataaaaataaagctgtatgctccgaaccgatgccttccttgaggtcaatatccaccacaacgatggcattcgccccaaacctctacacctc

SEQ ID NO: 9340 - DNA, 217 bp, Glycine max
  Clone ID: PAT_MRT3847_108443C.1
aattggctacatagagtcccagaggaatgcaaagctcgacccatacaagaagttagacccaggtggcaattactgtaacccattaaacctagcctcagacccacagaataaagccacccttcaattaacaaagatcaagcacacccatcttaccataagaaacttcttgagctttgcgacccgaaccgccaccacctgtgaaagccctctcaacaac

SEQ ID NO: 9341 - DNA, 333 bp, Glycine max
  unsure (1)..(333): unsure at all n locations
  Clone ID: PAT_MRT3847_108444C.1
nanannngcacgcgtacgtaagctcggaattcggctcgaggagtgtgtntgtgagagatggttatngcttcntggaagaagctggtgttgttgttgttgatcnntctctacacttgtaaagcacaggaggnatagagctcnancncngtgtacctgnancataactgnncnggcggaancnncacngccaacagtgcctacnanctcancctgnngaccctnctcacttcnctntcgtccaacgccatcagtaccgaattctccantaanaccgtgggactgggcncatccncgncngacaagntntanggcctgttcagtgnnnagggtgcn

SEQ ID NO: 9342 - DNA, 349 bp, Glycine max
  Clone ID: PAT_MRT3847_108445C.1
gtcgagattgtgatgtctgggaatgccactgacacaaggagtgattgggcctcattggtacaagtgtttttatcaaacagcagcggtacagagcattatgatgcatgtaggtggacaaagtcagaaccacattgctgggaattgatcttcccaatagagtgtatgtggccctaataatggttacgaaatgtggagttctgagtgggcagatcaaacttcatggcatttgagtttacttattgacactcccagacagactacagtttatgatattctcttgggagtctctcacgatttggacattgctggcaatactcttatgccagctccttatgttccacaggctact

SEQ ID NO: 9343 - DNA, 646 bp, Glycine max
  Clone ID: PAT_MRT3847_108446C.1
gccgtaagctcggaattcggctcgagcgaaggcgaagattgtggatatttgtgagaaaggggattcatacattagagagtaagcttataatattcataaatgaaggagcattgcctgttcttaacatatattgatatggcatgccatatagatggattcatcactgcggtagctcacacccatgttcttcaggaaggtcctgttgctgccacaaatactgctgctgaggtggccttgaggcttgtcaggccgggaaagaaggtaatcaattgtaacaatttttttttactggatctgcatttatataatacaagttgatttggattttactacatgttgcctttcttgatttatttcattggttaataggtgtaaggtcatacactattataagcaattcagcttagtaaaatcggagagaaattaggttgcttcatgtgtatcgttttctttgcctaaacacatgccttgtggattttgatctctaaatgatgaaaactatcttgggctacggataaactccgatgaagctttattgtcatagttacactgatagaggtcattcatgtttcttcttgtgttgtctatcacattgctcttttttggaactcctcttgtctataatgtgtatttctcaccttatgct

SEQ ID NO: 9344 - DNA, 786 bp, Glycine max
  Clone ID: PAT_MRT3847_108447C.1
ggctcgagcataactccatttttctctccctctcttctctttcttaatttacctattctctcacgtctcaaatattttctcctccatctctcgccagcttcaagatatcactcattgagcaaagtaggtcaaaaaatttgctcaacaaggtaaaacatttattagttagctagcagtatggggagagcaccttgttgtgacaagaatggcctcaagaaaggaccatggacaaccgaggaggaccagaaactcattgattacattcagaaacatggatatggcaattggaggacactcccaaagaatgctgggttgcaaaggtgtggaaagagttgccgtctccgttggacaaactatctacggccagatataaagcgaggtcggttttcatttgaagaggaagagacaataattcaactacatagcattcttggcaacaaatggtctgcgattgcatctcgcttaccaggaaggactgacaatgaaataaagaattattggaacactcacattagaaaaaggcttctgagcatgggaattgacccggtgacacacagtcctcgacttgcccatgtggacatctcctccactcgatccgctgctctccatggcccttctcaacgcatcttcctatggctcctcgccatgcaccagcccatggcgcccccgcagcctccagtacgggctgctccccgcgcctccacctctcgcctcctcccccttctccccctcgccgcgcctcctccatgaccccgatgacagaaccagctttgtgatcctcaaatt

SEQ ID NO: 9345 - DNA, 404 bp, Glycine max
  unsure (1)..(404): unsure at all n locations
  Clone ID: PAT_MRT3847_108448C.1
tgagccttacactagctgtgatggagatatgatgaggctggaatgactgtaaacaagatggctgcactgcgatatacttgaaactcgctgatcctgacaaagccaggagcttactcacctactatgctaggacgacaaagacatatcgtgtcagacagttctggagggggaggtgagggtgatggcgcctggaatgatctaggagtacagatatctagggactgatgcacagacagttactgcgtctggagcacttacctggtgatgggctgggaggataactgaatgtgtagactctanactgataggagatagccctatgccggagacataagaaacatggcctatgccaaggtaccttggtcatctgagacaggcaaaatagatacaaagctgtgcacatg

SEQ ID NO: 9346 - DNA, 471 bp, Glycine max
  Clone ID: PAT_MRT3847_108449C.1
tctttctttacctattctctcccgtctcaaacattttctcctccatctctcgtcagattcaagatataactcattgagcaaagtagcttataaaatttgctcaacatttattagctcatcaaacagaactacttaattagctagctagcagtatgggaagagcaccttgttgtgacaagaatggtctcaagaaagggccatggacaaccgaggaggaccagaaactcattgattacattcagaaaaatggatatggcaattggaggacactcccaaagaatgctgggttgcaaagatgtggaaagagttgccgtctccgttggacaaactatctccggccagatataaagcgaggtcggttttcatttgaggaggaagagacaataatgcaactacgtttcattcttggaaacaagtggactgggattgcactcgctttccaggaaggatccacgatgaaataaagaacta

SEQ ID NO: 9347 - DNA, 157 bp, Glycine max
  Clone ID: PAT_MRT3847_10844C.1
cgcaggtccgattatgttggggtatgtgcttatgctatatcttacatgctatctggcggcgactggtcgcactacaatcagcacctgaacgtgccattgggacacagattccgggcttcaatggcagtctaccttccaagcactatgctgggtatgt

SEQ ID NO: 9348 - DNA, 410 bp, Glycine max
  Clone ID: PAT_MRT3847_108450C.1
tttctccctagctttgcttatagttcctgtattaatttttctctccctgagattaccaagctctgcaactttgcttctcaacatggagtatcgtctcctacccatttttactttactcaatgttagcttcagcatccaaacaactgtagcatgcatgcttattaatactttatttaaagttatggtttccttttaatataaaagctcgatttctatttagaacgggaattttcttactatagccacaagagttataatatatgggatttattttttataagtggtaaagcattttctggtattaattaattttatcacatattattatcatgaaaagaataaggccaggtgctgcataatctgtttggaatgtattaaaatgttaattacgagatgtttttgtatttgac

SEQ ID NO: 9349 - DNA, 398 bp, Glycine max
  unsure (1)..(398): unsure at all n locations
  Clone ID: PAT_MRT3847_108451C.1
naannnaaaangttcctttttttgtcccnnnnnaaaagccaaaaaagnggggggcagggggccaaagacgagaccagcgacccccacaacggcgganccgggagggcncaacaaccgaaacccccnaaaagaaaaaccacgcgacagaacaanngacaacaacgcccagagggacgggcaaaaccagaaaanaaaggacaacagggccgcagacnggaanaaaaaacacccataacaaaggggaaccccacacccctaatggacccccttacacaacctttgtcccacgggaaggacccgaaggccaacctcaagccaggataaggggcaaccccccgcaagaacgttagccaatccctaatatcaaaatatccaaacgcagatatccaagaggaaac

SEQ ID NO: 9350 - DNA, 458 bp, Glycine max
  Clone ID: PAT_MRT3847_108452C.1
agacagcagccagagctgtgtataatggaaaggctaatcttgacacggggcattcttatgaggcactacggcacgagcaaactcaaaagctacggctgaattgtgactacaagaacacggttgaaaacagctattaacaaaactaggcataaaaatgacagaatgcaagaacctttatgtatatagacccgttaaatgatgagtctttttatagaggctcagtcaacattgtcggccaaacaagtgcttagactttatcgagacctgaaacccgcttggcaaaaccgagaataccacccccgtgaccctctttcaggtgggaaattcttctataagtgccggagaaaagaacaagcgcaaaaggcgaaactgttggctgacaaactgagggtaatctaatggattgacatcgcttttctagaaatcgtaccaccatatacaacaaggtatgggtgtag

SEQ ID NO: 9351 - DNA, 497 bp, Glycine max
  Clone ID: PAT_MRT3847_108453C.1
tcgcccacgcgtccggagctctcaaaatctgcaaccctttgtgagaagattggttctatcaatggtgccattcttatattagtagggatgacaagcagcaaatcagaagatcttctcactgttgagaaggctgataaaacattggagaatctggagaagtgtgagagtaatgtgcggcagatggccgaaaatggcagattacaacctcttctgacccagcttcttgaaggtccaccagaaaccaaactctccatggctacataccttggtgagctggttttaaacaatgatgttaaagtccttgttgctggaactgtgggttcatctctgatcaatataatgaaaagtggtaatatgcaatcaagagaagcagcactgagggcactaaatcagatatcatcatgttatccaagtgcgaagattttaatagaggctggaatactttctcctcttgtcaatgacctttttgcagtgggtcctaatcttcttccaacacg

SEQ ID NO: 9352 - DNA, 202 bp, Glycine max
  Clone ID: PAT_MRT3847_108454C.1
tttcgccgttgccatagttggagtaggtggtgtacgaacggtttcggctgagatgctaactatatgtggtataggcagacttctgtccgatgattgtgaccaagtggagctagcaaacatgaataggttgtcctttcgtccaaatcaggttggcctgacacagactgatggagctgcacacactctgacagacataaaccct

SEQ ID NO: 9353 - DNA, 437 bp, Glycine max
  Clone ID: PAT_MRT3847_108455C.1
tgctgatgggagttaaagtcttgcagcaagcaatcattgatttactattggatataatggttgagtgttgccaaccttccgaagtgggtcctgttgctgattctgttgatgcatgctctaaaccttctccaaatggaagtggagctgcaagtcctcttgagtgtgaaagagaaaatggagcaatggagtctgcacgagtccccgtatgtgagaggttggattctgttgttcaagaaagcagtaatgcatctgctgtgcagagctctgatttaaaaggcaatggtattcaggaaaaagcacttcctggacagcccatttgtccaccagaaacatctgccactgcgtcagaaaatgcatcccttcgttcaaagaccaagtggccagaacagtccgaggagctcttaagtttgattgtaaactcactaagagctttggat

SEQ ID NO: 9354 - DNA, 824 bp, Glycine max
  Clone ID: PAT_MRT3847_108456C.1
ggaagtatgcctggaaagcaaaagtgaggggtagtggtagaaggataaggtgacttagagatagaaggataaggtgaggtgacgagagtgtcattgtgaagttggaaacaatgctagcttcttcgctctccttcctccattcttgcacatccccctcttcctcttccttattgtcaatttcacctccaaaccccaaaccctctcacttcctacctttcgtggtcgaagccaaagacaggacccgcagggaagacaggaccgctcgccacactcgcatcagaaagaaggtcgaagggacgcccgagaggccgaggctgtccgtgttccggtcgaacaagcatctctctgtgcaggtgattgatgacaccgcaatgcgcacgcttgcttcggtgtcgacaatgcagaagacggttgctgatgagttcaactactccgctggccctacagttgaagtagcaaagaggatgggtgagatcattgcaaaatcctgtttggagaaggggatcacaaaggttgcctttgatcgaggtggatacccataccatggccgtgttcaagcacttgctgaagcagcccgtgaacatggcctagatttctaaactaagtagtctctttcctttttattccatgtttaaatttgtaatgtgaggcttcaacaattttttataatggcatttccttatttccagtgactgttatgatccaatggctcctattcatctatcaatttgtttttaaaaaaagactgttttaaacaaaaaatcctaaaaatgtaagctgtgattacactgcgttcgactcttacaatcaattaagtgttagat

SEQ ID NO: 9355 - DNA, 773 bp, Glycine max
  Clone ID: PAT_MRT3847_108457C.1
gagctttctggcattcccccagcacccaggggtgttccctcagattactgtttgcttcgatatagatgccaatggtatcttgaatgtctctgccgaggacaagaccacagggcagaagaataagatcaccattaccaacgacaagggtagactctcaaaggaggaaatcgagaagatggtccaggaggcagaaaaatacaaggctgaggatgaggagcacaagaagaaggttgatgcaaagaatgcattggagaactacgcctacaacatgaggaacaccattaaagacgagaagattgcatcaaagctctctggtgacgacaagaagaagatcgaagatgccattgagagtgctattcagtggttggatggaaaccagctggcagaggctgatgagttcgaagacaagatgaaggagcttgagagcacttgcaacccaatcattgctaagatgtaccagggtgcaggtgctcccgacatggccggaggcatggatgaagatgttcctccatctggttccggtggtgctggccccaagatcgaggaagttgactaaattattttatgattcagatgagatgggtttgtggtggatctattcagtttttattttctttattttttggtttagaatattagcccattattttggttactcacactaggtatggtgataatgttttttggttttgaatagttccaccttatggagacttgtgtttactttttggcaaaggaaacaatattattgccaaatcttgccgttcctattt

SEQ ID NO: 9356 - DNA, 316 bp, Glycine max
  Clone ID: PAT_MRT3847_108458C.1
ggggccaaacaaaaaaaaaaaccccttttaaccgctaaaagggaatgataaaccaatttttttgatcccaaattaacccgattttaacaagaaaaccttaaatcaaaccaaaaggcctacaagagaaaaaccccccttaactaaacagtggggtcttgaagtcccaaaaaaaaacccccttttttaaaaaattcaccttttggaaaaacaacccatttacggggggggccgggaaaaattttttggaaaccaaaaaattgtgtttcaggaaaagcccagaccccctacaaccgggggccaaaactattggaacccc

SEQ ID NO: 9357 - DNA, 307 bp, Glycine max
  unsure (1)..(307): unsure at all n locations
  Clone ID: PAT_MRT3847_108459C.1
antttgngcacncntacgnaaactcggaantctggtngnncngnnntacacnntggncactgaagttaggntntacgangtnngacagcncngttngcattanctgnngcngagnnnacgnatgacggcatgaggttncntntcatttggncanggcntagttgcngaaggagaangcnangnngangnganggnnnntnaggaggggtcnnnnngngggnagnntnnnnnatnanggtnngagcanncgatnngannnnnggagggagagntgagagnnagaggngtaggaggtacanngncannc

SEQ ID NO: 9358 - DNA, 270 bp, Glycine max
  Clone ID: PAT_MRT3847_10845C.1
acaaaatccccaaaccccaatttctcgtccccgtacgataatttccccgcaattttcatcgctccgtatccgctcgcattgctgtttcatccacattgcaatcttccaggacattggatttgatctctgctttccgaaggtgagattcctctccctcacctttttcccacattgcttcctccagatagtgtaggtgttattgatcgagggggtgaggagtgttgaaaacgagcatgcagtgggagcaggaggggcgggggaaagggggaa

SEQ ID NO: 9359 - DNA, 491 bp, Glycine max
  Clone ID: PAT_MRT3847_108460C.1
tctttctataaattataaaaggctttcagaacaatattaagatgatgagaccaagagataattttaattactctttctttttttctttctaaaagagaaagtcaaaatataaatttcaagttgggttttgtaaaatcaatccgactttatatttgtctcaattgtttacttgattaaaaaaaatgagctcgccgtccgatcccaccggcggcggaggagagggcaatgccggcggcaacatgctgtacgtggcattggtgggcttgcttccggagcaggggaggatacggtgcagggcgcggaggaggcaccgctggagcagggaaacgcggtggtggaaccgtcgccgagggtggaggaacggctgagtttcggatcaaagtgggacaatgcttatttgtttttcttcttcttcttctaaaaaaatgttgttctttttcggaggaaataagaacatgaaacaaaatggaagtttttttttctgaatgaat

SEQ ID NO: 9360 - DNA, 1801 bp, Glycine max
  Clone ID: PAT_MRT3847_108461C.1
ggctcgaggagataattacaggttcaattcccatagcctgaaatataagttctgtttctagttccccagcagacataattacaggttcaattcccatagcctgaaattatgtctgctggggaactagaatcagagagagctggagagccaggaaaattgattcgtgaacgctatagaacagcatctcaagtggtccagaatcaaggaaaaatgagctgtttgatgatcaatgatattgatgctggccttggtagatttgggaatactcaaatgacagtcaacaatcaaattgttgttgggactcttatgaatctgtcagacaatcctacaagagtaagtgttggtcaagattggcgagaatcagatgtcacaaacagaattccaatcattgtaacagggaacgatttttcaactctttacgctccactgatacgcgatggaaggatggataagttttactggcaacctaaccaggaaggttcctttaattctaggtatttggggaggaaaagggcaagggaaatcatttcaaacagaacttatatttcaggctatgggaattgaacctgtaattatgtctgctggggaactagaatcagagagagctggagagccaggaaaattgattcgtgaacgctatagaacagcatctcaagtggtccagaatcaaggaaaaatgagctgtttgatgatcaatgatattgatgctggccttggtagatttgggaatactcaaatgacagtcaacaatcaaattgttgttgggactcttatgaatctgtcagacaatcctacaagagtaagtgttggtcaagattggcgagaatcagatgtcacaaacagaattccaatcattgtaacagggaacgatttttcaactctttacgctccactgatacgcgatggaaggatggataagttttactggcaacctaaccaggaagatatccttaatatcgttcacagaatgtatgagaaagacagtatatctagggatgaagttgaaagggttgtgaacactttccctaatcaagctttggacttttatggagctctaagatcacgtacatatgacagatctattttaaagtggattgatgatattggaggtgttgaaaattttggaaacaaacttctcaagagaagaaaggaccaaagccttcctgtatttattcctccagagcaaacggtggatgctttacttgaatcgggttattctctaatcaaagaacaacggttgataatggaaactaaactttcaaaggaatacatgaagaacatagatgactaatataaagaatgttgccgtggtgcaagtcctcaggaattatgattgggccagtttggaatccgtgtaaagttgctatcgtggatacggtccactttcgaacagggtgcttctctttagcaatttcccagtttttataagaatcgttatttatcatgatgtaacccatttttaagataaggaattgcatgaaatgttatccaaaaacagtgcaatgtttaaccttacattgctgagccgcttgttcgtgtatcattgtatccttatagtaccgttagttcaaaggtgatgtaatcattcttataatttagcctgctggtgctttatagtattcaaatccaagtattagtataggaaacaaaccacaaaaggccattagtatcaataagtaacagaattggcaacgaagttacctggaatagtcaaccctaccaacatcctggatgattcatttcagtcttgaatatgctcttgtttgcccaaataattaataaactctgattgattttcttc

SEQ ID NO: 9361 - DNA, 818 bp, Glycine max
  Clone ID: PAT_MRT3847_108462C.1
aatggagaacaaccctagttcatccagagttgacagaaaattcattgagaggaatagaagaaatcaaatgaaagctctctttcgcaaactaaactcacttgtgcctcatcaaagatcaaaggaggccattccactgccggatcagctagaagaagccacaaactacataaagaaactacagattaatctggagaaaatgaaggacaagaagaacatgctactaggaaatgaaaggccaaatgagagaatgaataatgatggaaggagggtgggattaaaatctccacggattgaaatccaacaaatgggttcagccttagaggttgttctaataactgggttggattctcagttcatgttcggtgaaaccattcgtgttcttcatgaagaaggagtagatgttgttaacgctagttataaagttattgaagatgcagttttccattcaatacactgtcaggacaaggaagaaactgccaacggagctgcgaggatatctgagaggttgaagaacttcatccatgattctagctacaatgctttttaaatgggagtcattattattattatatactcaatttttcttccatttcattttacataagttttctttctactttatttttcttatatcatttcttttatgtatcactttcttcttctttttctctgtttttcttttacttccatctgttccccccatatatggaatgtacacgtagccttaactttttccctagtgtaagacgcgtaaattgggaatgtttgctgtaaccattttggtggaaatctaattaaatacggataattctagaggg

SEQ ID NO: 9362 - DNA, 180 bp, Glycine max
  unsure (1)..(180): unsure at all n locations
  Clone ID: PAT_MRT3847_108463C.1
gttatttttntacctccttattgttgttcgtaggccataagtncaanaggcattttggaggattgtgntgtgccccctacnacttgctgaattcttgnntgtnatttccatnccanttaagtgatccatcaaagcaagtgtgaagtagaaaagcattcatnttcaananaaaanananng

SEQ ID NO: 9363 - DNA, 257 bp, Glycine max
  Clone ID: PAT_MRT3847_108464C.1
acagagaaaattgcagaaaataaatgaggcaaactaaatactgcgtacgtacttacgaaggagcatatcctactcctccaaacttacaaacgaaggagggacattcaaacagaaacaatgggaggatgccaaagcccctcttcaaaaaaacgcatctaaaatatctataatacaaactttcgcgtccatagattggtggagaggccagcagaccccaacaacctggccagtttggaaaaaaaaaaaagattcccgaa

SEQ ID NO: 9364 - DNA, 262 bp, Glycine max
  Clone ID: PAT_MRT3847_108465C.1
aaagactaatttaatattagattgtagtttaaccaaaattctgcttcactcttgcagagccaaattttcatggaaaggcaccaattccaacccaaacctggttaaaggaaccagctgggaaggtccgataaacgtgccccaatttttgagcctacccgggggcctttatttttcctttcaaagggggccccaagcgggtgtgatacccagcgctttaagcgccactgtgtcttcccggggtattttaaatgtgggggaaagc

SEQ ID NO: 9365 - DNA, 390 bp, Glycine max
  Clone ID: PAT_MRT3847_108466C.1
aaaagtctaatataacatatattcattgttattgacttattgtttaatttttcaaataacattgcagcaagtaacaactactgcctgccacagtttttcaaaacaccatgtaaattaccatgaaattttgaagaaaaacaaaatgttctgctccataagatacggactattaaacagtgtatgacaaaaacaggagtaattaaacttaaatcatgatcagcagtgaccagagtagcataaacggcagaaacatgaaggaacccctgatccttgtgcaaacagagattgttcgtctccttccatgtgatggctcataacaaaattaccaacaatggcattcatctatgatctatctatccttacagctataacagaatcattgagctaaca

SEQ ID NO: 9366 - DNA, 479 bp, Glycine max
  Clone ID: PAT_MRT3847_108467C.1
tcttacctctgcttgatgaagtttaccaggaggtaccggcaatacactcagcagctgcaagcggtagtaccttcatttgagtatgtttctggcctgagcaatgcagctccctaagcaagtttggccataaaaaccaagtcccaacattttagatgcctgaagaagccattcctaacgattcagtttgccaaaaaagcctcatttttcttttcagccaccggaaagttgaatctccaaggtttggccaccgtgattgaggcccttaggcacaggcccgggtttcttagcacaaaccttttggcggccctcagaggccccccggcggcgtgaattcccagcaggtgttgacactttcgcaccttaccctgacgcaagctatgtgctacaaactgtctattttaccagggctattggtcaatgcaaaaaggctttgaacctgtgaaaatactatctaacacgcagctcaaaattcaaagaaa

SEQ ID NO: 9367 - DNA, 2564 bp, Glycine max
  unsure (1)..(2564): unsure at all n locations
  Clone ID: PAT_MRT3847_108468C.1
ctcgagccgattcggctcgagcggctggctcgagtggcacctatttttccatttaatctcccacttctgagttgtcacataaaaaccctaattcccaattcctttctccaatcgctcctccctccgcgccacgtcgctaggctctgtagggttctgagttccgattcgcgagggaaaatgagcacgcagaagaagcgaccgtaccacatagaagcgttcaagcaccgcgccgtgggggatcccaagtacgccgagaagacatggaaggttctggaacacgctattcatgagatatacaatcacaacgctagtggccttagctttgaagagctttacaggaatgcttataacatggtgttacaaaaatttggggagaaactttacacaggacttgtgacgaccatgacttctcatctaaaagaaatttctcaatcaattgaatctgctcaaggagaaattttcttggaagagatcaacaggaagtgggtagatcataataaggccttacaaatgatccgagatatactgatgtacatggatcgaacttttataccgagcaaccataaaactcctgttcacgagcttggattgaatctttggagagatgttgtgatccattccagcaaaactaaggctaggcttctagatactcttcttgaacttgtgcttagagaaaggaatggtgaagtaataaacagaggattgatgagaaatataataaagatgcttatggatttgggtttgcctgtttaccaacaggactttgagaagcattttcttgatgtttcagcaaatttttactgtcgtgagtcccagaaattcattgaatcatgtgattgtggtgattatttgaagaaagctgagagacggttaaatgaagaaatggagagagtatctcactacttggatcctaaaagcgagtcaaagataactaatgtggtggagaaagaaatgattgagagtcatatgcacactctagttcacatggagaactcangcctggttagtatgcttgtggatgacaaatatgaagacttgcaaagaatgtataacttatttcgccgggtgtctgatgggctcacaattgttaaagatgtcatgacctcttttgtacgggatacaggcaagcagctaattatggatcctgaaaggttgagagatcctgtggattttggtttacgtatcgtgaattagcaggaaaaagatgacagcgtaattactatgtgctttaacaaagagcagacagggcaagctgcagtaaatccctcttttgaatattgtatcagtttacattctcggtctcatgtgtaaatacaattgtttttgcatgaaaaaccaatgaacaaggacgaaggtgagtatgatggagtcttcttaaattgcaaattaaccagtcagttctctaatgtaaagcttgcgactgttgttgctcagagggagtcagaaccagaaaacctagaaactaggcaaagagtggaagaagacagaaagccacagatcgaagcagccattgtgaggataatgaagtcctaggcggactctagatcataataatattgttgctgaggtcacaaatcacctgcaaactcggtattttccgatgcatgtttttattgagaacctgatcgattccttgagggatcgtgctatgctatctgtgcatgtgcttaagacaggactatggcctactcatcctagcccgccgtgtaatcttcctgtagaaatactgggtgtatgtgataagtttcggacatattatcttggcacccataatggtaggagattgtcctggcaaactaatatggggactgctgatttgaaagcaacatttggtaagggccaaaagcatgagttgaatgtttccacatatcaaatgtgtgtactcatgcttttcaacagcgctgagcggttgacttgtaaggagatagagcaggctacagcaatacccatgtcagatttgaggaggtgccttcagtctctggcctgtgtcaaaggaaaaaatgttcttcgaaaagagccgatgagcaaggacatagctgaggatgatgcattcttctttaatgacaaattcaccagcaagttctttaaggtaaagatagggactgttgttgcacagagggagtctgaaccagaaaacctagaaactcggcaaagagtggaagaagacagaaagccacagatcgaagcagccattgtgaggataatgaagtctaggcggactctagatcataataatattgttgctgaggtcacaaagcagctgcagtcacggtttttgcctaatcctgttgttattaagaagaggattgaatcccttattgagcgtgagtttttggagagggataaagtggacagaaaactgtaccgctatcttgcttgaactgtatgtgcttttgatttggcatggcacttgtgtgattctgtctgtcataagtttgattgcacatcacaaattgccgcaagtagtgtaactctcctttgcatactcaacaaaacctagatttgttagggttacttcattcaggctgcaaaacttaatatatcttctttgcatacttatttct

SEQ ID NO: 9368 - DNA, 302 bp, Glycine max
  Clone ID: PAT_MRT3847_108469C.1
gggtcaaatggatgttttgaatttgaaattgaaattggagaatttatttaaacttgacagagaaaaattaaggggaaagtcacgagacgttcatcattaatgaagtcaatgtgtttgggatcattgcataatgcaagatatttgctaccgatagaaaaagaaggtgaggtttctgtgtctgatatgggttggggaaaggtgagaagccacccattgggggccggacagatatttgatccctcaaattcatctgagaaagccatgaagcattattaaaaggactgccatttgggagcatattt

SEQ ID NO: 9369 - DNA, 199 bp, Glycine max
  Clone ID: PAT_MRT3847_10846C.1
caaggatgaaataagtggaaaccgttgtgtcgaaatccatgggaaatgatgcatccaatcatgggaaaatttaaaaagcccttgcttctgtttgaccaaccatttcaccttgtttcaattaaggcattttatctttccaccaaagggccacttttaattgccttagaaagccctcaggaaccaattgttgagtgtgagg

SEQ ID NO: 9370 - DNA, 800 bp, Glycine max
  Clone ID: PAT_MRT3847_108470C.1
cgctcgcgatatgtgattgtggtgattatttgaagaaagctgagagacggttaaatgaagaaatggagagagtatctcactacttggatcctagaagcgagtcaaagataactaatgtggtggagaaggaaatgattgagagtcatatgcacactctagttcacatggagaactcaggcctggttagtatgcttgtggatgacaaatatgaagacttgcaaagaatgtataacttatttcgccgggtgtctgatgggctcacaattgttaaagatgtcatgacctcttttgtacgggatacaggcaagcagctaattatggatcctgaaaggttgagagatcctgtggattttgttcaacgtctcttggatttgaaggataaatatgacagggttattactatgtcatttaacaacgacaagacatttcagaatgccttgaattcctcttttgtctagtacaatctccacatcctcctcaccaacccctttcaaccctcggtctccagagttcatttctttgcttgtggatgacaaacttcgcagagggttgaaaggggtcggcgaataggatgtggagattctactagacaaagacatgatgcttttcaggtacctacaagagaaggatgtgttttgagaagtattacacgcaacacttagcaaaaaggcttctttcaaggaagactatatctgatgatgcacagaggagcttgattgttaatgctcaaaacagaatgtggatatcaattcacttcttaactagagggtatgtttactgacctgaagactttttatgat

SEQ ID NO: 9371 - DNA, 273 bp, Glycine max
  Clone ID: PAT_MRT3847_108471C.1
gctgcgagaagacgacagaaggggtatcctaaaacaaaaaccgacgacgtagtccttgtatgctgtggaccattttcatgaatgcagcaagcttaacctagactaggtacattggttcctcaatcgagacatgactatttctaaagaacatgatccacattaatttgtccattcccattcttcttttgtcggtgtaacgaggcctcgacgaactttcatgtttcgagttcaactctatatattcagctaatcatgcatctttcgctactgctt

SEQ ID NO: 9372 - DNA, 472 bp, Glycine max
  unsure (1)..(472): unsure at all n locations
  Clone ID: PAT_MRT3847_108472C.1
tacgctgcgagaagacgacagaaggggagtgataaacatcttttttgttataccttcccttttgcaccaaaatggacaaaatgagtcaatgattagcaatgagtaacatattgtaattcaaacagctaaatcactctccattagatactgatatgataatctgataacaccatcggctaaataacaatactaattcatcaaaaagttttcgtatatgacaaagtttagagtaccaatcttcttatcaaggttcttttccattttaattaaaaaaactcaaggttaattggagtaatatctattttggtattcagcaatagcctatacaagctgcctagaatcgacacttgtaggttccatgccaatgatgctgagcaagattagagcttcctcatgaaattatatgccgttcacagtttcttagtggataagtaatgcactgtggttntagtcaatggcatctatatctgct

SEQ ID NO: 9373 - DNA, 589 bp, Glycine max
  unsure (1)..(589): unsure at all n locations
  Clone ID: PAT_MRT3847_108473C.1
aagtcagaattacgagataatcattgaagcagaagagtattacaataatgcatttgtccaattaaaatctctttctccttagtcctaatgacaccaatgcctctctttgccttgagaaggctatgttaccatccatctatctatttcttcctggctaagacgtcccttttcgtttgtaatggtgatcttttctgatttaccaggtcccttgtcttctgccttcacatttagaatgccgttggcatcaacttcgaaggtcacttcaatttgaggggtgcccctgttcaattacccaaatataataccaccaatgaatttactaacattaatatatggagcaataatgagagaggacactgcatcatcaacgcaggtaacaaaccttggagctggtggaattccagacagatcaaatttcccaagaaggcgacaatcctttgtgagactcctctcaccttcgaaaacctgtattaagaaaaaagcagngaatcgtttcaagtcaatcccatcatagttcaccagatagtggtgcattttggatttagaagaaaaacacgcatcatgccctttaatggcaccgtacctgaat

SEQ ID NO: 9374 - DNA, 147 bp, Glycine max
  Clone ID: PAT_MRT3847_108474C.1
ctgagtcgtatgggggaggctgaacaacatcgaaccacttctgattttgcaatataggaataaaaaaacgaatcaacgaacaaagcataagcgacactgacgaactgagaaacagcgaaaaccatcatcacgctgtgccttacgcac

SEQ ID NO: 9375 - DNA, 263 bp, Glycine max
  Clone ID: PAT_MRT3847_108475C.1
tttaaataataataagtgtttgtttttgaccattgtagacaaactttgtttttgacacaaattaggccacctacactgggttctgttttccaaattttattgggttaaaaaaaaagcgcagaggggaaacattcctttagattccttccctgaaaaattaaaactcaaaatcctgggggtgtgtgttttaggggaggaaaaaacccgagggggggcggagaattttcagggcaccttgggtttggggattggggatgagaaaa

SEQ ID NO: 9376 - DNA, 1616 bp, Glycine max
  Clone ID: PAT_MRT3847_108476C.1
ccggattcccgggtcgacccacgcgtccccaagcgtccgcctcgtcttatgcctcgccctgtgtccctccacgactccgccgtggcgctagaccacgtggcggtggccgtggtggtttttctcgcccccgcgatccctcttcccggctcctccctgcagacgaagcacgaaacggtgacgctattaacttcgaggcgtacgagtctgtaccggtggaggctagtgggaaggacgtgcctgcgccggtgaacaccttcaatgaagcggacttggacgaaggcttgaagaggaacatcgagcgttgcaagtacgtgaagcccacgccagttcagcgccacgcgattcccatcgtgagtgcgggacgcgaccttatggcgtgcgcacagactggttcgggcaaaacggctgcgttttgcttccccattatatctgggattttgaagggtcgttatcgttctgggttttcatcaattccatctcctggtgccgctattgcataccccgccgcacttattctttctcctaccagggagttatcatgccagatacgcgacgaagcgaataaattcgcgtatcaaactggagtgaaggttgtggttgcctacggtggggctcctattactcagcagctgcgccttatggagaaaggtgttgatatattggttgcaactcctgggcgtttggtggatattattgaaagagaaagggtttcgttgacaaagataaagtatcttgctttggatgaggctgatcgtatgttggacatgggttttgaacaccaaatacgcaagattgtggagcaaatgcagatgccctcgccaggtattaggcaaacattgttgtttagtgccacgtttcctaatgatatacagaagctagcatcggactttttatccaactacatattcctgtctgttggaagggttggatcgagtactgaactgattgtgcagaagattgagcttgtacaggatatggacaaaagggaccatcttattaatcatctgcgacgtcaaaaggtgcatggggcaaatgggaagcatgctttgactcttgtatttgttgaaaccaaaagaggagcggatgttttagaaggttggttgttgagaagtggcttttcagctgttgccatacatggtgacaaagttcaaatggaaagggaacgggctttaagatcattcaaatctggtttgactcccattttggttgcaactgatgttgcttcacggggattggatatcccgcatgtggctcatgttataaactttgacttgcctagagacattgataactacgtacatagaattggaagaacaggccgtgcaggcaaatctgggttagccactgccttcttcagcgacaagaatagccctattgtaaaggctcttattggactcttgcaggaagcaaaccaagaagttccatcttggctcaaccaatatgctactgagggttcatcatctggtgggggtggtcgtctatgaaccaaccggtcatcgtttgcggcacatgggtatagaagaccaaatacgcaagattgtggagcaaatgcagatgccctcgccaggtattaggcaaacattgttaggttaaagccacgtttcctaatgatatac

SEQ ID NO: 9377 - DNA, 445 bp, Glycine max
  Clone ID: PAT_MRT3847_108477C.1
gacggtggtgatgatccttttcttgatggaaatttaaaagctgaatcagtagccaagcacatgagagcaataatggagcctcttttgtccacaaagtttggtgcagaagttataaatgaactattcaccaggtttcaaaagaaaattatgcaactgatggaggtggagaaatcggagtgggctactttgatgatatccatgataaaaactgcttgaagatgttgctcaataaaagatcttaaaaacttgtttttcttcctttatgatttttttatttatttgttcaaataaagttatggagcagtaaggacaaggcatatcataataaaagatgaacaactgtgtgaaaattagtagacaacattttttccctttctatccattaggatatggtcatacaccaataatataagggttgcttatattaatttgcttgtaatattag

SEQ ID NO: 9378 - DNA, 278 bp, Glycine max
  unsure (1)..(278): unsure at all n locations
  Clone ID: PAT_MRT3847_108478C.1
cggggcntctaagcggcagaaactgccaattcatgcggaggaagtacatagattacgcaggggaagaaaggctgataagcgcttactggatctgcacagaaggcctaaagaacgtagtgaagaagtgatagagacacagatgtactgatgaaagaatttatgatacctgaacgagcagatgcgggagttgaaatacagaaggaggcttattcaattgtgagatgcgaagccatgatatgccctcactgtttcatggctttaagaatacaaatgggagg

SEQ ID NO: 9379 - DNA, 1286 bp, Glycine max
  Clone ID: PAT_MRT3847_108479C.1
attactcttgaatatgggacttgagttttttttccaacacttaattttgctttgattacaataaaaatgttattttttcttaaattactataatgtgataaatatttataataatatgtaaaaatatggtaatcaaacaaacaaattttattcatctcaaaaaacatgattccctagcattaaaaatttcttcctactaaatgcctcctgaaagtaatcgtgaagcacttgctatagcaggcctaagggctacctgaaaatggagtacaaaacagatgccaaagtactataattctcagctttaattgtatcaatcatcatgatgtaacaatttcatgttacaagatctagaagtaccagagcttggtaccatcctacaagttacaactactgatcaggcggtgattgggaattaacaataattagaatggccaaataattacaaccaaagataatacacctttccagtatcagaaattctgaaagtcaatatttagtcttcatagatgcatcatttacagttttatacttgagccttgaaaagtgactgcaccggtttcggagacaaatttgccacactcctgaacttctgctgtttatatttttcgcgtatagaattcagagaacagcctttcatatcatgttgcaaatctgccagtgcaaggacggtagttttaagctctgacactttgtaattcgtatagtgttccatggttgaattccatggatgctctgattggttgagggtccatctggcgagtaatacagcagatgcagctatcaaggaaggtagaaactgcaagaagctgttttctacaagagtaagctctgctaaatactttgccagtaattccagttctacatatgaaacctgtagaacatggaaaacttacaaccaaattggttttgtttgtttcccttttgggcacaatataaagtcgaattgtggatgtttaatagcagctgcaatctaacagcagatgcagctatcaaggaaggtagaaactgcaagaagctgtattcaacaagagtaagctctgctaaataatttgccagaaattccagttcaacatatgaaaccttgtaagaagattctgatgctaggatgaacctcctgagaaatgtttttgtggtgggaacagataactgaaaatccctctctctctctccctctctctccctctccctctcccccgctcttgtgtacgtattatctgtgatgaagcaaaattcttccactcgaggagcacaaatctcttcatactttgatgcaatcagcatgcaag

SEQ ID NO: 9380 - DNA, 257 bp, Glycine max
  unsure (1)..(257): unsure at all n locations
  Clone ID: PAT_MRT3847_10847C.1
gcggcggcgaacgnggnagcggagcnagcagcggcacaggcggcggacgccggcgaggacaaccgaacaancgcgccgagcacggacacgcgagagcagagaaccgacggangcacgnncggaaacgcgnncgcnccgaaggacaagaacnacaacaacaacaacaacagcgnncaagcgacgccgngcgacacgaggcncacgcacaccagggcgaacncacacaacaccgagnncagacccaaggacgacgagaa

SEQ ID NO: 9381 - DNA, 304 bp, Glycine max
  Clone ID: PAT_MRT3847_108480C.1
gtgtttttttctttttctcttgtttttgttgctgcttttgagttttgcttgttttgcttcttatggtgttggagattgtggtcatagaacacagggggtgtcccgccttttatgaaaaaaaagttttcccatttgattaaacccactttaaatgttcaattgaggcttgaaaaaaaacaaggggggaagaaggggcttaggccttttctttggatgacccccccccttttgatgaggccccctattacttcaagagggaatggggggccatttttttaacctaccaaaaaaaaaaacggcgggg

SEQ ID NO: 9382 - DNA, 591 bp, Glycine max
  unsure (1)..(591): unsure at all n locations
  Clone ID: PAT_MRT3847_108481C.1
gttttattagtccttgcaggtgtttatgctttctgccagaagagaagagcagaaagagccatttctcgaagcaatccttttggaaactgggatccaaataaaagcaactgcggcactcctcagttaaaagcagcaaggcagttttcatttaaagaaattaagaaatacacaaacaacttctcacaagacaatgatattggatcagggggttatggaaaggtttatcggggaactcttcccagtgggcaagtggtagccataaaacgagctcaaagagaatcaaagcagggagggctagaattcaaagctgaaattgaactcctttcaagggtccaccacaagaatctggttagccttgtgggattctgctttgaacgagaagaacaaatgctggtttatgagtttgttccaaatggaactttgaaggatgctctcacaggggaatctggaattgtgttgagctggagtagaagactganagtagcccttggtgctngccagggtttggcttatcttcatgaacatgctgatccccctattatacacaaggacatcaaatcaaacaacattttgctggatgaaaactatact

SEQ ID NO: 9383 - DNA, 505 bp, Glycine max
  Clone ID: PAT_MRT3847_108482C.1
tttccgtcatcactgtatgacgtcctccttctttgggggggggggggggccctcgacagcgaggagactggggaaggcaagcaagtaagtccctggataacaaccaacaaagttcataaacgtatagtgaccaaagaatacggctaataacaaaataatagaaaggctttagaaatgaaatgagcgtaatcctaggagagcagtaaaatactaaaatttttgtggttgtaacggctacagcacaggtaaccggcgcgtgcgagtagtaagcgagttagtagtaataccaattggtgtgggtggacttagtgtaagcggttccggtaattagtagtggtatacgtgcgtgtaaattttatgggaccgggttaattaagtattggtgccgttggccaagtcgttttgggcaccggagtcatggtacaccctcaaacgagtgtgcggtaagcatcatagccgtttgttaagcacgtttatagacttcaatgtgatggttaacaatgtt

SEQ ID NO: 9384 - DNA, 362 bp, Glycine max
  Clone ID: PAT_MRT3847_108483C.1
gagagagagagagagagagagagagagagagagagagagagagagagagagcctcctgcctaattccgcacgtggctattcattttcctccggattatccattccacccacccatggttgcatttctgactattgctttccacccatatatcaacatcaatggttgtatttgtcttgctatcttaaacgatctgtgcccccccgccttgacactatctaaggttttgctctccgtttgctccctattgacccatccccacccagatgctcccttgctgcctgagcttgctcgtatgtaccagacagacccgtccatgtatcagccgactgctacgagctggactcagaagtatgcaatgggc

SEQ ID NO: 9385 - DNA, 469 bp, Glycine max
  Clone ID: PAT_MRT3847_108484C.1
gaccaaattgtcctttataataacttgggtgatccttcatcttgaactagttttgtaggttgagttaggtttagtccattttcatctaatacaaacttttgaaagaggtttcatcttcctttgttgttatcaatgttgttaaaatagccactatagtggcgctattgcattgcagaatttcttggatccacaattgctactctgtccactattgtgaacgagtggttgcgacagtcatccttcatctttttatcatctttgacgagtctccatccaattgaactttgagttaatattatgttatttttgatgcattttatttttattggcatacaacttaattttttatacatatataattgataatatcatacacttcaattgctatgcgacttctgctattggcctacaattttatacacaatatgatatagcaaattattggctttccaccattttccgatgatct

SEQ ID NO: 9386 - DNA, 661 bp, Glycine max
  Clone ID: PAT_MRT3847_108485C.1
ggctcgagctttttcacttcttcatatctcctttctcttctctgcgcgaccccccaccttgcgtgggtttttttttcggaagcagagagagatgatggagttgtttctaagttgcatggtcctctttgtgttaactttagcaacacttggcgcacactgtatctgggtggtttcatcgagtagagcaggttccaaacttccaccaggcccttttcctcttcccataatcggaaaccttcttgcactgggcaaaaagccccaccaatctctggccaaactcgccgagactcacggcccaatcattactctcaagttcggccaattaaccaccatagtggtctcttccgccgacatggccaaagaggtgctcctaacccacgaccactccttgtcgtcaaaccgtgtcattccacaggccgtgcaggttcacaaccaccacaaccacagcattaccttcttgcccgtttcacctctctggagagaccttagaaaaatatgcatcgctaatctattctccaacaagactcttgatgcgagccaagatctcaggcgcagcaaactgcatcaactcctccacgatatccaccgaagcagcctagctggtgaagcggtggatgttggaaaagcagttttcaacacttccatgaatttgctttccaac

SEQ ID NO: 9387 - DNA, 458 bp, Glycine max
  Clone ID: PAT_MRT3847_108486C.1
aatcccctttttttttttttttttttttttttttttttttttttttttttttttttttttttttttttttttttttttaaaaaaaccggtcccggacccatggataaaagtggggttttcaaaggggatcaaaccaaaaaaaaagcggggaaaaacaaaaaaaaaaaaaaaatggcctccctaaaaagggaaagggccaaagggggttgggccccaggggcaaattaatggccccccccagggaaggtgggggaagtaaaactaaatttaaccccttaaacccgcccaaaattggaggggtcccaaaaaaaccccaatgggggggggggaaccatcccctttggaaacggaccggggggcccccggttcaaaagggggaaccaaaaaaaccccccccatgggggccccgggggggggggaaaaaaaagatctttgggaaaagggaaggaatccctttg

SEQ ID NO: 9388 - DNA, 446 bp, Glycine max
  Clone ID: PAT_MRT3847_108487C.1
actagtctagagtattctattttgtagtttgtatgtattctagaaacagctcatgcaaattattgaatcacactacaatcttcgttaaaaaaaaaaaaaaaaaaaaaaaaaaaaaaaaaaaaaaaaaaaaaaaaaaaaaaaaaaaaaaaaaaaaaaaaaaaaaaaaaagaaaaaaaaattaaaattttaaagggtcccttttttaaaaaaaatttaaaaaaaaaaaaaaaaacttgggggggggcccgggccccaatttccccttatggggggtgatttaccccccctccttggccggggttttaaaacggggggatggggaaaaccctggggttacccaaattaatgcccttggaaacaatcccccttttgccagggggggaaaaaagaaaaaggcccccccccatccccctttccaaaagggggccaaccttaatgggaaatgg

SEQ ID NO: 9389 - DNA, 586 bp, Glycine max
  unsure (1)..(586): unsure at all n locations
  Clone ID: PAT_MRT3847_108488C.1
agctccttctctaaagtaagggtaaaataagtattcacgttgatgagaaaattaacagatgatgctccaatacatttatgatttgttgtgcttgcatatgtaatatcgacagttaattttctcatcgatgacttgggagttggaatcttggatttagctcgtctcaagtaacggtagaataagtgatcacagtggttgataaaaaaatctaacagttgatatttcaacacattcattatttggtatacataatatcgatagttggttttctcatccatgactgcaatcacttagtgtgtgtttttttggttaaccaccgcaattagggcctttggctctcaagtgggaccccgaggtatccccacaagctttgatcttttgggctagttatgggactaatcacttagtgtgtgttgtcaattgagctacacacattgngtacttagtgtgtgtttggatgagcatttgtgaaattgatttcatttaaaattgattgaagtgaagtgattcatgcttganttttttttttatgcaaaacttagtgcagattcttcaattcaaccanaagctactctttatcactttt

SEQ ID NO: 9390 - DNA, 321 bp, Glycine max
  unsure (1)..(321): unsure at all n locations
  Clone ID: PAT_MRT3847_108489C.1
attcttagcttagccagcataccgcttagtggggcaagctttattgcctctgatctttctttctctttcttctctgcagccaaagcagcagccgctgtagcccggacagcatcttgcccatgaaaggtggcttctcaaccggcagcaacagctgnttccggagcagaaatgacctttttactgccaaaaccatcagataccttagaagggacagactcattagacgcctcatactgactgtgaccagagcaaggcatgtactgctagacttcaggagggcatatgaataccaaatcccattattaccatcatagaaaagac

SEQ ID NO: 9391 - DNA, 467 bp, Glycine max
  Clone ID: PAT_MRT3847_10848C.1
gcgttcgttcgttcgcctgcttccgcacctcacgctgcagcgcattaaaacctgcaacaaccgctacggctacttgattcccagaatctatccatacattcctacttactggcgcacgatctgtgaagggaaagagaataactctctgtgctggccactgacttcacgattaattttatcttacactcttagcttattagctgaacactttccctatttgacataggactctcctgtcagcaccacatatgacctgtctttttctgggaaaaacacggtatcacaagattaagcctgtacactttcgtgttatggaacctcatctagagccaaaggaggaggcgtcccagaaccgctctcgggcttctacgtcttcctcgacgtccacaaccacatgagcatcctcatcggcgattacaccagagacttgttaaacaagttcaaggtccggcagcataacacgcctc

SEQ ID NO: 9392 - DNA, 448 bp, Glycine max
  Clone ID: PAT_MRT3847_108490C.1
gtcgacccacgcgtccggtgaaaacttgcaagtatacctcctcttagctttaatgattagtttgattttgaagaagcatactctgatgttgataattagagtacacaagtttatttttaagttcatataagtgttttttttgcttaaaaatgattttaatatctaaatattgttagcaagtaacaagttgcacaatgtacactgtcacttctgtgaggtattactctttgcattgctgagactgaaccttaaggagcttctaatttgatattattttgaaggttagtttcttaacaacatacaaggttatataatatattaataatataggataacatgaagatgctattatcttttatcttatagcttgcctgtgaatgttttcataattcattgttttaggaacataatcaacatgtacatgcaagcattgaaaatctgaacattt

SEQ ID NO: 9393 - DNA, 438 bp, Glycine max
  Clone ID: PAT_MRT3847_108491C.1
ggctcgagtccaattgctcctcttcctatttcaatgctgcctttggcaagagaactgaaagattctggtctatgcagctgccagtgcttattgctgagatagtctttgctgatttcttagttagcattgtgtctataactgctgttttgtatgttcgctacaagctaagaaattgtcagtgctcagggccataggtgaagaaactaaaagggagctctataaaccaaaaggatcataaatgcaagatccgaccggacttggatgacttcaagattatgagggcacagatgttcccctacgaggagcttgatagggcaactagtggattcaaagactgagttcatattgtggaagggaagtttttcatgtggagtcaaaggaggtctcaaagatggtactgttgttgctgattacagggccatagtgtcttccaacatg

SEQ ID NO: 9394 - DNA, 587 bp, Glycine max
  Clone ID: PAT_MRT3847_108492C.1
gattctcatgatatcatctggacgagaagcatggaaagctgagctcacatatggcacatacattgtagatccatcatttccctcccgcataatcggatcagagggcatatgaggaaaagatgtctggcacatatgacaatcatttaccctttgaaaactttcagccatagttacttgttgataaaaacttccatcggggagaacaacatggttagatggtggaacttgagacccgccataaccatcaaatggtataccaggagaaatcgtaccttgatatgcagtgtttcttggctctgtaggaagcggtactaacttttgagcagcatgatagttccccaacagattttcttgggtttgcattaccgggttaatcaaaactggtgtggaactaatctgagaattcaagggagccattgacatgtgagcagcaggaaggaactggtgggatgagacacttaaaggactatcttgaaaggttgttgggagaacaagaagtactacttggcaaaagctggataggtgaatgaacaatatctgggttgtctaaagctttttggcgagattcaacaatagccgtgaatgat

SEQ ID NO: 9395 - DNA, 1005 bp, Glycine max
  Clone ID: PAT_MRT3847_108493C.1
gctatatcgccatattatatcatcaagttttttagcaagactggtaaagaaggttgggtttctcttggagggatacttctttgtatcactggaactgaagctatgtttgcggatcttggtcatttcactgctttgtcaataaggcttgcatttgcgtttgttatatacccgtgtttagtggtacagtatatgggtcaagctgctttcttgtctaaaaatctcggctctgttgataacagttgttatgactcaatacctgaccctgtgttttggcctgttttcataatcgccacccttgctgcaattgttgggagtcaagctgttataactgcaactttctccatcatcaagcagtgtcatgcgcttggttgctttccgcgagtcaaagttgtacacacctcaaaacatatatatggacagatctatatcccagaaatcaattggatacttatgatcctaactcttgcaataaccattggatttcaggacacgaccataattggaaatgcttatggtaatttattcccatatgagcctctctctctctctctccatgcttatggtaatttattcccatatgcttatggtaatttatacccacacacacacatagaaacacaagaccatttgtcttgctattttgtatctttcatggctagtcatatagtcaagattggcagcattggcaacatagtgatgttgtgctctggtgccaattggctgttcactgcttgagtgcattgatttcccccaattatgaaactggattgatagttcaaacttatcaaaagccaaaatagatgcttcatatgcacaattattagcttgtgggtgtgaaagtaatcatatgaggggggaaaagaatcttagtttgaatgtacaaatcttaatgacataaatactactataatgtcaagtacacagaaagatatcattcctttcccttagtattcatatgatcatgacttctactttgatcatgtattacagttaatgcttggcaaa

SEQ ID NO: 9396 - DNA, 254 bp, Glycine max
  Clone ID: PAT_MRT3847_108494C.1
cagaaccaacctcactctctcttactctgtgattctctggctaattcatcaattgcatcaaaatgcataggcttcaactgcaactagtggtattcctctcaatctcaacttttcacaatgcgtactccctcactgataggctcatgccaaatgcgaacttcgatcacgggccgaagccatcagaattgaaagggtccgtagtaacagggcacgatgacatagcgcattcgacgatttcggggttcgatgaatac

SEQ ID NO: 9397 - DNA, 288 bp, Glycine max
  unsure (1)..(288): unsure at all n locations
  Clone ID: PAT_MRT3847_108495C.1
cctacgcttccgaccacgcggccggaaacgaggaacagccggggcgggggagccgaaaaaacgacgcgcgaaaggacacaccagcaggaggcaggcggcacaagganggcaacacagcaaaaagacggggggagaggcgcaggacaaagcccacatggacacccgcccacaggcaaccgcaaaagcacccgggaaagagacgcncaaccgagagagccangaaaaacaacggcgccaggcgaaagggcccagcacgcagcaacaanaccccaaaganggggacccacc

SEQ ID NO: 9398 - DNA, 792 bp, Glycine max
  Clone ID: PAT_MRT3847_108496C.1
aactcggacagttgctcactgtgtcacttgaattgtagcagtggaaaattaggcattcggggtaggacatttcaagtaattcgtaaattgtgaaggcgtaaaacgtatatgtaacaaacgcataaatgtaaaagctatgcccatcttcacactgatccatgtaataatgcaaattacaaagaaaaatgatggtaataatctacacaaaacaaatcatgagatactaaaatggcaccacctaatttgaagaacctcaattttacagaggaatgagcaaaaacttatgttgtagaaaatggatttcacgagatctccaaaaaaaaatgagaggggatattgatcaaatatataccaagaaaacttagggagtagttgtgctgtgttggtttccctttttcatcccttgaaatgaactacaatgcacgaaatatcatccttactctctctgttcaatgactcggcaactagttgtttagctgccttttgtggatcttttatccttcgtgcaatatcaactgcctcttggtttgccattaccttccaaagaccatcactggcaagtatcaaaagctcagcatctgggtcaatatcaacatgtcgtatatcaggatcagatcgtaagtgtgattttaaatttttgtctccaaatgctcgagaaactgcaagctgcccatttactcttgcaacgtctcctggcatgacccccccaaaaatgagcaaattagtccaaattacacaacacaaacaaaaaggactcatttaatgttgcaaataatatacttctatactaac

SEQ ID NO: 9399 - DNA, 417 bp, Glycine max
  Clone ID: PAT_MRT3847_108497C.1
aaaacctaattgatcccatttcatgaactattattttggtatgaacatcatgtgacctatgtgaatagaatggaaggatgcccattattaggggttgaatttccatccccgaattacaacaaatatttggtttggataaatagacacaaaataattggtagaaaatatcatctataacttggggggtggtttaacaaattcattcatgctttcaaggaacttttggtttcttgtacggaggcatattctttcaagagtcaataaccccaaaagcaagggctttcaacttatttgataaaaggaaaccttctggatcacttaaccttatataagccacccttcccttctgattagttttgctcaaagaaaaattaagggcatctattctaatgggtctcctatgctcggccaaacaaa

SEQ ID NO: 9400 - DNA, 1043 bp, Glycine max
  Clone ID: PAT_MRT3847_108498C.1
agctcggaattcggctcgagatgcaatactggggtcagttaaaaaggtagacactgttgaaggtttacgggatcttcaaattccttcagggattcaacctggagattcagtgaagttgtcatgtttgggagttccagacataaataaaccatctgttcgaggcgatcattatttcattgtgaatgttcttattcccaaggatatcagtggcaccgaacgtgtacttgttgagcagttagcttcactaagagcatctagcaaaagggattcactgtcttctaatgacaatgggatacccaaaggaaaattcaatgaattcataaaaagggatccaaaaggtgacgcttcaaggaagggaataaaaaatgttggctctctatggggatcaatcaagaacttcttaaggggaggacagtctgaagaaaggtttgcctcaatcagcatggatacgaaagtattcttatggagatctggccaccaaaatcctgtccctgattacttttttgttgttttcattataacttggatttttgcctctatagcaaagtctaagcattagatacttcagaaaagatccgggtcctttaatagaacagagtggaaaaaaataaaataagggtatgcttggttaggaaaataaaaaataggaaggggagtggaatggttttgatttttcaggccttggtgcttggtagaaagatgtattagtgggaagtgggtaaaaaattagtttcagcttttttttaatctatgagagatcacaattgagagagtagagtaagaatgagttccactacactaaacacccacaccactgttatacaaagcatgtgttagtaatttcttccaaaattctctcctatttatttttagttctactacacccctaaaacattctgtttgagctaataagattagtggttgaactcaacttttatgcccccatcctgtagtaaccatggcacggttaagttatcgaattcagctctttgctcccgttatgttgagacttaaattgtaacctgtaaccatctttgggggct

SEQ ID NO: 9401 - DNA, 380 bp, Glycine max
  Clone ID: PAT_MRT3847_108499C.1
cttggaacctttgggctgatttatgtgcttgtttatgtgcttgcatggtcgtgagaagatgatagaaggggacatatggaaaacaaacaagaacgcagaaattccagtcaagctattacgctcttaaaactaaaggtcaaagtaacgcctcctactccgaaaacaacaacgccaaactccccgttattaacacacgtacgcgggttacgtatcttgttatgctattataaatatttgttgtactatggtggaagttggttgaaagcgcttttcttgtcgttgttgactacaactaatttcttggcggcattgctcgctgcggcgacacatttattattaactctattattgcatttggtggtgtatggcggtagcttccc

SEQ ID NO: 9402 - DNA, 274 bp, Glycine max
  Clone ID: PAT_MRT3847_10849C.1
aacaaatgctaatcctgagagttgccctgcaggactcaaaagggaaaggttttgggacgtggcagatacctgcagggacatggaattaaggccattgcaatgtatcatctttgtagcattgtcatcactcctaagctgccttcacagttttagtacactaagatgaggaaatcgaaaatgggcagagaaagctcatactgtataattgaagacagtgacagagaacgtgtcagttatgccaaaactcttttgatttctgttccaggatttccaa

SEQ ID NO: 9403 - DNA, 399 bp, Glycine max
  unsure (1)..(399): unsure at all n locations
  Clone ID: PAT_MRT3847_1084C.1
taaatatgaaatgtgatcatgagaatgagatacttttaatatagaaatatgactttctagtnctgngnatctnctcnctcttngataattagccctcagtnctnctaatgcaatcatatccatgcttcctacaatnccacccncttggnattgttttctatgagagtaaccattagatgttggntgtccanttccagcctnggggngtgcatcantaggaacataaacagtngantngtcctcaacattaatgccagattttttcatctttganaccagcatccgcatgtgngggagntcanattccanatcttgtgggggggggtgngatttcaacaagtgtacttcttaggtcagcccctattntcaactnncacagatagggntgcttctnatgga

SEQ ID NO: 9404 - DNA, 347 bp, Glycine max
  Clone ID: PAT_MRT3847_108500C.1
ctcattcattttttcattctcataatattaatttttttatctgaacacaaaattttgaaaataaaagaatttcaattgaaatatttaaaatttttaaaatttaaaatttttcagaattttaaatttctccatccaaatactggtatttttaatattattataagattaaaattgaaatttcaccttatgaatttatgttaactttttttccaaaaatttgttacgtggaactatcctagttaactaaatccaattgtaattaggaaaccacctccaaatctttgaaaaacttgcatttaaccggatggttgaatatttccttaaaggaaaaaaaaaacatattgaaa

SEQ ID NO: 9405 - DNA, 655 bp, Glycine max
  Clone ID: PAT_MRT3847_108501C.1
gaatctccacactgacatttttaacaaaactaacatttgccgatacaaacaatcacataaagaacattgtgtaatcaacatgctatgatttagcacattccatgttacaatgtgtctcacccttatattatttctaaaagtttccatagggactacaagaaagctacaaagaaggcaaaagaaaggtgcatatgctatacaccttaacctaatattaatgatgcataaaaagcaatatacccttctcaatgagatgtaggaattattccctggttgcgtacacttggtttcttggacatggtacatgcaagtgcagatcgttgcttggttaacccttcaatgataaaagaaagtgccccataagcaatgcagcactgtagaagtgattggggtgtacctggagaatcctaaaggatgagtcataataacaataaaaacgtacaagagaagaaaattaaatacatatttttctttttggtgaataaatttcatacatatagagatagacttatacaaaagaattgattgaaatgcctgagtcactaaagcagctttttgttttgttttgttagaccattcaacatagtaataaacctcaacctttccccagccagcaattggagacaaaattgtctcaagtgtttggcatgaagga

SEQ ID NO: 9406 - DNA, 683 bp, Glycine max
  unsure (1)..(683): unsure at all n locations
  Clone ID: PAT_MRT3847_108502C.1
acggctgcgagaagacgacagaaggtgacatatttctctgtctatctgaaaaggaaaaatatttctatatttgttgttggttccagataatgatgtacttcatggaacttgcctccccgcacactgaagaagcaataaaacttgtggataaagttggaggatttgaatggttgattcagaaatatgaaatagatggagctactgcactcaagctggatcttgcactcgacactccaattatcattgttccaaggaattcaatgagcaaagagttagtgatctttaaatctgtttgtggagtctaatagcagtttttatttaatgtgcttggttattttttatgacggtattatgggctttgtgttaaagtcaaaatataatagggtgaaaattgcattgcattattgacataattggttgtcacgttgaataacaaaaagcatgatagtgtgtgcttgattatgtgtcatggtgtttgcttttgctataaatctgagagtttcagatggttactatggtgtagtaagtgctattagaaaattacttatatatattttgttcttctgatttcttttaattttggtgatggatgacaaataaaattctgggaggatatgtggggtagggagaagtttctttattaacatatcanaattttaggagaactgaagatcaatatccgt

SEQ ID NO: 9407 - DNA, 145 bp, Glycine max
  Clone ID: PAT_MRT3847_108503C.1
gacatttttgggttgtatttgattattacgaggaaatgcgtttcaatggaccgattaaatttgtctttttgatatttgaaacttgaggttaatctttgacccaccattatttcaagattattgtgaatgatagatagtttgtact

SEQ ID NO: 9408 - DNA, 240 bp, Glycine max
  Clone ID: PAT_MRT3847_108504C.1
cgctgacgtgatcggttcgctttacgatacgctttcagaagaccactgagccttattatatacaggacgaagctaactgagccacgcaatcctttccaaacacaatatgacgtccatgcgctagactattgatccaaagataatacgcctggaattaaaggcttgcagaatatccttcacacaatctgcatggtaagaaagagaactcctatgcagagccaatgagctactatacaagca

SEQ ID NO: 9409 - DNA, 504 bp, Glycine max
  unsure (1)..(504): unsure at all n locations
  Clone ID: PAT_MRT3847_108505C.1
gaaagctgggactgaaagatgaagaaatgattcaaaaggtcgataaaagcctaaaanaagtttacttcaaagccgncacgttgctancaatggcagngctaaggttagcttgagcactacctctaaggacatgatcacgttgagtttgaagagctgtaagcttcgcaaggccacacattggaacaaccattatacctgatcagttggatgtccatggccatgtcttttggggatgtgatacaaagcaatcttggtttcaaaccaaatgaacctttgcttgatgttggaagcacaagattgtggatgattggcttgatcagcacttggatggtgtaccttacggtatggttagtacctcattttaataaacaaagcaagcaacatactcgtatgcttggcattagggcggtaagacaaattgtaaagtgtaatgtaaaattttgcgatgaaatactgttttggtgaaattgttgcttggtatcagcgcatggattatctctgcaa

SEQ ID NO: 9410 - DNA, 530 bp, Glycine max
  unsure (1)..(530): unsure at all n locations
  Clone ID: PAT_MRT3847_108506C.1
gcttggtttttttttttttttttttgcgttcggggcagtcatataataatttcatgcggcaatctgcgtcatagcagccacgaccgcgatttaaaactatggggttggctgtgcaaatcatacagaaaggaaaatttccaggcatggaccttatacaacatcatgaggctaatgggattgacattactctgacactagagaacattgggcttacaagagacgactcgaatggaaaggggatntccagggcaaaatacaatanaacacttcacaacaaagcaaaaaaggccccccagatcaggggtgcgaagggcccctttacctatcaagccacaaaggatcccaaaaacatttttaaaataaaacctaatgggggggtaacaccctgggccccgaaaattttttaaaggggaattttaaaaaaagggggggggccccggggccgggggggggggagccccgggaaatttgggggggcccggggcgccggggggggggggcacaaggtgttggccttatagggggggggg

SEQ ID NO: 9411 - DNA, 135 bp, Glycine max
  Clone ID: PAT_MRT3847_108507C.1
ctgacacatacagactctctattcattggcagcatcaaaatgagagatggcaaccagtggagccttgcttgaatctccagcgtgcgattctttcaccgatcatcagccatatacaaattcgttacaaccctaccc

SEQ ID NO: 9412 - DNA, 429 bp, Glycine max
  Clone ID: PAT_MRT3847_108508C.1
ccacgcgtccgctcatactacgtggtagagtacattgatgtgtacagcttgtttcattctagaaaatgcaattattagtggaaagggcacttgtgatctgagaagttctctgcctaatggtggtcgaactgcgtagcaccattaccaacggtgccgtccacatattgttgctgggaaagatcctgagacaggaggacggcctctatggtagtgcacacttaatctctccactacttctacatcacataacaatctgctactggactacgttcaagatcaggatctatagcctgctccagagagatgagacacttgcttactatctatctcagagccagagaaccttctgttgtaccattgtgtaggaacaccatattttttgcttatctgcttgacagatccactgttgtaggctttcttctacacttg

SEQ ID NO: 9413 - DNA, 442 bp, Glycine max
  Clone ID: PAT_MRT3847_108509C.1
ccacccatctttgtgcaaactggacctatttctttattttgtaccatgggcactcacggaggccatatttcaaaaagagccatacaggacgacctttcacaaaaatgctgccagagttatcctactactaagactgccccaattgccctgtttaaaaacaactatcccatcaccatctatgttcctataataaaaattggacttctgaggaactccgaaccctaactattcgacgtccttggagaacacgacaccccctgcgccataatcaatgttttcggagagttcgcccagagccccctttaaacatggttacctgcaccctgtggacatgcaggactgcggttagagccagaccttaacctccaccttggcgaaaagccatgttaaggcctgcacggtgacttgtaaactgccacctggggggtattccccgattccc

SEQ ID NO: 9414 - DNA, 455 bp, Glycine max
  Clone ID: PAT_MRT3847_10850C.1
atcacatgactttccacgactagcgagcggccaagctggggcaaggtgacaaaagctaaccctgcggtggcgaaagaagcgtcacgggggggttgggcgaaggggagcgggccggccccataaagcccggtggctggcccaaagttaacagaggagggccccaccacctgctgctgatggcccaaccggaaggccctcgtgaaaagcggggataggcccccaaagccgggggagaacctgactaggcccgcagcactctgcgggtggggctatacaaccccccccatcacttcaaaaccttggtcgtcaaacactaaccggactcttggaacctgcagcaccatgtgttataaaatgggggggtccaacaccaaaaactgatcgtgcaagcgctaagaggcacttgacttcctccatgtacaaatgcacgcacggtgaaaatgatgcgcacattt

SEQ ID NO: 9415 - DNA, 422 bp, Glycine max
  Clone ID: PAT_MRT3847_108510C.1
gggagtattctctctctctctttctttcttttctgttctgccatgccaatgtttagtgttgcctcataaatgcctttcaacttttttttgacgattctctgccaccttggtcgcttcacacacccaaaccctacaccgcgcaggaaataagtaaatcacagtaaattcctcttcttcttttcctttttactcactcgtcttcttctttcccttaaaacgcaaacgacacggttaccggtgaagaactcaacagaaatgcatgggagcaatgcaatgaatgaacgtcgttcgtttttggctttcactgcgaacaaatttttaaaccgtgtgtgtgtgatgtaggtgtagtattagcttttagatactagctagctggctttttgattgaatgaaatgaacgcttcgtttttttctcttttctc

SEQ ID NO: 9416 - DNA, 419 bp, Glycine max
  unsure (1)..(419): unsure at all n locations
  Clone ID: PAT_MRT3847_108511C.1
tacggctgcgagaagacaacagaagggggtggtgtggtgtggtggaagaggaatacacgaagcataagcaatgatatgaggctgtatacgactgaccttattggatctgagcgaatccaaacccaaaccctaaacgaatcctaataagcaggggagncactctcgatcaatcgaaccatcgagcaagattgtctctctgcgaggccatgcgaccaccctataccttcgccatcgccctctacagagaggtaccctttttcgattttgccaattattacatcgattgcgacagacatgactgtcgacacccactccgctcctaatatcaaatacaaaggcctgctctgcaatgccggcacctgtgcttccgccggggttattgctgctacattggtgtgtactttagatgtcatcaaaac

SEQ ID NO: 9417 - DNA, 909 bp, Glycine max
  Clone ID: PAT_MRT3847_108512C.1
gtgaatcatgcttctggtgggtcaattgataagcataggggcactacattcttgcaaccatcagtaagtggttcttcagcattagcaaaattaaagactggtggttctggagggcccttaaaacaacaaggggagaagaaagaaactcctcaagaaagacttaaaagaatcatgaacaagcaactaaacaaacaaattaagaaagatactgctgctgaacttgccaagaaaagggaacaggagcggcagaggcaggaaaagcttgcggaaactagtagattgagtcggtatagacaccacagccgcagccgcagcaggagtttcagccgttcccctccaagaagatacagacgcagtagaagtccaagtagtagaggttccagaagatattattctagttctcgttccccttctcgcccccgttcccgctcacgttctcggtctccttattctcgatctcccaggataagaaatcgatcaaggcactgatggaatgctgtatacgtgtagaaaggctgacgaagttttgtgccatttgtttataatatggaatggatattaacatctggctttcatttctaccaaatgtttcgagggaaaccggtcttggttgagttgtgttgaagttgcgctatgcaatctttctgaaaccaaggttcagatttattgaattcaaatcaataacgtaggttcattgaagccaaaagaatatgattattgaactataatataatatagcatgtaagtttgataaaccctttttaacctagaatagatattttcttacctactgttgtaaatgtggcgtttatcattgaactttagcggtttacctgacactggagaaagcttaagggtaagcttatgaaatttaaagctgttgagttcgggtacgtcaaaaaaaaaaaa

SEQ ID NO: 9418 - DNA, 388 bp, Glycine max
  Clone ID: PAT_MRT3847_108513C.1
ctgacaacaggtgggggcacgtgctatttacgctttgagtggatcttcggtgcaggtggctggcatgtatcatactcgcacgagagccatggtagcaacggactccagtagatgatcacacgttccgctgtactgatttctcacttaggccaaggtatcatgcttgacgcggcgttgtgccgatcctagagtggactggatccttacttcactcacgtactccgttgcgataatgatcacacgacaactgagctctcacaatatagtgaagcacatctcaaataagccgccttctaatctttgaaatgttcacactgactatatatatctcacataatccagcgtacagaaaatgagtagcattgttcacctatagggggttcaggaa

SEQ ID NO: 9419 - DNA, 264 bp, Glycine max
  Clone ID: PAT_MRT3847_108514C.1
acgtgagttacccttgcaggtgcgcttgcgcttctactaattgaaacgttgatgagggttgtggaccatccagaggcatccccaggaccccatgattctgattacgcgtttagggactttgcataactaatgattcatgagaaaaacaagaaatcccaaccccaaatatcaacagtgtatagtttgaatgcataatgcttgaagctgacactgcgaggaatagaaattagctaaaattttagtgtgattgtcaagtactgatcg

SEQ ID NO: 9420 - DNA, 293 bp, Glycine max
  Clone ID: PAT_MRT3847_108515C.1
aagccttccgccaagccttccgtttttcggcaattctggatccaatggaatcaccattatttccgtccaaggggcccctttccaggtcaaaggcctcccccgtaccttccaaaacctaccttaagaaggccggtccattccgtaggaccggttccttggtattaaaaggcctcccttcaagggtgttgaaatttcgactttcaaaacttgaaagcaccgttacccctaaaggtacctttgttggaatggtatttttacttgccagaaaatttgaggtaatttggccttctttt

SEQ ID NO: 9421 - DNA, 267 bp, Glycine max
  Clone ID: PAT_MRT3847_108516C.1
gtttcactaatggatgaagtaatctcaacgttggaaagaaatggtctaagttttgtgaattcggcaatgagggtaaagacaaaaaagaagggaaagcctcatatggcaataagaattgatattccagccaccactcctacggctgttacttccatgttgtgggaggatttagtgaacagtccaatgaaaccagggtatggtggagagttcattaacaagagaaaaattcaatgtgctgagaagatgattagaagtgcatttgtagag

SEQ ID NO: 9422 - DNA, 266 bp, Glycine max
  unsure (1)..(266): unsure at all n locations
  Clone ID: PAT_MRT3847_108517C.1
ttgacgtcagtatgcatcacgtttgtaaaaagtattataggtagctanttcatcacttatttacttttttttttacattttttctaatttattttattatcattcataataaataaggtaaaaatatacaaagtggtctgacaagaacttatgacctaactctgacatctttaataaatagatcaaaccaaactagaccttatttatattagatggtaggtatttgacaaaccacctaactatcttatttntatgcttatttactt

SEQ ID NO: 9423 - DNA, 493 bp, Glycine max
  unsure (1)..(493): unsure at all n locations
  Clone ID: PAT_MRT3847_108518C.1
taaggatggacagactcgtaatcatgctcttcttgctttcacccttagtgtgaagcatataatctactgctgtaacaatatagataccactaccccgaatgactctataactatatataataaaattataagaaaattctcttcctactttaaaaaagtgaattacaacccagacaatattccatttattcccatctctaatttcgaagataacaacataattaacaagtccaccaaccttaactaatacaagaaaccaactctccttaaagctcttaaccaaatcaataatcccaagagaccctgacacaagccactcgaacttccattacataatatctacaaaattaatagtatgaataccataccagtaaaacatattgagactaatatgntaaatcccgagataatatgaacttttaatcccactaaactaacgactaaagttaagtctggagatatacgccattaagctctgacagaagctctatca

SEQ ID NO: 9424 - DNA, 256 bp, Glycine max
  Clone ID: PAT_MRT3847_108519C.1
tggctcgagcgcttgccgctcgagccgaataggctcgagcacccttgcttgaatttttttgtctgtcgcttctggggtgtgtattctcttgaaccagggctaacaatacacgagaggttgggattcatgagagtgtgcatgatcttaggactgatttggcagaccatgttgctgccctatctgaggccactgttaaaaagcgaggcgtttttgccgttgctatatatggcggggctcgcattggactaaaggaaaa

SEQ ID NO: 9425 - DNA, 431 bp, Glycine max
  Clone ID: PAT_MRT3847_10851C.1
gcttattcacctcactagggtttgtttgtaacccctttgtaggggacagagatccacactcttctggttaagcaatgtgggcttgctgacgccttgttcacatacagcatggaacatttgatcatgacgaccactattttcgggtgggaacaaaagacatattttttttgagctctctcccttaacatgtgagacaacctaaaccctgaactcctgaacactgcccctgtaggttggcttgccagtaaaaacacagaatgcacctctggagaggcatacattatgcacacgttgaaccatttgcgatgtttctccaaaccaagagttgagatatcgccaaaacttctcctcaacatcgttgctgcgatatgctatcctctattgtacagtgtcttaagactcttttctccccaagaaaatattcaactccc

SEQ ID NO: 9426 - DNA, 239 bp, Glycine max
  Clone ID: PAT_MRT3847_108520C.1
tttgaatttttaaaaaaactgattgtgagctaaacaatgttgagatgtactatgtttaatttaattataaagtgcaaagctatacattggaaggaaaacagggaaatcaaaatatactaagttttcaattaactcgttaatttgaagggtcgtgtgatattgatgccccacccttactaagcttgcatgcaacaacaaaactcttcaattgagataccttaagaatattgggcgcccaa

SEQ ID NO: 9427 - DNA, 1745 bp, Glycine max
  Clone ID: PAT_MRT3847_108521C.1
cccttgtttccgagagggagaaaaagatcttccagaagggaatgaaaatttaacagagagggaatgggatcagatgaagagagaatcatggaatggaatggagaaagaggtttcaaataacgagaaggaatctgatgatgcatcagataaactaactgaacaagaaattgtgttaccagagcagaagaaacaaaaagaagttgatagctggaaaaatgtagatagagaagctagagagaggagaaaagaaagggatgctgatttagaaggggataggtctgataaacgtaccaagggccttgacaaggaatcaaacgatgggtgtgctgatgtagaaggggtgatggagaaggagagggaggtctataattatagcagtcagcaccgtaagaggatacaacgatctaggggaagccctcaggcgccgaaccgggagtcttttttcagatcccatccccaagacaaagacgggtctcaaggtaaagtagaagtttcttctgttgtttataaagttggcgaaagcatgcaagaactgataaagttgtggaaggaacatgaatcatctcaatctgaaatggagaaaaatggtgaaagctctaataatggtcccactctggaaattcggataccatctgagcatgtaacggctacaaaccgccaagtcagaggtggccagctttgggggaccgatgtgtacacatacgattcagatcttgttgctgttctcatgcataccggttactgtcgcccaacagcatctccacctcatgcagccatacaagaattgcgtgcaactgtccgtgtgctacctcctcaagattgctatatttctacactgagaaacaacatacgttcccgtgcttggggtgcagcaattggttgtagttatagagttgagcggtgttgcattgtgaagaaaggaggtgaaactattgatcttgaaccttgccttacacatacatcaactattgaacccacccttgctccagtgactgttgagcggactatgactaccagggctgcagcttcgaatgcattgcggcaacaaagatttgttcgagaagtcacaatacagtacaatctctgcaatgagccatggataaaatatagtataagcactgtcgcggacaagggtttaaaaaagccactctacacatctgctcgtttgaagaagggagaagttttgtatttggagacacatttgtccagatatgaactttgttttactggagagaagatggtcaaggttacaccagcaacccagttgcatgaccctgtcacagaaaagtctcaaaatcaccacccacattctacaaatggtgaaaaaaatgattgtgagaatgtcatgattgatgcattcaggtggtctcgttgtaagaagcctctgccacagaaactgatgcgtacaattggcatccctttgcctattgaacatatagagttactggaggaaaatttggactgggaagatgtgcaatggtcgcaaacaggtgtttggattgctggaaaggaatataccttggcacgagtgcatttcttgtcaatgaattaacttttttgttattttgggggatggaggagttagtttataaaacacttgtgtttttttaggcaagatggtgaaatgatatacttggaaagatgttgtctcatgtaacaaaagatagtttatggggcttggatattggtctccaataaacaataaaatatcccttacatcgtgtaatttttctctcaaaaaaaaa

SEQ ID NO: 9428 - DNA, 773 bp, Glycine max
  Clone ID: PAT_MRT3847_108522C.1
cggaattcccgcgtcgaccccgcgtccgcaactttctaggggaagccctcaggcgccgaaccgggagtcttttttcagatcccatccccaagacaaagacgggtctcaaggtaaagtagaagtttcttctgttgtttataaagttggcgaaagcatgcaagaactgataaagttgtggaaggaacatgaatcatctcaatctgaaatggagaaaaatggtgaaagctctaataatggtcccactctggaaattcggataccatctgagcatgtaacggctacaaaccgccaagatgctctgagacatcaatatccatattctgccaattatctggtcagaggtggccagctttgggggaccgatgtgtacacatacgattcagatcttgttgctgttctcatgcataccggttactgtcgcccaacagcatctccacctcatgcagccatacaagaattgcgtgcaactgtccgtgtgctacctcctcaagattgctatatttctacactgagaaacaacatacgttcccgtgcttggggtgcagcaattggttgtagttatagagttgagcggtgttgcattgtgaagaaaggaggtgatactattgatcttgaaccttgccttacacatacatcaactattgaacccacccttgctccagtgactgttgagcggacaatgactaccagggctgcagcttccgtttggcccagatcttataataaacacaactttggactgcgaaaattaattcaataattttagcttttag

SEQ ID NO: 9429 - DNA, 246 bp, Glycine max
  Clone ID: PAT_MRT3847_108523C.1
tggggcttcttgcacgctaacttgcgtaaaattagaacatctaatattgtatggggaaagacattgcttgtgcaacagcaagcatggctgtaaaggcacagctaccgctgtcgacagctatttgggaactacgacctctagcgacgaactgtggcatcccgagcttgtggaaaattagaatcaaatatcaagctatcacacactacccaatactacgactcttaacaccagacacaaaacggtcga

SEQ ID NO: 9430 - DNA, 277 bp, Glycine max
  Clone ID: PAT_MRT3847_108524C.1
ggcacaaaaaacctcagcaaggggggtaaattttttgaataatttacatacttaatacattatttattgatattacaatcaagtaactctagcctaattaaactataattttctaaaatacaaaaatgttagagcattgttgtttttaactaaaagaaagaaagttagggatttcactagtaaatatacatgtgtacattacatatcattggccttttggcattactctggcttggttctttgtggatggatgcctttaaattttggagtttttgat

SEQ ID NO: 9431 - DNA, 430 bp, Glycine max
  Clone ID: PAT_MRT3847_108525C.1
gggccaaaaaggaacctcaacaattttgatttgatgtagtcttttgacaaaggccactccttgtatacttaaattcacatatagtgccaagtagtactaggttctccttttacaatgaatagcatttaggtttgaaaatattatgtaggacaagaaagtaacttaagaactaagaagcacatcaaactcactctacctatttacagaaagggacactcagaagtgggagtttaagttatccatttattggaattaagtaaaaaaaaaaaatctagtctaagaatctgaacacttgaaccataaaaattcagtggcccatgtagagttgagaaaggaaggatacatcatcatacaataaaaaagttaaaactctctttcctatttaagtttttttttttcttataacatgtcattgatatgaaatatccat

SEQ ID NO: 9432 - DNA, 578 bp, Glycine max
  Clone ID: PAT_MRT3847_108526C.1
aaaaaaccaaaatcgggtttttggggttaaaaacggcagcaaaaaaacgggtttttccccatgggaggggggggaaaacaaaacattggggtgaattaaatcttcccgaccatccaaggggggggcaagaaaaaggccagggttccgccccaggacccaagggaatttcccctttttttcgggagctcccctttttttaaaaaaaaaaatcttaggaggctttaaactataaaccaagaggccggaacttgcaaaaatatgcaattacccaaaagcaccccttggggggggcttttccggggggggttggaggggcccaacaaaaaaaacacccccaggggaaacagcgggcggaaggttttttttccgaccaccctaaaacatgctttttaaaaaaaccactaggggcccccaggtggcaacttaaaacaacccttgggtcatttttagaaaggggaaggcccccaaccccggggcggattctgacttacttggggaaaaaactggagcaaatgcatcgggataatattttcccaaagcattttcccccgaaagctttgttttaagtgtgggggggg

SEQ ID NO: 9433 - DNA, 505 bp, Glycine max
  Clone ID: PAT_MRT3847_108527C.1
cacctttcttggggcaactgaaggaactcaccttgttctatgcctggcagaatcagctccatggaagcataccaacagaactctccaactgtgagaaacttcaagcaattgatctttcacataatttcctcatggggtccattccaagttcactgtttcatctagagaatttaacacagttattgttgttatcaaatagactttcaggtccaattcctccagatattggcagttgcaccagcttggtcaggctaaggttgggatcaaacaacttcactggccaaattccaccagaaataggctttttaagaagtttgagctttcttgagttgtcagataattcactcactggagatataccctttgagataggtaactgtgctaagctagagatgcttgacttgcacagcaatgagttgcaaggagcaattccttcctcattagaattcttagttagtcttaatgtcttggatctttctgcaaacagaataactggcagcattcc

SEQ ID NO: 9434 - DNA, 467 bp, Glycine max
  Clone ID: PAT_MRT3847_108528C.1
gggtcactgggttgctgaacctgaacctcaaccatgtccatggcgtcttcagtttcattttctgaggaaagtagttggggcaaaagggtatctgaaaaggttctttctttctacgcttctcttcccaaaaagggcaaacctcaaggccgtgaagtcaccgttttggccgctttccttctctcttctccttccaatgatttgaaggttgttgcaatgggaacggggacaaagtgcattggacgttctctcttgcgcacttgtggtgatgttgttcatgattcccatgctgaagtcattgctcgaagagccttgatgaggttcttctatacacagattcaacatcttactgaaagtagtagtaagcatgcacctggaaatggagggaaacggttcaaacttgatgaagatcacttgccatttgagtgggatccaagttgtcttaataaacggaagtataccttgaaaaa

SEQ ID NO: 9435 - DNA, 222 bp, Glycine max
  Clone ID: PAT_MRT3847_108529C.1
gacgtttcattccatcgatggttcgttcttatccaatgtaagtcagcgactacgccatcatgacgaccaaggtgcaatccctggggcggtcgggtctctcccgggtcccaccacaatacattcatacccctcaaacccgacgcgtccgccacaccgcacccgtatctgactccattcccgtcatcgacctctcctccttcaaccccacgggaggcggtctcc

SEQ ID NO: 9436 - DNA, 630 bp, Glycine max
  Clone ID: PAT_MRT3847_10852C.1
actagaaaagagaacaaagaatcaacatcttttccctttcttctttaactttaccattttacacgtccatacatgattgtggcacagcaaagtataacatttaatttactctaaaatcctatagtaagttattatgaaataatacacaagttacaagtaaaatcaattatagtgcccattgtggcattaaagaacatttttgaggcgctaaatttgtagaagctaccgaagaggtcaatcaccctattttcaactttttaactctgcagaagaaccttttcaagatgaagggacaggccagtgagctatgtgtaaaaataaaaaaataaaaaataaataaagaagctcgccgtgtaggacgaattgccgagcaacatgccaaactcttgaaacatgccagcaactgccaccatcatcatagatttagtctgttcgcggtcgattaggaccattcttattgcttctgtataaaggtaatagggatccatgttttttttttccataacaccgccaataaagaataaacaatgacaccatgacaccgaggggaattgcccatctgtcaagatccaggattggggctgtaaacaacagtttcccaagttgcaactataaaatgccaaactgggt

SEQ ID NO: 9437 - DNA, 364 bp, Glycine max
  Clone ID: PAT_MRT3847_108530C.1
taatacacccggcgcgaacatgcgacctaatgggagagtttttagagaagctggggggttttcacagagcgcagcataacggcgtcttgcctgggaaaacgctggcggaacccaaatcctttggagtgcaggacagacgggtttctacagcagtagaaatagcgtaaaggcacgaaccgaaaggccttgctacaattgcccagtctgaatggccagtgagacgcgccttgtaatggagcattaagcgggacaagtgtggtggctacgcgcagcgcgacctgtacactcgccagagccctagaggcgccgctttccataccttccatgcctttctcgggacattcgacaagctttcctgccaagc

SEQ ID NO: 9438 - DNA, 476 bp, Glycine max
  Clone ID: PAT_MRT3847_108531C.1
cttgaaaatgaccgttggctgagtttaggggctaagaaaaccacccgtatcccataaggctttgcttattttaaaggagggaaataatataccaaagaaactttgtactatattctgtggcacccacaccttttacactctactctaattaaaaaaaaattcttctatttctctcctctaaaccaaacacaccctaaaagaggcagaagattttttggttgtagttttagtttcttttcaattttttatagcttaactctgctctctatataatatcctgttgcaaaaggacagggtcagacaagcaaagaaacttggggttgcttatatgatctatttttgctcccgccccaccttcttgtgccttaagaggattcgtgatctatcctctgttccctttcctgtcttaaattattgttttctaaaaaaactgtattgttgcaggaggtggggtcctaatagatgttattcatgag

SEQ ID NO: 9439 - DNA, 1327 bp, Glycine max
  Clone ID: PAT_MRT3847_108532C.1
atgaatatgaatattaattagatggattaacaaaacagagaatgttgaattgaattgagaagatgacaaacccattagagagataccaaaaacttgggctaagcgagtctctaccgaaaacctacagatacccaattgcgtgcagagagctaagctttattctgagggaagcttttcatcaattccccaaaaatttgcaatccatcgtcttccaagacaccctctccgccttccgtctcctcccagaaatacagactcagagtgctgtttcagcagtccacttcctccttcagagtgtagaagcagcactaccaaagcaaaaaaagaatgtggctgtaacagaatttaagcatgcaatggttgctcataagaggcgctgtaaagctcaccaggtagagaaaggttcattgccattgccacaagatattcttgtgctcattttcagttttcttgatatgaaatctttagtctcagtggggcttgtctgccggtcatggaatatagctgcaaatgataaccatctgtgggagatgcagtatgttgcactgtttggtggtcgtgctaaactggttgaaggcaagaacaataggcttttgctggaacccatagatactagaatcattactgattggaaagaagctgttaaaggagcatatactggagcattatccaggatattaacaaccagtcggggatattgtggacactgcaaatcagtagtttggttaaataactcaaaatgccccaatgtacactctggaatatctgaaattcaagatattaagcctgtaacagcattccaggctgtggaatatgttctagaggattctctatcagtaacatcttcctcagacagtgatagtgattcggaaggaggaacagtttctaggttatgggcatatcccaagcatataagaaaataatatgggacagctttttgctttgaatacattcacaattcacaaatgagtaaaaaaactcccaacgttcaccgggttcatattcatcgagaagcaagttttatggcccttttcataaccaaaaacaaaagctgattgtaatgtatctggaggctttggggtagaaaaataatttctttaaaaaagagaggtacttcagaatacctcatttgtgagtatgaatgatgatgatgatgatgtggttgttgttggttggagcaatgggtctatcattacaccaggctggggcaatatactggaattcagctgtcaagtgtttttttcttatatataaaaagtaggaaaattattacttgttattcattttaaagaaatataaatatatttaactaaattatctttctctc

SEQ ID NO: 9440 - DNA, 544 bp, Glycine max
  Clone ID: PAT_MRT3847_108533C.1
ggctcgagctaccctaaaatggagggaaacagtggcagaggagtaaggggaacgaagaagatcgcaattctgccatgggaattgataattgaaatcttgttgaggttgccggtgaaatctcttgttcgtttcaaatgcgtatgcaagtcatggctatgtctcctatctgatccacactttgcaacatcgcattttgaacaaccctccacacgcacgcacagactcatcttcatcgtagcaccttcttctcctcaaatccgatccattgatttcaacgcatccctctacgatgattcagcttgggctgcattaaacctcaactttctgcgtcccaatacgtatcacaatgttcagatcttaggttcctgcagaggctttctgcttctgaacggctgtcaaagtctctgggcgtggaatccatccacaggggtctacaaaaaactatcttcctcgcctattgggtccaatttgatgcgatccgtgttttatacgtttctctatggttttggatatgactcttcactgatgattactggtggtcaag

SEQ ID NO: 9441 - DNA, 648 bp, Glycine max
  Clone ID: PAT_MRT3847_108534C.1
ccaaatcagtagtttggttaaataactcaaaaagccccaatgtacactctgaaatatctgaaattcaagatattaagcctgtaccagcattccaggctgtggaatatgttctagaggattctctatcagtaacatcttcctcagacagtgatagtgattcggaaggaggaacagtttctaggttatgggcatatcccaagcatataagaaaataatatgggacagctttttgctttgaatacattcacaattcacaaatgagtaaaaaaactcccaacgttcaccgggttcatattcatcgagaagcaagttttatggcctttttcataaccaaaaacaaaagctgattgtaatgtatctggaggctttggggtagagaaataatttctttaaaaaagagaggtacttcagaatacctcatttgtgagtatgaatgatgatgatgatgatgtggttgttgttggttggagcaatgggtctatcatgtctcgaacctgggaccggtaatgctattgcaacaagcaaaccattacaccaggctggggcaatatgctggaattcagctgtcaagtgtttttttcttatatataaaaagtaggaaaattattacttgttattcattttaaagaaatataaatatatttaact

SEQ ID NO: 9442 - DNA, 489 bp, Glycine max
  unsure (1)..(489): unsure at all n locations
  Clone ID: PAT_MRT3847_108535C.1
gcacctactccatgctgggccacaccaccaaaaggtcctgggaggccgagcgagtcatggagtggctcaagacccaggagtggggcctcatgatcctggatgaagtgcacaccataccagccaagatgttccgaacgggtgctcaccatcgtgcaggcccactgtaagctgggtttgactgcgaccctcgtccgcgaagatgacaaaattgtggatttacattttctgattgggcctaagctctacgaagccaactggatggagctgcagaataatggctacatcgccaaagtccagtgtgctgaggtctggtgccctatgtctnctgaattttaccggaatactgtggcatcaaaaccaagaaacgaatcttgctgtacaccatgaaccccaacanatttagagcttgccagtttctgatcaagtttcatgaaaggaggaatgacaagattattgtctttgctgacaatgtgtttgccctaaaggaat

SEQ ID NO: 9443 - DNA, 491 bp, Glycine max
  Clone ID: PAT_MRT3847_108536C.1
gggaaaaatactcttcaaactttgaacattttaatacaaataacgtgacatcctcttatttttatcttcccttggcattttattcgtctaagttgggcaggttgcaaatttcactcactttttttagccatatgagtgtggtagagggggggctcacacatgatttgtacgtgaagtgcacgctctgtttgaaagtgcacaaagcaacacaacacaaagccacaaaatctaggaatggatgaatgagtgttctgatgaaacatgtgtctatctatgggtcatcatcattatcatcctcaatcccatcatcacgtatgaaaatgctatagtctcagcagttaggctctgaagtcaatggcacaaatatttttaacgccaaatttaataatagctttgccaggggtgtggtacagatgcctcataccagagttgccaaattctaccaattcccttggccttgtgggtttttaaattcccaagcctgggggggg

SEQ ID NO: 9444 - DNA, 333 bp, Glycine max
  Clone ID: PAT_MRT3847_108537C.1
ctcacgtttgcgcccattggcacaggcccagaagaacggttactccaaagcttcccggagacctgatacacgcggctccaccagtttccgtacggatccgaaatgggcggccgggcaaaagcccccaaactccgcggggaccagtacaccgaaaagggacacggcgatctgtcaagttgcgatcaacacatactccacggcctggactggcttggccaacatatgactgactaaggagaccgactgtcggcgctggaatgatgctagttcagatggtgggaccaccaagcaaggtatgagcaagatgggagaaacgataaacacactttgtgg

SEQ ID NO: 9445 - DNA, 260 bp, Glycine max
  Clone ID: PAT_MRT3847_108538C.1
ttggaataagttagccacacacacaccccacatgctcgtgccatgagctccaaattcgacaccttcttagctggatcaacacagaatagactttctattatggtggccgtggcccgaccggaaatggaccggctcaagggccccaggagcccggtggaggacgcggctatgcacaagctcgtgtagcggcatggccccataaactgtgccttgatgatgaggaacatactaaagcgtgcttggagaatctgcaagctcct

SEQ ID NO: 9446 - DNA, 593 bp, Glycine max
  Clone ID: PAT_MRT3847_108539C.1
ttttgtttttttttatttttatttttgtttatttgttttttgcttgttttcacacaaacctgctcgcaaatggtgactaaattgaagcagcatacatgggcgatgtcctggagtggaaaaaaaaaaatctgtaacaggatcgttctttgaatttttaaaaaaaggccaccccgaaatcaggcgtgggcgcccgaaaaaaaaaaaatatttccaatgacccctcattttgaaaccccccggcggagttgaccccagaaggcccatgggggaaaaaacataatgggccaatcccaggggaagaaacccctaaaaaagaggggggggatgggtacaatcagattgggcactaacccacaaacccgtgagtgccaaagattccctttgaaaaccgaagggaggcccctgggggcgggaaccttgtgcaataaaaaccccccctcaaggtttcttaaaaaaaaacggtaccaaaggggcctaccatcaaggggggggaggctctaaaaatcccccctgcaatcatggctaggcccggcccctttcttgttcggagggggagccccccattttccttctgcctggaggggtgaaaacac

SEQ ID NO: 9447 - DNA, 615 bp, Glycine max
  Clone ID: PAT_MRT3847_10853C.1
attataaaaaatgaagatattttccctttcttctttaaatttaccattttacacgtcagtccatacatgattgtggcacagcaacgtatataacatttaatttactctaaaatcctatataagtaattatgaaataatacacaagttacaagtaaaatcaaatatagtgccattgtggcatcaaagaacatttttgaggcgctaaagttgtagaagctacccaagaggccaatcaccctctgttcacctttttacactctgcagaagaaacttttcaagatgaaggggccaacgagctctgttaaaaaaataaaaaaaaaagctcgcagtgtaggacgaattgctgagcaacatgccggcaactgcaaccatcatcatagatttaatctgttcgtggtcgattaggaccattcttattgcttctgtataaaggtaatagggatccatgttttcttcttccataacaccgccaataaagcataaacaatgacaccatgacaccgaggggaatagcccatctgtcaagatccaggattggggctgtaaacaacagtttcccaagttgcaactataaaatgccaaactgggttatagtaaagtgactctgctgtccaa

SEQ ID NO: 9448 - DNA, 288 bp, Glycine max
  Clone ID: PAT_MRT3847_108540C.1
aaacctcgaattctactcagtattctatttataaaaaccgcacgttttattttctagctgacccggaattttccaggggggcggaaaataaatacatctaagagtacccttctctttacattcatgattaaaatcatcactatccaagaagagttcgccccaactgcatttcattggattaacaccattcgagaaagtttcaataacccactaccccttgactaccataccccgcaattcctactgctttactaaccataatacttacttatcgcaccaatgcctttt

SEQ ID NO: 9449 - DNA, 308 bp, Glycine max
  Clone ID: PAT_MRT3847_108541C.1
aaaagaacaccgggcccgcccgggggcccaccccgctaatcccgaacccggtcatagatgccaacaagtataaacaaaagtgagacaagaaaaacattggaaaacccttcacaaaacctatatcccggaacaaagggggataaaggaaaaagcccacacacaataatggcagaaaaactaaagactaaaggcgggggggccaaaggggggagccaacataaaaaaatgggcgtcccccccccccccatataccgacaaaaaaaccgggagagcgcgtttaattaatgaaaccaccaacgcccggaaaa

SEQ ID NO: 9450 - DNA, 384 bp, Glycine max
  Clone ID: PAT_MRT3847_108542C.1
aacaggaggaattatcatctttataattcaatcataaaatggccacagaaatatagtttttcgtttattaaaacttcttccatcagaaaatatgtgatctaaaaccacacaagaaaatatagaacaaaaagaagaagtaacattagtacattaccaaccaaagtactacaaaagtagacactcagacaacatagcttttaaatctctatatattcacaagggaacctaaaataaacatgagctaaagaaagagaagaggaaagtgaagtgaacagtttagtcccataacaaacatggaggatgaatttatctttaaagttccatgcacaaatcccggaaaccttggcttcatcttctaccaaacactagggaggaagaacttaa

SEQ ID NO: 9451 - DNA, 229 bp, Glycine max
  Clone ID: PAT_MRT3847_108543C.1
atgtgctgagagattagaggagaagcaacaacctgatgcacttaatggaactgctgtcaacatcgaggcaaagttctcgcagctgactcttgatgttactggatgatctggtcttaattataactttgactcgctcaacatggacagtcctgctattgatgttgtatacactgcattaaaagaggcagaggctcgatcaactgaacctttaccggattggaaagaaaac

SEQ ID NO: 9452 - DNA, 244 bp, Glycine max
  unsure (1)..(244): unsure at all n locations
  Clone ID: PAT_MRT3847_108544C.1
ccccatccccgatatggtttcgtttgcgtcgtcgtcgagtcggtcgtcttcgtctgcttcgatgctctcgtacacccctccctttgaggccgcgttcatcgaggacaggaccattgttgacggacaggtcgtctctggtggcggcgagttctccaaaatctggaggatgcgcaacactnggaactgtcgcttggcccacggcaacaactgtctcgtttaccggcggacactacatgactactgc

SEQ ID NO: 9453 - DNA, 145 bp, Glycine max
  Clone ID: PAT_MRT3847_108545C.1
ggctcgagcggaagcgcaaaaaagcaacttttcacggtgtgaccgaccagaaccccacacccgggccacagggagcagcaagagcaccgaacccacacaggccaaaaagagggggaccccggacgcccagggaggagcaaggccg

SEQ ID NO: 9454 - DNA, 602 bp, Glycine max
  Clone ID: PAT_MRT3847_108546C.1
ggggaaaaaacccccaaaaagggggaaaaccggcaaaaaaaccggggacccccaacaaaagaaacccccaggccccgagatttaacaaaaaaataggtaaaaaaaaaaaacccccccccacccaaaatggaaaaacccttagggccaaaaaaaggggttcaaaaaaaagcagggggccccaaaggggaaacccaaaaaaaaacccaaaaaaaaaattcaaaaggaaaagggcccccaaaaaagccccccccccccaaaaggtgccaaaaaaaggggggcccaaaatccaaaactgagaaacctgggaaaaaaggggcccccctgagaaaaagagggaaaaaagcctttgctaaccgccccggggccaaggggaaaaacaacaccaggggcaaaaacaagaattgggcccaaacccgggcccggaggaaaataaagcccaaaaagggccccagggggaacccccctggcaacttgaaaaaatgcaacaggaactggggcaaaaacaaccccgcccaccttgggctaaaaccaacccgaacaaaggggccctggcccaaaatcaacagggaaaattcaaggggaaccccccccccgcaaaaggg

SEQ ID NO: 9455 - DNA, 342 bp, Glycine max
  Clone ID: PAT_MRT3847_108547C.1
atggctcgtgggccttaaccgacagtgtcccttctaacatgactcttatggtccaggttgacaataagtagcgcatgcaattgttcctcagcaccaaaccttgcaaattgagaacccaagtgaacttggaccctacatcggctagtaccgtgaccattacagaatgctaagcatcttcaactattcattcgacgtgggtttgtactacatcacgccgcataccgtgactctagcttagatgatatggctccaacgctctgatcagacatcccgattggcttgagaggccaatatgggcatcccagttggagaaaatgccactatatcacttggtactgatgg

SEQ ID NO: 9456 - DNA, 496 bp, Glycine max
  Clone ID: PAT_MRT3847_108548C.1
ctatatcattaataccctatgtgagattttgttttcccagctcccactattctgtttccattatagttgtacaacttgcgctgcttcattctcccactttcctgctgatttctgtttccataacaatttcaaaacctctattataataactcttgattattctgaccttttctcacaatactaatgagagaaacctgtttatttcaaagttggacctgtgcaccttcagttttatgtttcttggcacagtaatattcatggccacatatgagtgtgcactctccctcgcccagtgtgtaaattgattttttcttatgatgttttacagatatatttcaatgaaatacccgatgagatcattgagaaactggttgatgagggaattactctcaatgttgctggggggctgataatagaacatcctttagtattgccatttgtcagagaagtggtagggacaaccgacagtgtgatgggactccccaagctcttactg

SEQ ID NO: 9457 - DNA, 466 bp, Glycine max
  Clone ID: PAT_MRT3847_108549C.1
ccacgcgtccgcagaggtggaggctcttggggtttccgtttccgttttctgagagaggaactatcggtggaggagacggagttggggatttgaagaaacgggaatagtaggtagaaggagaaacggtggtaggaacgattgagaacgcggacggggtcgacgaaaacgaacctggctgggatagtgacgcccatttctaaccagtttcgaaaaggttcgctcatgctggagggagcatccgcacttagtgatcggtccgctagttcgtgcaaatccgaataagttatcacggaccagccacatgcagggaaacttgcacgtgtgattcttccgaacaagagagggttattcactggcattttagaaagtgcaatcgctactgatggacatggtcgataataatcaaaataagcaaagaccagggttttcaagaaagcgttggtgtcaatgaaaaagtggaggtgag

SEQ ID NO: 9458 - DNA, 443 bp, Glycine max
  Clone ID: PAT_MRT3847_10854C.1
cccacgcgtccgtacggctgcgagaagacgacagaaggggaatgcataacactggaagccaaaatcaattgtatttcttgtttgtttttgtttaacgctgttgcgattcactcttcttcttctctttagggtttttgtctgttctctgaatctcacactatgaatccgcttccttttcaatctgcaccgccgccccctcctccatggtttccgatattaccctccgaaccaccaaattcaacctccttttgggacaacagaaatgtctgcgatcgcctcagagaattgcaacacactctccatctcgcaaagtcaatgcagaaggagttagagatgttgaagatgataaaagatggtaaagggtctttagaagatgtaaaagatgcttcaaacgaaccttgtctttctggttttgtaaaatgtttagaagacagaggagttgg

SEQ ID NO: 9459 - DNA, 426 bp, Glycine max
  Clone ID: PAT_MRT3847_108550C.1
gtgctatataggctcttaagaaacggttaagggtaggctaaacttgaaaacatgcgctcgctacactgatttgaatagagtactttccctgtacatgggcctttatcttataccttgacaggaatacaatacttggctgatggcttgaacattttattaataagagcctcggagatgcgggaactacacgagagctacaggccctcacatttctgatatcgttattatggtgtagccacattttgctttgcctgtggagggaaagactgttcattgctttcaggatgactgacgggaacatccaagcttagcggtacttgctacgactggttagcggggcccttccaggaaagatcttgagccctgcaggtctgtattaattgtgaccaagctcgagcttcatccactgcaggggcccttttgaca

SEQ ID NO: 9460 - DNA, 479 bp, Glycine max
  Clone ID: PAT_MRT3847_108551C.1
tataaagcaagcaggtcttcctctccaagaacatgtaagccgatttatgaatatgatatcatgtcaatattgaaattttcacagaattaaatcctctgaataaacaaataaaaaaatagcgggaatatcgaaaaatagtgcctactacttcgctgggagtgtgctctgcatctttctttttgagaatttagaatttcaatgaattacattgaaaacaaacaaaaatattcacatctggcttctctatctgatttttgcttgatcatctggagtttttctgcaaaactttttgtaagttaacttatcattcataatcatactcgtccatcacatcacttaaatatgtaaccatttacgaagtcaattgcctgtttggtgcttataatatcaccagttcagatatgtttttgtttttatattcgtattgattgtattttatttccttgtcctgcctttatacaacaggctgtattttttaa

SEQ ID NO: 9461 - DNA, 817 bp, Glycine max
  unsure (1)..(817): unsure at all n locations
  Clone ID: PAT_MRT3847_108552C.1
attagtgaaaaaaaggtttctacctcaattgaggccttgtgtcgaggttatccaacagaatttgcatcatacttccattactgccgctcattaaggtttgatgataggccagattatgcttacctcaaaagaatatttcgtgacctgtttattcgtgaaggattccagtttgattatgtgtttgattggacaatcttgaagtatcagcaatcacagctagctgctcctccagcacgtgccattggtcctaatgttggaactagttcagcattgccaccagctgtgactaatgctgatagacagacaggagaggaagaagggcgacctcctggtctggtttcaggggattccacaaggcgaagaatgacagggcccatcccaaactctgtaaatatttcaaagcagaaaaatccagtcaccacggatgctgcccttaataaggaagccatgttatcgaggcccaatgtcttggggcagtcaagtggatcaaggcgagctgctgtttctagtagtcgtgatgcatttgttggttcggatttggatcttcgtactcgtactactgaaactaaccctggaacagcaattaaaacatcatctgcgagaaatgcttctcatgtcaagaactatgaaactgcaatcaagggcattgagggtttgcaattagaaaatgatgagaaggcacattattgattcctaaccttttcatgttgtaaatataaagctttgggacggaaagcacattattaattcctcaccttttcatgttgtaaataccaattttagatgccggacactanncatagtgcatgtgttacta

SEQ ID NO: 9462 - DNA, 107 bp, Glycine max
  Clone ID: PAT_MRT3847_108553C.1
ttttggcggcagcaagaatcaacattgatatttgtctctccggcgcagggtacgatacagaacagagcataatccagaagctacttccatttcaccaaacaccctca

SEQ ID NO: 9463 - DNA, 183 bp, Glycine max
  Clone ID: PAT_MRT3847_108554C.1
cccacgcgtccggctaccctaaccgtttatagcactgccttgcgattgatgcgttctgtactagcattaccacaccttaaatttggatatttaactacacctcctgtgtgagcatcaattgcatctcataatgactgtaaactatcagaactccttttggatcatgaatagcttcatcagata

SEQ ID NO: 9464 - DNA, 493 bp, Glycine max
  Clone ID: PAT_MRT3847_108555C.1
atttaaaaggtaaggaaattcaagaaaaaaaaggcaaagtcataattccatttccatgcgcatggcttccaacgaaacttcaccgtttgagtctcgcgagatgctcgcatccttcgtctcgtccacgcccctgctgtcggactcatggcgcctctgcacccaggccaacgccactcccttcctgaccttcgtgactgagcgtgtcggcgcctccgtgtatgtggctttctccggcgtccatatggccggcgagtccgacccgaactggagaaatttgactcctttgtacagcatcggcggcctgcctctgttttcgtctcggcggagcaaggaatgggaggaaccggtcatggttcatgctggcatcctcaatctcttcttttcacttttcaattctttccagaaccaggttcgttctctatagaatcaccttattcctatatgctagcactaataataactatatacgggatacatcaaaacttaaaagatg

SEQ ID NO: 9465 - DNA, 317 bp, Glycine max
  unsure (1)..(317): unsure at all n locations
  Clone ID: PAT_MRT3847_108556C.1
aaagaacagaaaaagaaaataacataatccaacctgggtcaccaattcaatctgggatgggcaggggtcaaatttttaactgggcaaagactcttatagccaaaaaatggggtcaatggggacacaatcttgggaatacctgggggtaaaataatggggaaattttgccaatgaggggagggttgcataacgaaatcctccaaatttgcaggggactaggtgcatgcttaatcaatggagggatatgagggtgagatcctccaaaattacagtggaaaacattaatttcccccccacgcggtgcgggacncgtnngg

SEQ ID NO: 9466 - DNA, 531 bp, Glycine max
  Clone ID: PAT_MRT3847_108557C.1
ccacgcgtccgctctttctaagttatttctttagtagcatgcgatagctttggctccagaaccgactccaaatgcgacacggctgccctgtctacattcgtaactcgactactaaaaactccgtgttcctggttcattatggggaacgaactcataccgtaagacgcttcaatccaaatgatgactgactaatcgttgttgcataggaacacaacgttcaactttccttcctatgcggcgactggcctggagaccgacagcgagacacgcatgatgcctgcccctattaagaactatggagaaatggacgaggatctctgcgacctctgacgttcagactcggtgtgcgaacatgatacctgatctctcttgatgcaccactacagagagactgaggacaagaacgggcgtttatacgccagggtgatctgacgccatcatgttcgctggatagtgattcgctacaaagggggaaagccacaggatacacgagggagagccttatgacagacacagcattgtcactggagc

SEQ ID NO: 9467 - DNA, 717 bp, Glycine max
  Clone ID: PAT_MRT3847_108558C.1
tgtgcgaaacagagcgataagttcaacgaccaattaatgtcgaatctggaggtgaagagggttgtttccggtgaagggttcacctgcggcgaggtaaacgacggtggactaatctgctggggacccacttcggaaaatttgggaaacattaacatttccaatgttaccgacagttttgcggttctggtggctggccggagcgccgtttgcggcgttttcaacgtttccggcgagttaaaatgctggggcgacccggtttcgtattcggatcctccgttggattcggttcggttagtctctctatcagcaggggctaaccatttctgtggcgtgagaatggataatcacgaagttgaatgctggggtgatttgaattcctcggttgttccaaaaggtaatggctttatggctattgcttcttcggatttcaccacgtgcgggatcagggaagatgatcttcttctggattgttggttggtcaacgcttcaaaacccgattttgatcctcctttggagctttcaagccctggactctgcagggctagtgagtgtggggttgatgagtttgctttcaatgtgagtgttcttaacgagctatctttgacgagcgtgtgtgttagagaggatttgaggatttgttcgccttgtgggtcaaattgttccaagggttcttcttgtctagtgaatgttctacgaatgctgatagagtttgcactg

SEQ ID NO: 9468 - DNA, 471 bp, Glycine max
  Clone ID: PAT_MRT3847_108559C.1
cgcatgggcggggaaaatcgggctaactgggattgacaaacaagtggaatttcaatctgtgccaaagatacacaagatgcgaaaggggaaaaattattccaacaagttactcaagtttaaatctcattgaggggggggggctggtcttctgaatttcaaaggagtaactgagatccaagtagcattttcaatcgtgatctacaaacttgggtcttggtgcgtagggtcccctgacgaacatgccaaaagggataggttcttcttccaattcaaatggatatggggtcctgcgttggagtaaaaggtcccaacatcttttttctgggggccactctaacgccaggtttccaaacaacatttggggatttgagaccaaaaacgatggtgttggagacagggaaggtgaatttcatttgggatttgcgtccttccttaaggggaaaaaactcttcttagcatcagtagtaaatg

SEQ ID NO: 9469 - DNA, 336 bp, Glycine max
  Clone ID: PAT_MRT3847_10855C.1
aattcggctcgagagcacatcagaatctggtttgccacccagctcttaaagcatggcatcagctggtccccataagaggtgtaggaggcccggaaggagatgttcaacggcaccatccagtcagtacccccgaccatcactgtgctgcccgcccagtttgcccccacaaaggtgacgcagcccatccttcagacggctctaccgtgccagatcctcggccagactagcctggtgctgactcatgtgaccagcgggtctacatccgtctcttgctctcccatcacacttgccgtggcattatgtactaaccatgtccagaagagacccttggtgact

SEQ ID NO: 9470 - DNA, 653 bp, Glycine max
  Clone ID: PAT_MRT3847_108560C.1
ctcgagcgcgttgcgagccgtaccagatcagctacatacacactcttgatacttcacagagcacaacgcatcacacacaactagttcttctcaaggccgtttttttttggtttccaagaattacccatcgcttcggaagcaacgagatgacccatggacccttcattggacacaagtactcgtactgaatgcgagaaggatgctatgcccacttgcccttaagactgttacaatgactcctccaaagggagcatacaccgatgatgcctccttttatggatactggagcataaaaccttctcactggacattgatctgatcccgcttagcttatggatcttcctactgacccatatggatgaccatagcataatgcaagctctccgacgaccttctggtgagttatactaattctgaccttccttggtccgaccaaactcttgtgaatacctgggagactgggaatgaagagcagatcacaccttgctggaagcctgtcctcatacagaaactatagataaagggatcaccacttcctcagatacccatgctgtcaggagggaagatctgacgaccttggaactaagattacatgagaaacattggcctggcgctaaatgctgtcactaatgcaagtggtggcatggggagtc

SEQ ID NO: 9471 - DNA, 230 bp, Glycine max
  Clone ID: PAT_MRT3847_108561C.1
gaaaggaaaaaaaattttttataagggttataagggcttttaagcgtttaaataaatttaagggccagggcccaatttaacttccccccttttaacaaaatttggttttagctttgacccaacccgtttaaaaattttgtggggcagggcctcccaaataaagcctttcaagtttgccccccttttgtaaaaaagggccaaactttggctgttttaatatacaaaccccc

SEQ ID NO: 9472 - DNA, 472 bp, Glycine max
  Clone ID: PAT_MRT3847_108562C.1
aattcggctcgaggtatcccgatcatagatcttcaagaggttaacaaaagttcatctctgcatgctgaagtggttgaccaaattggaagtgcatgcagaaagtggggtttttttcaggtgatgaatcatggtgttggtgttgatgttttggatgagatgatatgtggaatccgtaggtttcatgaacaagatgctgaggtaaggaaaaccttttactccagagatagcaataagagagtcagatatttttccaatggtggcctgttgagagatttggaccagcctgccaactggagggatactattgcttttgttgcaaatcctgatcctcccaacccagaagaaataccagcaacatgtagagacattgtggctgagtattcaaagaaagtaagggcattgggagttacaatcttagagttattgtcagaggctcttggtcttgatccttcttatcttaagaaaatggact

SEQ ID NO: 9473 - DNA, 441 bp, Glycine max
  Clone ID: PAT_MRT3847_108563C.1
cctaagcaactgtttctcttcatccttcgctttttgctttccctctcgtatatcaacaatagcgtcatgttaaacatatcctttacacgctcatatcaaccatcttctcagtctcatcatcaccaccttctactccaacaagcacactttccctcttgaactcatcaaccactccttccatactcttgccaaaattctccaataaagcctaacatataacatctacctgctattatcacatcctaatgctcttacattttcattcatatacgactcacattactatcaccattattaaaaaccttattttcatccccaaccactaactcattatattattccttccaccaatctcacccacataccttaatattaacctcaatcttctttttaaaaactaaaaataatactatttgactcattttttaaaattataatata

SEQ ID NO: 9474 - DNA, 544 bp, Glycine max
  Clone ID: PAT_MRT3847_108564C.1
ccacgcgtccggacaaaggcacaaggatttcttgcgattacctcttacgatcttgctggtgcctctgatggcgtaagaatccaagacttttctgcctggcctaggttttgccatgttgagaaaggtctctctctgaaactctgttccaacaaaaagggttttggaatgaagagctggaaatgctaagacttggagcttcggcaatggcgagaacggctgaatttctctgagccagaaaatttttttgggggcgaagaagaacagaggaaccctaaggttttttcgctcagtccttttgagagaagaattagaagaggggcacgagaaaagggagtgagcgtgacgctccttatgccagtgagttacagtgatttttactatgacattggtaacacggtcttggctcattgttactggtggtaataaaacattaatcaagactcggattcaggtgctttgcatttagcttgctgatgtggcgctacctgccaatattgcccctatcgccatttcccattcacatctattggctttgacctgacca

SEQ ID NO: 9475 - DNA, 241 bp, Glycine max
  Clone ID: PAT_MRT3847_108565C.1
tcctctagagcggccgcttttgtttttttttttttttttttttttttcggtcactgtggccctagccaaggtcttatttatcgtagagctaatactccttaccaagagttgatggattccttcttaattaatcattaattctacaaaatccttttcatttttcattcaactagtatacgcggggggggccgtcttctcccatccgtacggacccgtgggcggccccgtggttcgacccgga

SEQ ID NO: 9476 - DNA, 329 bp, Glycine max
  Clone ID: PAT_MRT3847_108566C.1
ataaaaggccaaaccccttcttcattaatcccaaaaacatttttcccccaccctcctttaaaatagggcccacaaaatttaatttctcggataacaaaaaagccactcatataacgcgggtttccccacccccccccaaaaaacccggtaaaaagggggccccaaaaaatcgggaagggggcccttttttctaccccaaaatttatcctcaccgccccccttaagccccggttcccccccccctttccgaaaaatggccgttatgggggaaacaccccccccctcccccgttgccccaaaaaattctccctcggctttgggcggttttt

SEQ ID NO: 9477 - DNA, 442 bp, Glycine max
  Clone ID: PAT_MRT3847_108567C.1
gcaccaggcaaacatgggtaagcctcgtggtattcgtactgcgcgtaagcacgtcaaccacaggcgtgagcagaggtgggccgacaacgacttcaagaaggcaaaccttggaaccagatggaaggctaaccccttcggaggagcttcccacgccaagggaatcgttttggaaaaagttggtgttgaagccaagcagcccaactctgccatcagaaagtgcgtcagggtacagctcatcaaaaacggcaagaaaatcactgcattcgtccccaatgacggttgtctgaactacattgaagaaaacgatgaagttttggttgccggtttcggtaggaaaggccacgccgtcggtgatattcccggtgtgcgtttcaaggtggtgaaggtcgccaacgtttctctcttggccttgtacaaggagaagaaggaacgtcctcgttca

SEQ ID NO: 9478 - DNA, 290 bp, Glycine max
  Clone ID: PAT_MRT3847_108568C.1
cacggtcgcgagcagacgacagatggggggctactcccgcctgatggactttatcatatcgaggcacagctccaatatcacaacatcagtcttcatcatgtgccatggctatggcagaaatcaccgtcatatgttaatgctgcgtgacatagcgtcctcctaaagatgtcacagctctgctaaatcaccgccttatatgctaaaaccaccacatgtgaccaaccatttcgtcggatcatcgtcagatgttacagcctgaccctggaaaaggacaaattcttactctggag

SEQ ID NO: 9479 - DNA, 548 bp, Glycine max
  Clone ID: PAT_MRT3847_108569C.1
gtcccgttggatcctcatacgaagttgaagcaaatcgtgaatgaagggcgtgaaggaacgcaggccaggacgataactgtccatttctgtgcatccattggaaccaagccaaggcttgtccttccatgtaaaatgacgcaatggtaagcctctcatgatccggagttgtatgatattcgaaaaattgcgtaattttaaagatccaccccgtagcatcggagccgtcaaacctcggcacatccagcttcaatcggtgcggtgctgcactcggtcccgccgccgggaatgaaggcatctcaggctgtgtttgtgagggactgaatctactggtttcaagatgtgctaacctctccgctaatgattccatttttgcttctaccgttgccgcaaacttcgcgaacagctcctccattttttccgatgacatagcttttgatcgcgtattctccgccatacgtccaccttgtgctcaatgaaagcaccaatgatacctagcgttcgagggctagggaacctccacactgcgcgttccactcgagagttagagc

SEQ ID NO: 9480 - DNA, 472 bp, Glycine max
  Clone ID: PAT_MRT3847_10856C.1
aaacaataattgctctcatcctaaagaggagctgtcgtaacaactttagcgcactcagtttatagaatgtggaacaaatatatatgtctgttgatcattagaactcaaacaccactttttttatcagaaattttcagatggaggctgtagccagcactctggataaaaattccagaaggctacgatttacttttattgaaggggacgtatgtataaggctgcaaaacctcatcacttgactctccacatgataaaccgactaacaagaaacaagactacctggaatcggggcggggctatccttggctagcaattgtggaaaactgaaatcacctcttgtttttattaacacaacctataccttgcaccagagtagccaccattttgaacccttaaggtgacagacacgggaaccttctcgcccatgttcttaccatggaatggaacaatgggacttgacgtatactcaggg

SEQ ID NO: 9481 - DNA, 770 bp, Glycine max
  unsure (1)..(770): unsure at all n locations
  Clone ID: PAT_MRT3847_108570C.1
aaattatgtaaaaaaaatatatataaaaaaaaccctcaaaggcttatgtgcaggtagacgtatatatgtactgagacatttctgaaactgaaaatgacactccactacaagctttgttaagtgtctccctcaaaccctaatctttctttcacataattttttggtaatttcttttaaaaaataatacttacattctccctttcacatatgccttattttctcctttatcttctttagtgtctccccccggtgcacctttctcctttctctccttcactatctcttcccaccaaatattgctcctccaggtgcaccttttacagaacaaccatgactaacaaaatcaatcaaccaagaactgagatcctggtaaaaaaaaaccaagaaatgagaaaatgaaacaaaataataaaagaaaaaaaactaaaacaaacaaaaagtccctgagttttttcaactataatatatgagagttatacatggtgttttcaaacatcaataaattacagccgtcacctctctccctccactgccgaaaagaccaaacagtgtagctctcttgttggagatatatataacctggcttaaatagttaagnaagaaaaaaaggaattgatttttcttctaacaaaaaactaacatttgacaataaaaaagaaacattagtcntcttctcttttctttggannnnnnnnnnnnatcttttctccnagcnacccatatatatgnnnnnnttcacaaanncaannnacaaatcatattttcncatc

SEQ ID NO: 9482 - DNA, 218 bp, Glycine max
  Clone ID: PAT_MRT3847_108571C.1
gctaataatacctctacattaatggcacccggcaattaaagttggataggtttgctatgttattggagcggtcctcccaaatcacaatcatgctgattttgcgtatcctcaatatctgaatacaatgttgttagctgattctctattctaatcaaggcgctgctcccaaaggtgtctgcgcctaagcacacaaccgctgtcattcatcgttccaaagt

SEQ ID NO: 9483 - DNA, 553 bp, Glycine max
  unsure (1)..(553): unsure at all n locations
  Clone ID: PAT_MRT3847_108572C.1
ccctctttcttctttgtgtttctcttttcttcttcttatttcttctttttctttttttttctttcccccttttttttaactaaagacactttgaacccaaacatcctacaacaactacccttataaacacaatatnctcaaaaactaaaaaacttttccctcctttttaacataaaaaccatccatagaagcaaaaaacatattttcacaaacgctacttaacacaaaatcaacacttgacactttaccacacctaacaaaacaccancaacaacagtcaaaaccctttaaaccaacacaaagagaaatttctccaatgattctacaaccactgccaaaaacaactggcggatccaaacaccatcagcaacaaatcaccccccaacacccacnaacacaccaacaaggcccataaacancacgccaccccgccatacaatgcccccttcccaacaaatcaacccnagcaagaagcaacccccctncccacaaaaagagcccnctcaaccacaatccacccaaaaaaacaggcancgggaaaggcgcgacctac

SEQ ID NO: 9484 - DNA, 1404 bp, Glycine max
  Clone ID: PAT_MRT3847_108573C.1
agaaggagaagaaggactttgaagcagaagaaacatagaattgagaaagaaaatgttcaaacattaccggtggccccggttagtggttcataaacctttctcactctcacacacacactgggtctttgcattctgtggaagagcttgttgggttctctcagctttcacctttccaggctcggatccaaagaaaaatctcaactttcttcaacaattcatctccacaatttctgggtagtggctttttttagcaggaatggctcaacgttctaatgttccaatgttaggcaagagtgaagagaatgtttcagatacagctcattctgacaaagcccagaaaggtcagccaggttcaaagatgattaatccaaatgacaccaaggaaaattcagatgtagtttcttctgctggcctaccccattcaaaacccagagttcattcagaggatccatctggaaagggatcagtgagatcaatacatgagttacaaatgagtagggaggatggtgatcctaaacaatttactgactctccagctcgccatggtggcagtgattctgcctatcgaggtcacggagtaggttctgctgacaaccgtaaaagaccttcaagacaaagtactgggtctgagcacagcattgaccgttcaccccttcatcgccaggcaaagacccctggaagagatagtccttcttgggaaggaaaaaattcatatgacagtagccatggtaccccaggaaggtcccgattaagaccacctaaccgaggggatgaaactcctgataaaggtgctgctgttccaaagtttggtgagtgggatgagagcaaccctgcatcggctgatggctacactcacattttcaacaaagtgcgggaggagaaacaggtgggggctggacacgtgccagttacgcctaatgggagacaatatgctgctcggaaccaacctgccgacgacaaagctcagagttgctgcttttgctggggcaaaaaatgatttatgtgaagcatgaattatattctgaacagaagagataaaaatagggttgtgaatggtcatgaggtgtgtgtagcacttgtaaatattcaaggctctctcttcccaggaaagcatcattgaaaaacatttgtcttaaatttgtgcctttttctccctttctgtgtctttctttgttttggtcaatagagacactttgtgtgcaagattgtgatttgttctttttatctttttattaatttgctatgtaactgccacactttatataacttaatttatctgtatttagctgggaaatacaagatttattatacaattcttttggttgtgattccagaaaaaaaaaaaaaaaaaaaaaaaaaaaaacggcaattctagagaatcaataacaaactgtttccgggaat

SEQ ID NO: 9485 - DNA, 628 bp, Glycine max
  unsure (1)..(628): unsure at all n locations
  Clone ID: PAT_MRT3847_108574C.1
ccacgcgtccgatcaaacccttaagtagacttggtggactaatcttcgacattgaactagggatattctgaatttaccaaaaaatactcaatcatagtgtttcactttatatgatgcttttaaggttttggtatagatacttaaaagaatattatgacatcattcatcaaacgttttagttaaattaaactcaatttggtcctgtacatgcaaattgtacagaagcgattgttttttgtctgcattttttgtggtgctctaatttttttaccctttaaagtttaaagacaccttccaccttttgtactaagtttgtcgttaagacaaaataagatagatataaaaattagttaaaaatcaagaatatgataaaaaaaattatttaatatttaatgtacactagataaatttagagataattcatatgctattttatttttttatgtttgagattaattagataatatcatgataagatataaaatatataaattaactaaaaaatcaatgacataattaacattaaaaaaattataataaatcataaagaaacatatataaacatgatgaataatataagntttttgtcattgatattattcttgaatatatttttttaaaaatgaat

SEQ ID NO: 9486 - DNA, 230 bp, Glycine max
  Clone ID: PAT_MRT3847_108575C.1
gcgaaaggcaaaagacttagaattctttcattaaatttaacttaagatctccatctataaatggtacaaataatatccaaggttcctgcaaatattgaaaaccccagacaaaaatttcccaactcaccacctttttctttaatgggatgtctaaatgagctgaataaattaccaaaatgggtgcacctaaaggtaaacttatttttccacttttttaattccatttcctt

SEQ ID NO: 9487 - DNA, 237 bp, Glycine max
  Clone ID: PAT_MRT3847_108576C.1
tgatgaaattgttttttaattttttaaacttcgcaatttggaattcttgttattaagccttcacttatgttataagtataaatgctttggctttaaccaagttcattagttgaaaaaggaaaaagaatgtagcttgctgagttttgcaacaattaaccaattgtgtcaagctaaagttatattgttcctaacttccaagcttcgatgatttttcttggttggttgacttggtaaaca

SEQ ID NO: 9488 - DNA, 291 bp, Glycine max
  Clone ID: PAT_MRT3847_108577C.1
ttctttacggccgcgagaacaccacagaaggggggggttattgagagcaaactcggtatacaaaccaccaacaggtagcctccctcggaagaggacctcagggctgacgaaagatacaacaggcaaatcgacacacaccacaaatgccacagtcccgatgctacccccccaaaattccaaacaaagaccgttctgcgaagaaaaaaccgagcctgcgcaggcgatgcccggaagggaatggaactgaaccaaggccaacaacctgtagggcaccattgaatggctggccaa

SEQ ID NO: 9489 - DNA, 306 bp, Glycine max
  Clone ID: PAT_MRT3847_108578C.1
ggcaaacaattcttttttattttgcccccaacaatgggttagagatttcattgaaccaattcccattaattttttttggggaaaattctttcatgggtgagtgaactttttctggggaaaacccctgttgacttggttcgggcaattacttttcccccttcaacattaaaaataccggtggcctgtttgggttttcccttgggctttgggggcccccttacaaacccatttggatttttttttttttttcaaattatctgggcggattggcccaataggtattttttaattccaatggcccttttt

SEQ ID NO: 9490 - DNA, 475 bp, Glycine max
  Clone ID: PAT_MRT3847_108579C.1
ccggcattgttccatcctcatcgccctgccaactcttgtggctgccatcccgaggagcatttgatcggcttttgcccgtcatgtctgtatgagcgcttaaccattcttaagcatgacggttcatcttccattgacacgcgccctattacctcccttacttctcccgaagctaattgtcaacccttcaccacaacgcttgatggtaaccaccttcccaagtcttcctccatcaccttcaaccctaagctttgcagcacgaaatcttttcctgctttaaaaaatgaagggctttcttgtgccttagagccacgacgaaaatcatgtgacgtcatcccctatagcccccttttttccatttctaacccagacgacaaacatgaaattcctataaaggaacccaaagttgaaacgtgcaacctcacttcgtcttccattatagaacttgaagctgatgtggaagcagaaaaaaccctaa

SEQ ID NO: 9491 - DNA, 531 bp, Glycine max
  Clone ID: PAT_MRT3847_10857C.1
cttttgactgagaattcaacttcgcttggtctgggcgaattctgttctccgcaatctcgcaatcttcgccgctggattcggtggttttgtcgcaatctcgcaatcctctttcattcgaagactctctcccctttgcctatgttgatagtacgattgtcgttcatttaaagaggctaggcaggcaggatcccaccactgaggtagtggcggatggctgagagagaacgagtaaacaaagcatagatggaatcggcaacctcagagtcgccgtatccaggatcagggaatggcgagatcccaattgatctgttcggttccaaaaaacatgctggagtctcacgcggtgctctagcattcacagatgagtctggtaacatagtcttcagggtgaacccgcacccacccaatcctaacttatcgcccctttccaggacaagaaactcttgcttgatgcctcaggcaatacccctcttctccatctaccgttatcataatgggtcttggaaatgctataagggaaatagtgatgag

SEQ ID NO: 9492 - DNA, 375 bp, Glycine max
  Clone ID: PAT_MRT3847_108580C.1
gggccctaacacaggggcaaataagatcataagaggcaatggtttttgtttttccggacaataaaaaaagccatgctttaaaactgaaagtggaggggttgttcattttcaaagggggggaaaagaggggaattttttttttacaaaatttccgaaagggctgaaaaaagggagtaaagacaagaatggcttgggactcaaacccggggagggatcataggaatagggctctgtaagtttgcactgggggtagcaactccacttccaagttttacagggaagcccccattttttaaaattatttccacacccgcttgacatcccaacggggggaacttttttaaggggccaagatgtgcaattttgaaaaccttc

SEQ ID NO: 9493 - DNA, 427 bp, Glycine max
  Clone ID: PAT_MRT3847_108581C.1
ataaaatgtctttgagattggatcatgacacccccacttcaaataagctatcttccagctgtggaattcctctaacacaacatcactctcttcacctccaggctgatctcctttaatttctatcttcacccacaaaattaagataaacaaatggtgaagttctcaaaggagctagaagcccaactgataccagaatggaaagaggccttcgtcaactattggcagctcaagaagcagataaagaggatcaagctctcaagaattcccaagcaatcccaccaccacgctaaaccagactttggtctctccattttcgattccttaagcttctttgtcaaaaatattgctcaaaacttttcagcttcccgccatcatgacctcaacatcattcaggtgaggaagaaaaccacaaaggatgacgaagaag

SEQ ID NO: 9494 - DNA, 692 bp, Glycine max
  Clone ID: PAT_MRT3847_108582C.1
ccacgcgtccggcccctctctgctcagatatcattttcccttctgctcctattctcactcatactgatactactcttccctttctgccccattttcgctcacttctacccacaccatttagtaactcatgctctttaacttcatgttcctacccaacaagttaaccacttaacaagtgtgttgtttctttctcattgttcaggtccctctctttagctcacttccttttcaaccaagttgttggtttctaagtaaaggaggaaaataaaggtagaaaattttcatccgggtcatgagattttgtgcattcaaattttgcattccccaattctaagctcaagcttttccactgtgtttgatttgttcagatctctctcactctttttaacccagaaaatgccaatctaaactcttttcggctatcagaaacattgtgcaaattttctctttttcattcttttgtgggggtggcctcatctcatggtcttgttattggaaccaattgcgacattcaagggtgcccttctgcgataccattcttttgtttcttaaaagtctgaaccttgaaaaattgcgttttacgaaatgggctcttctttagtctaatttgggttccatctctgtctaaaggtccaatttttaaaactcaaacccatcttttcctgttattttccacatgaatgaaaagggct

SEQ ID NO: 9495 - DNA, 486 bp, Glycine max
  Clone ID: PAT_MRT3847_108583C.1
gctgaaccatgcctgatggatccaaaattgtttcattcttttatcatcagattcagggtgttatttggtttgaatgattcccttggttttcctcgcctacctttcccttaaattcaactttgattggaacatttctagtttttttttttttcttttcaatatgttggaaccaggtgcttttattatttttacttttttttaattgaataggggtaaaaattgtaaatataaatttgactattttcttgcaaaaatttctacccaatggtgagatatgctgctaataattgctgcttgccttcactaatttatttgatctttggtctatggcaagtagacagtcatccagcatcttctagaatctagaagtaaatgtttgtcaggctttgatgcttgtatctctagtatttttgttttgtttgtttttgtatggtgaatgtttgaatcattacattgatgaatgctgaatatgttttgataatgagt

SEQ ID NO: 9496 - DNA, 308 bp, Glycine max
  unsure (1)..(308): unsure at all n locations
  Clone ID: PAT_MRT3847_108584C.1
angnagcgnagtaagnncggaattcngnngggnggggntnagngnggntgtatatgtggaaganntgggngagcngangcgnntngaggngganggngnaattnggtnggatgtaaaggggtangngagntnagnnatggnagntnnngggtaaacgntaganangaagnangngttnatgtgcnagnntgannaggnngnttngaggnnnaantntnangntggnatantnganngngntaananatnaggataggganangnanacnggtggtnnggacagagtanaagtggnagtgatatgagan

SEQ ID NO: 9497 - DNA, 580 bp, Glycine max
  Clone ID: PAT_MRT3847_108586C.1
ggctcgagagctatcatctctaaatgcgctacaaaatctgtctaccatgaaagaaaatgtgcaacacttgatcagttctggaattgcaggatctctgctacaacttcttttctcagtaacatctgtgctcatgactttgcgcgagcctgcatcggctattcttgcaagaattgctcagtcagaatccatccttgttaatgaagatgtggctcagcagatgctttcacttttgaatctttctagccctataattcaaggtcatctgttagaagctctaaataacatagcctctcatcctggtgcatccaaggtgagaagcaaaatgaaggaaaaaggtgcacttcagctgctcttgccctttctgaaggaaaacaccaccaaagtcaggagtaaggtcttgcaattgctatacactctctcaaaagatctaacagatgagttgactgaacatcttgatgaaactcatcttttcaacattgtcaatattgtctcaacatcaacattagacagtgaaaaggctgcggctgttggcatactgagtaatcttcctgctagtaataaaaaagtgacagatatactg

SEQ ID NO: 9498 - DNA, 350 bp, Glycine max
  Clone ID: PAT_MRT3847_108587C.1
ttcagggtcagctccagctccgggttcagggccaccaccaggtaagacgcctctcaacatccccaaatttaatcaagcttcatttatgcagtgatagatcatagtaacagagatttcatttgatagactttcatcacctgtccaaaatctcatgaataacatttccaataatctgactaaagaatgttttattattttttcagataagtttatttaatttcttttaataatttttcgaagaattttagtctattacaaaaaaaataaaaaattcaaggttaaatttcagaacaaaattttcatatcatatgcttccattaaattaaaagtatctctattttattgaaaat

SEQ ID NO: 9499 - DNA, 401 bp, Glycine max
  unsure (1)..(401): unsure at all n locations
  Clone ID: PAT_MRT3847_108588C.1
gatgattaaggaccgtaccatcgtctacattgtccactgcttaacctccatttccataaagggagatcaaacttaatagtaaataacataatgcggcatttgctgcacgggaggctcgatgtgatcatacgtgagatcgacacattaccaagtcttaacgagtggaatttcaatctctgctgcaagggtacaagtagaagcgtgaggaagagatttctttcccaactcaagagttgtttgctctgtcaatgctaatgccagcccgagtttgtcgagacgggtctctatgcgacaggtgatttagatgaggcaagggttggaaggactaaactgttaaatgatcaatcctacaatcccacatggaatgagacctttcacatatatngtgcccatttgatctc

SEQ ID NO: 9500 - DNA, 757 bp, Glycine max
  Clone ID: PAT_MRT3847_108589C.1
aaaaaaaagagtaattctgctatttttgtttctggcaaaacaatcacaacttgagcagtttacatgaatatgatttaccctatttgcaggatctttgttgatacaggaaacctattgctcttgtttattttttaccctctctaatgttcgtatgtatgagcaagtgaaactactgaatcttcaagcctcgtatagcattccaacttcaatccgttgttgggggggaacccctagagcaggcaaggcagatctacagttattgggcatgacttcataaaatctaagcccaaatttatcaaaccagccacagttcaggccaatgtaaaattttgtctttccacgaacatgaactacccctgcacaccttgccttttttaagtatgaagtctcttcaatctctcgagaatcagatgaaagcttgtcaggagagttctgtatatgttgtgtcaaactagtgatgacttgattaacaaaatgatctccttctaaatttaaagcatctgcatagccatactgaatcacacagcaatatacaccttcgagattcgatttcttgatgacaatcctctcatgtggagcaaccttggggactaacaaatatctaagagtagtgaatattgtgaccttgtgaagggatttcatgttctttatgtagtgtccaagaataggagttaggccttcttgaatgttggtataaaagaagcatagcccaggaaccctttgaacactgcggtcagctaaaagctcttcaagtctc

SEQ ID NO: 9501 - DNA, 427 bp, Glycine max
  Clone ID: PAT_MRT3847_10858C.1
gcgttatgagggcatttttgacgacaaatctgctgagtgcgtatgatcaggatagaagtgctgtggcagttgcactcagcacaataggaagagcgttcgaccaacaatatgaggcactagaggacataggggatctgtacttgctatgcgctccaacaaggttatcttctcaaatgactgcactcaatacaattacatatatgggatagccgacaggctaaaaactctgtactgatctctcggataagatctaggcatcaatgcatgctgacacatatatgctacagttcggcacaacaaccgagatttccctgtatcacatgcatgatagggaagaccatgtgaatatgaatgggccgatgacgaagtacatctttgacatgagatgcatgaaccatcttagacaggcatgcagataactgattga

SEQ ID NO: 9502 - DNA, 1027 bp, Glycine max
  Clone ID: PAT_MRT3847_108590C.1
gagccatccaaaagactgactttatgtatctattgggtgtgtataatttgtgtttctgttttgcgattctataacatctcgaagaacagtaagattgagagaattcttttgcggaaatactaccatctgatggctgtctcgatgtttttgcctgcccttatcttccagccaaaatttcttgatctagcttttggtgcggctttggcaattttcctgacattagaaattattcgagtatggagaatctggcctttgggacacccaataaatcaatttatgaatgcattcaccgaccaccgtgactctgatcttctcattgtcagccatttctcactcttactgggatgtgcgcttcctatttggatgtctactgggtacaatgatcgacctcttgctccttttgcgggaatattgagtctaggaattggagacacaatggcatcaatggttggacacaagtatggtgttctgaggtggagtaaaacaggcaagaaaactgttgaaggtactgcagctggtataacttctgtattggctgcttgttctttactccttccactcttagcatcgactggatacattctcactcagcattggttctctcttcttctagctgtgactgtaagtggtttgttggaggcttacacaacacaacttgacaatgcatttataccactttttttctatagtcttctctgtttgtagacacagcttagttaatcttggacgagcgacgaggctctgcaaatatatgttgtctctgggcacattgtttatgcagaggtcagataactattaaccaatgcaattgtactttaccagtttagggttgtggtatacatagtagatagtagttaggattgtatctatacagaaatgatagatatacgagtgttcatttaaagggtttatacccaacacgcataacacaatgtatgcagagtgacagtttcccatttttgttggaacctatgtgaggccatgacaagaggagagttgttgaacatctagtggacaatggtaaaga

SEQ ID NO: 9503 - DNA, 376 bp, Glycine max
  Clone ID: PAT_MRT3847_108591C.1
cgaagatacatgagggtttaaagtctggatcattttggtacaaacccatccaagtgtgtcatcctcctcataagcttggagttagcttattgatattttgattgcaagtgtgataattgatgcaaccaaactttagcctggacaccaatggccgatgttgcttacgaatactgtgggctacttcattcagcaggtcaaacttgttacttctaacaccattattggaagcattgcctgatccactctctccgggcctgtctaacattctcagatcgacagaaggtgaatctctgaggatggtgttggataatgtggtccaagggctttctctacaaaatacagcttgagagctagtgaaagattttactgctttctc

SEQ ID NO: 9504 - DNA, 837 bp, Glycine max
  Clone ID: PAT_MRT3847_108592C.1
ggaagaagaagaatcagttccgtcgtgagacactgtcataacataagagtcgtggacgcggttggctgttgctgtctacggttccaacttccaagttacaagcttcacccattttataaaagttacggttcggttccgctgcattcgtgctttctagcaacacaaaatgagcgccatctctttcagttccacccattttcacagttggaaaaatcccaaggggtttggaaaggtgagaaagcaacgagatgggaagctacttgtcaagtgttccagcaagagtgggaacccaacttcattgcaaaatggggttcgtgttggtgttcttggagctagtggctacactggttctgaggttatgcgactcttggctaatcatccacagtttgggattgcactgatgactgctgataggaaagctgggcagccaatctcttctgtattcccacatttgagcactcgggacttgccagatttgattgcaataaaggatgcaaacttttctgatgtggatgctgtattctgttggttgcctcatggaactactcaggaaattattaaaggcctaccaaagcacttgaagattcgtgatctttctgcagatcttcgtctaaaagatctttctgagtatgaagaatggtatggtcagccgcatagagcaccagatttacagaaagaagctatatacggattgacagaggttttaagggaggaaatacagaatgctcgtctagttgctaatcctggttgttatccaacttctgttcaacttcctcttgtcccattgataaaggctagtcttattgagcttaaaaatattatcattgatgctaaatc

SEQ ID NO: 9505 - DNA, 230 bp, Glycine max
  Clone ID: PAT_MRT3847_108593C.1
ggctcgagctctttctgtcagcctgatgtttgcagcagaacctcctcaaagcaccataacggtggggataggtccagtcgcggggcaacacccccaacgcgtagaaatacacattgatctgctgctcctagctcatgggtataccgtaggtgggggaacagaacggtgagtatgctgttaaggcgtctgactccgtctggggggagtgacagcgacgacatcgcagactc

SEQ ID NO: 9506 - DNA, 252 bp, Glycine max
  Clone ID: PAT_MRT3847_108594C.1
ggggagagataaatgggaatttacacattcccagctcgctaaacgtgcacaaaattgaacatttttctttgaacaggatttcaatgcttattcaaacacacccttcatttgtaaaatttgtgcctgttcactccaataaatcaagcacgcatatggatccttttaccaaaatgcatcattaaatacgtgaagaagcatgtttagttcaaatggttttccttacagtcttcatattacaaaaaataactaatt

SEQ ID NO: 9507 - DNA, 345 bp, Glycine max
  Clone ID: PAT_MRT3847_108595C.1
tcgtgccccgattcctaactctaactacggttaaagtcgaaggcggtaaggaattaacaaacgaataagtagcagtaaacacgcacgtcgtaacgaggctcgagtctaattaaacccatcttaaaacaatcgaatcggagacggaagccagcgagtatataccggccattaacgttacctaattatccgattaactcagatgacgtcactgcacgaccggaggggcgtccgcggagagaattactaaagaggctccgttcgtcgcgtagtgaaacaaagaaggatctgaagaggccgcggtaaggtccaatgaggtgcccgaaaagaagaaaaaggaaaccctcg

SEQ ID NO: 9508 - DNA, 170 bp, Glycine max
  Clone ID: PAT_MRT3847_108596C.1
aaacactgttggttactacgcccacaactgcttctccaatctccaatctttttggacaccctctattgctcttcctccctaggtgtaatttgcgtaaaagggtatctctatctatagagattacatcgtccccggaggcaattttcgaccttaggtgtgttatggagagt

SEQ ID NO: 9509 - DNA, 357 bp, Glycine max
  Clone ID: PAT_MRT3847_108597C.1
gttagctctgtatgatagtctttattccctgcatctgaagaaagatagtcctttgctgaaaataaagtatcagtgttttactctttttaaatacaaaacccaactaaacttcttcaccaatggtattggttaggtgcctccagatttccctgggggctgcagacccctacagattgtggtgctggtagatactttggaaattagtaacagttattttgatctgtgagctttcacaaattaaagacaatgtaattctcaaaatattgatatatcctgccaccattatggatatttggaattaaaaagaaatgggtagttttagaatccatccgaaggtccaaatccaattttcaaatt

SEQ ID NO: 9510 - DNA, 526 bp, Glycine max
  Clone ID: PAT_MRT3847_108598C.1
cccactcgttcgtgtggagggggatgtgggagcggttgtggtggaggttgtagtgggggctgtgatgttggaagcggctgtagtggtggttgcggtggtgggggagacgtctcaaacattgaaggacgcagcgatggaactgagcccaaatacgttgctgtctcaccggaaaaaagttccaattctgctgcaggtggagaaaaggaagcggaaggtgaacaagcacaagtaccagctgagcaacagccattaccagttgcgccagccgcggcggaagctgcttcagccgaaaacgcaccgaccgaaaatgcagcagctgtaccatcctcaggatattctggtggtgaaccggcacaggctcaagctgtagcagtacaaacagtagaacagcagcaagccgcttcagaatccgaacccactgccattggcacatccaacggcaacaacgagattaacgatgcaaacagcagcagcactgatcagaaagcgatactgctgatcagccaaagcaacaacaaatggtgga

SEQ ID NO: 9511 - DNA, 1571 bp, Glycine max
  Clone ID: PAT_MRT3847_108599C.1
ccacgcgtccgatttatttcactctttcaaatcttatatcttcttgttcttcacttccccactattttagagagagacacacacactcttccttccttttgttgtctcaaaatgatgagtgcaagtgcaagaaataggtctcctttcacgcaaactcagtggcaagagcttgagcatcaagctcttgtttttaagtacatggttacaggaacacccatcccaccagatctcatctactctattaaaagaagtctagacacttcaatttcttcaaggctcttcccacatcatccaattgggtggggatgttttgaaatgggatttggcagaaaagtagacccagagccagggaggtgcagaagaacagatggcaagaaatggagatgctcaaaggaggcatatccagactccaagtactgtgaaagacacatgcacagaggcagaaaccgttcaagaaagcctgtggaagtttcttcagcaataagcaccgccacaaacacctcccaaacaatcccatcttcttatacccgaaaccttcccctgaccccaacaacaccaacaagaaaagccaccaccctcttcctttctctcctttgccctctaatcatctatgccaagagtcccaacccttttccagatcctaccaaaactcttctctcaatcccttcttctactcccaatcaacctattcaaaacccccacatgctgatattcctccccacgatgccaccacccaccacctattcatggactctcctggctcttattctcatgatgaaaagaattatagcaggcatgttcatggaataagggaagatgtggatgagagagctttcttcccagaagcatcaggatcagctaggagctatacagactcgtaccaacaactatcaatgagctcctacaagtcctattcaaactccaactttcagaacattaataatgatgccaccaccaacccaagacagcaagagcagcaactacaacaacaacaacactgttttgttttagggacagacttcaaatcaacaaggccaagcaaagagaaagaagctgagacaacaacaggtcatagaccccttcaccgtttctttggggagtcgccaccaaagaacacaacaacagattcctggctagatcttgcttccaactccagaatccaaaccgatgaatgatgttttttttctagttattattatgagctggtgcatacggccaagagagagagagagagagacttgttgttgataaagatcatcagtgttttgtggctggggtgattttcttttgcaaaaggtgtgatgttattgcgttatgtaggggaccacagtaggatttgtgcctttgcttttctagatatttatatttatatatttattatataagcatatattaccaacaacaacaaaattctctctcttacctaatagactagggtagacactgcagatttatatcaaggtttcaaacttttcatcaacagctcattgttagttattgaatttgtatattttcctttgtttcattgccttgggcaatcaacatggggtaactgggtataccttaatcta

SEQ ID NO: 9512 - DNA, 892 bp, Glycine max
  Clone ID: PAT_MRT3847_10859C.1
tacgtctctttcaacaatgacaaactggggaatctagcaactaccaaaaccaatctctttcaataatcaacaacaatgacaaacttgaagcctctaattctcttcttttatctcctagccattgttgttatgatttcaataccatcaagccactgcagcagaaccttgcttccagaaaacgaaaagctgatagagaacacttgcaagaaaactcccaactacaacgtttgccttgagtctctgaaggcaagccctgggagctccagtgctgacgtcacagggctggctcaaatcatggtcaaagagatgaaggccaaagcaaacgatgcattgaaaagaatccaagagttgcagagggtgggagcatcggggcctaagcaaagaagagccttgagttcttgtgctgataaatacaaagcggttttaattgctgatgttccacaagccactgaggctctgcagaaaggtgaccccaagtttgctgaagatggggctaatgatgctgctaatgaggctacttattgtgagactgatttctctgcagcagggaattccccactcaccaaacagaacaatgctatgcatgatgttgctgctgttactgccgctattgttagattgttgctctaaactatatatacttaattgtactgttaactgtaatgtgaaaatactatctattttaaagctttttataaaatgtttattatatgtaataaaatccaaccctctcgtgattctcacgagtttccccagatatctaatttgcattgagacaaaaaaaaaaaaaaaaaaaatataacaagaaacaggcggaaggtcctactgttggggacgtagaagaatctgaaaagtctctgtctgaattgcggggcggccattataaagaatc

SEQ ID NO: 9513 - DNA, 410 bp, Glycine max
  Clone ID: PAT_MRT3847_1085C.1
ttttccaggacacattcttcccaaaatttcatggagcatgcagcattgaataagaataaaatgatgtcgtgttgagtcacagaggtttcattcattcaatccatccctagatgaatcaaagactcctatgtttgcgcatacaaccatcgctctatattcaccgtttattcacaaaaccaattgcctccgaactataattaaaatctcacaatattcacatgaatataccttcccattttgagagaccatatgcattacctttccaaaacccatagatagtgacatccatcagcttattggatatgccaccacaccccattgtccgtatgtcactattacaagtcgcgtatggcaagattctttagctcaaacacagaccgtaacctttcgggaacgatgcctgtgccctt

SEQ ID NO: 9514 - DNA, 413 bp, Glycine max
  Clone ID: PAT_MRT3847_108600C.1
ccattagaacaaatgggcattatttatgaaattattgataatgcccgttttaagaatatgtgctaaaaaaacctaaataacatagcattgaaaactatatctgttaatttcatactaggaatattccataaaatttataaagcaaaccttaaagccccctctgttgaaattaatcaagaaaaaataacatggatatatatattcatccattttcctataataaactttttatgagttctcataaaacaccattaacttggttgaacaacacaaaagggttttgtttctgaagatctcatgactatcttgcctttgatcttgaaagctatgttcgttacaaacaaaccaaaccctttgcttatgatcctgtgaaaatcttcagccatttgctggaggatccaaacaagttccat

SEQ ID NO: 9515 - DNA, 405 bp, Glycine max
  Clone ID: PAT_MRT3847_108601C.1
cgggagaagacttggtcgaatcggccagaccttgtgtctgacatcgggagtgttcttgaaccgtctgaagcagcttgcattgacacgccaccactttagacttctaagaaggtgcttcggattccttcccatgatgtctgcccaattgcccaggaagtgatggaagatccatacgtagctcgacatggctttacgtactaggacgaggccagacaaggttggtatgaatagtgtccagctcactgacccactgacagaccttaaactagaccactctgatctggtacctaactatgctctacagtctgccattctggagtggcggctgcattgaattagtgaaccgaaattgtccattacgcttgctcattttacactggcgtcaatgatacttattgtgtatag

SEQ ID NO: 9516 - DNA, 296 bp, Glycine max
  unsure (1)..(296): unsure at all n locations
  Clone ID: PAT_MRT3847_108602C.1
gtttcctagaaacttcacttcatgattcgaatccaccgtagacttgttctttgacttcaaaaattgcacgcgcaacttgtggcatgggtaccaatatatatactcttggtgcttgcttttatttttttcaagtcgctgtgttatactttattatctagctatactattaataaagataaaaaaacaattaaattaatgggtcaattttgtcantacccaatgtatagaccactgtttattttgtgtgatgaatttcatgtgaatggcgtcaattcttgtagttacttagaataagg

SEQ ID NO: 9517 - DNA, 706 bp, Glycine max
  unsure (1)..(706): unsure at all n locations
  Clone ID: PAT_MRT3847_108603C.1
ctctttctaaacatttggatttcaaagggattacatccgaccttgttactctgaacatcctcatcaactgtttctgccatctgggtcagatcactctttccttttctgtattggccacgattctcaaacggggttatcacccagatgtaataaccctcaccacactcatcaaaggcctctgtcttcgtggggaggttaagaaagcactgaaatttcacgatgatgtcgttgccctagaattccagttagaccgaattagttatgggacattaatcaatggtttgtgtaaaataggagaaacaaaggctgccatacagttgatgaggaatctggaagaacgctccattaagcctgatgtggtaatgtacaatataataattgatagcttatgcaagaataaacttgtaggggaagcttgtaatttgtactctgaaatgaatgcgaaacaaatttatcctaatgttgtcacctacacgactctgatctatggcttttgcatcatgggttgtttgaagaagcggttgctttgttaaatgaaatgaaattgaaaaacatcaacccagatgtctatacctttagcatattgattgatgcattaggtaaggaaggaaagatgaaagcagcttaaatagtgttggcttgtatgatgaaagcatatgtaaaaccctgatgttgtcacttacaacagntctagtggatggatact

SEQ ID NO: 9518 - DNA, 432 bp, Glycine max
  unsure (1)..(432): unsure at all n locations
  Clone ID: PAT_MRT3847_108604C.1
tttagatctgtgggaaaaacccagatgaatgaacaatcatcaagaagtcattttgtattcactcttcgaatatgcggtgtaaatnangtaaagatgttctattattacaatgactaaaaccatgttctatattcaatttttaatttccatctcaaccagtgatagacacactgacttgcgtcacaatgcaacctatttgtctttcttccagagcactgaccaacaagtacaaggtgttctgaaccttattgatcttgctggtagcgagcggctttcaaagagtggatcaactggggaccggttgaaagaaactcaagtatgtataagcatggcgcttttcattctctcttattcttatttgatttcaaatagtttaaactctctttcgtttgtgatcaggcaatcaacaaaagtttatcatcacttgatgat

SEQ ID NO: 9519 - DNA, 336 bp, Glycine max
  Clone ID: PAT_MRT3847_108605C.1
acgaggaacatcagttgaatgaccttacactctgaaaccaattagatacatctttctgcatgtaggtataaagaccagcctgaaaagatacagaaaaattaatgtgaagtataagcttttctagtaagattaagttgagtagagacattaaaaagaaacagtttttttttttttttgtgtatgctcagctttggcatgatatgaagagtgaaactgctgaaagagacaaactatcttagaaggccttattatctttatgttttagtaatgatttcttaatgacagttttattaatgccacctagattagttttaaagtagaagaaagagaaaaaaa

SEQ ID NO: 9520 - DNA, 226 bp, Glycine max
  Clone ID: PAT_MRT3847_108606C.1
tcggctcgagcggctcgagtacggctgcggacgacagaaggggacttccaaaaaaaaaaaaaaaaaaataaaaaaactaggggcccccgattagtgaccccttcaccccgggatttatttcgggccgggtacctgagggggtacaattttccccaaaagggagccgtttaaaactttggggaattcagggcaaaactttttcccggggtaaattttttacccgccc

SEQ ID NO: 9521 - DNA, 865 bp, Glycine max
  Clone ID: PAT_MRT3847_108607C.1
acgaggcaaaccaaatcaagtaagagcgagagtgtgatagagagataatgcgttcttatggcttaaccgtaccgggaagcgaccaccgcttctgcgtgcccaccgtatctcaggtgttctttaggcccaacaggcccattaaccgaatcgcgtttcccaaggccaccctcaagaacgacggcttcgtggtggacctgagcttctacgaccttctgggaataccggaatccggttcggtaacggagatcaagaacgcctacaagcaactcgcccgaaagtaccacccggacgtgtcgcctccgggtcgggtcgaggagtacacaaagaggtttattcaggtgcaggaggcctacgaaaccctgtctgatccttccagaagagctatgtacgacaaggacatggccaagggcattaacttcgccttcaacgcccgcagacgctataattaccacgatcaggtagttgaacaaaaaagtgaatggaaagctaggtggaaatctcaactgtcagagctgaagagaaaaagtaacggcaaggatgctggagggaatatgtcatgggcggcacgaatgcgccaacagagggatgaattgtcaaatgaatcatgactaggattttccttagttctctctacgtaactagttgtatatatagataatgggtacatcttcgtactctagatcacaaattaaatataaaattaatgttgagaaaacgtgccattggcctattgctctacttagagtttttcagtgtgccaaccacatatttaaaaaaaaaaacgtctgtaagccattaaggtgttttcgttttaatttgcaaaattcgttttgaagtaaagtgatttatagttaaaaaaaaaaaa

SEQ ID NO: 9522 - DNA, 422 bp, Glycine max
  Clone ID: PAT_MRT3847_108608C.1
ctttctcgttcaaacctctgcaaacatgttgttcaatcaagtccttccaacaggggcagagacccagtcggacttcttgcgactcaaggcaaatggcaaagggaagctgcggtaggccctaggaaagcgaggggagagaggctcagtccaggccagcccgggagcctacacatgctggacaggccgacaacagcagggacgctgaaagccggtaaaatggagttggtggatgcgtgcatacactcagactaaaggagcagccgctacaaccgaagagacagagggatgcactgaggacaagagtgcacagaaggttgacggccaccctagaaacgaaggaacaggaagggaggatgaggcgcatagaagcggctacatatacacggcccaggcagatgaacgagaaacggatgctggtggca

SEQ ID NO: 9523 - DNA, 215 bp, Glycine max
  Clone ID: PAT_MRT3847_108609C.1
aattcgagcgggcgcttttttttttttttttttttttttttttttacccaatgcgggggattattaaaatcaatggtgaagtgccctttaaccaaaaaaagggggggggcccttacaaacccaaagtgttttattttaccaaaccaacttaaccttgaacttcgttaaaacccgtggccaaaataaccaccccttgtcccttaattaattccaaa

SEQ ID NO: 9524 - DNA, 197 bp, Glycine max
  unsure (1)..(197): unsure at all n locations
  Clone ID: PAT_MRT3847_10860C.1
agagagagagacagaagggaaggaggcattatagaacaagaaccccagcccccccccnnnagcgaagcngngganaccgcaacaccgagcagnnnaaggcannncncaggaagnagaccnnccccaccgagggcagcagaggccaggagcacaccgcgacacaaagcagagcagcggccaccccaagaccgggaaac

SEQ ID NO: 9525 - DNA, 268 bp, Glycine max
  unsure (1)..(268): unsure at all n locations
  Clone ID: PAT_MRT3847_108610C.1
cnaaaatctggaaaagtcgaatccaaacacaaccacaatacttgagttttttcacaaaaaccctccagtgaaaatcaaaaacctcaatttctttcttctcaacatttccaaaatttctgcccttcgaacttcgttcttccgaaaccagtgtacactttggcggcgtggcgaggcataaatggcatgcccgaaaccagcgatggtcctagatctgaagccttcgtcggaggcaccgccattcctcccgttgacgagtccgattacctcc

SEQ ID NO: 9526 - DNA, 604 bp, Glycine max
  Clone ID: PAT_MRT3847_108611C.1
cgcttaacagcaaaccccactactcactaaatcactctttttcgttttgctacaccacgacgccgttcaccgaaatgacccctccaacgacacccaataatggccccttccaaccgccgctaactccgccgccgcctccctcatttcgctggaatccaccgccctccgtctccggcggaccctcggcgccgcgctcctcttcttccttgtctctctctcctgcgtgctcctcttcaaaaacgcctattactctctctgcgcttcttccaatcccttgtctcgcctcaccaccgtttttcaccccaacgattccgtcgcggtaaccaatgactattcactagaaaatattctgaatgaggctgctatgcaagacagaactgttatcttgaccacattaaatgaagcatgggctgcaacaaattcaatcattgatctattccttgagagctttagaattggagatcgtactcgtaggcttctgaatcatttagttattattgctttagaccagaaagcatttatgccgctgtcaggcaatacacacctattgctatttgcttggcaatgaagccactgattttcataaagaggcatactttatgac

SEQ ID NO: 9527 - DNA, 932 bp, Glycine max
  Clone ID: PAT_MRT3847_108612C.1
atcaaacatggtatgctattcagcacattaaacattaggggcgacaaagtgagtgaatctgtctccacctcccttatttgccgaaaatgagacccacctcctcgtgtgtgtgtattatatatagtcaattaacatttttttatggcttgttggctaagaagacaatatcctcattacaatcataatatagcacactcaaaaactatgcatttccttataaagctagtaaacagaaatgaaagatcagaagaagcacaactgtatcagaaatctacactctcagtacattatacatagagaactctcaatttcgttggtcttctagccatccttggaggatgtagattttggagcagtgcttgttaaccacagcaagctcctctgcactttctgaaacagcgactttgatcgtgtattacacaaagtgaaagcaattgcatccaaataccaatcacttcgccccttaaaacccacaacacagcctccatctattgaaaaagtgaatggagtcccttcttcaactccatagggtccaaaggttttgcggttgctcttgaatgtcaatgatagaatgacgggggtgcctccacgaacaactggacagtagtggccactcacactgaccaagaactcatctgggaattgcagcttaatctcagctgttttgttacctccaactcctccatgttttttagctgttaaaggcttgccattcctatcataaaccacctggattgagtctatacaatgaccataaactagtttgatttctctcacccctgtgaaggttccatcatcccagctatttccaccattgcctccccatggtcccaatattatgctcctcttcctactttttccttccataaggcctattaacttccaaagggggcgtatacaagatatcgcaagaagcaacgatacgatatgat

SEQ ID NO: 9528 - DNA, 340 bp, Glycine max
  Clone ID: PAT_MRT3847_108613C.1
ctccaaaataaaattggggtgtgaatatccatttggtccaaccctccaagattggaatctaatcgcttccattgcctcctaaaacaagctctacaatgtccaaaattttataatattactttttaatagaaaaaaaaactatttatttacaaccgaacaaaatcgccggcgtataatttttttgggaaactgcccctactccggaatggtgctcaacacccctgcaaatccccctttaccaccggccccaggggtggtccttccttttccacctccaacaataattgcggcatacacccccttagggttagagttattttttttaaaaaacaaaattttt

SEQ ID NO: 9529 - DNA, 356 bp, Glycine max
  unsure (1)..(356): unsure at all n locations
  Clone ID: PAT_MRT3847_108614C.1
gccaagttaccaaaccaaacaattaaacaaaacccggtgctttgttattgaaatccatactacanctccataaatcatataattcaaaccataaaacggttgataattactgaaaattttttttttttccatcgcacaagcccccaaaaataaaatattagctaccttactgcctcctttgtgaaaaattacagaggtgaacaaatttataattccatattgaatcacatatgaacattgtataaatatgcctccctattatcctgacacctaaaaattttggaaacacaccccccgccatttggtttctattcagacaatcctgtccaactccatagcataactaagtgtttgtt

SEQ ID NO: 9530 - DNA, 249 bp, Glycine max
  Clone ID: PAT_MRT3847_108615C.1
taaattctctcatttgtaatgtgatcatttaatttaatgaaagtataaaatacttcaaatgcttccaattctgtggtaataacaaatcaacagcattgcatgtaatgattagaagcaattttgtcatgttagaaattctcaaatcttgtgtcatttcgtgttttcttttgtagtatacttttacttaaacttggtagcaattatatttcagacatcttgtgtctgatcatactctctttgtatataaat

SEQ ID NO: 9531 - DNA, 430 bp, Glycine max
  unsure (1)..(430): unsure at all n locations
  Clone ID: PAT_MRT3847_108616C.1
cccacacgcccgagcaaacaagaaaaangagctacggcccaggccaacaanggggggaggaggggctgaaacccagcagacaacacgggaaagagaggaacaagggaaccaggcgtcngcctcaacagaangaggcctcacgctaaggagccggcgccaccagcacaagccaacaacaagcaggacaccaccaccacaagngctaccaaaattgatcagaaaactgaaaattcttgcaatgcatgtgaggagaagttcaatgacgggacaaaacccgggtctgtgattgctaagaacatcatgattgnggatgattatagccttgaggacaagagtgctgagcaatgggcactcactcacacaggtcaggaccatgacactatagttattcttcatgtcatgaacccttgtaataaacaagccactgatg

SEQ ID NO: 9532 - DNA, 483 bp, Glycine max
  Clone ID: PAT_MRT3847_108617C.1
actagatctaccatcttacacaagagtgttttctttgccacttcttgtagattttgcgtattgcatgtgtttgatttattttttaaattcaaaatggtttttaattaaaactttactgaagaattaaaacaatcttcataaaataatcaaaattaaacaagcaaattctgatcaataagaatcctgtcttcaaaagctaaaaactgaataaagttattttttattcaaccaacaatgaagattattttttaatatattcattccttgagtaaatattgtcattgttttaattctgtctctatgtttgccttgtcatcagcttcggcttcaagttgcagtgcttcaacactaacgtccggtggatgtgggaaagcaactaaaatcggtgttgttgttggagtaatcaccactggagctttggtggtggctggtctgtttcttctatgctactgtgccaagcggcgttctacttggttgagaaaa

SEQ ID NO: 9533 - DNA, 307 bp, Glycine max
  unsure (1)..(307): unsure at all n locations
  Clone ID: PAT_MRT3847_108618C.1
cggacgcgtgggcggacgcgtgggcggacgcgtgggcggacgcgtgggcggctgcgagaagacgacagaaggggatgtttttttattaagaggttcttattttggtcaatctgtataggtaagtggaggcagcagagaagtattaatggtagggtaagtaatagtgttacttaatgtgacagttacaactaagtgaacagagtttaatttaagctgaagcgatcttgcttgccaaattgaacttctagtataattttaagaatttagtatgttacttaaaaaaaaaaacatagnnnnnnncacnaaa

SEQ ID NO: 9534 - DNA, 120 bp, Glycine max
  unsure (1)..(120): unsure at all n locations
  Clone ID: PAT_MRT3847_108619C.1
agatggatcagtntttgtggagggtgtnnncctttgnttangatccttgtttcctttggagtgttctgactacttgnagnattcttacagagcacaccgtannncntctncatnaagtta

SEQ ID NO: 9535 - DNA, 650 bp, Glycine max
  Clone ID: PAT_MRT3847_10861C.1
cttttgtttttttttttacactgatttgacatttttggatccgtcatatgaataatcttctattctagacactattgatctaagtataagataatagaaatattgagtcatcaaacaacaaacgaaaatcattaacattagagataaaagcagcattaggcggggatcttttacttacaagagatgacatggaaattagaacaaaatcagcaaataaaaaactcataagatggaatattctagtataatatataacaaattgcagattatgatgtactacttaaggcatgtccattagaagctaatcatgtttatacaacagccttagctgtccgttgtaactgttcctcaatcagatataaaatatgaatatgttctgctggaggactgctagcaacacactctactattggttgaaatttattcaaatctacaaaatcatgaaagagagtcattaaataagatgtagaacccacaattttgtgtgatttccaagaaattttaaccaataaaagatggtgcgttcaaaagagtatggcaaaagagtgtattgctagcatttctcgttctgctattagcacccttctgtgcacggagtgcagtttcaaacagaacttttctgtaataaatttaaataaaaagatgcctgc

SEQ ID NO: 9536 - DNA, 291 bp, Glycine max
  Clone ID: PAT_MRT3847_108620C.1
ctgccagaagacgacagaagggggccctatagaccaacctgtgaaccccgtgtgagctcctctcacctccccatccctttcatcctgtagaggaattcctgagccttacggtctctgtttcacctctgctacattatggcccctcagagggctctactttactaactgatgggtgctacacccaacctttcgggagacgagacaactgtgttccaggtagtgattggagactgtatagagcacagacgcttctacacggttcccttctcccctgacaacctgtaccttgcg

SEQ ID NO: 9537 - DNA, 303 bp, Glycine max
  unsure (1)..(303): unsure at all n locations
  Clone ID: PAT_MRT3847_108621C.1
accacccatccntcattcttatcaaactttagtttttcccaacacaatactctgtcgtcggcgggttcatacaatactatagattgtcacatataccttcatatccacatgataatacctactgtgctcctcatcacagctccctaattataaatcacacgatacatccttccataaatggcacacctaaccaaatttcgaaccacaattacctccctaagaattcttcaaaatacctattgcatacaaccaaacctaaacttatttacatctctcatgaccacgatctatgcactgttaccc

SEQ ID NO: 9538 - DNA, 1952 bp, Glycine max
  Clone ID: PAT_MRT3847_108622C.1
aggcgggctcaggtctaactcgaaattcctcaagaaacttcttatctatagtttgtttttgctcaaaatatacacattaattgacgccacaatggaaaaactagctgttctcaaagtagaggcaacaacaataaaggccctaccttcatacttgtgccgtttgggagcgcttaaagaattgaacctgcactactgcgaaagactagagactattccatcctccattggagctctcatcaaactctgcaagttaagcatgatgataacattatcccgccacactttttcttatcaatttatcaatttgtaatagcaaatgtcaaattagaatgattgctcaaagctgatgaccttccctgagatcttggagcctgcacaaacgttctgctcacgtttacttgacaggaacggccattaaagaattgcctttttcatttggcaatttggttcatcttcaaaccttgcgcctgaacatgtgcactgatctcgagtcacttcccaacagcattctcaaattgaagttgacagaactagatattatgaagttgtcaaagcagatagccttccctgagatcttggagcctacacaaaattttgctcacgttaccttaacaggaacggccattaaagaattgcctttttcatttggcaatttggttcagcttcaaaccccgggtccgtacatgtgcactgatctcgagtcacttcccaacagcattttcaaattgaagttgacaaaacttgatttgagtggttgctcaaagctgaggaccttccctgagatcttggagcctacacaaaattttgctcacgttaacttaacaggaacggccattaaagaattgcctttttcatttggcaatttggttcagcttcaaaccctgcgtctgaacatgtgcactgatctcgagtcacttcccaatgacattgtcaatctgaaccttctctctgtactcgattgctcagggtgtgccaaattaacagaaatcccaaacaacattggtcgcttgtcattattaagggaactgtcactgagtgagagcggaattgtgaaccttcctgagagcattgctcatctttcaagcttggaattacttgatttaaccgaatgcaaaaagcttgaatgcatccctcggcttcccgcgtttctaaaacaactattggcatttgattgccaatccattacaagagtgatgtcaaattcacttattcaaatcccatcaaattccatccatatgatgatgatgatgaagcataatataatgatgatgatgacttttggccgtcaccatctttcttatcgattgtcagagacatcaaatcaactgtcaaagtaaaagaatgcggaatatgccctctttataccaaagagaaagatgatgataataatgctgatgcaggtggctattctggatctgtgagattttcaaaaaatggcattgaagaacctagtggaagcaatgttgcatggaaggaggaagccctttaataagctacctagtcagctaatatccttttcttttggttcactcaggtgtctaaattggcattcagcgggttcattcaagtgtggacaaagagatttctaagttgtagcgagatatagtttgatgtgttcccacaaaggacatgaccaaatattacttcatgcttgcatagcagcaaaggcaatatgaattttagaggagctccatttataaaggaatttaaaatacagctggatttggtgtatacaactctcatggcattttctacattctggccctgatcgtttagcttatctgcgcttcatgttgaatacgagtccaaattcaaatatgttctttcttcacattggggaagcttgtttcgagttgcgacttataagtgctgttagcatgtgattgttaattgtagtttgataatcaagttgaagaccattttaatgtataatcaagttgattgaatctctc

SEQ ID NO: 9539 - DNA, 327 bp, Glycine max
  Clone ID: PAT_MRT3847_108623C.1
ttttcttttttttttttattttctttttttttttttgtttttttttttgttttgttgcaaaaaaataaaaaagaaaatttttttttgggcagtgtttttttaacaaaatgattcccccaatccttaaattttgtctaccccaaagcctgggagggttttttttttcaccactctcgcacctaaccaggttttctcgaggggaatccccccgtggatttacaaagaagaattttttgtggtgtgtaatctttgcaccctaaaaatttgggggcatcgggttgggggtaaagtttttgatcccggagctggcctggaaaagggcaaatt

SEQ ID NO: 9540 - DNA, 766 bp, Glycine max
  unsure (1)..(766): unsure at all n locations
  Clone ID: PAT_MRT3847_108624C.1
aatttgcaggtgcaggcgactattctggatctgtgagattttcaaaaaatggcattgaagaacctagtggaagcaatgctgcatgaaaggaggaagacctttaataagctacctaggcagctaatatcttgttcttctggttcactcaggtgttcccaaagagattttgaagttgtggtgagatatagtttgttgttgttatatcagcataagttggcttgctcggtttttccacagctgcaatgtttcatagtcttgtatggaaatacaataagatagtaagctagtctcttgttcttccggttcattcaagtgtggacaaagagatttctaagttgtagcgagatatagtttgatgttttcccacaacgaaatggccaaatattacttcatgcttgcatagcagcaaaggcaatatgaattttagaggagctccatttataaaggaatttaaaattcagctggatttggtgtatacaactctcatggcattttctacattctggccctgattgttttgcttatctgtgcttcatgttgaatacgagtccaaattcaaatatgttctttcttcacattgggaaagcttgtttcgggttgtgagttataagtgctgttagcatgtgttaattgtagtttgataatcaagttgaagaccattttaatgtataatcaagttgattgaatctcttattatcattttctctttggtntactcctttcgcgactttctttcagcatgacanactacanactatccttattg

SEQ ID NO: 9541 - DNA, 650 bp, Glycine max
  Clone ID: PAT_MRT3847_108625C.1
cccacgcgtccgaggacctttgtgactttgtccatttctcctctgccaaaaatcgtttcaaaattgaacaagaaaagaaagaagcttctcttgccaacaagttattccactcccttgatgaatcttcttgttctcttcctgcctgtttgggtgctaagcatttctttttcctcaccaattcttcatgctgcttcctccatttctctttctcaaaatgcacaagctgaatctccaggaattcaggaggttagaacagtgcaccaccagaatttgaataagagaattctaatcgcactagttgcttgttctgctcttcttgttggagtcttcctattcctgttatatgtctggttcggtcgacataaaaacttaagatgctccaaaagtaaaagccaagaaaccatcgaggctgcaaaaggggaaaccatagctcggttaatgctaaacttaactactctaagatggcagataaaaagagttcagttgctatttttgactatcagctgttagaggctgcaacaaacagctttaacacaagtaatattatgggagagagtggttctagaattgtttacagagctcattttgatgaacatttccaggcagctgttaagaaagcagatagtgacgctgatagagaatatgagaat

SEQ ID NO: 9542 - DNA, 211 bp, Glycine max
  Clone ID: PAT_MRT3847_108626C.1
gatgtttgtgtgatgaaaagcaatgcaattgaacgtgatgttgatgtgcatgagttgatcatcagtgcagtagaccagtgaggctcaaccctcaaatggcgcacttcagagtgcgattgtctccgagatgaaggacactctctacgagatggaggctgaaccttcatatcttacacttggttgtgtccctgactttcgaaatggtgcactg

SEQ ID NO: 9543 - DNA, 333 bp, Glycine max
  Clone ID: PAT_MRT3847_108627C.1
gtgttctccctgcaccaagataattttatttaatgttgcattttttaattgccaacaccgaaggaattgtttgaaaaatttggaaagcatacccgggttagcttgttatctaatgctcgactttctcgactagaagcacggcatccaattttataattaaaatctattacatttaatctaaaattctatgattaagtagaggagatctggggctttgaaagttgcacttgccgacgacccaaaaagaatgctgtaactatccaaaaaaaacaaacagggaggccataaaggggaactgttgatgggttcccgttgggagtaccaaaaagcatt

SEQ ID NO: 9544 - DNA, 589 bp, Glycine max
  Clone ID: PAT_MRT3847_108628C.1
cacgtgttgaattttttcacactccctctccctgattgaaacttcctccccagttgccaccattgacgacaaatctggccaccatgtgcattatcccatcaaaccatacccaatacgacatactcttcttcctcttctctaatagccctcaaacaattttgagatgcaaccatgctccctatgatggctttccctatggctgccacaacctttcctccagaacgagatcgacccgcgagcagtattcaaacttgtaaatgggtaagcgtgagtctgtgtgaggtttcagttagtggaacactctcttcagtgaggtttcacttgctcttcctgatgccaacagagaagtgttcgttttgggcatcgctccaacattgatgatttcaattttctcaaacttcaccaagagcctcaagttggtttgtggtttatagagagagaaaggttgagcaagctcggtaagcaatggagcctattgagtgttgagacaggtattgatgttcccaatcctcttagattatcagcctttattaactaagtttgagttttttgttgaagctattgataataaacatgaactggcgttgtc

SEQ ID NO: 9545 - DNA, 497 bp, Glycine max
  Clone ID: PAT_MRT3847_108629C.1
ccctaaaagaaaccaaaggcccatttatggattttcctttggggggttacccttttatttatggaaacaattaaaagtttttggggggactttgaatttttgggaacattacaacaaaaaaaaagtccccttacccttcctttcccaaacacccaaacaactcccgaatttttcccaaacagatttattaacaacaaggaatttaactcccctttgcaaacccccccgcactaaaatggcaacttgggggggggttaacctccaaaacatgccctggtgggaactttacatgaccaaccaaagccttaacttaaagcacaaaacaatggggacaaattttcccattttttgcagttttaactccaacccgacccaatttggtcatagcacccacaaagttggagttaaaaacgttggtcctggaagcaaaggaataaacggggttccaaaaccttgggcccggaaaaaggatttggcccaagggaaaaaggcccttt

SEQ ID NO: 9546 - DNA, 549 bp, Glycine max
  Clone ID: PAT_MRT3847_10862C.1
accattcaggcaattgacaagaaacagaacaacattcccttgaagaaaggctcagctgtattcaacaaagagcttttgagctggtacctcatcaatggtaaactcaaagaaactttagaatctgggataccgtcttctcctaattcgggtaaccgatcaactgagtttgcccagcagcagcaggaacctacagaagcgttgcaagttgtcatcaatgaagatggtgaaaaatttgaagaggaaccaaactcaccaacatctgaatgggtggtaaccatcaaggaaaaactagatgaagcgggtcaagaggatgtggcaagttcatggtccaagctataaatctacaaaatccctcactaccttagagatggtagtggcgatgacaaatcttttgcaccccagattgtgtccataggtccttaccatcatggcaaaaaacgccttcgccaaatggatcgccataaatggcgttcccttaaccatgtcctcaagcgtaccaagcatgacattaggctctatctcaattccatgaaggagataggaaaaaga

SEQ ID NO: 9547 - DNA, 307 bp, Glycine max
  Clone ID: PAT_MRT3847_108630C.1
gtttcgcgtccattcaccctaagggctcaaaaggggatccttgactgtcgaacgggtgtcaaccatcacactgcttcacaacacactcatgactacccgatgccaggtactcattggtcctccaaatactggggctatggccctgacagctcgaatgctacaactaccgatgttgctagcactggcgcgacaggaacatctgacggcatcatcttcggtacctttaatgctgctactaccactctactctacttcttcatgccgagacactatctagatcgctagcagggacggtgcatcaaatgac

SEQ ID NO: 9548 - DNA, 200 bp, Glycine max
  Clone ID: PAT_MRT3847_108631C.1
ggttggatcagggttttgaaattaccgaagtctgtcttaatgggtaccataagcttgctgatggtatttatttttacagtatttctcctgtaaactatttaaggggaaattttcagtatttaagaatgctaatctttatatgctctaatccttgtacacattgcccttcgatcttcatctcgacttccttgtgtattatg

SEQ ID NO: 9549 - DNA, 462 bp, Glycine max
  Clone ID: PAT_MRT3847_108632C.1
caaacggaaacctcgactccatgcatttcacattgttctgctgctctgctatctctacacccacaacagatagcagcacgcgttcaggggttatcgcccaacggcaacaacctccaaactgaaacctttcgtagagaaataataatggaaatatgttaccatgcccacatcgatcgcgagattgaatcgctcctagaaagaatacatcctcccagggtctgtatcgataatgattcttgccgagactgcactgtggtgaaggttgatagtgcaaacaggaagggcatattattggagatggtccaagtgttgacagatcttgacctcatcatttccaaatcatacatttcctctgatggtggatggtgtaatggcgtgttccacgtgaccgatgaagctggcaagaagctcacagacgaaaccctcatgctccacatccaacaagaactgtgcgccactaga

SEQ ID NO: 9550 - DNA, 473 bp, Glycine max
  Clone ID: PAT_MRT3847_108633C.1
gggggtgtgttatgtagtttggttgttaagtttttgttagacgtgttttcatacctattgattaaatattatcatttgcttcaaattttagtgttttgcacctgttgtctttaattcctttctttgaaatatttatttttgatggctaggtatttgatataatgtttcaatcaagagctacatattcttcaagtgttaataacaataagtaagcgtcaaatattaaaagaaaaaattgtaattgccttaagaaatattcattcacggaatcaattgttaatttgttattgagtatttaacaaagatgctaaaataattttgtctgctcacatatctcaattgacactatttaacaagagagaaagggggtaaaagtaatctaaaaaaacgaaggagtatcggggtgctatttgagaaaaaacataggaagtgtgaatgtaacaaagatggtagagcaatttcatcttaattga

SEQ ID NO: 9551 - DNA, 323 bp, Glycine max
  Clone ID: PAT_MRT3847_108634C.1
cggaaatcccgggtcgacccacgcgtccgcttattccgttgatgtaagctgactcaggttatgtgtcggtatgaatgaataataatattgtttaaaccaaattcagaacggaaggagttagggtttgaatatgcgttggatccgcattgaactgaaaaattatttatttaaaataaaaatttcaaagcagctatatattgtatttttcatttgacaaatttgttgatgttagattcaactattttacaaacacacatttatggtccgtttggtttggagggagggaaaataaggaaagaatgaaaagtttaaaatttgaattg

SEQ ID NO: 9552 - DNA, 166 bp, Glycine max
  Clone ID: PAT_MRT3847_108635C.1
tccaggaaaatggaccatgaccacagattcctggtgcctttttttactctctggggtgtgagacttccataagcacagggagtctcattcattgtgtacaatagtgcgccagccagggaacccacaattcgaggcaaatgcagtgagagcatgcagtggccaacta

SEQ ID NO: 9553 - DNA, 395 bp, Glycine max
  Clone ID: PAT_MRT3847_108636C.1
gtttaaagcagagagataggagcataggttcatatcatggctaccattgttctccatcgagtcccgagaaagatcaggaagggccactcctccacttcacaccttatcatcagtcccatttatgtgggaacaagtgcccggaaaaccaatgccatgcagtgcccttgtgtccttctccaaccccaagtgcttggaactccctcccatgttgttcacaccttctcccgccactgtctttaaagtttccagcaacagatttcggtctccatctttcagaatgagcgccaattgctatggttctgatacaaaggtgcttggtgccatgtttctcaccaaagccaatgactacacctgtgttggttcttggagaaaaaaaaaccttcaaactcaataaa

SEQ ID NO: 9554 - DNA, 399 bp, Glycine max
  Clone ID: PAT_MRT3847_108637C.1
catggatgccacgaacaatcttagtgatgacttcatgattggttcaggaggttcaggcaaaatctacaaagctgaattggccactggagagacggtggctgtcaagaagatttcatcgaaagatgaatttctgttgaacaaaagcttcttaagagaagtcaagaccctagggaggattaggcatagacatctggtgaagctaataggatattgtaccaatagaaacaaagaagcaggttggaatctgctgatatatgagtacatggagaatgggagtgtatgggattggcttcatgggaaaccagccaaggcaagcaaagtaaagaggagaattgattgggagacaaggttcaaaattgctgtgggattagctcaaggagtggaataccttcatcacga

SEQ ID NO: 9555 - DNA, 644 bp, Glycine max
  Clone ID: PAT_MRT3847_108638C.1
ggaactctttgatataatatagaaagagacagagagagagagacagacaagaagaacaaagatgcaatcttcaaaggagaagctgaaaaacatgaccagtgctgccaaggagcaagtcgacatctataaagcaaaaatagacgagaagacagagaaagcaacggcaagaacagaagaggagagggtgattacccatgaacgtgcaaaggcaaaggaagctgaagcaaagatggagctgcatgaagcaaaagccaggcatgcagcagagaagctaagcaccaaccaatcacattatggtctccaccatggccacaaccctcccctggtaggaacaactgagactcactaccagcaagggcaccaccagccacttggggcagttcctatgcctggagccatttatccatcttatccgctaggagcaaaccctaaccctccaaggaacaaacatatataatagatctatttgtgttttgcagtagtctctgtacataagtctgaataagaggggtctgattttagtctgaatccttccatttacatttgagagtggctttgatttcagtgaatgtttccccctttgtaataattcaacaatgtttaaacttccagatggtagtatggtactggtgtcattagccagc

SEQ ID NO: 9556 - DNA, 1635 bp, Glycine max
  Clone ID: PAT_MRT3847_108639C.1
ggcgagagacgacagaaggttccatggtgaattgcttacatttattaactaatgaatgtgaaactgttgatacaaaatcttattcactgactgtagaattacctaaagaccctataaattttagattttgaaattttatcatctgcaattatttttcttaaattattgtcgtttgatgttacaaggggttgactgtggtcaatgtatcggcaacaacatttcctcaaaaattggattggctgcatggttaccttcttcaggtaaaatttttattagatgtatcattttggattttggtacataaagtatatttattcttcttattcagtactcaataattgctttattgattgaatgaaagaagtttgttagaaaagagaaaggaagtgcagattacaatgatgataagatattcctcctgaaccttaatgttaaagaaatagcataatgacacaatgaagattgaaaacaatcaaatttatgccttacatccttttatatctgtctcatggacatgtttggagtaatgaaacctttagacattcttatctgatgatggtagcttgcaaggattgaaaagctagtgagttataactatttctttctctactgaaaatacgtagcattttttcttaatattgatctctctcaatttggagttgcctaattacaggctgatattttttacaggattcttaaagcattttgttgaccccattagattagtcctctgtcccttttcttcagaaatgactttaaatttctaaaaaagaaatatgtttctagaattggccggtgatgtgacaaaggcaatgaaagatagaaagccaataataatcgaggggatacatttgaatccaagcatttatttagtaggtgatgacaataattcaccttctggtgtacattcagaaataaagagataaagccagcatttatgacattggatgataatgctactgcacaaataaaagacagtaatgttagtagcagtgatgagagtaatggtggcatcaggattttgagctctgatgaaggagtagctgcgaccaggttgatgcagtatcaaattctatggcaggataatgagaagcttatagccaacttgaaaaccatacaggatcttctgtggtctttcacatcgaaagtgttgactgaggtcaatgtctgggcaacaacaagtccttaaacattttgttggctgcatggttaccttcttcagtgcatcgagcaaggtatttaagaaaatgttacgccagtagctccaccatagttcatgtaatgaatgcttccaattttgacaggtttcagtgcatcgtgcaagttgatgatgcaaatgtatcacctatcaaatcaaaagggtccgggcatcgggtgcagacagctccaccacactcgactccaccttgtaaatggtcgatcctcgacatttactaccaaagtcaatatctgatctaccatgcggtttcatgccatctgccaaacttaccgccagccatgaaattgacggccattttacttttgtttttagtcttctccaaattatttgtgatctttgaatgtcattgaccaaagggtcaattgtttatatttttaggtaggcatatatcatctttcaataatacaagctatccc

SEQ ID NO: 9557 - DNA, 348 bp, Glycine max
  Clone ID: PAT_MRT3847_10863C.1
tgattgtcaccaccgcgagcaccacccgacggccggttacatttggaacaaaagcccgttttccccgatctcacaaattttccccactatttggtgtcctaggtccacagggcctgaaggccacgcatagtgctgtccacactggccgcggactattagaatcaccactctcagcacacttggtgaacacgctgcacactgtcctatgacatctaggactacttgaacgatttcagccctcttttgtgtgtgtctgattaatctgaggccccgctggtgaagcctaggaaaagtggtaccactgttctcactaatctaagacctctaggacagacacatttaactctg

SEQ ID NO: 9558 - DNA, 113 bp, Glycine max
  unsure (1)..(113): unsure at all n locations
  Clone ID: PAT_MRT3847_108640C.1
tgcccgagagggggagggcccancaaatccagaagaaacgctgagctgagctacgatgttgacgtcatcagccacacccacgagcaggttcccatcactgactactagagggg

SEQ ID NO: 9559 - DNA, 275 bp, Glycine max
  Clone ID: PAT_MRT3847_108641C.1
gggcgttaaggatggtgatgaattgcacaagcattcgcatcctccttttaggtctgttacacatagcagtagacagtggatggtcatcaaaagaagtaagcagcatcatatcacgattccagcggtatcagattctcaacactgcccatgccatcccgcgttaccaagaatccgcacgatttcatgatgttttaaggtaaagccctctctctggaatcccaaagcattgagtttgtgggaggcatgccacttgtccatctgagatgggaacgctc

SEQ ID NO: 9560 - DNA, 226 bp, Glycine max
  Clone ID: PAT_MRT3847_108642C.1
gactcaagcactagatctctatcgagtaaattaactaggaggcctaacctatgagtatccctttccttcctgcctctctttgctttcctggctcattcagaatatgttgagcaggttgtagacataactggcagacccattttcccaggtggcacagtgtacagtatgcgagcaacttcgggcgctgccggtggtggattgaaactaggccggtgaggagactcag

SEQ ID NO: 9561 - DNA, 627 bp, Glycine max
  Clone ID: PAT_MRT3847_108643C.1
cggacgcgtgggataaaaaaaaaaaaataaaaaataaaaaaaaaaaaaaaaaaaataaaaaataaaaaaaatataataaaaaaataaaaaaaatgaaaaaaaaaaactaaaaataataaaaataaaaaatttaaaaactaatatatataaactaaaaaaaaaccaataataaattgatcgtgtatctatttttaaaagatcatattctaaatgcccttctttcagcctgcatattttttattatgagtgccactatttaaaactgaggattggttttaaataatggttgataaaaaaaacccttgatattaatacattataattcttttttcaaaaaaacctttttttaaagtttggttttaaaaaaaaaaggccccaaaaataacccttttcaaaaaatttccacttccaaatggccaattggcccccccttttaatgggttaattaaggtggggggttttttggttttccccaatagtaccgttatatttttaagggtcttttccgccggtttttttatttttttacctttttttttttcccaattttggggttttccccatgaagcttttaaaagggggtcccctttaagggcccaattttagggttttaaggccttttacccc

SEQ ID NO: 9562 - DNA, 563 bp, Glycine max
  Clone ID: PAT_MRT3847_108644C.1
ttgggggggggggggggccgggggggggggggggggagatttggatgaggtggggtatgcgtgcagttgatagaagtcggggtaagagtgggggtggccgggcacagacagcaggtaacagggtcggcagtacccgaggtgctggggctttcagggtcacgtgtgaatgttaaggtaacacaggtaggggggggtgggtgacgaagcggtgggggaggggtatgaataggggcagggataggacaacaaaaaaaaacgaagggcaggccgagaattgctcacggattttgagagctcgtagaaaagagtataaaggggcaaaacaattaaaaggtgccaggtcagagccaatcagggacgagggtgtgaggcaggtttagttaagtaaaagatgggtgagatagagggggggttagagtgacaagtctagtggttcagagagaaggtggcagaaacacaggagtgagcagagttaagaaggtggggggagatcgcggccaaggacaacaaagtatggccgggggggggatggcaaagaaccagtgagagttagaaagagagca
